United States Patent Application Publication US 2014/0057251 A1 - sequence listing, part 57

SEQ ID NO: 79217 - DNA, 4356 bp, Cannabis sativa
aatgttttaaataagagaaactagaatgaccagtctataatgccaaaccattatttgatcatgaacagagaaaagaactaatgctactaaacccttgagcaattttattcttagaaatattatcttaaaataagaagactatcaatcatcctaacactgccaattgtctttcctgaactctatcctaaaaaaaacaattagatttatggttcataaaacgattagaatctcttgataatttactcacagacaaaagtttgcaggtaatattaggaacatggagaacagatttaagatttactcccttagataattttattaaaccttttcctgcgatgggtgtgaaattacgcaatcctaacttttttatctcctgaacaaggtgtataggaatcatagaatttagaagaatttgtcatatgattggaagctttggaatcaattatccacggagcataagatggaaaaaagcggtttaaggcatgtatttcatcaccaaatttgcaacaaaagcataaggaataccagatgagtttgaattggattttagcaatgcatgaagatgagtcagttaaaggattggtcttagcttcagtggcagtagggatacaacctaatctcttagccttgcttttccaatttgcaggtattgcaggtttattatcagatttaggggggtatgaatttttcctgctgtaacctcctccaacagccagcgccaagccttcaacagtggtcctaattgcctttatttttcagcataacattcctccgactctcctctcttttgacctccgtgaatatttcaccaactggaggcaaggggagccccttccaatgattctccctctcacctcatcaaactccacgtcggctggttctacagtgatggaatggagttttggacagctacttgggtctttagaaccaaacattttgaggatttatcatttttagatttatgtagagaatggaagacaattgtatagggcagcaggtggttttgtttagcttttccctcttctgaggcaaagcaggggagtactcttgctttagaatttctgttttgttattaattgtaaccatggttgtcctccaccacaagtgaggcttttaatatataaccatggttttcctccaccaccatggttttcctgtctaagacaagaggatcttcttttttttaaaaaaaaaagagacatggtggtatcaattttgaacttaggaaagaagaaattagggtttaaagaagagaaagggttgtgcaattaggaagggatgaaggaggtaaggtgcgataggtagggctggaaatcgtgtgattaggtttttgagaaaagttgcattaagctctgatattagtagatgaagaaaacataggtagttgggtattctagagacccagtgctttcctatgaacttctccccctctatccttcactactcactcatgtacataataccaataccccattaaaattactcttataccctttctatttattatcctaaggcctaacactatgctagcagaaaaatgtcattagatcactaaattatgttttggttttattttatcttccatttaccttgtgctagtgtataacttgctattcttggacttgaaatcatcggcatcagccacttttcatgctttttcttgtcttgttagagaatatttagagaagtttctttgccttaaactgtcatcagttcaacatttttcttatccaatgtcaagattttattaaggaaatgtttaattgtatgacctctatctaaatttgtgtttattttagtaaaatgtagttgtataaaattttgaaggaagagaatggttggccagaacagtataggcagtgatcgttccaggacatattggacaccaataatggaaagatacttcattgatctaatgttagaacagatgcatagaggagctaggattggccatactttcaacaagcaggcgtggaccgaaatgctcaccatgttcaatgcaaaatttggttctcaatatgacaaggatgttctaaaaagccgttatacaaatttgtggaagcaattcaatgatgtaaagaatcttctgggccagaatggatttgcttgggacgaaaatcttcaaatggtggtggctgatgattatgtgtgggatgcttacattaaggtgcatattttctgtaagggtttagtgttgttgatgtaaaacttccctaaattaatgtgatatagagttacatgtttgcaggctcatcctgatgcacggtcctataaaactaaagcagttctgaacttcaatgatttgtgcctgatatatggatatacaactgctgatggaagatatagtcgatcaagtcatgacatggatcttgatgatgaagtgttaggtgtaaatataggtgtgttgtctttccttgattttgtgttggttaaacttcggaaatcagcttaatttatactaaaaagtcaacaatattgagatgctgcctatgctaatatttcctgaattgttaggcgatggaatatacaatcttatgccttttagtaatgatcgaccaagaacagattggacactggaaatggaccagtatttcattgagcttatgttggatcaagtaggaagaggcaataaggttggtaatgcattcaataaactagcatggacagatatgattgggtcatttaatgcaaaatttggcccccaacatggcaaaagggttttaaggcatcgacacaaaaaattgtggaagtactatactgacataaaaattcttttacaacaagagggattttcttgggatgaaacacaacaaatggtagctgctgatgataatgtttgggatgcttacaccaaggtattaatggtttttatattctccttccaactctgtttgtttattgagctccaatttgttataactaattgatgtaaaactgatgcagacatacccacattcacgtacatatagaacaaagaccttaccaaacttttatgatttgatccttatctttggtgatgaaatcgaccatgggttgaacaattgttctcaacagaagaaaagccttgaagatgataaagtacgagtaaaggaaggtgacgttcagttttctgtcacctagtgacggtaactctgttccaactttttgtttgatagatatgtaaaagctttgaagtttagttcatgaattcctgccagaatcttgtgaaaagtttgttttgattaataattagtaactgcttatagaaacagacataatattagaaaaacatgggaaatcttaattcctaatgtgatgtacaataaaccatgtaattgagcatctcttgactaggtaaaacatgtcaggtcgtttatgtcttcgtggagtatagaatcctacaaagttatgagcatgattttatttttacaattgtacattcatgagatttgtcatgatctagttattactatgttagagtttatcaacaaatttccagatatatcgttatgtctgtaggtgaaggaaagggtaaccaagcctcctgtgtgggtgatcgtacaagaacatattggacaccaccaatggaccggtatcttattgatttgttgctagaccaggtacatagaggaaacaaactggggcaaacattcataagccaagcttggatagatatggccacatctttcaatgctcaatttaaatctttccatgacaaagaagttctgaagaacagatacaaacatttgaagaggcaatataatgacattaaaatacttatcaaacacaatggattttcttgggatgaatcacgggaaatgatattagcagaagatcacatctgggatgcctatataaaggtaatttcttgtgttattgactatgagatatttagttatgctgaaacctctgttttatgcatgcagagccatcctgatgctcgatgctatagagtcaaaacaataccaggtttccacaagttgtgtgttatatttggagaagaacattccgatggaagatacagccgcttggcacgtgatgctgacccattttgtgaattacccatgttgatgactagtaagttcgtatatggtatttttaacttgatattagtgcttttcttggtggtttacggagaaacaaatttacgcatcaatcacgaggttaagataattcatgatagtgaactcaagaggggtagttcgaatgactagacatgtggttcgctctctctaagtttgtggttcgagtccctcctaaaatcctacataataattgttgtagttttctagttcccaacgggaagtctagtttcaggaaataaaaattgtttctcctaatgactgagctttcagtgtttcaaaaaaaaaaaaaaaa

SEQ ID NO: 79218 - DNA, 1873 bp, Cannabis sativa
aagttgcactctttatacccttgtcaatgagggttcatatcccatgtgggactctttccaactcacacacactaagacacttatatattttgttaaaatattcacaagatttccaacagatattattggaatttggaaatggatcgaacaatatggaaccggaacaggatctagagatgagtcacaaattctttcattaacttttctaaataaacaaacaaaaaagtaaaggatcagcttgcattttgtacaaagaaaagaggtaaaaagaagttcaaacggtcaaaaagtatacaaaataggccataggcatcctaaaggttccatttttatattggttttaagccacttttcttattttaataatccttcttctatgtatatataacttttttttttgaacaaatatatccctgaaatagtagatagtagaaaaacttttcattcattatatcttgagtccttagttaatgtgattctttccacattgatgcattttaagcatggcatgattactcttagtatatattctttgaaatgctgttcattttgttataaatttatatgatgctaagattttacaagcaacccttcttcagaaaaagaagaaagactttacaaacaatccttactaggaaaattgtacagttattaataaaaataattaactcaataatgagggagaatagatgaagtagagattcagagttattagtttgagattttcatttctatatattatgtctacctaagatgatggggtagttatcaaaattattttttaatattatttctaatattttcttataaaataataaaatagctgtcatgcatactttttcagttttaattattttgtaggaaaattactctaaaaaagtaatttttacaagaaaatatacttttactaataattcaataccatattattattttttatgaagaaaatacaatatttttttaatgtgaaaaacacattattatttacgtaaaaaaaatacaaacaatatcatttttctaaaagaaaaaatcattatatatataagaaaataacaaaaattaagcaatgttcaaataacagtgttacattgaatggcccatctctaactccttcctataacttatgctatacacactcttacatgtgggacactcccacacatcaatcaaattttaacctaagtattaacaaaataataaaaataataataataataaaatatcatactctttctgtatatttttggttttctttgattttgattttgatttagtttttgtatttataatgataaaaataaaaaggataaaaatatggtattatggaatatgggagaacaagtgtgtgtcggaaaggaaatggagggaaattttgcaatgggccccgcatctcatcaagtacccggccctacttgacagaagcatctctctgggattgagcgccaaacccacgcgcttcccataagcagcctaactgcgtgaacaccaaaccccaccaaatcaccgttcaattacttaagtgagacgcacgcgctccttccattgggtgggtaatacaagggtcatggtgatcctgaaaaggtcatcactgtcagggagggactcagactcactctctcatctctctctttttcgcctccatttaaagggtctctattttagttttttcatttctcgcaaataaagtaaaattaaaataaataaaaagattaagaaaacagagtctgttattttcgcttttatccatgtatcgcactggttttgaattttgagttttgatttttgcccaattttattttaattttcacataaaacattttcgttttgggtttaataaaaaataatcaaattgtactctcaattcccaaggctt

SEQ ID NO: 79219 - DNA, 1760 bp, Cannabis sativa
cccttaaaattttgtattatagctttagttagatactaaataagcatatgaaagtataactaaataatgttacggtatagaggaaaatgaaaaaagagctctgatagtccacacatttgtatacgagagaatatctttcaaactgtttccatcaattccgtgacacactatgattcgaagtgaatcgtccaaatatatcttattgctctaaatatacaagccttacaagttacaacaagaaaatccaatataactcaagaaagaatattattaacaaaccaaaatactcaactgtctattatttcaccagtccaaaactaattcaagagcccaaaagtttcttaattccggacttctgctcagaagtcaacctagttggaaatttaataataaacttgatcctaaggttacccctttttgaagggtcctttggtaagggcatgccttccttcggcaccacctcctcgtagtttggactaatcacactgttgatgggaatggtcagattccttccatccagtgtggtgaggttaactgtatagcctgttaatgcttctgcaagtgagatcctctgtgtgacaaccaagtcattaccatcccttgcaaatgtactgtgtggcttttcatcaattatgaacacaagatcagcaggtatcacatttggttgctcatttcctttctctgggaatgtgatttttgttccctttttccagcccggcttgatcactatggataagatttcttcaactggcatggttttcctgcatgaagaagaggaacacacaaatggggtcacgctcaacgttcaacaaaccatagaagttgcagcaaaatattgataagaagtctctacacttaagcttcaaggttatgaactagttttacatatagaaaaatacacaatcactggaacaaaactgaagttactgagccatgtttgttctatgcaagcaattctgctctaataccaagtatatgcctaccaatgtataaccctcaatcaaggtatacacatacaactaaaccagctcaataaagtggtattatgtttcaagatcaagctagtgtgacttcatggttttcccatcctaaatttgaaggagaattataatgaggatcccttccatgggaacacataaaacaagcactattattagtcttctttagtttcacctacaaaaatcccaagaaggatattgcaagaaagtacataacttaattaaacaagtactcacccgcttgcatcggcaatctctctagatatcttcatctttttggtagttcccttatagagctcttcaaggctacaaggcagagtattctcaattggaggagccttacgaggactttggctcattggccgaccatccccaaatgcactaaagatgtcatccccaaacaccccaccaaacgatcttgaccccctcataccacctgggaagccacttccaccgcctcccatgcctccaaatgggcttgaagacccaaaaaactcagcaaaaatgtcattggcgttcctggggttgaatctgaacacatttggaccatccccagtttgaaagaaagtagtaccaccaccagggaaaccccctgctgcatcaggaggtggcacttgtcctttcagaccttcttcaccatattgatcgtatatggctctcttctgaggatcacttagaacctacaacgaaaatcgcaggaagaatcgtatcaataaaaacagagcattgatcaaactggtaccactacaattcaatgcaaat

SEQ ID NO: 79220 - DNA, 4646 bp, Cannabis sativa
cacatatgaaaaattaaacaaacacaatgtaattgctaaaataaacgacatttgataaacaaattatttatttgtttttttccaaaccaaagtcagctcagaaggagcaagaacaacaaaaacaattaaggatggcctatgagcagcataacagcaagggaaagttcctattcaaaacagcagtaacttttagtttttttaatctttttctctttttttagggactgtaactttagttaataaaacttcttttcggttgctataaataatctacagggcaattattttacttacttttagtatttttgttttgaccatcacgatgtagatagtggatatggataagtggggcataataaattcaaccagtacgaaagaatgtcaatgagatacaaatgatgtgccaatatacagaatttaatgtaattacctgagacattatcagtcattcaaatcgtcagctaattctaggaaatcgaagctagcttctcttttttcttttttggtaaataagctagctttcgcttgaaaaccaattctaatcaaacttaaactaaaatttaagacaaaacacaacgctttgacttccataataatgaggtcgatacaaaatagtaaattttctttttcaattgtacactgtttgggattcacaacaaaacaaaatgctacatgcctgcctgaggtgatgtaagaagggttatttcattcttttcaaaggggaaaaactattggtagggagaagaaaatagatttgtaaacaaacaacaaaagaatatatggctatgggtagactcatttacaacttaagagccgcaattgcttccggtttaaattcaactctaaggcctagtactcgtctaacctccgctggggttagtctccaagtcataggtcctgaattttcaccccagaaatcaagaatctctgataccttctctaagttgagaattgtcgccatttgagtgagacgagcaaacttatctctaacagtcctttgggtcatgccagagaagtggcttaccaacgcccttgcatctctatcaagctgcagacctccaagctgactgaatcttttctgcatcataatcacttccagcctctttacgatgaagtcaatgaccagatgaacaaatgaatcatagttgttggaagtcattagaggctgcagccatgccacattagtctccactgcatggagaagcctctggacccatggatcattaacctcattatcagcatactctgcttctgatagctcgtaactgatagttgcaacattgtccaacaatggacgaattcgtggtgtaacagtccccacaagttgctccaagccagctgacaaaacttgcttgaatgtgctgctcatatcccccagttctgacaaacaagatttcactttctctctatcagctggtgctgggaatacctgagcacatattgtacatttatcaaattgatgaaaacaattgacatgaatttcgaagaaagaaacatgcacaagctcaacaaaatgaatataaacagacaggccactttgccaacatctaaaaactagccaacttatacaattaaaaaacctgtacaattatcaaatgaatgtttccccaatctagaaacccgtgaatgccatattcattagagttgaccagaaaaaaaaaaaacagcttcatggaccatttgcctcctttggtaaaagagactctgagtttaaatcacatactggccaaaatgtgcttatgtggcttatttcatacaggctgatgattgtcataaataattatatctcttatgtgaaaaatgtttaatgacaatcttcttagcatcaaacagtgtaagataagtgagaaaagataataagcaactggatcaactatggaaacatatcgacaattggtgacctgtatccaaaaaaaaaaatctgaaaaatggatccgttatttatagttttgttttggtaattttgccaacttctaaggactttgtccagacaagcaaaaacagactacgcaaactttcgaggagagagtatggacgagtcttaggggtgcaaacatgaaaataatactagagtacattggtgaaattgatagatatacgtgaaagcaatttgatcaccaaacatactatctattatttatttctcgattacccaccaaggaaaaattatttctaaatatagcttaaatagaacagttttgcaagagtctccaagcaacagttttccatttcagcaaacattcatctacatttccgattcacacaagcaactagagtctccactagaattagatatagaatgcatgaatcatgatcaaatgaatgccatcagcaacaaggagaaaatataaatatattatgatcaatgtaagccacagacttacctctgcacattgctcttcgatctcgtgcttcagtttcaggacatattcgctactaacatccatgttgtttaaagctgttgcaatctctgttccagttttctgtacaccaacaccacccaagaacaacttggcaccgagattgggctccctcattttctgttgcaatgcctcatggaattcattactcaacaagctacttgccccactaagaacagcaatcacagagcttatattcgaagtggatattgcccttcgcaaacaactctgcaaaacatagaaaacatcgtccaccattgatgttgtgagactatcaggtacatgctcatcaatagtaatagcctttctaacattttccaccatgaagaatccttctagaatgacataaaacccagtaatatcctgaacaactttgctgaaactcccactcctaaaagccttggtggctcgtgggagtaactctggatccacagaagtcaatcccttgatcttagaaaccatgaactctgtatagtcctcacccagttgcatcaaggatagtatttcctccaaatacaactcaacctccctggggtcaggtccctcagtgctaaccccaacagttagcaaattcttattctgggcattgatctcagaagacaacttgggcaatttcctgtactccatgtacttcttcaagatcaaagtacccctagaatcacactcctcttgaagttcacaaattgcataaacaataccatcttcaccacatagacctttcaagatggcatggttctcttcaacagccaagacgatatctttaaacaaattggtcaagcaaccgacaaaattcaccgggctctgacccacaccagaagcattttgctccatcagctccaccaaattctcatactcaagcctagatctcattccaatcaccttcctcaaataaccaacataaacctgcaaaccctcttcctccaatcccagtggtgtgtacaactgaatgaacctcagaatggtggcatggtctctctgatccacggccgccaagagccgcttcttcacaatcccctccaacttctttttcgactcaattagctgctccctctgatcggacccagaatccttatacttatcatcgatttggaggaaagtctggacgtaattggcagcggcttcgtagtcttcgctctctagcgccttcttcaccccatcaatacagttccccctctcaacaatggcgtcaagacgttgaagcgtggacttaacacgcgactgagcgaaatcgagctcacgaaccttaccactgacatggtcggcaaggtctgcagttgagctcacattggaaagcatgtggtcggactcgcccttgacaatgtctagaacctcggcagacttttggaggtggatgagttgcttatcgagatcggtgcgttgagagagaagggtatccagttccagatccaaagctctctgataagcaatacattcgtggagtaaccgagtcatggctcccacatcggtcaggctgcgcacatcctccagtgcctcctccgtcccgaattttatcgacgacgacgaaagaagatcctgctgttgacggtggtgatcattttccagggatgtggtcgatccgtttggggtcgaccccatttttttcaattcggttcttcacacacacaagccaaaaatatggcacaatgaactacaacggaatgaagaacacacgctcacgaaaccactgcttctcgggtcgggtttccaattctcatccaagtttgcgattttgggccttgggcccaatatgacaaatattatcagtctaataaacatttgttaccggttttctggaatgttattgggaaaaataacataaaacagtaaacagtaaagtgttataaaaatacaagaaaataacatataaataacaattttatgtaaataaaatctaagaaaacctaaaaatgttaaaaatttcctacataccgtatttttataattttttttattgtttttgtgtttttgtgtttttttttttttttttttctaactatccctaaattttatttacaaaaatattaaaattttagaagagttttattagcactaaaaaattatacaaatacaccatattttaataattttatgtcaaatttaggggataaagtttttaatttacaaaaacacgacttcatttaaacagaatatgggacagaacctaacagaaggactaaatttctgtagatgtaaaagttcaggggattcttaacaagccgtatattt

SEQ ID NO: 79221 - DNA, 3724 bp, Cannabis sativa
tgcatgtcactaaaaatcactctcaactctttagtgacccgcacttttctgcgtgtcactatatagtgtcactaaaagggcaaattgtagtagtgataatactggtgtctaataagaatgctcttaaataaattataaaaagagtttttaattaattatcctaggtggaatgggaggcatggagggagagaggtgagtgggggtgaagcaagagacgtggggcattgataaagtggaggaaagtaggacccactttcaagtgtgaagactttgtgagatgtgtgctgtacgtagcgataccattcattatgcatgcaaacgtaagccacgtaattcctcacacttccaagaactctctactctcttctcttctattattaattcaactttcattttttgtcttttattatagatatatatatagtgaaatgcgttaggccacgtaagtttgtgctcaactcaataagtagatgatcaaaatatatatataaaatagaattagactcagagtattgtccactgaaacacttaggtacttgtcatttggcaattactattattttaaattattattattatttgcagtgttatattgcacatgtacagacacagcccaacatttaatttgtttgatactgcacccaggaatgagccacaggagacaccacacacactccatctctattacacacaccacgagtcaggtcacgacaatattcttacaaatttaaccaaattgctcatgcctctactatatatatatatatatatacgacaatctttaaattaaccaaattttgtttctagtgcctgcctacgcatgtatatattcaaatattattaacttgaattggtgggttttattggttgcggattgtgtgattcgtccttttagtttttgtacgtgttttggtcaccttgtatttcatttacaattttacaggattctcatactggggtctcctactaatgctcctttaacaataattatctttatagaattttttcataataaattaaaactttaaaaaaaattacaaaaatacgttaaaaaaaaaatatatatttttacgtttcgaataattttatttacaaaatattttttcactaaacacaagaaatcaatttttttatatttatcttgaaaaacatttccattgttattttttattgttttatattatttttttaacacgacgatataaaaagttataagtcacacaatcaattagttatcggggaaatcaaaaataagatttttgaaccaacgatttcaacactattagttgaatgactgagatagcagttacaacggttcctaaaaataaaatcctaatacatcgtcatagattgtgagacaacctatccactatgaacataaatctatgttctttgtctttgacacaaacaaagacgatccattgacttacaaagaagcaatggatgaccttgaccaaagatgatccattgacttaaaaagttaagttttagaatgcattttaaatgatagactagagaattgatagagtgctcaaacctacaaaaaattgggtattaaaaatgagctttgctatgaggcaccaatcagggtgcctaataatattatgaggtgacgctctataaataattaaagattttctataacttttactaaagtaaaataattaaaatttaatattaaattgtatcaataacgatgttatacctcataatggtatcagatatcatgggtgcacttaagcatttctcattaaaaataaaacattattatttagtaccttaagaacaccaatatcacactgatgtgacaccttataattaattaatattgttatttggcatcttaagaacaccaatatcacactgatgtgacaccttataattaattagcagtttttatattatttattaaattaaaatgtgtaaaacctaatgtgaaaatatatcaatattatcttttggtgcttggtcctttaagatgcccaataacatttctcttacaaaataagatgctcttaccttctttcaatataaacataatttatagaagcttaaatggtataatttgtcaaaaaattgtaaaatggtaccattttgaaacaaattttgatagattggataaattaaccatttattagtatggaacactaccttctccgatgaacacctcctcccattgttcctttccgaacaaattttgaggtcctaataaccctgatagatgtattccctgaatcatcaagatggtgatgatgatgttgatgatgatgatgagcatgatcattattatgaaaacccaaatctccgtttctaactataatcctacgatggctcctaggccttaaggatttcctcaattgggcacctttgtaatccctccttgaacgagataacatcctcttcctactcttatagtgatcattagaaccataatcacacaaatttccaataccttcatcttcatcagtactactgctagtacttttatcaaacacttcgaggtcaatttgccgtcttcgtcttcttcgtcttcttttgactcttttgagtttgacccataagaaagtgcataagtactcacaagaacaagcacaaaatgtaatacatgaccatgtcattctgcataggcttcggcaaacacactcgcatatgcctaatttgtatgttaagtacatgaataacagaactgcattatccaaacaccatgatcaccaaacccaattataattagtaatttaacaaatttctctaattaattagtaatattctgactcaccaatgtagagcagaagaaatactaagaccaatcttagcaaattggccacacagaaattctcgacgtaacaaatgaaatcccatgttttgccacacactgaactgatgtaataacaaaatataatacagattaattaatagtatcaacaatgaagttcatattaaatatctacaaaaagttgtaataaagattatgagaaagatcatatatgtgtttatttaataacctgcaagattttccggataggaaatctaatggggaagcaaagaggctgccaaaaacttttccaaagccagaaaagaatgattcaatcacatttcccatttgatcctgatcacgttagtaactgaaaatgaagaagaaaaagatacatacatggaattaatatgttacagtttatatggtgtgaattataggtttatttgtttccaattgtagacctgcaaatcaatagccagaagagaacatttctctctgtacttcattttttatgtttttcctttgtttatatgaaaataactgactctcgatggaagaaagcaaccaaaccaaactgttcttaaagtcaaaaaaaatttatttcccccaaaatttaatggatcaaccataattcccattctaaggcccaatattgccatcgtttggcccagttcaattacctcaaccaaatatggaaataggttttgagaaaatacacacattaaaacaagagacacaacaacaagaataggaaattacattatatacccattttagtttatttatttaaatttttacttttatttttatattctttaagatatacctacttttatacatgatgttcttattataccccatagattaatataaaatatgtactaaacttaagtagagagtgaagatatattgggcaatctactcaaaaaagtgagtatattataatgaaatataatatgaggatatttt

SEQ ID NO: 79222 - DNA, 1358 bp, Cannabis sativa
aaaaaaaaaaaatacatacataatatgtaaattattatacatgtggtgccgggcggttacaaatattactgtattttttttttccttttttttgaaaatatatatgatcatttaaccacactatactgtaatggaaataaaggataattaaccacagtacactatgccgtacaataagagtttgcttgttttggggttaacctaatgttagcccgtttgagttttggtggtatttcccagacatttttctaaaaagaaaaaggcatcttcgtgtaattaattagtggatgcaaaaatgatcaataaatttgtgtacgactgatccaccgacgaatctataagttcaatgcacttttttgtgagtcataattataaaagataataatattcaaaaattgataagacatgtgaccgctatggttaatagctttatttttccctagtttaacagtaataacttttattttcattatccttacaaaagaaaaaaagaaacttttattttcattataaataaatagttaatctattgttcctttaaaaacgaaatttaaaaagaaaaacaaaagaaagattaattcatttttgaagcctgcagaagataaaggcataaggagtaaaagtaattacagaattgttaggtcactcatgaaaagtaattcatagtaggattatccatctcttcatcgacaagctttcaaatagtaggaatagatagacgttgactttaaaacagtgcaacacaattattattaattaataagaactttagtaaaccttaatatttttttttttgaaaagttaggaaaccttaattaattagtaagattatcgggaacacattaatttaaaaataataaaataaaaacatatccatagactgtagtatagtagtctgccactaacgtaacatggacaacaaagaatttcaaagttatcacttataacgttctgtcttactaattttgtattattgtcagggacgggcttaaagcggactaattttcatttttctacagcccatccaattaaagggtcagcttttattattagagaaatttacacattttactaactttttcatttttatttcaattatactgtggcacggtaatcttaacgtttttactgttttttctttttttttttaatttcgccagtatactgccttgattcaaattgtgtatgctattgttttgtttttttttaactgattgggacatgggctgtcacaacaaaagtgacaaattatttatttatttatttttattttaatggatgtaaaaattattatttattatttttaatatttaataatgattattttgattaaaaggttgatgggatgtgggctgtca

SEQ ID NO: 79223 - DNA, 1091 bp, Cannabis sativa
aatgttccctccctaaattgaataatgtcctgtattttcaattttgatcttctcatcattattcactctagcattgtatacattaaatttggtcttgttagtaataagactagaacactcattgaatttcttgaaagcattaaaaatacaatttgcagactctactgatcccttacataaaactacaagattatttgcaaagcatttgggatttaaattctttactcttagccttaaaaatcagcaaccttgtgagatactctatcaccaatacaaataagagtggagaaattagatccccttgtggaagcccttttacactatgaacatgcctttgtatttttccatttaataaccaaagaataagaaattcccctaaaattaattaatttaatatttttatcagattttttaataattttttcagaactaatagaatataataatttttaaaattatttttttaataaaatggagaaaaaatttgtattaatcaaaatttagggagtaaaaataccaatttttaacggtaaaagaaatagaacctaccagaagtagtatagttatgtagctgttatattttagaagaaattttttaacaagctgtatattttaagaggctagatcaagtagtatcgaaaatttaaagaacaaaaatactaattatttttttacattttggtcaccaaacataaaatttagcactactttttcaaaaatacaagataaatttaaaagtatctgaaaaataaataatttataattattcaatactagtagataaataatcaaattgacataaatataaacttagcattatataattcacaatatatgttacatcatatagttagataccttaaaatatcatatagaaatgctctaaaatttataaatttagtttttattgatttagtataatgctattttaacaactcataaaatcaaggtaatttttcttttaaaaacattgtgacaatattagtacttatatagtttaatatttaatgcacttaaatatttatacataaaaaaaaattaacataataatacctaataaagtagagaaatgctaaaagtcaccaagcacc

SEQ ID NO: 79224 - DNA, 2413 bp, Cannabis sativa
gaccatgggaaatgttcctgataaaagcatcaaggtttgagtcagacgatccacctttggctattgctttacgacatacttcttgaatttccttcactcttttactcatcactttaccatcactactctctttattcataaacttcttaacaagctctgctattttttctcttttcaccaaaccctgatcatcatcatcggtagttctactactcatagtcgtcccacctttctttattacattatacccaattttccaatcttcaacaatttgtttgctatctgggacttggtcccaaaatataggacaagtcagcataggcactccagagtaaacggcttccaaagtagaattccacccacagtgagtccaaaacccaccaatagaagcatgacacaacacccttaattgatcacaccatggcaccacaaacccaagctcatcatcatcatcagtaccgtattctttgatctttgagacattgtcacgtgccacccacaagtacctcgtgccactgccccgtattccagccacgagttcgtccaattgggcggctgaaactgagagaaaactccccagagagatgtataagacagagccttgaggctgagaatctagccatttgaaataatcagctgtatcagaataattagagcaagtttggagctgtgagtgaggtatgctgggtccgagtgggtacactgggaatggaaacttggcctttaaagcgtcaaagacttgggattcaagctcgtaaactgaggtggacaacaagaactgtgccttggaaaccttactagtagcctccttggcccattttaacacctttcgaccttccccttcgaatattgtgggaagatcttcaacgcgaatcgtaggaatcccggggatgtaatccacaatttcatgtccacgcacttcaatacacaacaaacaaaatttgaacaacttatcaatgattagacaccaatccatatattatatatcaatgataatattttagtgttaattatttgattccattccgaattacagtcgaaggccctatttgatgaactaagtaaggaagcagaagtgaagcaagttataatatacatagccacatttttacaggaagacataaattttgtgtgatccttttcgattgtttagtcacatttttttttttaaattttctttcacctaatgttagtgtcaataatcactatctccgtaattgaagtcctttttttttgcactacatacgcttacttgcccttgtttatttttgaaaggtgcaagtatcttcattgttattatatgttcatgtttttatttattaaagcaatctttttcagtttgactttagacccaatgaggaccacgcatacatggcagacaaaagttgaagtacagtccacaaacggtgatactctactgacccacttataatattctattctgaatccattcccagaatttttctttttcacgaataatccccatgactctaccttaattaattgatagatatattgaataatatatgctaacattacaagataatgtatatggaaagtttcaaatattgtagttgttgtcctatctctatctgtgtagtttgccatttatggagcaattaatgttttttgatatgaaaaaaaaaataaaattaatatgcgtatgcatacctgataggtcgattgggaaatgaccgttttgctccacaagatcaaaatgacggaagaccgaaaacacggaggccgacatgggccaaagcgaagccacaggaatgttcctccggtttccgacgtcggtcatccaaatcaagtaggtgtcggctatgatgacgttgactggagtgtcgaggcgatcgaggagctcctcaaagggagctttcaagttgttggtgacggattgaaagaagcctgagaagttcttcgctcgaccatgctcagatggtatgacgttcggcactgtgcggaatcggactctgtcgggtttcggatccgacccgaggaggccgagccactcttcggtgattacgaatgtgacgagtaatcgggcatttcgtgagacgagctccttgcagatgttcatcaagggattgatatgtcctctgcccggataaggcatcgccaccacgtggcaatcggtggttggctcaacagtttgtagagtacccatggaaggtgctttggggagaatgatgcagtgttacgaaactcgatgagaattattacatgattttacatcaatattcggactatatagactgctttaaataccggttttttttttttttttttgacacaatacaaaattggcaagatgagaagatacgggctaatacaatcattattgtaatttgtaaatgaccctaaatctaataattaagttaataaatgttatttttttaaaaaaattaacaaa

SEQ ID NO: 79225 - DNA, 1229 bp, Cannabis sativa
atttcattttatctttaatttcttgctcatgtgtgagacctttaacgattttaagtaactcatatgttgttgtgtttgaatatgtttctcttaatggttagtgattttttgtttatatgtgggaactttgttatttgtaggagcatgcctacttcagctgctcttgatgttgtagctaagcatttgaatttgaagttctttgaggtacctactggctggaaattttttggtaacttgatggatgctggattatgctctgtttgtggtgaagaaagttttggaactggttagttttagtattagctttcgtacaaataattaaaccatctgatattgttggacatctgtaaatgcttgccacattttcaatggacaggttctgaccacattcgggagaaagatgggatctgggcagttttggcttggttatccattcttgcatataagaataaggataaccttggtggaggaaagcttgtgacagttgaagaaatagttcgtcaacattgggctaaatatggtcgccattactatactcgatatgactatgaggtatagtattatttatccctttgtaattggagagatattaagaaattatctcccttgtgagaaacataatttgactttgttttcccatgtaattgcaataaattataaatttacttttaatttttttggctagtaaataaaagatattcaaggatacattatgaattgagttttttaagattgctattagactcttaaacaccagaaagaaattaagactaatttcattctcaactgttaatagaataattaaactcaggaaagagaattaaattctaaacctttcactttacttcttttagtctttctacgttacatttagcgactggatgataatcactttgtctaattatttgaaattactgcttgaagaatgtggatgctggtaaagcaaaggaactaatggcgtacttggtgaagctacaatcatctcttcctgaagtaaatgagtatgtttatcgtacttaaactacttatttttcatatgtttccaagttgttctcttgatcacctcttatcattttctaatcgtgacaatacattcttaccatgtgctactgtgtcctaaagtaaaagtttctgaaatcatgtgaggctttatcatggttatcttactgttgttgattaagtaatgtaaatgcttttggcttttttccaacttaagtcttctttgattt

SEQ ID NO: 79226 - DNA, 2238 bp, Cannabis sativa
gatccaccagagggtttctttaccaatggctcaggagtacctgtcattggagaaaacagataagaactagagggaaggatcggagagcaggagagctataattgattaggtgttttgcataggaaaagcaaatagtgttttcaaacaattagttcaatctcatctttatataaatatataaataaacagaaatataatgtgtgaataatattgatgtggatcgaattgtattcttcctctttttctttagaactgtaatccactacagatgttttctaaagcgataattgattataaagataaagcaaaaaagctattttgtcaaggataaagacttggacatctaaggataattatctttggtcctttggatgtgagatcgattgagaatttccctttgaaaataaaaacttgaaagttaatgcttaaaaagaaaagtgtacgtacttattctcaataaaattgaaatggtaaagatgaggttgaataaattaatggaaatagagaatgaaaataagcataattatagataaaaaaccaataattatatgatttttagtaacaatttgttggaaaaatgtacaatattcattcattctgagttgtagagggggcctcgctagatatttgtcaaccactttgaaattaagtcattactttattattaagactccactaacaagacactttgaaaaagaaagtgaaataaaccaaaacaaataatgttccaaaggaagaacacctcaaacaagattaaaattacaaaagcgaaaaggggacagccaaactagagaatcaatccataagtacgatactggaacatgtttcattaattaatttataaataaagaaaaacttgattctacagatacacaggggtgatcagaaaacaaaaaaaaaatgtttaatagcctaattcgtgatctgattttcgattctaaattaaggaatttatgattatatttaaatttctttgaacaaatgaaatagttcttaagttacgtaattacaagcttttattaccatagttaactcagacatttcacatacaaaaggaaactaatcttatccacaaatgtattttcttatactttttctcggcaaccaaacagataaacatataaaaacaaaacaaacttacttggttcaaccacaactagagatttagagtcatcaaccttgggctcagtctttggcacaggaggtggaagagcgggcttctcagaaacgacgtcggatgggggctgagccaaaggagcgttcagttcttcttccatactagtctccttcttcagctccgtctccatatgataatcctttcccctttggtttctgtaatatatatttatttagcggtccaatttttcttcttctgtaatttaacggataaaattttaaaattcattcgactttttctatttttgtcttttaataccgcgggacctacagtgttagagtggtttcgattgtgtggtgagtattacggttagtcaatgcaaccggactctgagatccgttcatagtgtggaatagattaaattggtttgatcgaacggtgtttatgagttaagtggatgaggagtatggtggggtcccggatagggagtaagtgcttggttcatgtcgacaggtattataggtaataaggtgatttttggtggtgccgcgtatagaggtgtggctgaagcgtcggcagaggagaaaacgacaacgtttactcagtgggtcccacttgaaagatttctttttgactcgattattacacagatagagagtgtgattatcacgctcattacaaacgcgtggagtatttaagaaattgagtgtatactatttatataatatttgctctttttagaaataatatcattggtgattttctaatttctcgaaacagttttatgataagacgttaatttcggtgatagtaagtattggggggtctttttaggagatttttacttaatcattgtgaagtttaaaataaattaacccacggttatgtaaaagaggagcatagttttgatcaattaaattggtattagaaactatttgtaaaatcaaaccattttcattaatacatctcaaacctcataattaaggacatctaatatttttagacctatctagatccaattcaatcatatattggatatttattttactatccgatctgatccaattaatttcatcatccaatcgatccaacatcctttggatgttggattggatcggttc

SEQ ID NO: 79227 - DNA, 1261 bp, Cannabis sativa
tttggcgtgttaaattttttaaatatcttaaaattttacaaaatatcttaaataactacaacgtgaacgatcataaaaattcttaaataaggatcactatacaaaatttggactaaaaaattttaaaaattaccgaaagaatccctttaaaaagatacattaattatagaacaatgtattaagtataataatacataaacttcttctgcaaaataagtttgtaaaatttgcatccctttatcgacaaagaacattataatcatgtgatttttgtttttagtttattgactgtcttcaactgtctataaatagaaaaattactgttgccttaaatcttgatttctttattattatttttttttaacatcttgatttctttattcaagtgcgactaaaataataaatttattattattattattattattctaacatgaagtatgttgatggataaggttaaatttatgaagattttggcaggagagggagccaaacacgagaatttctaaaagtgtgacttctttttaatttctactatattgttgaattaaaaagaaagagagagaaattaacatcaataaattgaaactacataaagagacttgaaagtagttgtagatatacatattagacttttaggtggtgaaaatataatttgactttcaatcattaattaacaaactcacattttaggtgacatttgaagaatcgttgcaatgactaatagtcaaagcgatgatgttgatgaagtataactagtttcagacgacaatatttacaaatgatcttcgaagaagattaaatgaaaagaaaaagaaagcaagaaccaaaaaaagcagatcctgtggggacgatttgagaaatcataccaatgatcgtatttgtggaagggaatcttcaagtgacaaaactcaatacttgaaatgcaaagtcgaggaattgataaagatcatagagaagatttctaaaagaaatcggaactgtgtccgattcagaagaagaatacacagaaccatgcgtgaaaagaatcatagatgaaccactgtcggagcacttcagaatgtcccaaatggatttgtatgaaggcaggacggatcccagagaccacctgtccaagtacaaccgcacgatgcaagttgctaaggccagtgatgatgtaaagtgtctctacttttcactaactttggccaagtccgggaaagattggtggaaaaggctatctccgggatcaatccacagctggagggacctataggcaatg

SEQ ID NO: 79228 - DNA, 6276 bp, Cannabis sativa
taggagactaggaaataggaaactaccaacaaaataggaaactactaaatacaagttatcctaattcttttacacctaatatacagctaattctttaacactatatatcgattccttgcttttaatgattctgtactacagagttctttctcttgagaaaaacctcttgttagggtgtatcaacccaagtcccacattgaaaagaataggcaagagttgctttgaatataagtgtttcacctactctattagtacgaggctttttaggaaggtgcttaaaaacaaatccgcgagagcttttaggcctaaagtagacgatatcatactaatgtgggagtgaaagtgagcctgcggcccaacaaggtaatggggcccaacacctccaaagccacttcatgaggaaggggtttatttcagaatattcctaatctctagtgcttggaagtgggagttttcttgtcatattaactactgtagtatatcatatacacatagaatcttagtatgaagtatggttttgagtttcccgcatcatagggatgtaattcatgtgtatatcataaatgctctgtagatgcaagaaaaaatttcaaaacatgctttagtctgacaggactgtttgtgtaaacccacagaaaggaggagtcatacttatcaaattgaattcttgttcaagttttatgtgaagatgctgcagcgacatctggatcaattaagcccttcaaaatgttgggagtccatctgcgaggggctgcaagtatttcctttcaacactgaactttgtagtgctttagtgcatattgggaacctatacacaacaccaaataaattacggcggatgtttgatgagtacaatcaaaagtgagttttctttctttttgttttgtttatagaaatttatctgtaggtgcacatgagattgccatgacaacaatttagcatttacactttggagaaggtggcaatgtcatggacaatatttaagatttactgcttatatttgcaggaaacaatctgtggttatctggatttttgccttgtcatttgagataagtagaggtggctcccagcacagggttcgtggattgtttgagagagcattgggaaatgatacacttcgtcggtcagtattgctatggcggtcttacattgcttatgaggttaacataacgtgtgatccttctgcagcaaggaggatatttttccgggcaatacatgcctgtccatggtaagagctcgtggcaaggttataatgcctgtgtatttgagaaaaagacgtggtttatttatgttatttgtcatgttttttggatgaatgattgttttgtgatttggttctgagtgtaagaacccctattctctgcgcctagatatagaagtcatttttcctataatttttcatattgaatttttttaatggtgcattttattttcaatgatgatacaatcatatacctttttccagcattgaaaaaatgttacacttgccaattctaaagtccttttgtagacttcttctttgagaacttgaacaaatttatatagttttgtattgctatttcctaaatgactacatttacaaatgaagagtatatcattttatttctcaggtccaaaaagctttggatggatggttttgccaaactgaacttgattctgtctgcaaaagaactttcagatcttcaagaagttatgcgagataaggaattgaatctgaggacggacatctatgaaatcctcctagaagatgattttggagtatgatattagtgataaatgccaatggtcaatcctagagtatgttgtttgtatttattttattgttcacaacaatacctaatgatgccatctttaggtagaggtgcctgagtatgtgagtgaatgatttcattgataggcccctatcaagctccatgaaacacgcctctacatttttcaaggtaagtgaagaacttgtacacaaccttgtttttgatgatgtacttgtaaattttgtagttataacaagattgtcccatactccttttgaaaatagtgatcatgggtgaataacaataccaattcccatgtattgtatttgtttgaaggttataacaacaaagacaagagaacacatcaatatgctccttcagttctggtatcctatataaattgaaaagggcatcaatgattttaacatcatatcattacattgatatgtttgtacattgacactcctagtaatttcgcgggatgaacaagaccacatgaatatgtggttgaatgaggttattgatgaacaaggcatggaccaattcaaaaaattgaatttctataaaatttgaaggttcttacaagagtttaagatgaaagttatccatctcgctaagctatctattggactgcaattatgcccataacttatagttacataaataaattatttaaaaaaaaaaatgagcaaagtgtaatttaagggagatttttataatttatataatttaagggaaattttcacaataaaaaaactcatagaacaaaattctacaagtgtcatagtccagcgacaaaaattctatttattctttatttaaaaacaaaacaattgtcacgtgaaaaaaaaaagtaaaaacaaaacaataagaactcgtttggtaagtcatataaggatcgtattgtaataaataataaacaacactatatttgaataaagtaatgtattgtattaattattacgacttaaatttttaatacaatgtatgttgtattatttaatacataaaaaatggtttgtattggtttgtattataatttttacgaaggatccggggtcaacatttatcttcgaccgggattcggacccgaacccaaacccaatactcggacatggatccgaactcgcactcgggactcgaaccccaaacccggaccctagaccccgagacctggactctagatcctgcaccctgacccggactcaacccgttgttggtgttggaattaagtgtattaaaaatatattataactttacacaatctatcaatacaagtcataccaaacatagtattgtattaaataatactaaatacaatacaatccaacgcaatacaatacgacgtatcaaacgcgccttaaaagaggagtattaaacttttgaaattccacattcttaggtgatgttttgtttactaaaatgtaaatcgtgatgataatgaaagagccattatattgtttggtttctattttagcttttgtactcaagttattacattgataataattacatacaaaaactaatataatcttccttgcaattacactatattatagatttatagagtaatataatattttaataaaaatattagtaaaaagaagataaaggtctattttatctttgtttcttttagaaaaacatttcataattataaaaataaaacaacaaggatactttggtcaatacacatattattctattgaaaaaatttatttataacccaagatttttaaaaacatcctattttaataattttaatagtttttattttatattaaatttatatctttgattgtattaagttttttaaacttttttcttttttttttcatattcttaaaaaaaatatatacctatcaaataaatataaattatattttaaatattatgacaaaaaattaaaataaaaaattatataaaattttcttaaaaaaaaaatatatacataatttagaaaaaaaaaatatgaaaataaaatcaaaataagtataaaaaatatgaagagtaatttttaaaaattatttaagtttattttttttaacaataaagtatacttatcattttataagatgcaaatagagctctcgtattctattatattcacacttcaaattaaaatcaataattctaattaaaataattttttcaacaataaactaaatgttattatcaattcttattaattattacattactattactattattatttcattacacaaaaccaaacaccatcaacaccttaacacaaaacagaagtacaaagtgacacaataaataatacactcaaattcagcataataaaaagcaaagccaaaagcattaaaaacattaataagtcttccaatacaacaagctaatagtaataacagtaactaattaaataaaaatcacccagatttttgatgtttcattcaaatcacagttaatatataaattctaagccagaaccaccaagctttttgtcaataatttcaataatgtgttgtgccatggagggactaagatggttaacccaatctccaacttgtccttttcgaaagtaacttttgttgtcaaaatttggcatgaacttgccacttttgttcacttctaaatcactcaaattcttcaaactacaaagctgtgatatttcaccaataacccctttcttctcttcctcctcagaaaaaggacaccctatgaactcaccaatcttcttcacatgaacttcaatatcttccttcaaatcttcgtactttaaaaacaatactttttccggcttctccaaactctccttccaatatcccaacacatgatcccaaaagggcccaaacccttgttcgcctagacaaaacttgtccacatagtcctttatcatccattgtgactggctctcgacacgatctctagtggcgaaatgccagaatgagacaatcgtgtcgagagggtttctacaaatgtagacaatacgacattctgaactcttgatgaccgactcgggcaacaatatgtggggaaggtgtgtggagaagaggcgcggtgtggtgactggagcatcggggccaaggtcatgaggggccttggcctcggcatagagattgaactcgagaaagggtaggagttgatgtggattggaagtgagtaagggagtgtttgaaagggtgtagcgagagcggttggcaatggagaagaggagagctttgagccatgttgtgcctgattttggagatgatgctaaaatgatgtcttggctttgaggttgaaagtgtgtttggaagagcttgatgtttggaattattctagaaggacaccaataaccttggtaaagagaaagaacagaagagcctaaccatcctttggttttaggaagtttatcaagatcaatatcaatatcattattattaatagatatgggaatgggattcttcatatttatcttactacttcttgtgagtaaaacactcttcacatgtatttatatatacaaaatattggaatgaaatttgagtaattaattaataaattaaacatgcatgcaattaatgagtagtactgcaaatcaatgcatgtgggaaaagtaataatacactataaatcatggaagtccaaatcatgcacattgcatcatcaccctgctttttaattttactacgtaaaaagaacatctttataaatcaattaggtgtaaaaagtaaagagcactgagagtagagtaattatgtggagcattagtatgtatgagtatgggctggaatatatatgatgtgttaaatcggtcaattatacaactcatttggatggacattatatttatttctaatagtgcttgctacctactttaacatatttggattggtcagtaggcatgcatgcaatgctgttaagtagcaacttttacaccactccaaaggcaccatgtggccccagagctttgttcaattggattgctagagatcatgctgggttgtgttttgctgctgctgctgctgtcaaactttgaggtgaaattgaccctgttgttgctgaggcgttgtcaatgaaagaggctttgagttgggttaaatcaagctaggaagaaggcaggattgctgaggacttttgtcctagagcggtgattatggagtcagattgtcttgtgttggttaatgctatcaatagcaagagccaaattctttctcctcttggtcttattattttggattgtattaatcttatacggtccttttctatttttcatatttcagttcagtttgttaaacgatctgggaaccaagcggctaactagttagctcattcttctatttcatgtcctgattgtatttctagtagggggtatgtcccttctggtttggaagctattttgttagctgatttgctttaatgaaagtggcaatctttgtttcaagaaaatatgggtttcatttttttttactgacagctataataagtttgactatttttatgactttttttagctattttatggtattttttaataaattcaatttttaaagcccatatttaatctttagataaa

SEQ ID NO: 79229 - DNA, 1780 bp, Cannabis sativa
taaaagggtaaaatgggaagttcaggtaatcaatggaattaatttgtacaaattagtggagggtctaaattttgatattgggggttttattaagggcaaaaaatgaaatttcccttctacacgatccccttttttattatcattttgttttaaaaaataaccttcaaatgaatttgatcacatattaccttgaatttgattattaaattttcaatttatagttgtttaaatattttgaagatatttacaaggataatcatataactaaaaagtattaattaagtttatagaaaaagaaaaaaatctccaaagtttagaattagtgtcttcgaagaaaaatattctgtctagtgtaatatttggttatttgaattgagtttttattgaaaatgttatgaaatatacacaaattggtgaaaatgttggaccaaaatggtatacacccttggatttggagatagtgaagtaagttggagcttgtgaattattactatatcttaaatggttacctttcactatttggctgaaaacttttacttctcatagtcttctgattttagatttctaattttttctgatgtcttttgttaaattctaatacacaatgttgggtattgaaggttagagcgggagtggagatggcattaattgatgcagttgcgagcgatattggggtgcctctgtggagattgtttggtggagtttcaaacaccataaccacagatataacagttgggtgattgtttgagtaattttgtgtttacacttttgttcattttttaattgtcttcaacagattcaacctgtgaatctgatatgtacaattttctgtaagttaaagtatgtttttcgtaagtatattacacaatctttagcaactgaaaattgtgtcaaactaatatatgcagattccaattgttcccccagctgaagcagctgcattggcttcgaagtactgcaaacaaggtttcggaacattgaaacttaaggtgggaaagaatctaaatacagatattgaagttcttcaggccatacgagaaatccacccagattgccttttcatcttggatgctaatgaaggatataaaccaatggaagctgttgaagttcttgaaaaattacatggtaaatgatgtattttcaacatctagtgttatagttctctggtttttttcatgaatgttttttgaaatatgtaatattttctgcgttcaatcatgcctgtatattcagcttatcaaattcctacttttagcctcctctcaaaggtaaaaatagtttttttcccttttttgcattagtattaagttttgttgtgttatttttgcagaaatgggagttacccctattttgtttgaacaaccagttcatagagatgattgggatggccttggttatgttacccatattgcaaggaataaatatggtgtatcagtggcagctgatgagagctgtagaagtgtaactgatgtaaagaaaatagttgaaggagatcttgctgatgtcataaatattaagcttgccaaagttggggttgttggggcccttgaaattattgagatagccaaagcatctggattgaaattgatgattggtggtatgattgagacaagattagctatgggattttctggccatcttgctgctggccttggggtttttcagtaagttttttctttcttatttgtaagaagtacatattaacttatgtcccgctgttttgttattaattaagcaccacgtcttttacaggtttatagacctggatacaccactgctg

SEQ ID NO: 79230 - DNA, 2466 bp, Cannabis sativa
aaataattttacaataatattttactggaatcccgaatatgtatttctattattttattttaagtgaaagacaaattatattgttagaagttgttttattagttaggttattttttgttttattcgcttggctttttgatcctgattaacagcattagcataatgtaatcatgacacgcagcattcttttaagtaggacgttagacaacccttctctctttttatctgggttagtggtaatttttaatggccatgttgtttccttcaacccccttaggcatctcatgtcaaagttatggtcatctagggaagttcttctttgttacactgtctgtctatcttcctagcctctctcgtgttgcctattatggatacccttaccgttcccctatcattgaattgtcgtgtttcactcctctgtcgggggcacactgtcgacaatctttccttagtttcatagagtaatgagtcttccatggcagaagtttcccttaatatttcttttgtgtgttgcttttcctcaactttaagtgctacatacccttgagccattgctagagctcttgtcagtgataatctcagctctactattatagccttcttaagttatgatccgtgaactaatctctgcatcagagcttttgttgcaatacaataaatacactttgagatgcttacatactctccagtgaatctatttatgaacctctcaagcagttcatctgacccttgatgtattcatcatatatgcatcaacttttgctaactgtacacatattgtgaagttggtatggaatttcacaattagttcttgatacgaatttactgcctccaaagataggttatgaaacctctgcaaggtaggacccctcaagccttgggtgaatattttacattttatggcttccaagtcttctaagggaaccgagattgttaacagcttctcctcaaactgacatacatactttaatgggtctctagtcccatcatactcatggagctttggtgcaacatagctttgcggagcttctactcatgaaatgtggttttcaaagggggacaatgagtggatccttccatccttgcccattttactatttattcccatctggctttttgattccatagcaaggagcttgtcctatatcatctcttgttctctatttcattggcttgaattggggaaccttctggaataatctaagttgtggtacatccttttgatgttgtctggggtgcctcttccttcgcgcttggttcaatgtcatccttgtttcttcgcaactaatctaatgtgcattgtgtttttgcatgaatatggtttttgtgtccagttgatccatcttgtgcctgattgttatgattttgattctaaactatggctccatctattaactcgacctattactgtttgtttctctcttcatgttgcgagggatatatgctagtaccctttaaggactaccttcatttaactgtttttgctttcgagattattcacatgctcttttttatgtgccaattatgttccttgcggtgctattttgtcatcctgagtttttagtctttctaggatttctcgcaaacttgggattgctggtgttgctgtgtcattctctttctgggtggtggtattagtttcttgttcttggttagcgctattggtatgtagtttcacgatatcctcttcttcgtttgtcgtttcaagctttttctaaattcttcatgaatactgatgaacaataaaaaaaaaacatgaattttggatgcaaaaatcttcaatttgaaagaggagaagatttttccactgacgactcaaaactgttttgaccaaaaacggtgagtaatatttttgatcaatttttcaaaattagaatttcatagattttcagttctttctctcaatgttcataatggatcctctctcgtggtttctttttttttcgtcccctttacatgaaccctttcttaagtctttatagtacgttctttgtatgcatgattgtggtgtcacgtctttaatatatgctctgacaaacatgtgtacttgtgagttgttaatttgtaatgattaattttattaagggattatctttttcagactaattttgttttatgtaggatggaatacactctattattcttgtttggccttgcttctaactgaacagaggtatgcttcgtcaacaagaagagtgtattcgtcaacaagaagatttggtgaaatcaatgcttgaagcaacaagagaaaatccacagcaacaaagttaaagtggatttacctatgtacctgagccaccacaacaaaatttagaagatttctatgtcccgatgtcttctcctgtagattatccattgtcaatgccccaggtattaattcttttgctaaagtattccttttattattatttcatgattacttatatgtcccttttgtatatgttaattgttggaaatttattttac

SEQ ID NO: 79231 - DNA, 2668 bp, Cannabis sativa
ttacttccgacatgatatcttgatattcctttattattgttgaaaacttagtgattataagataatgtacgctaccgttgttttgttttggatttactcagagagatgatacagaagtgcttgatgaacccctgtatgcaaattttattcgggtcacaggctatgataggccctacagagaggaactactatcaacaatggtatgcagctaactctccatctctttttgtttccatcataacaacatattattaggctatctaaatctgtctcaatgatatgatatctctttgtgtttccatcataataccttatattaaaatttcttctacaggctcccctcccttttagacttgcagcttgcttcatctgttattctagcttcatttttcattagacataagttcataacttattgctttttattattcaccccaacaggaatctgatggaaataaagttatagatgatatcctttttagtcctggaaaaaagaagtacaggtactgtaaggtaaggaaatatagcttttaagtatttagatgaaaacctgaagctgcttatctaatgtttaaattttctacagcaaatagcaaagcatttggtgtctggtttatcaagtgatttaataaagaaaggaaagcacttcatactgatacgcaatccacttgatattttggtgagcttttatttctgtttttttttttttttcaattgatattttactattaatgtctactcatttttttactcctcacttgctctggtttactgaatgtttaatctgatgccttttcagccatcctttgacaaggttgtgccaccatcatttaacgagttaggttttggaagcctgatcagcatatacggtgagctttcagcgttgggaaggcctccaccaatcattgatgcagctgagcttgaagcgaatcctgaggttttaagctaccgaaattattctatctcgaaaattccgtgcagaaagcatagcaatatggcagatagatagcttatgaacttacctgttttcaagatgctttgtcatatagatatctattgacaaatattgcaacaatgataaaagaatgtgtttttctagcgatatagttctcttggatctaagtaattttaactttcagccatacataaagaaaacaatattacactcttgaacttagaagttgcaaggctcacccggttctgttttttctaagaaaactttaactgaatattttgagctcggtgattttctcaggtattgtctaatatttttgttactccaatcttgtttttatgtaggttacattacgtggtctttgtgaagaattggatattccttttcaagcctcaatgcttaagtatgttctgtaaattttccccttaatatataacataaatttgctgtttctactttatagaacaactgtgttctgcactcagtagcttgtccatgaaataaatttcaatttaaatttttttcagatgggaggctggcccaaaaccagtagatggcatttgggctccgtggtggtacaaaagtgtacataaatcaactggatttgaacgagttaggaagtatcctgtggtatgctgtttgtgtttcttagccaatggttcaaacgtgttgaaatacaaattgtcattatctattgaagtattaataatgttatatttttcttatttttgtcattttaaattacttccatgtgcttataaaatcaaagcaatattttcttttgatgttattttgtaatttccatgttttccttaatgcagttcgacattttctttcttgtaaatcaattgtttatacctgcttagatctttagtggtttaatgcatcttttttggtggtgcttatcagggttttgaatagcaactaaagtgtttaggaagaatggtgcctttgactgagcttattctatattcttatttctcagccttttcccctgtctctgtatgatgtattggagcaaactctacctctgtacaattggcttcggcgtcattcaaagcacacatcacatttgctaaagtcccccttgcctcctcctgatcttcctaatcctgaaaatgcaaagctatttgcatgggttggtgatgagactctaccacgagaaagtgcaaaggtaccttaagatgagtcgtgttgtaaccaactgttgaatagttaaaagatctattatgtgctaatgtctagagacttatccatttcgtcaccaatacaaggtttctgtgttcgactctgttgtccaaggaggtgattcagcttgggagggactccgagtttacgatggaaagatatttaagcttgaagagcatttagataggtcagcgaagaaaattggctttgatacaaatgcatctataaaatgtatatgtaacattagtttggctgtatcttgggtcagaattgcagtatgcaataagtatgaaatcaaataatcgttagtaaagggaaaactaaacaatttggtccattttactactgtaatttatgttctaatcaattagaattgtgaatttcatgagagttcactgctaaaattgaagaatgttcccagggcatttcagcagagcactgtgatacttatatgtaacaaacatgaatttctttgttattaagcatgtgtagatatttttgtataatttaatgatgattcaatct

SEQ ID NO: 79232 - DNA, 3190 bp, Cannabis sativa
aaaagtagcattacccgtaatggtttatacctgaagaaattgggaggaaaacttctcccattcttttctcctaattttatgcctttcccttagagtatcccaaccattaaataatgtaaacaaatgaaaaggagtgattaccatacctatcactcccaatcctgattagtaaacatgccataatagattagatcaaaagcataacacagtaaaacacaataatttgataatagaatccaacaaaattgacaaaacatagaactactggcctaaagatttgtcattgaaaacaagtaatatgtttcatatataagctgcattactttatttttgatataccaatttgcaagttcttgtttgattgccaaacaacacaaccattcccaatattaaaagcatggaaatgttagtattggatttttgtttcttctattgccttcttcccttgatgatagtattggagataagtgttaacatagtttttgactgttgtgtacaatttgggtcttgattcatcgatcaacccttctaaaggtccgaccaatttatccagctctggaacataaaacacagccaaagaaatcctctccctttctgaatttgtcaaaactttatgtatcgcgctcttgaatgctccattacttgatatctgttgtattagtttagagaaaccaacaacataattttaactgttaagtaatgattaataagttgaaaaagatgtcatgaaaagcattaaaatcaatactaatgaatctaattggagtttaaaaacacaacaatagtcaggtaattagtactctaatttctatgataatttttattagcaaaataattttacaaaaaaatttattaacaaaataactttgtatggtcgtagaaacgatcataaattacactgtgcgactataaacgatcatagatttacaatgtgcaatcattatatgcagaatagaataaattaaggttattttacaaaatttagtatttcatattattactttagcaaatttctcaaagaaacttagaattacttggactaagtttagataattctacaattatttagagtacttatatgaaactagtttaatgaatcgaaaaattaagaaaatatgtgtccaaatgagcaaagagtccttaagtgttctaacttctaagcttgtattagtcttcaataataataaaattatcgaaattttatacgaaagattacctcggcttgatcaccaacattaacgagaagcgcctcgggaatggatggagctttgaaccattggttgtctttcaaaatctgcagaccatcaattgattggtcttgcaagagaagagtgattgcagatgcatctccatgtggtttgctaccaacaataaggtcaggccttggacatttcgggtataaggtgaaccttccatttagttttgatctttctccatactgctccacaaagcaattctcttccaagtttagtgaccttgccatggccttaaggagaatctcacttactgatttaatcttctcagaatattcatgtacaatagacctgtagattcaataaatgtgcctcaatatagtagtattgaaaaacttatagttatatacactaattgggtgtgccacttttatttgcttacaattttttaataggctaattaagatttttgttacttaaattttgacatgtacgtatcaaattatgttctctaaacttttttgacagttaaaaattttccctgaactattgagattatcgaatttaaggacttttatccaatttcattcaattgtactaatttagtgattgtttatgtactaaatcatgctctcaaaactttaatatctaccaaatcacgcccctcgaactttgacatgtgccaaatcatgtcctctgaactttcatccatgttagattttccttactaaaattggacaaaagtccttaaatctaacaatctaaaatagttcatggggaatttttaacaatcagaaaagttcaggggcatgatttggtacatgtcaaagtttgggaggtaaaaatcctaattagtctttctaatatgatcttgagaggagatgttagagagtctcacatggctaatgtgtgaaaagataataaaatatataaagatctatgaacttcatgcattttacgattttgatctaaaatgtaattccaaaacaatgttctcaccgaaaagctttaggattttcgggccaaagtttgagccttcgttgttgttctgggtacaaggaaaggaacaaacgatcattccaatctcctttttgttgatctgaataaacattgtcattaccatatccttcaatatcattttcttctttcaagtattttttcttctcttccaatggaagttggaaaaactctcttgtaatttctcgcaatcgattcaaatattcaactgacataccatggtttattgcctaacaaataaaaaccacaaaaggtaaatcttgagctttgatttcgacatagttagactttagagtccaaagtaagactttaaagtccaaagtagccacccataaataattaaagggaaatcccataagccttgtttctcaacatatcagtttcaatataaatatacatatcatataacttaggaataattacaatatttttgtaaaaattttatatttttacattcaaatatatatttttttttttatatttttacagtgttctataattacaaaaaaaaaaaaaaattacataaaagtaataaaaaaataacataaaaaaaaaaccaacaacaaattaacaagagaacaatataaaaatacattaaaagactatattttctgtaaataaaatcataaaaaccataaaaattccgtacaactatatttttgtaatctttttgttaattttgtgtatttgtaaaataatccctataacttacacatatagtcagggtaggctcagaaatttagtgggtatagaaaaaaaaaatttaggcccttattttaaaaaaaatgtagtattttttaaaattagtaaaaaaatatgtaagtttaaaagagaaaaaataatttttggacccctgaactaggtgagccttaagcaaatatctagcccgtctatacccgagtctgcatatggtgtagttagtgtcaccaaatacactaaaaaataagtcaaatatggtgtcaaatgaacaaaattatggt

SEQ ID NO: 79233 - DNA, 1530 bp, Cannabis sativa
aagctaagctaattaagccaagaaaaaaaaacccaaagtgtgaagaactaatctttttctatgaaacaccttcagaattcatacacaattgcattactaatcaattgaacgacataaagggcaagtttcatgcttgttatggaaccatttctctaaacaccctttgtggaaaaaatgcttgcaagacaactcactaacctcttcatcaccttcaaaacgacataaacaaacacaacactctactgtattattagttttggcttcaaaaaacctgtcatggcacagagacttgaactgggttattgagattcttctctcccttaaaacatcctctgttgaagaaaactcacgtgggttttcttccactacatttggagaactcataatattagcacccatgacttgaagcacagatctcaacatgttcttcaataaagcaaatgataaaacactgttcattactagcacaggtaacactccttcggctgctgtgggaaagtttgagagtcccatgttagcagagaagaacaaagaaacaaacgaaagaggtaaggagaaaacccaagagagcaaacgaaagactcaaatgtgaaaaactcacttgggactctgtagatatatatactagtactattacatggtaacataacatggggcctaaactatatgatagaatacattaactctggttggtggtgattacaggagccatcaacacgtggagttagtgtgacaagtatgaaatggggttctgattttacaactgctgttttcattggaccaaaaagggcaaggttgacaacgccacgtgtccgagggacttttgtgaggaccaatgaggttgtgcattgtggcagggtcagtgacctttcaatagggttgtgtggattggcaagaagtttcttgattctgtgttatgatttatgaatatgatgggccaaaccaatactattggcaatgctatgcggtgtaatattcattcaaaacactgaaagaaatggtttattttgagcttttagatgactgccacttgttcatgtggccaaccaatgtttctgtgtcatggcttgtcttgggtacacgtatacaaaggttatgtattaactgacagttggagcattacaaggctccaaactgtgttgtggtattcatttgaaataaacaagtggataacaagagccaaaaccaggccaatcaaccaaatcaatgacagaattgaaacctcaatcttaccaatttttttttaattaacgaaaggctaattagtaattttttatcctgaattttaacatttattaaatcgtgctctttgaatttttttagctattaaaaattctcccaaattattgagattgttaaatttaaaaacttttgtctaattttattcaattttactgtttcagtgattgtttatgtactaaatcatactccccagacttttatatctactaaatcatacctctcaaactttgatatgtactaaatcataccccttgaactttcatccatattagaatttttttactaaaa

SEQ ID NO: 79234 - DNA, 3961 bp, Cannabis sativa
ataattaaagttttaactaaaaatctcttataaattataggtagaacggtataacccagttttgtcaaaagaaatctcagaattggcatcaacaggcagatctctttaatgaatgactgattcaaaggctcaaatggtcactaaaaagataaaattgacaaaagagttggatgacttactccatcagcatcatcagatttacgtagtgctccaaccacatcgaccaactgtgtaaagttctttttcaaatctgtatcatcatccaccaagtcatacggttgtaaagatgagtcacttgaggtatcagaaatctcactctcattatcatcatcatctttgtcagagccagaatcacaattaagagtagctggatcaataatctcatccgggtcaaccaacttatactccgatacttccttagttttagtctttacattttgcagtatatttttatcagctgtgtggtttacatcattttcctccactgaagaaatacatgatttaacattgacacccttttctatacacttattgtttgttaaacattctttctcagaatcgactaatccaaactcccagtcaatgctttctcctatgcagctatcatctagatataaaggattttctggatcaataacgttagagaacgctaaagcaacactgctagccattctccgcaccaaatggtttggactctccagcctacctgcaagccaaaaaaaaaaagatgtaagacagtggtcagccagtcacacaagaatggcacagaaatagagtgaaaaattacagctcactccttgaagaattgaaggcatcacatccttaatctcatctagttgctccctagaaatattttccaaggaaaggccaacagctgcagatacatctaaattataacattaaggggtaacagaactgcaaacgacacagaagcaatgcaagttcttttcaaattaaccagaagagccaaagaagttgatcttattgtaaaacaattaaaaagattctccctaagttgaagctccaacaacttgtttatttgttatagacaattcaataagacagcaataaaaaggatacaaatctgttgctctgttgtagccgattgcacaaactccttcttggaccacactgatgctaaactatgcagtgcctctaagaatttctggttgttgtggctttcagaaatcggttttacatcaggtgggtgttcaagaagagcgaaatgaaggatccaacgaaggcaactaataggaaatactttccagagtaaaaatttgtcaacgagcatggacctaagaagaaagaaaaaattaaagattggctagcaaaaaacaactgccttacttgtaagttgtctgtggcactggcactgtataaaattaatttcaaaatactaaaataactatgcaattcctcacttgcttggaaagagagggaaacaaaggaaatgcatccactgacctgaatgaaacctgatgtgaaaaacttcgatgaaacaaaatccacagaatccaataagcttcaacatcactcacccgtttctttgcaatctcacgtaaaagctgctccgacattctttccacagcatatgaatctttgactgataacatcatattcaaccaaaagtgagaagcacggtttgattcaataacatccgcaacgagtgaaccatcatttaatgacaatagactttgaacatgccttagaacccttgggacaacttcacttacaagaacatctgtaaaaaagatttttaaacattcagtttgtactctccacagtattaaatgacaatgctactatacaaggaaaaaggagcacctaagctttcggatggagatatcttgagaaacatataatagaagtgtaaattttgcaaaaaagacaaaaatgaagataaataaagaatccatttattctcatacggcttaagctttcagtttgacacacctatagatccacgacgacaaatgcgggaaaatgtttcaccaacaaatgtaaaggtaccataaccatccatgacacttccattgaaaacggctcctccgtttactaaatttgaatttctttcttctgccagagaaagaagctgaatggtaatctgtttgaagaacatactatagttctgtaaaggataaacacttaatgtggagctccaaaaatgcaagcaattaatatatcatatagctaactccatctcaacttctgatacccagccattttgaatactttttaatgtttgtgatcctcgtaaacttgtcaaagcacacagcttgaacataacattaaccaaacaagattgggcaaaggatactgagatgagagtgaaacagcagctcccatttgtgctttgtctggtaaagatgaaacaatttgtgccaccattgatacacgtgccttgaaatgttcatcaaaagaatcctcagtttggtaagcagcgccaaattccttagccatctgaaccactccattattttcgagcaagcaaagaatgagtaatctgtggagtttgaaaaggaaagcaaaagactcagaattgattacttatgaacttttattttatcattaatgaaagtcttgtttctaatccataaaaaaatggtgacgttcaaatacaatatcttgaaaacacagatagagatacaatagaactcgtaggattcagaattttttttctgttacccagattaaaactatgttacatttaattttagtagttctatagcataactgttgcacattgttgaaaaatggggaaaacatgtctgtagaaacctacagattaataaaaactgaacttagtgaactctgacgttggaaaattctactagcaaatcaacttgaggaaaatggcatctaaacttacaatttaacacaaaatcatgattgttcttcattttgtaacccatgtgttgactgatggacatgaaacaaagggtcacctacaatgatcaatactcctactcaggtatatttttaaattgtaatgataaaaatgcattagagagctagtctcatgcgcaacatggaccaagcaaacaaatacaatgttgaaacaaaactttaaagctaaaagttacgagcttgtcaacatctacctttcagtatttgagcggacagcttgaacatcaagtccatcagttccgatgggctgtaagcaggggaccaaggcttgaacaacctcagtcataagtccattagcaaaaaatgcatcatagacatgcttacgtgccgaaatcgggaaacaagctagccaattggaagtaacatctgcaaccaaaatagcaatgtacatgaaaattaaaggatacatctacggacaacaaagatgaaaacacaaacttgcgtacttcactttctcgaacatgatgcttataacaaaatggagtaagaacacaaactatgtaaatgtaccccgtaacagaactcgagctaaggttggaaatgcgtttcctcggtagaacacctgccaccactcacttctctcatctactgagggaactttggcactaagaatctgaaataattacaaacaaaaaaacacaaaagcaaacttcagttaaaaataaataaaaaataaaagggcctggtggctctttaggtctattgtaaccatgaaagctcaccttgtctcgataccgctcatcaatactacctgcagctcaaaaactcatgtgttaattgtttccaccgaagttttaacagaaaaggatccaaaatcatatctctaatcttatatttttttatgaaaaaaaaaaaagaaactgatttcgtctgcaacggtgtaatcaattgaacacagcaatgtcaaagattaaaatttattctctttcctatcgattcttagtaaccaaattcaccgtatataaatttcagaaaatgaattaagtcgagtgaagtttacctgagagaagcgaagaatcgagaggaaatagaaggatggcgaaggagtgaagag

SEQ ID NO: 79235 - DNA, 3177 bp, Cannabis sativa
tgttttccgggtcgacaagtaatagtgctgttaagaagaaagactcaacaactgttacaccacctcctgctgctgctaataataatggtctgccgaacaaggaccttcatatgttcgtatggagctcgagtgcgtcgccggtgtcggaagggaaccttagacacgccgttaacagaggtgtctcttctgaatttggagctattgatacttccaaatcttctggcgtgcctcagaacgaaagaggtaggggatcagaaaaattattaatctttctttataaattatcgtttgtctctatataggtttgactcatgatgatgataatttttgcatgggatctgacacgcacatgataacccttattactttactgatccaattgctactatttaatcaatcattagtcataaaaattattttgtattttacgatggtgtagcatgaatacaccaaaaaaaaaaaaaacagataatttttcatgtctttcattaattatatattaagctaaagaaattaggaaaatcagacttgtacaaatagcatataggtaaatgatttggctttttctccatattaattactcttttgatactaaatcattaatattataacacatttttatttctaatattgggcaccacttattgtgtcccttcccttttgtatacattcgatctcttgcacaatataactcttcacaataacattatttatagtattttgtagtatcaagaatttttggtctcgcaatttattaatccgcagtagtacactgataattaaagttaattaataaatactaattattggattcttacttcccaaaaaaaaaaaatacttattgcgtaggtatgcaagagttaaatgggcacgtgagtcctgcagggaaaattgttggagaacataatcaagtggaagtagaagaaggtctgaacaatatgaagtataataatggtataatgaatggaggttcgccatatagttctaacaatttccagaagaaggttgaagacgtggttgatgtaggaggaggaagaggaggtcagaagaagaaccaaatgccacctgctagtgtcatgacaagacttatccttatcatggtttggaggaaactcattcgaaaccccaacacttactctagtctcattggccttatttggtccctagtctccttcaggtaattattgctacatcaatcaatataattacctatctttctctctcccccataaatatcatcttctcaatacagtcttaataagtgtccaaaactacataaattaaggatttatataccgtagctttttaaggtgtgcaagtttttgtactgtaaataacaaaatgttaaaaagtatgcaacaaaacacattaccatattattgattcaaattacaaatatcgaattctatattttaatgtaaaattatattgggtacagcttactattgataaagtacatatgtatttggcacaacgtaatttatatatgctctatattatttgacattcttcatcacataataattttatgttggcagatggaacatcaagatgccaacaattgtaagcgggtccatatccatattatctgatgctggtctaggaatggctatgttcagtttaggtaaatatttatttatttatatatatatacatatatataaatccatgatttcatttggacaatatctttgcaaataaacaaacaatgacattggcattaataaattgcatgtgcgcaggtttattcatggctttacagccaaagatcattgcttgtggaaaatcagtggcgaccttttcaatggctgttaggttcttgactggccccgcagtgattgccgcaacttctatagtaattggtctccgtggaacccttttgcatattgcaattgttcaggtttaatatactttctcatttcttaattacttaattaaataatcatttgtacacttttttatataatcattagagatatgtacagtgctagctggatgtgtatatatcgcttttgtagaaagtcaaaccccttttctcactacgaagtatactttaatgccaactaaccttaaaatgaaaagtacctttctagagattgaacagtattttgaagaaaactttgttaatagtacataatatctgacagcaatagaatacaattatgttgacttaatgcttctgatatgggtctatttttttcaaggtaggttcgtaatcgaatagcattttactcatcaaaatttgaaccaaaaggattattgttttataataaatagagaaaataatatacatattcattttatgcagtctttgccttcatttggtagtccaaaatgctgacttgctaaaagtattgtttttcgatttcgcatctatattaaaacggtcaaaagatcttcaaattattttgtcaataagttatttatcactgaaaactatacttgaataatatatagctaagtagttaatgattattaatttaattataacacttacattattatcatatgcaggctgcacttccacaaggaattgttccctttgtatttgcaaaagaatacaatgtccatccagatatacttagtactgcgtaagtattcatgatctccacactaatgaaatgaacatatataatttatagagatgaacagacttatataacacttatataattaatcatataagagaaatctgacatgtaagtatatatatttataatattgcagggttattttcggaatgctgatcgctttgcccatcacagttctgtattacgtacttcttggggtatagtatagtaatagtactgcttcatgggaaatagtagtgaggaggaaatatataataataatgtattatatattcaagtcaggaggctcagttggatggaccttatatatactgtattttgaagaaaaccaaatatgcctttggattcagcgccttacccatgtgatcttttaggtctcactcctctaatagctttttttttttacttttgctatcttattacatggttagaaatatattagattagaccttagagagatatagatgagaaagagaaagagaaagaggcagggaatattttgttttttcaatttctacatgtattctgatatatactaattatttgttacaccaaaattaatgtaactcaccattgcattactttg

SEQ ID NO: 79236 - DNA, 2457 bp, Cannabis sativa
tcttataattagcctaaattttacatctcaagattttacaattatgcattgaagcacaatagtaaaagatgatgtaaaaattatcagagaatcactttttgtgtcaaatatactttaacttttaatccaagtgtcgctaaatcttattaaatgtgactatatatacacgtgccaaataattaattgtctactttcaataaaaatttattaaataattttagagttaaaaaataaaactaattctttccaaaaaaaaaactaattaataattatttaattataaaaattaattgatttcaaaaaaaaaaaatcatatttctattattctttttctccatattttaattttattgttatttattttatgattataaaaataaaaatgagttggatagtttaagattattttaacatgtgttattttacttaccgaatcatcaaaaaaacatatgtataagtgtatgaaattaaaaaaaaaaataatatatatcacaaatacagatatttgcagcgaaatttttttaaaatttataattgttacatatatgactctaataaaaaaaagtggcggcaaaaatatcttattttataattttgttgcagacgtatcattttttagctattaagtgtcaactcaaaaatgtgtggtgacatattattagactacgtattaaataagctaaaaaaatatatcgtgtgtttctgagctgacatttaacaagtttaattgacatttaatagccaaaaaaaggtacgactacaacaaaatcataaaataaagtacttttgtcgccattttatttttattaaaattacatttgtaacaattacaattttacaaagattagaggagttatttgtgagagtaattcctctcacaaatatccctaatttttatttaggggagcaattatagtagaaacacttctgttctctatatttggaaaggttgtacttaatccttttatataatgattgtagtcttgtatagtaggcatttcactattttttttctttctttttttcctttttaaataattttttttttggaagacctttttaaataacttaactgtgtattaaaaaaaaagagaaaaggttgcaacaaaaatgaaaatacttctactgataaaggtgaaagtagtgttaaattataatttctatatttatgtaatttatatcaacgcctataacattttagaaattctaacttaatcacattattaactcatcaatatcttttatcaatgaagaaaaaattattcatcaatagagaaaaaaaaactcatcaatcatacagtccgagtgatgtgagctggcccatctgattaataataatggcttaaaatatcatagtgtgtgatgacgggtaagaccactattaagccacgggaaaaaaaagggggttaggggttacatcatttcttaattattggtgcttttataatgtattaggcacattttaatagttttaaagaaaaaattgcactttccacaaaatgacataaaatactaatttttgtaaaatttttacattttatatttaaagtttatttatttatttattatatttttacgataatttataaaaaatataaaaaataacaaaaatatcacataaaagtaataaaaaaatacaacatcaaagtaataacaaaacaacataaaaaataagttaattaagatttttacaccctgaatttgattaaatcatgccccttaaactcttaggctatgtttggtaggaaggatagagagtttaaaaaggaaggaaagaatagaggagtggagtaatcatttgttttgtttggtaaggtaagaaggaaagataataattttcaatacttttgtttggtattagaaggagaattaaaaagatggagagtgatttgttaataaaattactattttgttaataaatataaaataggtatgtatgagagagaaagtaaattgtcaattttcccacttttttttcaccctctctcctacaatcggtccaataaagggaggaaacaaattggtgggccctccaacacttctctccatcacttctctcctctccacttctctccatccatttatccatcctgccaaacacataaaaatataatccctcctctccacactccctccattgctctccctccctcctaaaaatcctcctgccaaacacactgttaaggttgttaaaaatgcttctgaactattgagattgctagatttaaattttttttttcttttcaattttagtaaaaaagtctaacatggatgaaattccagtggctatgatttagtaaatgtcaaagttcgaggggcatgatttagtagatttcaaagtttggggaggatggtttagtatataaacaatcactgaaatagtaaaattgaatgaaactagacaaaaatccttagatctaacaatctacatagttcatgataatttagttatgtgaa

SEQ ID NO: 79237 - DNA, 3065 bp, Cannabis sativa
tttgtaatggtgatgctctaacaaccatcttaatttttagtacaattatggtcaatgctttacgtcaatgcatgcatgtgcgggtccctatccgtacaacgtaaatggaatctcactgaaactctttttcactttcgtcgaagtatccaacttaaaattacagtctacaccttcttcctttataattccattaaaaccctaatcatcaccaacaataccatctctgcaactttactcattttcttcatctgatatatcatatttcatcattttaatctcacagacccaaaaaacaaaatgggaagctttgaaaaacagactacttcctactcagacacaaaatcatcttccactgatatcgaccatgatcagaccacctcagacgaagttgttcagaatcacaaccaagttcctcgtcctcctcctctcatggctccgatcgtttcctcttacaacgaccacattcgtcctcttctcgacgcagtagacaagctcagaacactcgctgttatggaagaaggagtacagcttccgaccatcgtggtcgtcggcgaccagtcttccggcaagtcatcagtgctcgagtccttagcacgtatcagcctgccacgtggacaaggaatctgcaccagagtcccactcgtggtcagattacagaaccacacagagccagaggcagagctttatttggagtacaaaaacagagtggttcacaccgacgaacagcacctcgccggagctataaccgccgctactgacgtcatagccggaaatggtaagggaatatctaaaacccctttgactctcgttgtgaaaaagaaaggggttcctgatttgaccatggttgaccttcctgggatcactagagttccagttcaaggtcagcctgagaatatttatgatgagattaaagatattataatggagtatattgagcctgaagctagtattatattgaatgtgttatctgcaactgttgactttcctacttgtgagtcaattagaatgtctcagatcgttgacaaaacaggagagaggactctggctgttgtgaccaaatctgataaatctccagaagggcttttggagaaggtaactgctgatgatgttaatattggacttggttatgtctgtgttaggaacagaattggtgatgaatcttatatggaagctagagatgaagaaactaagcttttcgaaactcatcctttgctttcgaaaatggataaatctattgtgggaattcctgttttggctcagaaacttatgaggattcaagccaagagtattgacagaaacttacctgacattgataagaaaatcaatgacaagttaaacaagagtctttccgagtttcgaaagcttcccaagtcgatttcttcaactgctgaagcattaacaactttcatgagaataactggttcagttaaggaatcactaaggaaaatccttctcagaggtgagtttcatgagtaccctggtgagaagaacatgcattgtacagctaggttggttgagatgttgaatagtttctctgatgagcttaatgaatgtcctgagagtgatcccaagagaaagtttttaatggaggaatttgagtgtttagaagaagctaaagagatttctttgcctaattttcttccaagaacagcttttttgtcacttcttcagtcaaaagtcaacggaatttcaaccattcctatagcttttgttgaaaaactatggaagtatatagaagaggttttgatctcagtgttaatgagtcatgttgaggattatcaccagcttcagatttcagctagaagagcaggactaaatctaattgagaaaatgaaagaaaagtcaatgaattgggttttggaagtaatagagatggaaaagctaacagattacacttgtaatcctgagtttatgagggattggaacaagttcatgtgtcaaaaggaagaattcatggttgaagtgaacaatcaatcgcgatttcggatggaattagaagggtttggaatgattgagtttgagaatttgaggcattttcctcatcttttggaccaagcttttgatttgaggatgagaattgtgtcttattggaaagttgttttgaggaggttggttgatttaatggctttaaatatgagattaagtcttgataagcttgttaataaggaattggaaatggagattgtgagtgagttaatggatcctcatgggaatggaattgagaaattgatggaggaagctcctaatgtggctgcaaagagagctaggcttactgctactgttaataagttgaaagattgtagagagattttggctaagattaaaggaagaattaatacaacttcttctgattataattagttaattaagctaattaagttgtttggtcatgtttgatgtgtgttattgttattatgtatatttagaactaagtgtttgtgttgtgtgtgtgcttttgttgtcttaattggcatgtttaatataataaattatcccttggtttttattgtttttttagaagaaaattgttatgaagaaacgtttgcggtgagactaaatatatatatgctttgtttatatatattctttgtaaaagtaattgatgagtgtttaaagtaataattaatcattaattagtaattgaattatataatatatgtatacacttgttatacctatatacacatattttcgatcatatttatcattttcaataaatctctcattttattaaacgatattaattagaataaactattctatcaatccctcattatttttaagaaataaaatcactacataaatgtgtatatacatgtacgctattttggttttcggcccaaatcacgatttttttttttttaattttcaatcttattcatgctattataaacatttttttgaatcaaaatatgattttatttaataactttcaacagaaacaatagaatttaaagcagatgagcatcgtgctcactgaaagtacaatctgacaaagaacaagaacctctcgcaacacaatgagcggccttattcgcagatcgtttaacaaaacataaagaaac

SEQ ID NO: 79238 - DNA, 2684 bp, Cannabis sativa
ataaataataatacttttaatactaaatatgtgttgtagcttagtggtaatttgattagtttaacaactaagaggttgagagttcaaaatagagcagagagttcaaaatagaacaggatcgacttatttttgataaataggttagttaggttttttgtataagctcaaattaaaactttattttttttttataataagtaagttaactactaatttatatgttatttttttcagcttgaattgtttttatattatagaaatttttaatgtatcgtatctttggatatatcatatcgtattgtgtttcagtttatttttttcgttttatctcgtatcaattttgagcatcgtgttggtcacgctcaagctcatatttcttcatgtcgggtcgtgctcgtgacagttttgtgtcgtgtcgaaaagcccgatcggcactagttgataatgctcctctataaagagtacgacatgtcgttgtgaaaataacaacaaacgacagctcctctatataataataacatatttagacttcccaatttttttgttaatttagtattttatgaggtaggagttgattggaaagaataacgttaaaacgacatcgtctaaatgctcagaaacgtaacaaacgacaggagcattcatcgtcacaagagctccgatctttggcagagatgtacaaatgtcagattcctcaaacaaatccacgcttccatgcttgtcaatggcttcaattcaaatgcttctgctcttagagaattcattttcgcctctgctgtaaccatttcatgcaccattgactatgcccaccaagtgtttgcttttattacccaaccagacacatttatgtggaacaccattattagaggctcagctaggagtggtaatccctttaatgctatttccttatataatcagatggaaagccaatattttaaacctgattgtttcacgtttccttatctcttcaaggcttgtactaagctttgttgggtaaagatgggttttgggattcatgggaaggttgtgaagttcgggtttgaatccaacaagtttgtgaggaatgcccttattcattttcatgcaaattgtggggatttgagtgttgcagctgcacttttcgatcaatctgaggagacgaagaaggatgttgtagcgtggtcggctttgactgcagggtatgctagacgaggcaatcttggtattgctagaaagctttttgatcgaatgcctgaaagagatttggtttcttggaatgtgatgattactgggtatgcaaagcaaggtgaaatggagtgtgcaaggaaacttttcgatgaggttcctagaagggatgttgtgacttggaatgcagtaattgcagggtatgtaagctgtggttctaacacgaaagcgttagagatgtttgaagaaatgagaaatgttggggaacagcctgatgaagtgacaatgctgagtctcttgtctgcttgtactggtcaaggagacttagaaattggccaaaagatacacagctcaattttggagaagggttcaagaaatttaagcattctactaggaaatgcactaattgatatgtatgcaaagtgtgggaatatccaaagggcacttgaagtttttgatgggatgatgaacaaagatgtttcaacttggaattcagctataggaggattggctttccatggccatgctgaggaatcaattactctgtttcaagacatgttgaggagtaaaattaagccaaatgaaatcacttttgttggtgttttggttgcttgtagccatgctgggaatgttgaagaaggtaagaggtatttcaatctcatgaaaagtgaatacaagattgagccgaatataaaacactatggctgtatggttgacattctaggccgtgctgggctgttaaatgaagcgtttgagtttgtagagacaatggctattgatcctaatgccattgtgtggaggacacttcttggagcttgtcgaattcatggcgatgttgagcttggacagcgagcgaacgagcaactgcttcgaatgaaaacgaatgagagcggtgattatgttcttctttctaacatatttgcttcacatggagagtggagtggggctgaaaaggtgaggaagtcgatggatgacaatggtgtgatgaaagaggctggctttagtctaattgaatccaataataacatgtttgttaaccaatttttgtttgattcaaaagttaacaaatctataaatatattagaaggcaaggatgttagttaagtcaattaaaacatttgtagatgtaacaaaatcgtttacttgagaagcaatttataaatatattagctttctcaacatgttgcagtggtttttgtatgtaaggctcaagctaatttgcaacaaatgaattaattaggataaatatcattttaaattatatgttttgtaaagtaattaattataccatttgttttgttaaatgataatttaaactttttattttttaaaatagtacaaaatagattttgaacttaattttctgtaaaaaattttttatcataactaacctaaagtcagtatctagcacaaacagatacaaaaaatgtaatgagtctgctaataatacattcaagtcaagttattaaaaagttttaatttgacgaaaattcaactgagtgtctattttgtactatttt

SEQ ID NO: 79239 - DNA, 1847 bp, Cannabis sativa
  modified_base (113)..(113): a, c, t, g, unknown or other
aggttatcttaaatagctataacgtacatgaatatgaaaaaaaattagattaaaaaaattttctggatgccgaaacatgtcaagggtgcatcggtacatcccttttaaagggntgcattgtagaatcacccaataacatctatgctaaaacaatatgactaaaaaaaaactatacttgtttctgtaactcaatccttaggagggattattgacagagtaataagtctgaatccctgttaatataagtgccgctgctgcagcaagaagagccaagatagtccaaggacttttacaatagtctctatagaactgagctttccaagcaacgatctttctttcgtagtgcttttgtatttctattttcacgctcaaataagcatcatagggcaccaagctgctgcctatggtgttgaacaattgtgctacttctgcgtcgctactaagatgatttcgaagtatatgtgctaatcttagatctttaacatcttgttcactatcgatgagtgaatctaatagcctcaaataagaagtcacagtgtagtttttcttattgttatcagggcacatttcataagcaaccaagttcagcaactttcgtgctgttgagtcatccacaatcaatggaggaaggttaagtttaccaaaaatatacaatggagaagagaaagatacagatttcaggccacgagaatagtcgggctttaacattatgccaacttctttaagatcttgaacgttgcgaaaagagtgtttgtagtacaaaagagtatctgtagtgtttccacctgtgctgctctcatgatcatattcaggctcatcctcattaaataagagctttgatctaagaaggtcaagaagatgagcaggcaatttatcatcttcaatgatgttctttttattaactagaaattctaaattggcaaagaaaatgtcttgtgcccaattgctacagaagttgtgtggtaccatgttgttcaaaaagataaaacgatagatgtttgtcgccaatcgaaccccttccttacttaacctcatcaatattatgagtactcgaaatggaatttgattttccaggagaaacaagtcatgttgaatctcaacaacttggccactgctaacctcaaactcttttatgtcaccattgacataactatctatgaattgtagtacaaaacacccatctaaaaacagtaacctggccaattccttatcatcatcattgaagaggggaggtattacattcaaatcgaagcactccttcagttgagagatgtttttgttgatttcttcaagtaaagttctcccatctcgaccgctttctttgataaatcttgccgttaatctatgcttgagatcatctgtatttttcaagctcttggtgaaagcatgaagaggaccaattgcaatctcctttggcttgtaatactctttccaattatttttcctcaacatcatttttggaactttttgtatcttgatatgtgatccgtcgtcacttttactagctttatttatttttcctccactttcaatatatttttcgatgaaatctaacaacttattatcaccatcatcatcacctctcagctcagcttgctggccaatggcaattaccacgtcctggttaccatccatggtctgcttaaggaagagagttatttgtcttctttcctgagaaaaagaggtatttgttgtagtttgaaaatgtacattattgtgcatacttagaaatatttattattaaaatttaataccaatcgacggttattactaaaattaatcttaatcacacaattaaatgtgatcatacctaaaaatatttcttattaaaatttaataccaatatt

SEQ ID NO: 79240 - DNA, 4486 bp, Cannabis sativa
aaaatgttattctttgacttgatgaaaaattatgtatagaaaattgatataatagttaaaatataataaaactttcaaataaaattaaacgtgtgttgtaggttggtctaacaaaaataaaaataaataaattacatccacataagagagaaggctttgccaagatttaaaaggtagtagtttgcaacaagttaatcatgacatgtcaatgctcttctacctttttttttctttgtcaaaaaaagagaattggtcacaataaataaatgcatgattcctacacaatttctgttcaaatctccagattagatttcatagagcataacttaactttccagaatataaactaccaaataaaacaaatgcaaacagagcacaaatataaaagatcgcaacggaagtaccgccaccatggtttttatttttatgaagatagtaaccgcttgatgcccgatttttggtctgaagtaagcctggaaggaaatttgatgttgaatttgattctcaagtttccctttttggtgggttctttaggaataggcattccttcccctttaaccacttcttcataagtgggactgacaatagagttgatcgggattgtcagacttcgaccgtcgagggtagtcagctgcactgtgtaacctgtaagagcttccaccagagatatcttctgagttagaacaagatcattgccatccctcttgaacattccatgaggcttttcgtcgatgatgaatacaagatctgctggtataaatcctcgttgttcgtttcctttctcgggaaaagttattttagttcctttcttccaaccaggcttgatctctattgttagaatttcctccactgtatttggtcttctgcacaaaacataacagaagtagcaaaagcaatgagaagtttgagccgggggtgctctagagaatcatcacttgcattttcaaaatgtattgtgtattttttgcataacttgtatgtgattatttgaaatcaataagcatgaaactgcaccgcaaaggatcaaaagaaaaaacacagaataccaaaaaaataatcatgatcagtatgaaaaagggcaacatcactaatcaattgcaacaattccactagatgaaaacttctagttacactaagtcatagccttgtattaataggggccatctcatgtgaaagggagacagatttagtctgaaagactcctacttttcggaaaaacaaaattctacaatcaccataatatttatctttctagaaggtatgtttcttggaattttttaaaagaaaaattagttgagcctagccattttctgtgttttcaaagaagaagaaatgcaattagcaatccacaagttagaccagtggtccaatgtatcaatagaaaactcttcaaagacaatctaatgcaatatgcattaatgaaccaaggaaaataatattatgaacaagtggtcatccatgaaacccataactcatagtttggtatactccttattatgactcggaaataaacttcagaacagactttaggaacttttttatgcccccacattgaacacatgagattggttccagcataatgaacaaatctttccactagtatctatcgatacatagttcaccaaaaaaaaaaaaagtgtgtaggtgaaaaattttctccaacaatcactttggctagcaaggaaaactataggggcattaaaataaaatattaataatgacaattaattagaaaccaagatgttattaaagggcagtagtatatgtatatcctatatgtaaataatgaatgcactatttttgtttctatttgggcctcaggccacttttcctctgatcctatctagtaagttacatggaaactaaagttgtggacaacacatgctttaccataacaaattttgatgtaagaagaattttgagatacattcatgttagcatgaattagtacagagagagagagagagagaaagaagaaatagagcaaacactaagatacctatgcaggaactggcaccaaaaacgtaagagagatttttcttcttgctccagaactggataaaattacgatatcaaaagctcacaaaggaaatttaagtttgactgagcatgaaaaattacaccacagagaaaactagttgacaaatgttgcatttgcaacaattggcatgttgtgagtcatctagtcatgtaattaggacagtcatcatcatgtatgttacccaaaaacataatggaaaacaataaagatctaacatatcttgaataaaaaggaaagtatgaaaagcaaagttattataactaggaataacattattgcgacgactgtaaattagatgttcaaacaatgacttactgtgttatgaagttttaaaatatcagtgtcaacaaggtctgaaactatcatacacacaaacatatttataaagggaaatatacaaaaaaattcacatcacagcttacatgccaatgctcagtaaaactcatcatcctacaaggaatacagccgtaactacaatgctaaaatatttgaataaaatgtagagatatcagtgaaaactattctagttttttatttttgttaatgttgcttttcaatgtttatcatgtaggtaactgtgtagtggcaacatgagataattattttttatctcatttctcttttcttggtattattccttatattagtacaaaggagtttcttttttaaaaagaaaaatgtgaaaaatgcttaagaatttggtaggattcatcaaggctaagataacaaaatcaaccagctaagatgttaagtaacagacaagtagtacgcttgtacaatgaatgtagatggaatctttatactacaaggcatgaacctatacacattgaagtgcaacgaattaccacagattttcatatgtatatatttttctttgattttaaactaggatgcccgcctatccctaaactttctggggaccggaaaactatagcaattgctatgtaggtacccagaagggactcaaatctcagactgtgggtaccatttgagctacccctcttgtgtgatccacctaaaagtattacaattctaaagctacaaattccaatggggcaaattaattaaaaagcgataactagtagtcaaagaacaacataactacaatgtcccactaagtaacatcgatgactaacagttaaggagcattaattcaaataataattaagtttgtttgcccatattttgtgaatttaaagttcttaattctcacttctagtatttaaggctaatgatcaagctttaagattcatgcaaatctgaaatctaggattatcacactcatccaagactcaaaattgataaatagtaaatatcaactcaatgggaaaagggtagaaatcttacccagtggaatctgtaacatccctagaaatcttcatcttctttgtggttcccttatacaaatcctccaaagtacaagacaatgttcgctctatagcctgagctttcctcggagcattcatggaggcctccccacctccacccctaaaagatgcgaaaatatcttcaccaaacatactcctcgagaaagccggtccaccaccaccggccctagacccacccatatcccccattcccccaaaaccagaaaaaccgaagaactccgagaatatatcgtcgggactacgagtattgaaccggaacatcgtcggaccaccctcttgtccgctcgaaaaccctccggcacccggcggtggaacttgtcccttcaaaccctcctcaccgtactgatcgtacactgctcgcttctgcggatcacttagaaccttgaatccaaacaaaagcagccaatcacaaattattgaaaacaaagaaaaaagaaagtaaattaagccgaaaataaaacctcgatattgaaatttcagattaaatctcagctcgaaatctcacatcgtaagcctcagatatttgcttgaatttagcctcagcttctttcttattggaaggatttttatcagggtgccacttcatggcgagctttctataagctttcttcaagtcatcgtctttagcgctcctatcaacctgaagaaccttgtagtaatcaacacccatagctttctcctgtttccctctctatcttcgaagctttctttctatctctctgtgtgtcttcgaagctttcttcaatggcgttttgtttgggtgatgctgtgattctttctatgccggagtttggtttcttacgagaaaagaactggtggtctcatgtgactgatgactcatctacaacaatgagaagtttccactgggccagggcttttccttaatgggctttcaattgggcccaataatttcaattctgtacgacaatacagacagatcttgtcggcccaataatgaattcgggagttttaacggattttttttttggaattatttcgcaaatacacaaaaataaaaaaaaattaaaaaaatacagtttcacggaattttaaatat

SEQ ID NO: 79241 - DNA, 2114 bp, Cannabis sativa
aaaaaattataggaaacccctatggagtcgtttattttataaaaaccgactccataaggtccctatggcgacggttatttcatacccctttagcgtcactcggattaacgtcagtagtgaatttttctaaaaccgacgctgaaagatcttaaaaactgcctctaaagcccatatttgtagtagtgttgctttatttttcttcaatactacacctgtaaaatattaacaacaaaaagtatcaaattacataaaacacaactaaaactatttaaatacactttaaaaaactagctaaacatagtactagtaaagttctaacaagtatgccagtgaattttgtttaatggaacattagaagcatgtactgtagagccatctttaggtagaatttgttgttgtagataataaaggttgtcaattcaaactagttgtctcaaattcaatcctcaaagtatgagaagggccctgaatataacaagtgctagaggtaaaaaaatatgaaattgtgactagtatcttgtgatctaaaagggcactaatagataataaattgaattgaaactgtggcataaataaaattaatattggtgagaacaatgtgtgagttgagtatatatgacagtgccaagttgcgatgtgttagaacaggtttagctagccagtccaaaaccgggatggtctgcagtgcttaggcaaatagggctattgcacatcttcgtgagcgcaaaaatagaacaggaggatcgtttcttggagggtggaggagccatggaagcttcgatccaccactagagtatcttgattagtatttatataaagtgtttagctaacaaagccaagtgattggtcaactagcatagcatcttaactaagttaataaaattatgtgatgagctgctgcaaaacctaagctctattgcctctaatctaatcctacaagctaactgtatatccttaggcatgatgggaactccacttagcgtacgtgcatctcacaaagattggtgtattcgaagagacctaccaattaagtaagcttctggagtattaagattggcagatcggtcaatcatgatggagctcgtcaggatatttaattaaaaaaaaaaaaagttacatttaccatatggtttcgtttcatacccaaatctgaattacccgtcatattgcagaaattaataaagaaaaagtgttgaaaagaaaaatgatttaaatgaaaaccagagcttgtacgtggagtctgttttgagactccactggagtattctcctattactttataatatccttaagcacatatttatgaaatataaattagctagtcatgtcgaattaatattgtttgttttggatatgaggagcaaataactaaatacatcatcatcaatcatgtaagtggatttaatcagataaaacttgtctgctttatattacttttggagtaatattatatattaatatcaatcaatcagtaactcgctgtctgtctaccaaactaaagcagctgtaaactagctagccaaggcatacaaacgacttcacaagaattccattattatcatatatatccctttctttacacatgtccttgtccatcaatttcactacactttcttggtcaacacaacttcatcttagctatatgatatatcctatctcatctctctcaatttttccaataaatatctaattataattctactcattattgccattcaacaaaaccttacataccaagtaattactcaatctattgatcatttaccttgaaaaaataaaaagaaaaaaaaaactagtaatcatttttgatttttctccagagaacgttaccaagacctttcattttcttttttttttattattattattaattagttggaacacccatcctagctatagatcaaaacatccatagtcaaccacgtggacgtggcagcctactcgtttgaaattaagcatctagtggcactggcaaaaccatgtgttaaaaatatacaagatcatctccaattattctttaaagatgctctagatctccacgtcatccaaaatataatattttattttacttttcttccacatcatttttgacacctttacttttaaaaacactc

SEQ ID NO: 79242 - DNA, 1963 bp, Cannabis sativa
tgaagtgattgcctacatgttcatcatcattgaatcataattaagcagcatcaaaatcgcaaagtgaagtagccatattttatgagtagaatggttacttattttagtgtaatattttctggtccaataagtgatatattacattttgtgaaatgacaaattttatcgtaattgccaaaaggtatttcagacacaggaggacagaggtctatgattttagagcaataacttgactagatgagacagcatgatccgtttgacgttttgggtcaatagtttgactctgtaaataaattaattgactagtattcccatatcctagtacaaaaatatacatacaaatataaaagtacatatatatatatggcttcttcacacctcttatcttcatcacttcatgcaattgccctacataagaaaacaatttcacagcacaaaacgatccaaaaacaaaagctaatatattcatacaaaaatgcattgaagaaaaacctgttagcaaagacttgtagcttactccattatagtaaacataataaacttactcctttagcttttgcagcttcatctgaagtttcacacctaaatgtccatgaaaattttagtactaactacgaccaaattgtcgggtatcctacagaacttaatccacaccgtcctcatttaacaagcaatcttcatattacaagaaaaaatgataaattggaaaacatagaacactagtatttcatactctaaaattttgatacttagattattgacctttaagcctaaagctgagcaaaacatcgattcctgcaattcagatgatataacgattctgctacagcagcgtaagaggttaaagtatcaacaatcaactcgttataaataccatgaaaaagaattcatactacacagctgaaataagaaaagcaactgcaaacatttactttagaattcaaaacacctactggaggttgggagcaacatggatttgtatcttaaggaaagttgagtcgaaaaaaaataaaataaaaacaagcaggagtgagaggccttaggatttaggaaacacaagatactaagtttggcaaatttggtttaatggacaagcaaaattttcttggtggaaaaaaaatcttcacatgtatttggtccattaaaatagaagcgtcaaggtgggccatgagtattgtcaaacgctggttcatctggtcttccagtttaggcagaaggcttcatcaaaagaggcagtaggctggcttcggggcttcgtatatctcaagctgttttgttgggatgggaaaggcaaaaagggaaaacaagtgcatcagaactctattcacagggagattggataggttatgaatgatatcaaactgtcacatacaaatctatggctggcccagaggaaaatgccagtaaaagtaacagagaatagaaaaaggatcacgggaaacagtagtctacctgcctgcaggtaaccatcaacaaattctagtaaccatagtttctccgtcgagaaacggggttctggctagataacctggtatcagaaggttaaatcagggtcgaggcatctcaaaacattaataagcaagataatgcactaacgatggagtgttcttttcttcttcctatggtaaattgagaatcgagtgttctttttcttatttctagtgaaaaaatgagaatagcacataaagtcattttagaaagaaggaaaaaaaaaataggctcctcactcaaccttacaaaattttgagtaacagaaaactatagcaattactattttcagaatcaatggttaaccaaatgtttaaaacacaacttcaagcaaggaagaaaaatcaacattaattggataaaatccagtaaatcacataagcttaataaggaaaaatcagagatatataagatcaataaataaagtatcaaccgagaaaaactaaaaaacctcttacccagaactaccaggtcg

SEQ ID NO: 79243 - DNA, 5078 bp, Cannabis sativa
  modified_base (616)..(620): a, c, t, g, unknown or other
  modified_base (4827)..(4828): a, c, t, g, unknown or other
attattttaagaaattcatgtttaaggtgttagattatagaattataatcaacatacttgttagtaaatctaaattctagtaaaacaacttccaacacatactcgtactattaaaaaaaaaatttagtaaaataataattcatactattacaagttaattattactaaggggtttgtttcctaatttttccaataaaactaagtaactattaactagtcttacaaattagggatgggcatccaattcaatccaacatttttcttttcgtctgatacaatccaatcagtaattagagttagaaaatcatcatccgatccgatccaattaaaccgcaaaatccaagccaatccaattagtaattggatcagattaattttttaattgaatatcgaattgaacctctaatttttagtactaagttaaaattataaagaaaaatacgtaaaaattaaatattaccctttaattaaatttaatactctataaaaatattattgttatagtgcaatgcatctaaaagtttaaaataactaaaacaacaacgtaactaattataatgaaatagaacaaaacatcataaaaataaatatagtaatttgcagcataaatacttannnnnaactctcagttgcaaataaatacttaagtttaatttttgacggtaatattaccaaaattatatttttaaaactttgtaagtttagcggcaataatacctaaattatattttaaaaactttgtaggtaccttactgttaaatattaagtcattatattcacgtgccattttcttattggtatatttaaactaatttgtttaaataataaaaatttaatgacttgaaccaataaggaattgccacatggcaatttatttaaccaaataaatacagaaatttcaaaattataacttaaatattattaccgtaaaaaattaaacttaagtaatattaattttgattcttcgccactgacggaggtatggagtaccaactgccaacagacttagcattagtcaccaatatcgttgtatacttgtatgtaatgttatcagtattctttataaacctaatccggttaaacaatcatcaaaaaaacaaaaataaacctagtcagataatcagctgcaaattataagatcctttatatcacaaacagtacaacacacccctaacttcatcatctgaaatgagataacaatataataatgataatatcaaaggaaggcaagttaccgttatataatatatggaggaagataccacaaaaataacctcattgttatttaaatataaattggccaaaaaataaaaaccaaacagtggggtaagaggcgatgaaaggtcaaaatgtaagaaaaaaagaaagaacttcagaaaaccaccaacagcgagagcaatgagtttgactacacgattgagattgctaataggaaatagttaatatggccaccctcctctataacctgaaggcaatttgacaatttatagcaaccacttccactacataccactttacataaagctgagcaacaaaagagagaccgccagcatcaaaatgaaaacatcacttgccgtcaccttcatcttcatcgtcatcatcttctagttggtcatcatcttcgtcatcatcctcagattcgttgtcatcctttccctgccaacagtataaattttcagaaagaaaatggagattaacaacacctataagttgcaaacaggatggagattatattcatttagaaaatgtgtccagtgtgaaaatggcatctggtttacagttggacagaatcccatttacacaattaggagtacaagactagttacactacaaacaaaaaagtcaattttatttacctctccatcagcttcttcatcaaaatcttcctcatcagggtcctgagacagaaaggcaatcaattaatgttagaaaatttggaaggtaacataggctgggcactaaaaaagggtttaaatggtagctacattgttgaaatatgtaagggggttcggccacaaatcctctttaattatatcggcaatctgcaaagcagcaaaattgagctaaagattagcacagggttcaagaacataatttgaaatactacattagcatgaacattgttactgcaaatagaactaacctcatcatggatttcctctacgtcatctttctgttgagtatcagtgaaccaactaaagaagctgaatcaaaaaggcaaaacaggaaatcataagcttttaaatcatatgaaattagtctggtacatgatgcatttaatcagacgtaactgaaaattgtcataattatttaaaaatagaatatatactagagcttattattgtaatcgatagacaagcaaaatagaaaattttaagtaggcatttttcttaaattactcctacttgctttcagcgtaattcttaaaacttaaaaatgaatgcttaacctaatggaccatgctgaccaacaacatgcagaagctgactatgaggcaaccatgtattatttgaaatgattacagtaatgtcatttaaaactgtcagtgaagaggaaacattcaagtgaaaacaaacttatcacaattgtaagaaaagcttaatttacagtatcgacgaataattcaattactagtgaaggtgccgtagcttgcggaaaaagaattactgtgtaaactcatgtttatcacaaataaactaacctttcttcagttggaggcctcttgtttcctttcttctcatggttaactccattaggtattcccttaagaaattggtattcaattagttagttacaataccaacaaataaaatgaaagttctaatgacattaagtcactgatagaaaggaccataccattccctctttccactttattgatgtagcagtaatttttgttccttcatcttggaatgtaaaagtcttggtaatctttgtatcctcaaaataaggattggggctgaagttctgtaaaataatggagacaacaccatggtcacttagtataaaacagagttcagtaacatcataaaatattgtgacccaaaatggattctaagctaagcagagaagataaggtaaactcacaaatgagattgagtaacccgatttcacatctttgaagtcctcaacctctagtgaagttaaatgtttgaaaatctggagaagaaaccacgagcacatgtatattagtgtataagaccataataaaaaaattatttgaaatgctttacagagcctttctagcgaattcattactttgtcttatcttgtaattgataaactgtattaattcttataattgataagctgtattaaagccataggaattgacaatatacattaaacaatattcaaataaactaagcaacagcagtaataacagagttctgggccgcagcacaaataaataaaaccccaaccttttgatcttcctcactcaaaagctcgctaagagcagggtgactcagaaactgaaaagtagaagaaaaaaataattagtttaaaaaattcattaactagattatagaagacatataatctctttccaaatgttagaggagaaacccatatcacttacagcagttaaccaaaaatcaggaatagattttataatatcattccgcttatcatagactggcttgcgtatctcattgtacttctgctccacctccaagaccttatcactggcctcctcattgatctaggatattcagataaacaatgaaaactttaatacatttctccaagcagcttattactgcagttctatgtgctagtagcaataactgatcatacttacaactttcaaatgcaatgtggaacaaaataagcagggcacttaacccaaaaaaataaatattacaaaaataacagccacaaacccaaactttccttgtctatctaaaataggaggatagagaaaacaatagcttaaactatatatgtgtgtgtgtgcataaatacataggacaaaacacaatcctgacccagaacatcatatttctaattgaattcccgcatgtctaaggagagttatgttaatgatccaaacccaataattctaatcagcaaaagaagcgagtcaatgataatatacacatatacagagatataacatatgtatacggctcaatttagcttaattttccaaataatcaccgaaaacagagtaaaataataataatgaaaaaaagactatctcttcaattttcgggttgtgaattaaaacttttagaatgtatcggttcaagggcagaggacattttaccttttcaagctcatcttgcatctcctgcaacttctcgattgaaaggacgagcttctcatcgatgacatcggaattttggtcgtcgcttttctcagcgagtttcggctttttgcctttgtcttctacaatcttcatctctggcaaaaaccctagttcaccttctgaagctcggctaaaaccctagcgcttgggatttttctctctctcttcgcacttggtgtgggggaagtgagagaaagtgtgagtcagtgaaagatagaacaaaagagttagggttttggaaggttaagatctgctgtaatccagtacaagttaactgcttttattctaccaatcaaaataggaccattagttggagtttagcagtgtaaatggagatcttatccgattatgaccggatctgatccgatccaaatctattgatgattcgacccgctctgttccattaggttattttttcgggtcggatttgacatgctccgaatgttcaaatttgttcctttttttttgctacagatttaaatttagagaattatcctatatactatttttttaannttttttttttaaatttacggcttgagtttctaaagtggttgcagcgctacttgtaataggggtttctatacgattttttgttgcaatttttgttccactgggttattttttcgggtcggatttgacatgcttcgaatgttcaaatctgctttttttttttccagagatttaaatttggggaattatcctatatactatttttttttaactttttttttttttcaaatttccggttttggtttctaaagtg

SEQ ID NO: 79244 - DNA, 2197 bp, Cannabis sativa
ttttagtttgtgcttggttcaaaatgtttcatttcattgtaaagtcactaattgccagcatatgaaaagcggtctccattggatgtgtgctgctggggtaattctgaagttgcagtatcaattggatttttgctacctaagtaatgctgaagttgctgtattcattcctgatactagttttcctctctgaggcagattttcttggagggaagaaacttcaattaccatcgttccgtgactgtttgaaagagcgagggactgtacaaatgttaactgtgagccgggaggctgcactggaagttcaggttgtttagtaatatatatatatatatatgtataaaatgagtacatatacatctgtggtaatcatatcttcgttgttatattaccttttttttttcttcccatttattttccattgttttcagatgcgtaatgaatgactatgttttgaccttgatgacttattcaagtatttaacataatcaaaccgtcaagaattctactttctcatgactctgcccttatttaacaatactatgttattgtttggaaaaactatcaacttagagtgccgctataatcttttatatcctattttattttgtaaacatctcttccccttttgtggaccttagcttatcaaatatttatatttaaatcgtaaaaacgaaattcccaacttaactgctgctttcttagccaatttttacttttggaacacactgcttttgtctacaaaggattgcttttgctccttttttttgggtcgaatcttcgcactatactactctcttgctgaatcttcacattctcatctaatgatctagaaagtagtttattgcaattcttgtagtcagtattctaatttattcaaatactttgcagtcacttgtcaaggtaattgaatctagcattggaagcacgctatgccactcgttgattttctttcaggatctgctggtttctacatcactttcttctgtatggttcaattttccttacctatttgatcattattcttttatgttttatatcattttctattgcatattagtcagaaatttagggagggagatgttattgaactgaacttgcttgggatatgaccttcaatagtactgagtgttacttttgtttttccttcgcaggaagatacagtaaacttatttacgtatgctgttttaaggatgaccccacgtgctttatccgctggagtaagttcatggtcctatttagggaagggaacttcacctcacctgtccagtgcttttatgatggcccacactggtccttttccagaacaagtatatgtctctcataacaccactccggctcctgcaggagataatggccatagggttatacggcccttacgtcatgacaagtggtcaaaagggaaggacggttttcttgttactgatatatggggcatggaggctggcagtacaactcctgctactccaacagtattgcttcatcaaacagaggagagaatgtatttatgttcacatcagcataaaaaccttactgttatgtttcttcttcccgtgtcttccatcccaaatggagagcaaggtatttcagtggtgaagcagcaacttctcgaaaatgttagttctctatgcttatctgggaagatactgctgttgtttgaactgcttattttactaattttgctcattctccaatgatgccattttttccctttacaaattaaatagagatcaatagatgataggatccatatgaatgacaccttcaaataaaaggtggcaaaaattgtagagttaaacttatacttattaatgcttttgaaaacaattccaaaacagtataaaggtttagaatccatttagagtgtagccttttactactaattagagttttaattcatacaaggacataaaactagaaagggtaatgcttttttagtagttattttcatataatgacttagttggagcaaacaggtcttctgacacccatcttagtatcttaagtatatattgtgcagcttaatgaactacaatcttattgacacactgcatctttctgctactcagtttacgccaacttctttagttgtttgtttattgttagaatagaagtattcaacctttatgctggatactgattgaatttcaatttatagtcattacttatgtaatgttagttaccttcaagttttaaagta

SEQ ID NO: 79245 - DNA, 2455 bp, Cannabis sativa
  modified_base (1836)..(1836): a, c, t, g, unknown or other
gttgagtcaaagggatagaaattgagttgaagcattggatcaattaaagcttgtaagtaatccttatacttgttgtaattgttttgtgcataatacaaatttactgattttccaataaaaagaataaataaatatagtgaaacatttaaatttagctgaaacttttttattaaaaagctattgagtgggagagagagagagagaaaatgtgatacatggttgtaactttagatgacagctggatatataatatttgtcgtgcctaaaacgtgtgcacttgtactattgtacatacatatttccatcaatttaattcaatgacaatgcatatatttccatgtttattattaatgttacgcatatattacttttcgatatatcattttcagcaatggtttgctagtatatagtccaaaaccctagccagtgcatacccaattggcaattctacaataaggtcacactactactgattttgtatacttcctttatatgaatttttggctacggggtatcacccgcgacatccccacgcattaactttttcatcatttaagtactcataaatctaacatatgggtcctcaaaatccccactactactactattcacattttaatttcatctctatatatacatatcagttacctatatatacaaacaattattctcatatatgtctgaccaaactaataacaatccaagtaaaccaatattattagaccaaaccaatcttgacttcccttcttcttcttctagtactactacaactccaattcaaactacacaacattattctacttctacgtcaccatcgtcttacacgtgtgaaacccttataagccctaataaccaggccacgtcatcatcaatggcttcaactagcagcagaagtagtagtaaacaccctaggtatagagggattcgctgtcggagtgggaaatgggtttcggagatccgagaaccacgtacgccaacccggatatggctcgggactttcgccaccccagagatggcggcggccgcctacgacgtggcagctcatgccctaaaaggagctgaggcagtccttaattttcccaactcaatccgtgagtacccggtcccggcttcagcctcagccggggacattcgcagcgcggctgcagccgctgcagcatttaagaaggcggagcttacagcattggacgccagacgccagcaaacgacttcgtttcgtgataatagtggtaataacgaaacgacgtcgtttgagcattatcattattatgatgagtttatggatgaggatgcattgttcggtatgccgaatctgttggtggaaatggcggagggaatgttgctttcccctccgcgaatgagctcgccgttgtctgaggagtctcccggtagctcagacggaggagacagcttgtggggatatttttagtgatatatacatatatagtggctaaaatgctatatttatagttcatcctaatttcatatatatactgacaaaattgaagtaaaaattagagtatgagaaattggagcatgtgtgagtcaattagtattaaatatatatatatggaacgcatattcatatatatatatatatatatgaaactgagagtagatgatttgatgattaatagtatgaaataaaattcaaatatgggaattagggttagcatgaccacagcaggacgtatgtataaacatacataagtttatatataagttatgaaaaattatgaagaagtacatgtagtttacatggtgtgatgaaactaattagtcactcaaataggtttttcttttcggattaaaattattagagagagagagagaganagagagagagagagagaaaacattgtgaggctttttcaattagtgtatgggtggtttattattatttcggtggatttactttttgctgatcttatagaattaagtgcatgcatactactgttttgtagattttgtttggtttgtattttctttctcttatttttaagtttctgtgtttaatttttttttccgatatcatataataagatattgtttcccttgatgttcaaaaagttgagtaattatatgaaatgggtcttttttgcaaccttgacttttgtctcccttgtcctcctttatgagacttctttttcacacatatgcagaaattcaaatggttttgtttattcttcttatattacttttcaagtttttctttcttttgttctatttgtacatgactatataaatgtattatttattattatgaaaaataaagtagtagtattataaaatgcagttatatgtgtaacaaaaggggagggaaaaaagaaagagaaatgcctcttttaagtatgtaataatgtcattcaatattaacatatatatatatatatttatataagggcaatgaaattcaacatttttgttttcctgttttccaaaaaaaaaaaaaaaa

SEQ ID NO: 79246 - DNA, 2056 bp, Cannabis sativa
ccatagccaattgttggtggattctctgggttgcatggacagaatcccaccacacgtaatcatccacgtcggggcataactggtattctgtgatgttctttctgcctccgcagctatagatgcctccgtacggtccagttccacaacaagcctttactccgtccttaaaaccttcatagtcaaacattcaatcatcattaccacaatttcatattttcatcatttcatctatcatatatatcatatcatatatacacccctaaaatggaaacggtttcacccaccatatcatgttttaatattaataatattttgttggccaagtaattttttttatataagtttggcgatttaccatttgaaatttattttaagtactaaaaattattaataatttttttaaaatagaatgtttaatttccagtcagtcaacccaatttatagcaagactttgcatactaaatctcgataacaaaaatgttacttaaaataatactaaaacaaatttcacttataattcccacgtattaaaaggtgcagttatataatatataatacactaaataataccgtgtttggtgggatggttgattctatcatataaccaatcatagaaattggagttgctatacttaaaccctttaagcaagaattcaagacttgtgagcacagatctaagggcattgttatgagctgaagcaagagcagaagcctcttccaaacaaactccttgtccttcacttgcttttgggcttagagctctaaatattggtaagcacccaagaggacaaaggctcagaaacccaaatttcctacctcctttctcgtacaacacctaaaccaaatccaaacagagaaaacataaaacgacatcgaaattcatgtcgttggttgttggactatggaaacgacaatatattatacctgcactgcctgagtcaagttcccaatgaccatacccacgtattgctcagggttatatagttctcgtgtctttggattacctaaataacctgccatgtagtcattacttccaatactaatgaaataaactgcttctgttatcactttttgtgctgactcttctcccaatttctcaaccaaccacttttccaccttttcaaaacttttcagctgggttggaagatcaataacctttacacaaatacaaaattattattaacaaatatatactacacctcaaatttttctatctctacaggaaacattaaaaatattgaaatttaccaatccttgattggtttctgggagtacaccagctccaccagaggcgaaattaacaccgttgatgtagtcagcagagggctgtaaaaatggaggaataatgggtagatttgcatattcagctgcataaaaatatataaaattacatcaaatttttttggctataaaatcaaaataatatgtatcatatatatttggatgtatatgaaattgtttacactgcacaaaccgtccatactattagtgactgatttagaatatttactttgtgagagcttatttatcattaaaagaaatatttatgcttatattataaacacttttattagatttatctagttttgttggaaattttcttatgattttgatctataattattaaattaaaaaaattacatttaatttttaaaagacaatatttttgttagtgagaactatagccccacatgaatacaagtaagtctatctctacgtaccatactaaactgcatataaaatgcggtttaaaattctttgcagtgtgattgtaatttaaatttttataccaagcagtgtgttgcggtttacagttttagatttaataattaattacggtttaaaatacgtaaacaacactatatattataaaattattactaattttttacaataatatcgtatttttttttcatgtaagaataattatatataatatataggaataattatataaggcaccatttttttgtaatatttacatttttacgttcaaaaaatgttttttttacatttttacggttttccaaaaattaacacgaaaacaacataaaat

SEQ ID NO: 79247 - DNA, 8088 bp, Cannabis sativa
  modified_base (8052)..(8063): a, c, t, g, unknown or other
gaaaatttacctggtttctgtgcttcttactggcttgggattggttttccttgtttccggtcctccggggccattgggaatgccggtggccttaggaggaggatttaattgccaaagcatgtctggctctgaagaatcactagttgcagcctctaactgatcatcagaatcatcagtgatggccatctcatatcgattactcctctgtgaatcataatcttggctctcctttttgtttccattaatcttattattcaattgttgttctggataaatctttgaagggtctgggaggtagttctgaccaaacatctctgtcaactgtgaactgtctacatcccaacattccacaagattttcctctctatttatgatgtcttgcttgttcaccataatcttatcaacccaatcactgttaactgattccttatcatcttcttttccatttccatcaggagtactctcaacagatggccaagaagatgaatgcatcagcacatcttgaagatccaaacttcgccttttcaatttcgatgcagaattctgaagatacatgaagaacatatatgagcaaattttttgataaactatgcaatgtgggaaagatgaaagtccagtgcagattagcttggcttaaaatttgattaccaataactgtatttggttttggtacatacctcaacgttaccaacatcctctattggttgcctacgccccccggaaaactctttgagacttttccaacttgggtgtgaaggggatgaccctgcagatttcaatcttgatctatctgggctggaagaacgagaatgtggaccgcgctctccctccttcctcactagagctgctttaagattagcaatctgtaaccaaaagagaaaacaaaaaattgaaataagcatgtacatgacacatggtgataagaaaatatcatcagaaaagactataaaatgccttgtttaacctggtctttaagctctttcacgtctgaactatctttgttagctttagcagcaccaagttcaacagttgaaactcgttcagcaaatttcagggtactaattgtttccccaacagcttcggcctcggggctaatgtgaacaaacatgagtgtctttgcctgtcctcctaaaaattcgaaggatgatcacaacatggggttgtagaggagattaaattgggaaataggaattaaaaaatcaaaggtaatctagagtatataggatacatattcttaccaagtgagtcttggagcagttgtgtgagtttactgtttctataaggaacatgggaattcttttgagcaagagaagagatcacatctcctaaggcagaaagagatttgttgatatgttgggcctcctttaatctatctccagtcacctccgatttgtcaactctttcacttcctgcaaggtcaaccaaatgcatgcaaccacgtagaacagtaccagatgtgaggtcccttccttgaacatgaacagtcaagcagctgcaaagaaaataacattactatttttggtatagtcacaaataaatgtgatgagagttgccgaaagacaatcacccaattatacctatgagatctgctactacgatcattcatggctgtagcactcactgccctattcttgtgtccaagattcatcaaatacaagacatcagatgttgttgatacaggtacaaggtttgcatctggtacattaattccattttgtgaactattccgaatttctaatgtatattggagttaaagaaagatcacatatgaatgtatgtatgaatatcaatgaattatatgtgagaatacataaaacagtaagttgtgcatataaaggatatcttttgttaacaccatctgtaataagtagatcccgaacttgttcgttgtagatttcaagcatctgaacagaaatttcatagaaaaaagtgtctttcctctgttctgagagaagaaataggtcatttagtgccctgtagtttacaccttgggtttcctgtgtgagctcttttggtccagtctagattggaaaaagagacacagtccataaatttagagtaacataaagtgaaccaagcaatttacattgtatggatgcagtagtggcatgtctaatttcctccttaccatagtaaaagtttttccagatccagtttggccataagcaaatatgcatacattgtaaccatcaagaacagaacgtataagaggtctagtgtctgcaaataccgcctctgaagggaaaaagaagcagaaattgaataggtgatgaccaatatgagaataatgattggaactatataaagactaatcaaccaaacaacctaccttggcttgcacaaggaccaaaaaccttgttaaaagtgaatgatttacgtccctccttgcaatactttgcaggagtaagaactgtgatattgccatcatcaatgtgatcgattgtactcagacgacttgattctccaggcaagaagggtctgactcggcagtacactcttatatttcctgagcaaacacaaaattaagaactgttgaatctttctgtaaaagtggatgaaggccagtaaagaaaagaacaagaaaaaagccactgattttacctctcaaatcttgtacttgattgtatagcttgcgattctcttcaaggactctctgataacctgaagcagcataagcaagactacgcaggtgcttacctatcaaaacagaaaaacagctctgagatggacaattccactttacttagctcatacaaactcaaagataattttttttactgtaattagcacctaagttttcgaactcctctttgtgcttcatttgtagaaattgcattccagcttttgtatggtgaagagtatgtttcaaatcctacaacaaatttacaccaatggcaatttaaaatttatggtcaaatagagaactttcatagcagtaatactataatatcagcatattacctgaatatctctctgttgtttctccagtagcatatgctgctttaaaaactggttatcaggagcttcttcatggttatacatttgagtacaagcttcctctttggtagggctggcatctttttcttccatcttcattcacaagaaaaagaaaatgttaaacctcttatgcagacagaaagcagtttataatcataattgatttgcatgacaaatatatacatgtatagttatatgttgggataaattacacaaagctctttgtaatgaacctatgcttatacctctatatcatctgaagcagggtctgcgcgagagttttcggtgccagataaagccatgtctttctgaattgattttgtctggtacatggcataaaaagatgaaagtgttcagaccttaaccttcaagacaaatgaggctcaaaggtcacaacaaggaacaaaagtagtgtgagaaagcaacttacaagttcactttgagttgctaaccgacgctcaaattcctccacgactttaccaagcatagattctataatctgttacaagcaaaataatagttatttctccaacaagaaacctcagaccaaaatgaacaagtccagagctttaatgatagaagacttaaaaatgacattctgggtaaactttatagttgcatttatagtatagggtaagtctcttggtggtagcaaaaaaacattctcaagaaacttctatgatgactattaaacttgtgaaaaaacaatcaacataaaaggtgcaaaaattcttactattggaatctcttcctgcctcttatctgaaagaacttcacggactaacgcattcaaggaacgggagataccctgacaatcataatgcaaaaaattatgatcttgtcaatgataaattctgcattaaacttttgaaaccacaaagttttaactaactgtttcactgatgtcatgaccaatatctccattagaagattgattactggaaatactatctacagacttctcttccccatgacaaggttctccaaacaagaattcccaaatggttctgaattcttcctcataaagggttttccaaaggcaggtggtttagtatttccaccaaatttccatgaaccaatcgaacctccttgtttccactcactatatgattttaatgctagaacacagtttacaactcttgctgacattcctccctgtaaataaatttcaggatatgagaaaaatgtaataggacacaacaaagagtgcatgaaaacatgttcataattagcaaaagccatggatatcaacctgctcaagatcagaggcttcaaaagttggaagccccatttcctccacagctacaaggaagtttctaacattttcaaaatactgaaaggcagaaagtgctgccccatcaggaatgattactgaatcagaagggccttctacaacctaaagcacaaacaggaaacttacaattaccagaaaagtattgatttaaagtcacataaacagaatggaacaaagtcagacacagaaagaataccttggttacagctccaggattgaccttgttaataacattgcagagaacaattccacttcttaaaccaagtctgaattcttcttcagaaggctcagctggcaaatctttacccccaacaaccccaattgttcttctcaaccatccagctgcttcataccttctcaatgctgtaaaaaataaaaatcatgacaccaaattatgttaccattctctgattctctatatgatcaatacccaatccaataaaccaataaaaaaaaaagtctcaaaatatagatttcctctaaaccacatttctttatggatcaaagtttcgatcatatagagaacatctcatctcacatttcattaagaaaatctaaataataaaacgattattaaaaaggaaaaaaagacgtacaagcttcttcagccttcctggaagcgaagtcaatgggggttgtacgagaaccatgctgatgaagaacatcttcaactatggaagctacagagaagggcaatacttgctctgttgccatttttacaatcaatcaccccacaaaaaaacccaaacccactctgtcaagtttttcaaattaatcaaaaaaacaaaaactcaagcacaaaaaaataaaatgaatgaatgaatcaaagtaaaaagttttgatgcaaattctgtttgtttggtttgaaagaataaaaaaaaaagtgttggaatcgtaacagaggaaaatgaaggagattgaagataaagattctagggttttaaatacaggaggagattggaaatgggaaacagaaaaaatttgatcttgtttgaaaatgttgtttgtaaatatgaagaaagattttgaagaagaagaaaatggccgaagctggttccgaccctctcccgagtcttttgggctttttaacggtttatatttcgcgggtgccatcaaatttaattaattaataaaaataataataataactattaaagaaacaattgctgttttgttgatttttttagctgaaaaacaaaataagaataataaaaaaaatcttatttttaatagggttaatattattaggttagtttagggtaggtattattagtgtttactgtttagcagtcttcttcggtgtgatattattattggtgtaattaaatacataacttaaaaaaatagcttttacgcaatatcgctaaccaatcatggggtgtcacctataaaaggtgttgggtaccattgatacaaattctttttatttgttttggcatacgaaagagcgtttttttttcacgatcgcgtatgttttaatcatttaagactatctgtaaatttttcaaaaaaatttgagtagtttacaatgtcgaaaataagatctacatattttattgcacgtacgactattttttttatacgcgtggtaagttactgtttaaaccaaaattttggcacggtaaactatttggaattttcgaaaaatttacaagtggtcataaacaattacaacatatgtgaatgtgaacatgaaaaaaaaaattagactaaatttttttcttgatagggaatcagatagggaatctactatataaatttctaataatattttggaatttgtgatttgtaatctattaaaattctttacattttaaaatgataaaataaaatttgtattttacaaaataataccccaaagttagtttttaacatgaacaaatgtaaaaaaaaaaaatataaccatcttagtcatgacacatccacgtcagaccactttgataaaaaataagtttatagtattattttatataattttaaaatattagatttgattagtcatttaacaaaataaaaaatttaattaataatttttgcaaaatacaatccctaaaatggtatttacactttttaatactatgcctttgaccacctatttttttttttaggagaattgaccacctatccttatgttttgttctctgttttttttttcttttttttttttgtttttgttttaatatttgaattgacttcttgttgtaaaaaaaagaaaagtatagttttttttcttttgttttttgaaaaaataaataaataaaaagaagaaacaaatggtaataattgttattttgttaattgaaattgaaaatgcttgagtatttgtaatattttgtgtgtgtgtgtgtggcagttcaagtaattacaactttctttcttctttttaatgaaacaattatctagaagagattttatttttatgatttactaaattttgattgagagttataattttggaatgaagccaatcgagtaagaaattaacctaataataatttaaatgaacaaaataaaataaaagaatttgctcgatcaaataaatataaatcagaattataaatagtattatttgtaaaaataaaataaaaatatatattatcttaaaaaagttatgtaaattacttctattttatttttatataattgttttatgaatatatatattcaatgacaaaagcagtggcaaataaaatattgaataatcaaaattattattttattatatatatattttatattgtttactcacatagtaaaaaagaattctaaattaaaaggtaaatagtatattttaagttaactaaattatcttttatgaaatatgtatattttctaaataaaatacttttttagggtgaatctgatatttaatttttaataataataaacacattcactttccaattcttattaaaatattttcatttctaaaaaaagataaacaaatgaattacaaaacatattattactatttgtggttagtaaattaacatatatggagattttttttagtggtcgtaaacatggagattaggagtgttttgtataaattttaattaaaaatattttgcatttcaaaaaaaaatatatattttgtaaatcatctatcaaataaaaaatctacaatatcacaaattgttcacaatttcaaaagtaaaaagatgatatatgttgataaatataggcatgttatatgattaacatgattaatataattagtaataatttaattagagcaatatcttaattttttaacaaagcaatatgttaattatgatttgggaatattattattttctatagcagataaaactgtacaaatatatcttaaatattttcaaattatgttattataattattgtttttatattaaaatctaaaactaagtcaaataaaataaacaaacaatttgataatgtcttattttaacatgaaattaaatcaactaacttcatattttaaataattataaaactttgtaattaacaaaacatgtaatttatgtctagtttttgtctcataaatattattgttggatatgtaatcaaaattccaatttgattagaaatagaaataatcatggatgtataagaatgaatgatcattgctattatatttgcaatttattttaattatttacatattggaacaaataaaaatgttgaaagtgtaaattaatattttgttattgcatcgaaatatataaatgttgactaatttaaacttggtaaaataagttatgtgacagtcagtagtcccnnnnnnnnnnnngggaaataccgggtaagctgtacaa

SEQ ID NO: 79248 - DNA, 5982 bp, Cannabis sativa
ctttggggtcgccaattgcttcaaaagggtctggtttggaagatcggtactggaactaatatccccttatctgctcctaattggatcctaacattaaatgtcccctccttctgcatcctcttcaccaatcccaagcttttgtctcttttttcatcaatgaggattcaacttggaacattcgtaagcttcagcaatacttccattcttatcaagtagatcatatcctcacaacccccattgaccctgcatcttctgattctcttatttggggtttccactcctcaggcattttaactgtcaaatctgcttaccatctcgcttgctctcttgatttggttgaggttccctcctcttccaatcctaacccgtaccttcattggtggaaaaccctttggtctcttcctgttcctcccaaaattaaacattttatttggagaaccttccaccatattttgccttgtgctctcaatcttttccttaaaaggagtcttcctcaccgaaattgctctatctgtgggcacaacactgaatcagtctctcacgcccttattggttgcataagagcaaagtctatatggaaatcttcaagattcaagcagttttacttgacctatcatagaagtgacattaaggattttcttttacaagctttacataatatgtctaaacaggatttccaagttttcattactttcatttggcagatttggaatgctcgaaactccattcttttcaaaaaacattatactactaacaatgtggaagaaattgtggtcaattatttacaggaatacagtgctgctcaacactcccaacaacatgacactcagctctcagaggctacaagcatccctcatacctctcatcagcatctccctccatccctgtcgcctgatacacctgctctttttgtagatgcagccatcgaccatcaaaatggcctaactggtgctggttttgtcttcaagtgtggatatcagactgtgttggcttctcatcatcatcggctgcctggtgctgtctctcctatcttctcagaaggccaagctcttttgcagagtctcaagtggtgcattgactctcaattttccccacaagtagttttctcagattgtttaaatttagtctccaaagtaaatggggcctggcaggacaattctgctctttctggtttagtttctcggatccgattgctcttctcaaatttccctggtgcttcgttgcagtttcttcctcgacaatttaatatgaacgctcataattgtgcacgagaagctctcaggtctagagaagttagctagaggaagttcctcttcttcctctttggctgcttgttgtggttgtttgtttcttctttccagcctctttgtctcaaaaaaaaaaaaaaagtgttaaaaccgtcattattagtgtacctgagagtgtgaaagatcaagtgagaagaaagagttcttagaaaaaaaaaaatcagaagcaaaagttagtgcagttccaatgcttttttttttctttctctatcttttgaaatatgtcactcaagttttactgttttacttttttattttgtattaatatctttatttcttttatatttaaaatatataataataataatactatatgttatatgatatattttaggtacattagcattttttcttcattttagagcaataataaatttaaaacattagttgggacttgggagtgctcattctcaatgctcatcaatgaagatttgtttatttaattttagttttaatgaacttgcttccatcatgtcaaatgaagaatctttcacaatagactaagttatagtttctaagttaacgagagagaaattgcttagatcatctgtaatttgaataaagaagatgggatagaaaaaatatggagattttttttttcttcttttttaaagaactaatatattcttttttgcattgagaattattgtaatatatagctgattagatatataacacttgttagttgttataatcacgtgagttgtctaataagagaaattccatatatgatcaaatttcttttgatgacgaacactatatagttttcaatagcatattagttggatttaacagaatttaacaggccaaattaatataagaaataaccaatcctaattacagatagcagaataaggactcggtcaattatcaatttttatgtttttcccatctttaaatacggaacatgcaaaaatgaacctagttttatttacccaaaaatcaacaattagattcaaaactcgtgggtgtataacaatcccattttttctgatgctaaaataggaaaaaacatcaaacatgtttctaaactttctcaatacccatcaatccaaaatgtctttgttccaaccattatatcaactataagcaaagaggctcttctcaattatggtctcagccagccatggcaaataatcatcattaccctttctcaaaccttactaccatattgttcttattcatcatctctttcctttctctaacaactttgtccttgtcattaactgatgctgaagcctccttcatagctcaacgccaactcttaactttcccagaaaatggcgaccttcccaacgacttcgagtacgagtttgacctcgtcattacattcgccaatgaaagattgagaaaagcctacgttgggcttcaagctctaaaggatgccatttattctgacccctataacttcacaggcaattgggttggagccaatgtttgcgcctacacaggagtattttgcgcacctgccttagacgatccaaaactcagtgttgttgccggtgttgatcttaaccacgctgacattgctggccaccttccggttgagcttggcctattgactgatgttgctcttttccacatcaactccaatcgattttgcggcattataccaaagagctttaaaaggcttacactaatgcatgaatttgacatcagcaacaacaggtttgttggaggattccctgatgtcgtcctagaatggcctgatgtcaaatatcttgatatccgatacaatgatttcgaaggccagttgcctccggaactcttcgtaaagaaatttgacgcaattttcttaaataataatcgattcaagtatataatccccgaaacattggggaactctactgtttcggttgtaacttttgccaataacatgtttaatggatgtattcctcgatcgattggcaacatgccgaacgtgaacgaaattatattcttgaacaacgagctcaacggctgtttccctccagagattgggttgcttcgtaacttgacggtgtttgatggtagtgataatggctttgttgggagcttgccccaaagcttttccggactagaaagcttggaagaattagacattgcgaacaataagctcaccgggtttgtaccagattacgtttgtaagctgcccaaattgcttaacttcactttctctaataacttttttaatggtgaggctccttcttgtgtaccgtcgtctggtaaaacaaccgttgttttggaggatgaatataattgtttgcctggacggcctaaccagaagtcaactagaacttgcttccctgttgtaacaaaaccagtcgactgcagcaagaattgtggtggtggtgacccatcgcacaagccaccgttgcccaagccttcttcgccatctacaccaaagtcaccatcctcgtcaccaccaaaatctactccaacagaatcaccctcgcgtacacaagtgccagcacctgaaacacccaagtcagaaccaccaccaacaaatatcccatcctcgcctaagagtccaagtcagccaaagactcctgagtcacctcccactacaccatcaaaaccaactcctctttctcctccaatggctcccactacaccatcaaacccaactccttcttcacctccaacagctcctactacaccatcaaaaccaacaccctcatctccaataaacgctcctattcctactcctactccgaccataccatcaaaaccgactctgccttctcctccaaaggccccgtctacaccattaaaaccaactccctcatctcctcctgaggataactctcccaagtcaccaccatcccaagattatgatactgcaccaccaccagaccccactgatagaagtccaatcagattacatcctcgcccaccgccacaagcagaatcaccagcaccagagccatcacagcctcctaagccacctactgaatcttcaccaccatcacctaagccacccactgaattgtctccgccatcacctaagacgtctgatagctctcctccgccgtctcctacacctactttgccaccaaattctccatcacctcaacctaaaaggtcatctcctccatcatcacctaagactgataggcctacttctcctccagactctccatcatttgaacctaaagagtcgcctccaccatctccaaaattaaagcaaccaccaccttctcagtccccatcgccaccatctccatcaaatccacctcaattaatatattcaccgcctccacgagttccgtcttcccccccactggtggttcactcaccacccccacctatttactctcctccaccacctattcactctcctccaccaccaccagttcactctccaccaccaccaatttactcaccaccaccacctatttactcacctccaccaccagttcagtctccacctccaccgactcactctcctccacctccagtgcactccccaccaccaccggcacactctcctccaccacctgctcactcgccaccaccacctatttactcacctccacctccggttaactcgcctccacccccacctgttcactctccaccacctccagtacactccccacctccacctactcactcacctccaccgccaccgccaccaacttactcttctccacctcctcccatggctgtttcaccaccagtatttgatgacatcattctaccgccaacgttcggatcccagtactcgtcaccgcctccaccagtgttccaaggctactaaagggttagaatggtgtttacaactgatttttacaattctatagctttctcaatgctagggcagtatacacaactcattttgtaacaaaaagccttttatcaattactaaaattcaattttatttattttttaattttttctaatggtttaactatggagttgtagtagatatgtgttcaataaatacatacatatagagataaagtgtaataaatatagagttatgcatatttaactttacgagtaactttgatctctttgcttaatacttcaaaaaaaaaaaaaaaaaaaagaatgaagaaaaagaagaagcaaagaacatcaatcggaatatatgttactgtgtgtaatagcaatactctatcataaaaatttgtctcaacccaatgaatgaaaaaataacttttttatagtatataatagaaaatagaattataaaaaagaaacatactatctttgtatcttaaataagtttaggtgttgttttaaaaaaaagtttgagtcaatataaatataaattttgaaatttattttattttattattcatatgacaacctaagtatagattttgttaaagttactttttcaaaatgattttttagctatgattttgttgagacagaaaactggtcaactcgcttatatatatagacgagatgaaagttagaaataattaaataaaatagagagcacacataagaattcatagtagtttactctctgtgtcgcaagagtaatgaagctacgtctacttcgagtttcatttctcgcgagaattataagaaaatttggctaagtcttaaagttttaatctctagagagagaaactatgaccttatgtgtacttttttgaatgtgaaaaatgagaaagaggtttataacaaaataaaccaattttaaaatagatgtagttaggtaattattattttaag

SEQ ID NO: 79249 - DNA, 2804 bp, Cannabis sativa
ttggtatttaggttaaaataatagatctacacatattattcttttattttacttgtcttgttcccgaaacttgagctgcctaaattttatgttttctagtttatttttacgtgttttagtgataatctacgatatatagcgacatatattaaagtatgctgaaggttatgacttttaacgacattctgtgacatgtagcaactaaaattacaacatgtgccaatttatgcttgccatggacatttgccatttctgtcgatattgtttgcgacatgtatcgatagtttagagtattgtgttggtttagtaggaggaaatattttgtcgacatgtagcgatgttatgcgacttgcttatcgacatagtttgcgattacttgtgacatatcttgcaatatttctcgacatagtttttattaactaatataattttttttgcagatttaattgtatatgtgtactgtaccaaacaccaagcactagtagcacccggccagatccctttggtagtattgtagatctaattttgaagtttgtacaaaatctaaacctattgtgtgaacaagggaagacatagaggaaaataatatttatacaacttctcttagtggtacaccttcagggggaaatacacgttggcaaattgtacacaaacaagactgaattgaaaagtgtagtgggaaggtttgcattgaaaatgaattttgagttcatggtaagactgtggaccaaggccccagagaaagtcagcactctagcttcccagaagtacctgatatcaactgaagctccatgaacttgaccttgatatctctaaacctatctgaaccctgataggtaagacgccggacgaaatgttatgaaactagaagtttaagttcaggagccatctctaaagaatggaagcaaacatattaaaaactggaaaaaaaaaaaaaaaaatattgcaaactacgtcgcaaatatgttgtgataagtcgttaaaataacaaatccaatttagcaacatattcatgacatgttaacgacatacatttaattaataagcaactgtaatgttcagtagaattttgcagtatatatctggcgatactattaacgacatctcatgacagcatgttactgaacatgtcgtcaaaagtcgcaaaacgtacgccatatgtcgctagttgtcataataagtaaaaccataacaacaaatattaagaaatatcctagaatattgcgagatgtcgcacaattgatacaaactgataaaaataaacaacgaacatagaagccattggggacgacaataataagtaatcaaatatatcgtgagacatcgtaaataatatcgctagacattgtaaaactacaacaaacaatcaaaattccaaaagctcatcaaactaaaacacgtcgcaaaatgacatcgcgacatgtcgtgaaacattccataaagacaaacatctactgcaacttgttatattcaaaaacaaaattgaatgacgtcacaaataatgttgctacacgtcgataaaccacaaaaaaccagaacttggacaggcatcaaagaaaatcaaacaaaaaacaaatttccttacaatcaaacaaatttccttacaaacaacaaaacaaacctgaaaactcattcaaaatcaaataaaattttaggtaaaataccttttttgcaatctctaatgtgggtttcgcgattcgagattgggtttagcgatttggatctgggcttctaccatgggattctgtcaaggtagttgggtttcgtcggtgatgacagtggaggtgatggggcggaggttgatcgtgtttggtggttctgtcggggtgggtttagagagagggggggagttagaggaagagtgtgattcaaatgaggagggtatttttggatttatgggtttttggagtacatatgttatgtagagtggaatactaaaagaccttctcgctattttaagcatgcattgctaaatttttctttttaagtaattatatatagtataatttcttaatgtattgtaacgccatatcccataaagacgctatgtgtgtgatttaatttgaaaaattattaattaattaaatatataaattcatggcattgtaaccttttaaattcggggatctccttttaaaaatatatcaaaaattgtcattcagtattacattaaaatatacttgtaactcaaaagtgctataacaaaaaaaaaaaaaaaaacaaatcttgacatctcggcactggtagttggataaactgatatgctcatttattggggaagacctctaactcatggccgctctaaattgctcattctcttacctgcaccacaaagcacttgtaagtcacgaaaactcaataataaaagtaataatacaaacattcatatcaatatacaaatataaccaaataaatacatagtatcataaccaagtaatcacatattttaattcgtatacagaaaatcacactacacaatataaatatcattaaatatcaaatatttgtctaataaaataaactaatattataactttataaagtaaccattattcttcgctgcctaataagacaaccaactctagtactgttgcctaataaaataaccatactaatactattgtctaatgagacaacctttctgattcgttacctaatgagacacaacctttctaatatcattaccgaatgagacaacctttctaatactgttacctgatgagacaacattcacaatattgttggctaatgagacaacctttatataataagcctaataatatataattttaaaacgaagtaat

SEQ ID NO: 79250 - DNA, 2562 bp, Cannabis sativa
ggctttaacccacatatgggctaaagtccatccgtccctgcatataaatgatatgaccacaaatgaattttatctagggtttccaaattaatattgatttcttttccttttcttctttatatatatatttttcgtattattattattttctatttaattccctatctttaagaaagaaatcaaataaccatcaaaagagtgaaaaagaaaggaaattagaaaagaaaagagaagagaaaatcaattaaataaaggaaataaattataagaactaggtatatagtcgtgtatatatatgtttgcaaggtaggtacataggtttacttttacattttataatattgagttaggaaccaaagaagcaaaagttgaatgccattttattactaattataggaagtactactaattattattattaaaatgcagaaattactaagaattaaagactacaaaaaaatatatatattacttttagtcacaatataatttttttgtgactaaatataatttttacgcaataaaaatcacttgtgactaaaatataatatttagatacaatttgtaactaatttaattttagttacaataagtattgtgactaaaaatacatttagttaattacaacgaattaattataatttttgtgattaatatttttagtcttttaatcacaatataaaaatgataatttataattaatcacaagtgttgttgtgactaaaaattttaaaaaaaaaattatagtaaaaatataaaatttattttaatctctatctctaccctttaattaattgtttctagcttttaatttagggactgtaatttgataaggcgcctgctctaaataaataaataaataaataaataaataaataataaaaccatatatctatcaaactcaccaaacaaatcaataatagctaactaaacatcatcattattattatcacgactttctcgttaatttcaatagtatatataatatatctttttttaacaataagatcctcacctctcaactttgcttaatttctttgacattattataattgatatatatatgttataattaataagcttattaatttctctaatattatatatatatgaatgaaaaattataaaataatataattagtggcaagaattgaaagaaaaaaatactaataaattttataagataataaataccaggatttttttttttgattctttttttttttcaaaaaacatttctgaattttcattgttttcaaaaaaaaaaaataataattttttttgtgaagatatgcatatagatcaatatagtactagctactataaatgtgatcgactatatataatcatatataaggtgtttattaggcagagaaagaaggctgttatcgatttatatattaaccatatataaggtgttctcaattaattaactctagtatataacattatatattatatggtatatataaatatataatttagtggtatatatattataaattgaatacatgtgaagaaggtgtatctaatatataattcatctatatatattgattgtgtacttatttattatattatttcttgtttgttttattttatatggtataatttacacattatatcatgtaaatatatataattaaacgatgcttattaatatcattacatatagaagaatgaagaatgaaattaagaataaattaattaattattttacctgtaacattttgttaacattgctagcaccaaagaccttatgaacactagcaaatttgtgaggttcgtcggccggaaaatatggagcaaacacacaatcttgcgcacaccgccggcgcagaagcttacacgccgcacatggtgacataccaccttgttttcttccattaccagtactcccaatattactattctccttcattatattatatatatttaattataattactaatattaaatgataacaatgcaagaaaatgtgaatttagagaatatatatatgtgattgtaagtatatatataaatggattaattgggaccaaattgattgaagaaaatgaaaagatataatatgagaaaaaaatacaagaaaaaattaaagcaaaagtaggaaaaaaaaaaagatgagaggagagggggggcttaagagtaagggttgtgaaaggttatatagacaagcaagtagaaaccaaatcttaacatggtcctaccaaataagagcccatagattttgttacacaaatcacttgttttttgataagatcttttggccccactaattctatatataataaaataactacattattaagtaccttggataattcaatttgttattaatttaatagggattaattatatgagaattgctaaaagtgcttaatattttcctatgtgtcatacttgatgtaattatgtattcggttccataacttaagaaaataatttttaaaaaatatcgttaaccaatcgtgaagcgtcatttataaaaggtgttagacactactcttgcctaataataacaatactctatatacatatattagtttcttggtatgtga

SEQ ID NO: 79251 - DNA, 4831 bp, Cannabis sativa
aaaataatttccaacaattccaactaccattgatgctaactcacagaacatcatctatgctccatatactgcaatacaatgctttaaagaccatgagtgatgataaaagttcaagaatggatggcatgtttgtcatgttttttacaaactattggcacattgttggctcccttgtcactgcatccgtgttaaatgttcttaataatggtgcagatctagcttcatttaataaaaccttgatcactctcatccctaaagtgaagaagcccagccacatcactcaatatagaccaattagtctatacaatgtactttacaaactagtgtccaaggtcattgctatgagacttcagccataagtaatctcaacgactcataacggacaatattctagtggcatttgaattgttgcactctctcaaaagtaggaaatgtggttacaaaggctatgcaacaatcaaactagacatgagtaaggcatttgattgtgtggaatggcattttattgtacaagtaatgctcaaaagagggtttggaattacagttgttcaactcattctccgctgtttataattagtctcatactcattcctattgaatggttcagttcaaggtaatgtgataccaactcgaggtatcaggcaaggtgactcgctatcaccatatttatttcttatttgttctgagggtctctctcatcttttacaacacgaggagagtataggttctttacaaggtttaaaagtttcacaatctgctctatctgtgtcgcacctcttttttgttgatgatagtgtacttttctgttgagcaaatagacaatcagcccgatccattcacaaggctcttcaaatctatagcaaagcttcaggttaattaataaatcctgaaaaatgtgttctatccttctcggataacagaaggcaacatgatcaagcttttttccaagatctccttggcatgccaatacagtcctgtcatgagcaatatctaggtctaccttcttttgttgggagagataaaatgaagctatttggaggcattacagatagaatttggaagcttctctattcttggaaagaacatctgttttcagctggtggtaaagaggttatattaaaagcagttgttcaagccatacttacctatgccatgagctgttttagattgcctgtcactttgtgtcaccaatttgagagtatgatggcaagattttggtggggttcttcagcttcagggaaatcaattcattggaaaaattaaaatttttttataaagcaaaagtacaaggatgtttaggatttcgcaactttatacactttaaccaagtgctattggcaaaacaagcttggcgcatcatcgaatttcctaactttctaattagcagactacttaggcaaagatacttttccaatggtaactttcttaaacctaatttgggttctactccctccttaacttggaggagtattgtttgggggaaagaattacttttaaaaggcttgagatggagtgttggatctggtcacaagatcaattgtaaactcaacccttggattccaggacacacttgttttaagccttattttttcaaaggatcaaactccaacttgctggtagcaaatttcatcaatgaaaataggctatgggatatggtgtcactacaaaccaatttttgtcaagctgacatcgatcgcatcctaaccattccccttaacctgttttcttcagaggacatactggtgtggcacaactcattcaatggtatttacaatatgaagtcacgatatcatcttcctgtcaaccttactgagcaagaagataccaacagtagttcatcgatttaacattggcggtctacattctggaaaatgaatctccctcccaatgtttaaatatttgtttggaaaatatttcacaaatctctcctagttgcagctgaactctatcgaagacatatagcaacctccccttactgctccatctgcaattcgtgtgaagaaactattaatcatgccttgtttttctatccaagagctaaagtagtttggcatttgtcgaaattaccaattaacctgtcaagaacagatcaaagctcttgcgaggacattctgctgcaactttcaacaaccatatctacatctgaatttgaactcgtcctggtttattgctggagtatatggcatgagaggaatgcactctatcatggaaacacagtaaaaacacatgttgttgttgccttatatgcaccttcctttcccaaagaatttcaagcaaacatcaaaagccccatcaaccactgctgctgataaagattcaagaccttctgaattcacacatgcaccaagatggacagccccacccccaggaagactcaaactcaacattgatgctgcaatagacacttctaataattatttgcattggggcggttttaagaaactctgaaggttcagttgttgcagcattgtccaaaccattacgaggcaacttcagagcagaagaaatggaagtgttgggacttgccttcagtctacaatgtctactatcgaacaatctttcagtggacctcatagaaacagattctcttttggttgttcaaggactgaaatcctcttacttatttatttctgtttttcatgctatacttaaagatgtaaagtattatctagtatcctatttcccacgagcacagatctctcatgcatcacgatctgctaatacttatacccacactttaactaagttcgctcttatggtagatactgattgttcttagttggagacattttcatctccactattaactcttctgtaatttattcaaattaatataatagtttttttcttttaaaaattttatttaaaaaaaaaaaaaagccaccgctacactatttacttaccgtttgctgaggtataaattggagaaagattcgaatcatacacattaaagcgaagccacgtggagtgctgtatagatcttgacgttaaatcatgtttctcaaaaataaaatgataggtttttttttgttttttgggaaatcaaatgaaaagttattatataggtaagtttaggaagaaaataaaccgtggcgtggcgtggcgtatttataattagaataatttttttttttttaaaaaaaaaaaaacaacgtgggaatgtgacgtgtggttgcatgaacaacatgggttttcacatttaattatttaattatgatgatgatcagtattgttggaccaactgtgtccgtgtatgatgcttattatggatggaccccattcaacagctcagctgcgtttaaataaaaacatatgatatagatttaatttacatacaaacgacgtctattaattgaattgaaccaaaaacgcacacgacataaacctgcataacatgtcatcatcatcgtcatcatcatcatcattatgcattttaaacccaaatgatgtttcgtgcacatcagattttttaattcttaaaatcaaacccaataagattttgttttttgttttaagttacaaatagttgtaggagaggttaaatttaggtatatattgcttagctagtcatatatttttctaaatgacatcatccagtaataaaataaggtaatgtaattataattaattctacaattttttattaatcaaaatatttgtcgataaatctcatccaatttttttttctttttttagataacaataaaataaaataaactcatggacggacgtcaggcgcaacaaagcaaataggaaaagagcgcgtgaggcataacacgagcctaactgccgttgacgtagactatttcaacttttaaagtcatcaccacatcatcacacccttcttaaattccatttaaattcaccattttcatacccatttttgtcatccaaaactctctctctgtcttttcttttgctcaattgaaaatctaaactatgcaacaagcaattccctacaaatcatggccaccccttcaccaaacgacgccgcttagtcgtcttcctgctgtggtcatggaaagtactagcaatgtgaatagtaatagtaaaggagttttaacgtttagaagaagcgtcgtcgacgttaacgctttaaacggtttggtaaccgataacgccgttatggtcttcgtgaggcgaggttgctgcatgggccacgtcgttaagcaccttctgttaggacacggcgtcaatcccgccgtttacgaggtcgatgaggccgaggaagttggccttgttaaggagctcgaaaccattgctgctgctgctggtgattccggtgaaattttaccgtcggctcagtttccggccgtgttcatcggcggtaagttgtttggaggactggatcgggttatggcggctcatatatctggagaattagttcctcttttgaaagaagctggtgctttgtggctttaattaattattaaattcagttttgtaattttttttattaatttttatttatttcaataatatatgtggataggtttttaatgttttccctgataatttgaagtagaggaatacaattcttttctttttttttttttacagaattttttgcactcaaaagaaatatttatgtgttttgttggacaaaattaatccacatgttcatatagtacttggaatagtttggtgccttattttccttttggtaatatttattttcaattaattattttaattaatatgtctgattacatagttggagtaattaatttcgtgagtccagagttgtttccagctggggatttcagaacttcgtggcttttccttgcgaacgattatagtgtgtgatttttctttaatagccttatttagg

SEQ ID NO: 79252 - DNA, 1683 bp, Cannabis sativa
tttcttgccatggcggtgagtatactttcaatctattttgtgtacacagctcatgtctcgtgtagagctagattttgtattttggctgcaatttataaattgtacacccatgaggccttgggtttgatatcttgtggggacctacctaggagttggactacaacgattgttggttccagtgatgggacatatatgatatatttattcgtttgtatctattgcactttaatatgcatcccataccataaaggtgggatagttcaagaacaaaatgtcagtgaagaaaggttttgctttctaaactataaagcagtaataaaggaatttagaaaggtggcagaatttttgtgtgggtggtgataccatttttggaacttgaattcgggtgctataaaataatgttctggagttctttgtttgcttttattttgaattttgttctttatatggttctggagttctttgtttgcttttattttgacttttgttctttatatggttgtggggctaactgtttggactacgactactaagttcaagaacatgcctatatctgatgcagtcagatataggtttctggaacatttgggtagaaagagtatctttggttcaactctatcagtactagaagaaaatgcagattattaaacaatggtgatgctagagttttaatttgcagtacatttagtctttcatgaagtgtttaatctgagattcactgactaattcttattttgttcatggaaagttagtgttttatttctcgagtctttcttaagtatttacttctgcgcatatctttttttcagtttaacttcccaagaactctagaggctttaatacttcacttgctttcaccagtagcagcagaagtccttacacgtaaatttgacgagcttgatcatctgaccactaaggaagatcggtacatactagttttctttattcatatgaaaatttcttccctacgtagtgacaaaggaaagaaatcctaaattaattatcattacaggaacaagttctaccaggttttctatggtgcctttgatgaccagtttgctgcaatggatgctattctaaatgggaaagaatcattttcgctccaggtaataagtcacttctttctatcgaaccatttctttctttcaaagcttcaacaaatatagcacctcaatttcttgttggagtttgcaattataggtttgttgaacattaaccttctgaatgaaagagtattgttgataagctcctggttcagtgattctcaaataatagaacactttcaatagcagcagaatacaatagagaaaataatggaacagtagcaaattgtatgaataatgatattatggaagctttattgaattaggaaaaagagactcaagtctctaacaaaagagagagagagagaactctccatgatgctgataattatctcaattcttgcataaaacaaaacaatagctcctctttggcactaaaaaggcttccctcccaaaataactaactgccagctcaaatcccaatagaccaagcttaaccctgacctgtgtatcttgcaccccttctagttctagtgtaggtgaattaggtctagcaatcttgagcccgtgagtccgagaaaacccttcagctccttaattgacgtaggcagcggccaatcaagcatcgcttgacttgaaa

SEQ ID NO: 79253 - DNA, 4972 bp, Cannabis sativa
accacccgcaccgcgaacactcctaattaatagaagccatgtcaggtttttttattttttatatttaaaagaaaataaactcttattttattttttattagagccattctttccctttggtaaagggtgatttcgggttttgggtaaaatccggttagaggatgcggtgcggtctttctcaattctctctaactcaaaactggaagtcgtaagcctcaactctggtgcgccgttttggggaattcattttcctttctcacagagtttgcgccaactggaccaaattaacaactttctcttcttcctctttccctccaatccaacaacaccaaacagaaccctagaaagggtttcctccccccaattcactttccctctttcctttcaaatctctgattaacaagaaaaaagcttctgcctttcgaccttaatagctattcacccactccattacgctgtcgttttttcggttaccttccgctcacttcttgcctcttaaattgctcagctcatcattgttcctctgccaccacattttgccaaatttcatgcggcgctttcccatcggaagcttgaattttggggggcttttggtttgagattgattcgtgttctgggtttttgagtgtttatatttgataaatcaaggtgtgttagggttttctttttcttgttttgggtggagctgggtggtgaggaagcagttttaaggtgggatgagtagtgtattcactgagacgatacttgcagacaagctatccaagctcaacagcacccaacagtgtattgaaagtatccttttttattttggtcaattttttctttggtcttaattttcttttctctttcaatttctcggtggcaatgaattaggaacttgtttggatttctttatgatgctgtattctttctctttgagtaccactcgaatcgctacttgattgtgaattatatgagtcttaattaaaagataagccttggttttcaactttcttcttcatcttcttattggaattgttatataataatatagcttttgtcccgacttcctaagtttggatttgaaattcttaacttttgcatatagctttatcgcattggtgtatatttcatcgggccaaagcagaacaggttgtcaaaacatgggagaagcaattccacagctcacagataacagagaaagttcctctcttgtatcttgcaaatgacatcctacagaacagcaagcgcaatggaaatgaatttgtctctgagttttggaaggttcttcctgctgcactcaaggatcttcttggcaaaggcgatgaacgtggaaagagtgtggtctccagattggttagtccattctctcattttttatgttcgattaagattaagggtgtttctttttatggatcttcagttttgaatctaactggaaagcaatggatctgtttctagtttaactatcttgttgttaacatgtgtgatattagaatgatgaaggtttatctttgttgattgcctattatttacttaaatgttgtgaatcagaaaatcagaaatggattatgatatgctggtggtaatatgttaggttgctatatgggaagaaagaagagtatttggatctcgcgcaaagagcctcaaagaagttatgctaggggaagaagcacctccgcccttggtgttcagcagtaagaaacgcacacgttctgttaaaattgtaaaaagggattctcgttccattagaacggttagcacaagggctttctttcttttcacagtgtttttgctccattgttttcctttccaccttgttgaatgtttctttttttattttccgaaaacggtttaagatatgttctctaacattttccgttactctgttaaaccagaaactttctattggaggttctgctgaaaagatagtttcagcattacacttggtgctcagtgagcaacccaatgaagatgcagagatgagtaagtgcaagtctgcagtcagtcgtataaggaggttggagaaagatgttgaagttgtctgtactagtagtaagtaattttaaatattattttttgcatgattgttccctgaatttttttctgtttggaagtatgattcttgaaaaagtaattttggcacttaagttttttgattaagaaacactacggatttaaatccaatttgctcttgaatctaggtttttttgtagtgtattttgggtatttcaagtgacccgcaccttcactctactcaaacatcaatggcttgctttttattattaaatgtttgcacctttctgtgattctttagtgtttttctccctaaagcttagtttcattgttgtcagcgaaggatccaaagcgaaaaacatttgccaaggaacttgaggaggaagaaaatattttgaagcagtgtattgagaaactgaagtcagtggaagcaagtagagtagcccttgtatcacagttgaaagatgctttgcatgagcaggtagcgggtgataccattatttcttttatgttttaacacatttatattttcttccacctgcagttagcaagtatgcacaaaatatttttttagtttcctcacgtttccaatttcttcttcccaggaatcggaactagaaaatgttcgaacacaaatgcaggtattgtttgtgacaagtagatcctttgatgtttgtattattgctcatttatatgttactgagagctattgaaagggaattgtttacactttctagagtcctgtatcttacattgatgtatggttttactgtttcgggtgctgtgtattaaattttttaaaagtttaaacagaccaggaaaaagatgattgccactttgtatattgcacttgctgaatggtgctattcacagctgccaatattgtgagatttggagtgtagtaagctgtgaacgaactaactgaaatctaaagttttgtagctcaattttatgtttccacatatttggaaatgccatcactacatagagttaatgccctcaatagtgtcacagaggttgttcaaatctaataattgtgtatttatacttgtaggtagcacatgcacaggcagaggaagccagcaacatgcgaaaaaggctggaggatgaagattatgtatcaaaaccatcaaatgctaccccctctcctgctgatgcaagtgcagcttcaggacaaacacgtaagaagtcagctgcagctattgcagctgaggttgcagataagcttgcagcttcaagctcctctcaattaattatgagctctgttctctctacgtttgctgccgaagaggccaagaaagctaatctcacaaaggcttccacaccgtcaagagcatttacatccgggcccacaagctctagtgtggattcagcttctaaactagaaaaacccgtgtcagtctcagatcctaatatgtatgtgtcagcacagccgctgactgcgccccctccaaatcattcataccagtcagttttggttccccaatcaacaatgcagaaccaagcctcaaactctcagggtcaatatcacatggttgcaaacccaggttcccaacagtatatgcagccatctggaggggtcatggtcccatacggttataataacattccacccttgcccccaggaccccctcctcccccaccgccgcatatggtgagtccaatggtgcctcttaatcagcagccattacaaatgactcagcagcaacagatggcgatggctcaggcaccgccaataacgcagcaacaagctatgcttttaacacagcaacccccatcaactcctagtttccggccacttcaacccccggggattttgtactatggtcaccctcatcattctcagttacactaattcaactttttagacgacggtaggtaagatcagtttgatcttgtttttaaccttttgatatgaagcagtttgtcgcggtgaaaattttgttttgttattattattatttttttattattattataatgagatataagttaagaggttagaataatgtgaatgcgtacctctaatttgtgtttttattgcacattccttggcactttacatcaacttgaggtcctcaaggcagggtagctatcgcatatgaagtgtgtatgaatcaaatagaagattacaagtctcgaaatacattaccatacaggttattgttcaataggttatcaattattgaaaaaaaaaaattcaaccggtattaatggtgttctataatatttctcataactaaatattatcgctagtttgatggtcatttgtcgtacttgaaactgaaaggtgatttcaaaagaaaaaaaaaaaaactgaaaggctgaacaattaacagtattttcatttatttttttaatgccgtcgtggaaagctatagtccaaatcgtcccaacaaggccagactaagcaagataaccaaatttctataacagaaagggtgcttaacacatacaccctttgacatccttattataacataaaagccaacaagcaaacataaaacaagaacagacataaatccaaatgaaacaaaaaagagcaaaattgacaatgccccaacccacaaaacctagcaaaacaacaattcaccaaacattgtttcgaagcctgactgaagattttcactttgttgggatttatttatgagtaagtgttaagtaaattgttaaaaataatacaatatataattgaagaaaaatattattagttattgtttgaaattatttttacttaagacactggtatcaagaattacagcaaattacaaaatataaaaaacaaatgacaattttcaaaaactacatatttttcccattggaccatttcataatattaggcccatgagactttaagatacccaaacggcaataaaaattatcaatttcacactcaaatgtatctaaaaaaaggcacaacatgacataagatacattatcatcataatataacattaaacatatataatatatattt

SEQ ID NO: 79254 - DNA, 4157 bp, Cannabis sativa
  modified_base (3962)..(3971): a, c, t, g, unknown or other
  modified_base (4122)..(4122): a, c, t, g, unknown or other
tgcttttcttactgagtctgtcgactcatagttactatgtgtacgtgcaagtatgagctagaatcgaaccaatgaagagtctaaagctaacgatgaagattgtacatatcacgacggttagacctggagtgttcaaagtctttggagtggtgttgactctcttttgtaggtcgcttgacaacgacttttgaaatataaacagtttataaatttttgtaactttttaaaaggggatcctgaatcatgtaaattattatgtttaaatatcaaagcaaagttatttaattaagttttaatcgttcacatttttattaaaccctttgactagcaaaggcgtgcacagtatctaaaaaacactgtaacacgtctaatctagtagggtgttacaagtgaaacaaagaattggaattagaatgaaaactcaaatctttatttaatggatgattctttacacaagaaggatggtccaatctatagtgccaaactttatcattggaaatttttgaatctgaaattgaagaaaaaacataactgaaatggacattagaatgactcaaactcggataatagaggctaccacatttctcacccatcccaatcatcttgcacttgacaatgtcctgaataacacatttatcatgaaagaattaaaaggtgcaattagatgttgctgtcaaagaattaacagatagcaaacaacattgaaaagtaggcacacataggacatttttgaggacaagatcatcagataaaacaatagttcaagtgtaggaaatgtcagcatatgaaccagttggtaataacacagatttgagattggaatcattgtgaatatcagtaaaaaaatgaaatatcaggacacacatgatgtgtggctcctgtatcaatgatccatttagatttatgaacatgaaaattcttaccagaaaagtgtgacacaactagttattcatcaggaacttgaggtgatgtcttatcagcagctttctgagcaagaagagccatgagttttggacactgaatattagacaagctagatacaagatccttatcccctggtgtatactcatttttctcctcatctgtccctgtaaaatttgcagaagcatttttacttggaggcccttttgcatttcgatttgggaactttccatgttgcttatgaccaggaggatacccattcagtttaaagcatcgatcgattgtatgtccattcataccacaatgtgtgcaattatacttggatcgaaaaggttgtacaacatcagcaaactctcatgtagtgttgttcgatgaattttcagcatcattagacacacctgatccaacagatccagatgttaaattcctttgtctttcttcttaaaaaactgaagcataagcctggttaacagtgggaagaggatctctcattagaatctgagatctgacattgctgaaagaaccatttaattctactagaaactcaagaagtcgatcctcttcttgatattcaagtataactttcatagcaccataactacaaacaggttgtggtctatattcacgaatatgatcccacagagacttcaatcgagtgaaataggtagtaacactgcttgatccttgtgtgagattttgcataaccttttttgcttcaaaaattcttggagtatttctttcattaaatctttcatggagttcagaccaaatttcagtcacattatcgatatacataattctatcatcaatttctccagaaattgcatgaagtatccatgagattacagtgctgttacatctgcaccaagcatcataatcattatgctcctcatctggctgaggcaactttccattaacaaacttcattttgtttcgagctacaagagcaatcatcatagacctcctccaagtactgtaattctcacttcctgtcagaatcttaggtacaagtactgcagctggattatcaccattagagatgaagaaaggatttgaaagatcatttgtagtgctagatcgtgaattttcaccaagaacagagtatctgtttgattcatttgatgtattaacagtaccgcgagtgtttcgagtttgagctctaccaccgcgcgccataaaaaaagatcagaggattaacagaacaaaatagaagaaagacaatgaagaagaccacacaacaatggtggctctaataccatatcagtaatccattgagagaaaaccagaaaacagaggaagaagaaaatggaacagaatattcattaattgttcaatctgttacagtataggaaagaaatgcatatagtagcaagaatcagttacatcacacctaaccaacacttatggaaccaacatttgaataacgaactaaacacaaagcttaactaacttgacagcagctaaactaacttgatagagttaaacttaggtatttatgtcccaaattactctatacttaatataatatttttgatatagtataaatgatatatatattaattatgtaattaaatttaatataaaaattaaaatttcttttttattattggtcagtaaattaaaatttatttttaaaattgatatttataattatttttataatgatcatcaataaataatatgtattaaaaaaggtttttcatatatagaaatttatatatgcatttaaagcttacccaatttgaaaagaaagaaaaaggagagggacttgattttaatgagttcatctggaagtggaactgttgtgagcaaagacattaataattaaataagtaaatatgtgtccacaaattgaatattgaacatgtctccttatacttttttttaaaaaaattccaagtaatagcaaagcagccaccaataatcaatacgtgtatcatatgttttgaaatttattaagtttgatttttcttcacaatgttaaaatttcagtagtggagacccaacatgatatcagaagaataaataatagtataacacatgcacaaaaatttttttatatatatatataaatagattaataagagtatatttagatatatacattggaatattgggatatatttcttaagaaagaaaaaagagtattaatatacgaagatggtgagataatcattcaaatggtcatctaatcttgtaataattatatatcatgtttaaggattaaaaattgtggactccaaattaataatactaaacttaaatttaagagctcaaactagaagagatgagctcacaaccatgtaattatgcatcttcaactttaaccttttcaatataggtgtctatagcaaattaggtgtgtgatttgtttattacataatttaaacatagagacaacctagcctaacctaacttgaattagaaaccaagacacctcaaaatcacaattctatttttatcttggtttctactaagtttgccttctatttaagttaatagtgtgttactatgatgaacttgaatttttactagttttgtccctttctcgatgtctaacccatcttctaattatttattgatcttttttaaagtatgaaaaagaaatgtataatatttcaaaattatttgcaaaattagtgacaatattttccatgaacattgattggagatactaggaaacaaatcatgtaacaaaccaaaaattataaaatctttttccaattataattttgttcaaaaacaatgtaattaaaattatccgtttcaaaatatataattaaaattattgaaccaatataagtaagcaaccccaaataattatctttcctttaattttatcatattttatattatgtaatctccccatttatatttttggtgatttttctaatttacgaagatataagaagacactaaactagagatcaagagtttatgtcaagaatgagaagaaattcataattggacttatttccaaataatttttatgaattttttaatgtttgaaagatggattataactttttttttaaaaaaannnnnnnnnnattatttgttaattttgttctatgggcttaaggtcataactatttttaataacatggaaaaaattattaaggttatgataaatatgacataaaaagtagatgcccattaaatatgatattatttaacaatcaaactaaaaatatgattttntttaaaaaaaaaaaaaaaaccatacaaaatattaa

SEQ ID NO: 79255 - DNA, 1899 bp, Cannabis sativa
cagtggtgacaaatttctctacttgcaaaatgtcatcggggaccatgtcatattgtgcttggttgatgaacaaggctttgttctgaagggatcaggcaacagatactgcataaatattagtaattccatcagtcatgaacataagacacaccgaaaggaaaattaaaaagtaaaacgttagagtgtttacttattgttttgaagtcaagctaaagtgttcttcagcgggaaaccaatggtaaagaaccaatagtctcggaagttaaggacatgcttggtgatgttgaagggacaatgtgtttttggatactggctggtattggtccgcattttataaggcttcgcagcatagttagacactacttcctctggtcctggaacctctatcttccgtagcttacacaatacataccatactactaaaatcttgtacgggtataggatgcgttggaagggcacaatcccgagtgttgcttcgatattgacaaagtacatacgtaggggcaagtgagctttgcaagagatgtgggcctagctctaagagccaaacccagttacgctcttagacgggaactcatctaggagagaaagtctattccaacacagacatgtgatgttccagactacacccttctttaagagtcgttggagaatgttgtaacctcggaacttattctaaatttggccaattctccaaatggatgagttatatacaattggaacatttttccttttacgcttcctctttgaggccacttttagttccacgtcttgctctagctccttggccagagcttgtatctcaacttcctctagatccatagcctctaagtggaactcgtgataaggagtagtcactggaagaaaatatagtccaagtagttaaataccctaaaccacaaagacagcaagggtaccggggaaggcttcccctaaaattgcttggagaggcccctctggacctgttactcagaagtgtcactcttacaaaacaacgcctctgagtagcgaatggggaacttaaagaaatctaggggaaaacttaaagagacctgtgtaaagccgtaatggccttagatgagaagacccagggcaaatccaattcaaaacatattcacacaaatagaatttaccaaactaatatacacaaaaacgtaacatgcattggcagttcaacaggcttataatcattagacaacccaacactacctagtctatcatcctagcatttgtgtacaaacaataatatatccaataaacactcgaatctaactggtcaagttcatatcagtttaatatatcttttatttacgattctataactaatgttccttctagaatcgattggaggcaaaaaggagttgttagtcccgtaagataacaactttaatgtggaaagtttgaatgcatggagattaggtatttgtacattataacaatcttttttgaatccacaatttgatcatctgataatggtcactttatacagattgatacataaattagaaactagctagaatcaatggggagtcagtccaaaagttaatagggaccaatacatataggaaaaaataaaaattatatacttactttttatagttattttcttcatgtgattttttttttttaaaaaaatcccagggccatggcaccctctggctccagctcgagtagctagctcctccgtcattggttaaccatattgtaaatcttatatatgtttactatctttatgtttcaatgtggcaaatgacgatgaatggggtcaattttgtgcttacactaaaaattctaattaaatgatacattatcacatatttatgatatatatatatgtgggtgactatttaatggttacaattttattgtaattatatggttacatttttctttaacatg

SEQ ID NO: 79256 - DNA, 4691 bp, Cannabis sativa
cactaatgggggagctaacaaaaaattgcagtagggccaacactgagtaaaacttatagcggggaaaatgcaaataataataggaacattgttgaaaactaaaccttttgtgagttccaaagtaaaaataacaaaaaagttacatgtaaaatagaaaaccttttacggtaacaggcccccttccctgcgcgcacacatggtgaaataataggaatgctgttgaaaaataatctttatgtgaggactaaagtgaaaataacaaaaacttatatgtaagaatgaaaacatattaaggtacacacaagcctcagtcctgcgtgcacgtgcgctgcagggcgcacgcaaacagtgaaaataatagaaatgttgctcaaaaacactatttttgtgaggaccaaagtgaaaataacaaaaaaaaataatatgtaaacaaaaaaaattagggtggccacaggacacagtcttgcgcgcgcgcgcacacatgaaaaaaaaaatagggtgtcattgaaaagtaatttttgtatgaggaccaaattgaaaataacaaaaatattatgtagtatatttttagtgacgacgaaccccctgtccaacatgcgcacacccacacattgtgcatgtgcatgcacatgcctccttcctactcacgcgtgcacatgtgtatgcatgcatatacgcacgcaatgcacatgcacatgcacatgtgcaaacgtacacatgcgcaaacgtgcatatgcgcaaacgtgcacatgcacacgcgtgcatcccctttcctacacaagagcgaacaccaaaatctggccctctcgcaagagttgcacgcacaacaaataattggaagtttgttttacttttaaaaattgttagcaaaattttcaaaaaaaaaaagtatcatcaacaaaaatttgtaatatccttttgtttttgtctgtaaaacaaaaaaaaaaagtacatgtactgtacatgttagtccatacacacatttgtataaacgctaacctaaaagattatataaataatgaaataaattaataaagtttgcgaagtatgcttgccatttataaaaactgagggccaaaacaacattttaacttttattttcaatttattgaaacaaaaacttgaaaaatcaatccgatcaatcccacaataattcatatacgtatataaaaaataaaatagtacctagatatacacaggcacatacaaaatcgattgatgcgaatgttctatttatttacatacaatatacctacattaacttcaagtaaaccagaggaccagatgcgtctacgatcaatctaacagacatttattcagattcagaaaacaatattaaactttgaagatgcaaccattaatataattattttagtacctccaagacctcatatccttgctcttccgcacaagcataaattgcagcagattttccactctgcaagatgtctgagacttagtaatagatcttaatataggaatattgtaaccatctaaaatgttgcaaaccatctaagtctcgtattttcacataaaattaacttaaaacttttgccagaaatataaatacatagaaggagacaagaaccttcccagcataaggctgcaaaagacctacctctaactgtgagctttatttttctcaagttttaggcactttacgagtaccccactcaagtcaagataaaaaacaagcaaatggcatgtataattttcattctcactatcagcatatccaatgcatgctaaaagttctaataatttcatttcagaatcctgaacaaccatatctagagactcatcataactgtaacaagacaatacagattttttagttaccccgactggtcctgtaactaagaggacatttttcagcctgtcctcctcatattggcttcctgaatcagagtcactttcagaacatacataatcatcttcttgcctatcacttgtatcgcaatcaataagatcattgcagatttcaaaatctctttctcgccattgttgtagccactcactcaaaaacttcacagaatcatcattaccacatacctgcacatcatgtcacaagttttaaaaaaaaaaggaaaatgtattttttccccagtttaaagagactgtactagtcaaagaagaaatagtgcaagatatctaacctccgtggcagtttttggctggtaactgtaagtccataagctattccttagttgattatcacaaccagaatagcatgacttcattctgcaataaaaatgcagatgaaaacttaacaaaatctttagataggctaaactaagaataatgcataactaatcaaacacattatgataattatttcaacaatatcaaagctaactaagataataagtacacacgtgagatatcttacgattaatcagataacgagtgaaaacgattaattgaaacatattaatattgagcctactaaaacaatgtaaaaattaatagctatagaaaattttattataaaaatctacctgccctcaagaaatccactttccttcctagtattttcctttcctaccacaccagtaggtccaccaaaggaatcaactttatttatctcactgccctgccaataattcatttgtattgagaatcactcacaggatgacaattacaaaaaaatagaccatttttactgagagcacgtgcatcctttaaggaccgacagcatacctctgtttcatcatctgctgacaatgtttcataaatacaatcttcttgaacaacaaagtcatctgaaaaaaccttatcatgaaaacttgatgcgttgtcagggtgtaaaatgaggtgaaacttttgaaaacttaagcactcaagggagccttcaaaaatagatctgcatgtgctttctaggtcaaaaatgtttttcataaagatctcctcagaaaatttccaggatccccagtcaagaggaatgtcagtatcctgtagcagaaagttttaacagagctcagaaaaattactgcagtctcaattaccatagcagttgtttaagagctagtctgagaaattcttaccaaacttctttcaaatacatgaattggtgcacaagtctcctctttattttgcctaacaactgcaaacgttttacgctctacaattacctcccgatttttcttgtcttccttccgagctgcaaaaaagggatgcagtttttttcctgcaaaaatccgtgaattttcctgttgaaatgaatgaaggaacttagctccacatcaataagtaaggtcaaagtcgaagttaataattaaccatgccaaactagaatgcatgagaagcaattgataggaaacatgagtaatctaaagaaacaaataaactgccaaaagtgccagtgactgatagagttcaacagcttggggtggacataaatttttgtaaaccgctaaacctaataattcacccaaaccaaaccgagataactcgacgaaaaatacaaaccgaaaaactcgaccaaaatataatccgcctaatctttatattagacggattgaaaataataccaactcatccaattaacccaaactaattcgattaagaaggtttatatataatataatttatatacatattttttcattatatatttatatattataatttatataaatattaaaaaaatatagagttttatagtgattgatttgaactttgaatcaatctatctatatattagtcttattatataattaactaaaatataacaatcgaatgtggaaaaaaaaagtattagtgttcggtttgagtaggttaatccgaccaaattgaacaattcattggatgggttaatattttggacgggttgcacttagatttttgtaatccaatctttacattaagttaaataaaaggtaccataaaccgaccgacgtacaccctttttacatgataggttttttttatattattcaagaagttagggaaaaaataataataaactacgaatgtataagaggttacgaaagaaacaattgaaaagagactagttactcagtgaacatttcttaaggcaagagatcaaattgactaacctgggctgtcaatcttgcctctaaccgcaaatcaggcataacaacagctacatcttctgtctgtgtatttgttgaatttttctttggagtactatttgcagatcctcttcccctcgtctgccaaaaatgtaacaaaaaataaaataaagttcaagttcgcttacctctttgcatcattagaagaagaagaagaaaacacacaactactatattactattcatctaatttacctttcgagaagctgttccctgagtagttgattttcctttaggggttgtcatttgcgcttctttatcagggctaacaaaaactatatcttcgctatgtacatttgttgaattcttctgcagagcattatccgcagatcgttttcctttcgcctaccaaaaatgccataacaacataattagaagttaaaattctcaatctgaaatataagaaaagaaaattctagtaatcttttatttcaccttgccagatgcttttactgggggtgctgatttccttttaggcattctctttctcttgttctggctatcacaatactcctcgtcctcgacatcgaggatctcatcgcaatccgtctcgcacttgagatcaccgttaacttgacgatcttgtggcttaggttt

SEQ ID NO: 79257 - DNA, 1415 bp, Cannabis sativa
ttatgtgagatatttacactctttgcacataattttcaggctatttggccatacagtggacattatcatccaacagaggagaacttcaaagagttcatcaacttccttgaagagaatcatgtggatctctcaaatgtcaaggtaaaagatatagcttatagcttatatatattttgttacattatttatatatttaaagaaatttgtgacaagttttctgatataattttatttatctttttgtgtctgcagaggtgtgccattgatgatgactatccttcatccattggtcccaacgtgttacaaaaatcaggctcgacaactccaaagaaatcggacggtgttaagatggctgatgtggctaaggagaatacaatcacagccgtcaaaaaagaggagaaaaagaaggtcgagtgtgataaagctaagccaccattgtttgatttgggccagcgtctttcttgtaaatggagtactggaactgggcccagaattgggtgtgtccgggactacccaacagagcttcaatcaagagccctcgaacaagtcaacctatcacctcgagtggctcctggacaatgtttcagttacggcccaattccatctccaaggccaagcccaaaagttcgtctctctccaaggcttgcgtatatgggcctccctagtccaagaaccccaatcactaccattaactaagtcatattgactcaaggctttgttcgtcactatatggcccaataatgaatcttctcaaccttcttcaaaaatcaaaataaatgggagggtaggagctaaccttttttttttcttcccatttttttcattctttaaaaattgtttctaatattccagccattttttttttcaattgtaccagcctaatagataggtctctctatttatttccttttttacaccctttttccgctcatatttttttgggctgggaatatttatttgtttatcttgtaaaagtaaagttaatgtgacattcgtaaacaacgaattaacttagaataattatacggggttaagtttgtaaacataatatagtatacattgaattatttgagggaagaaataagagaatttatagtaaatttattgttttaatgatttgttcttccttctttaaaaagaaacaaaatgattggttcttcctttgttaaaaaaaatgaacgattgctcttctttttttgaaatggtgttaatgtttgactctaaaattattaattaactagtttatgtgattctaacaaatcacgattgattatataacgaaaattaataagactttgagtttattggaatttaaacttttaacctcttaattattaaattaatcaaattattactaaattacaatacatatttaacattaaatgtataatattttatgcaatatttttatgtaa

SEQ ID NO: 79258 - DNA, 2814 bp, Cannabis sativa
ttatacattgttatgttgagaaaagtggagaaagaaaaagaagttcgcaattcttatttatccctcttataccaaatagaactgggtcaatataatataatgtctttaattcttttttttatggaataacgtctttaaattggatttgtatatatttgactatatttaatatttgcatgctacaactcttcttccaaattaaaggtgaaattggggaccatgtaaatccctttgcaatgttcattcacgtgctaattaaaaactttttctatataagttttataaaaaaaattatttacactacattttaaaatttttttattttattattttttgatcgtagggtggaattttttttaacagtactccttttttttttaaaaaaaaaatactgtttaaattgtatagtgtatacagtgtttaaattttatagtgtgtacagtgttaagtttttacaattattatacaattgttttttagttgtttcaccgttgttcttagttgttctgttttgtgttccactgttgttttataaaaatacagtattttaaaaaaaaaaaaattgtatgacaatatatttttataaaagttaatccatgttccatgtaaaacaaattaattaagctagcacttttgatcatcagttccaacaactaaattaaggaaagaaaagagaaaaaagagagagagacgtacgtgacacaatgtataatgtatatagatttttaatcacattttttataagaaaataaatacataacaataatggtgtaagagttacaaatacacgtacatggtaataaacaacaagaaaattagaaacagtactataaacactttgttaataataattaaaatattataattattcaactagttgggcttggcacagtgttttctgatttcaccatcagatccagtaagaggttcgatatctcccatcttgatcattgccttaacaaagtcctcagcaaagctactaggcttcgaactgtagcgtttaacaacagaatcagtggatccaccattgaacaagatctgatcagagtgtaaaagacccttttggctcaacagatttttgaagtagagattatcaaactttgttggagttgtaacatcaagatctgctacattgttatctccagaaggagccttacgtggacacttgttttgcctttgtttggcaaatgaactatcaatgttgctctcattgtatattctgtctctgaaagttgtacatcttgctttcccaattgtgtgtgcccctgaaataaaatatatatcatatatttaagggtatacattcattgaaaagatctaattttattgtttttaaattgtgttattattaattaccagataaggcaaccatgtctttggcagagagacctttagctttgaatctattaatgaggttgcttagggtggaagtgggaggagggatgactccactattggcatcattaaagcttgcggtctttgagtctcttcttccaactttaactttccaatcaggtcctccaagctatacacatcacaatatatagttaattatattttttgaccaaacgacataaaatgtgtgctgcgttttgatgagtatatatatattgcttgcttacaattgcgacagagtcacgagcagcaatggctaagatatcagcacatgaaacgacaccagggcagactttctcaacctgggccttaatcttatccacaactccaaaacctctcactgagttgttattgggccgtgctgtcttctcacctctgaatgaagaagtgtcgtccagtagtattgacccatcacagccctataaatcaaaacttaattaattaatttattttttttagagaaatttacaaaaataatagaattttagttaatttttacaaaaatactatcagatagaaaatttttaaaaaatacagtgtttttataaaacaacagtagaatacaaaacagaataacaaaaaataatcgtattaacaatagtgaaaacttaacacaatacacagtatttttgaaaaaaaaatctgcctcacaaaataaaaattaaaaaattaaaaattttagtaaatgggtgtaattattttatatatatatatatataaaaattattgaataaatatcaagtatatggtagtagtaaattgtaataaatttattcgttaaaaacactatagctattattgaaagttttgtccttttgtggaggttatagaataagttgattgagtctataggtagctagtgtagtgtccgtctatatagtttgtttgtgaaaatatgtttcaaccactatatatagagtgctcagtagcacaagatttgacttgcttggctcctacttcacgcaacaatatgccatgcatgcatgtgcatcttttatatgtcgtatatattcaagatcaatgtcaaaagtcaaggctttgacctatcctatgctgccacgtcacaaccatctcttgttttataactagcctataagaatatgattcagcacttgaccaaaattaccaaaactcatccgaataaaaactatatagccacctaggcacattattgtatctaaggggattatcttttacattaaataattaagagaaaaagtcatatttgttttcatcaattcaaatatttaattgatgatttatgttgaatcaatttcgttgcaaaacgaattaataatatctctttttcttttattataaacttatgtgtcgtaatatacataataatatttgggagatattcattctacaatgtatatgtatatattttttcttctgtgataaaaccaatcaatttag

SEQ ID NO: 79259 - DNA, 3924 bp, Cannabis sativa
tcaagagaaatggaacctggatctaggttccaaaaaactgtagaaatgaacatcattggtgataagtgtgttatcctaatttttgttcacctaacctggctcctccacatggtaaaaagcgaaaaatacattgaagacaggtcagtactaactagccaggttagtgtcgtgcaggctttcaacttgcaagacttatggttgcacaatagacacaagcaatgacaaaaatgtgcacaaacctgtaaggtcctggccgaccagggtagacagcccctattccgggcatcccatcaacaaggctggccggccaagtgcacagatatgcttcaacacttttttttcctcacaagccatctaaagtgtcttcagcattcctatgacttcagaacagttcaaactacccacaaaaattagggattcttcatcaacaaataacaaccctattctttaggaatattctccgtattctacatatttttaaataacaaaccttgtaaaccctaacactatataaagggtcttaaccctacgttaaaagggaccttaacctgaattctatgtctcaagtacgctcagaagcacaaaatcctagagtcctctctctattttctcatacttctcacctacaaaacacattctcataataatactaaagagaggcatagctagaaattacaaggtttcagcctataatctacttggtatcatctcaagagtgaatataactaaaagagggagtaggtcattaccctaacaaaggggttgaacctctataaatcattgtgccttcacatttattatcattccacccgtgacagtcataagccaaatttgatcctagtcagactctatgtcgattggctaaatccacattcaacattttagtgctttcattgagagcttagaatgctagttctgaaagctctcatcttcttgatctccattctgcatggttgtgacaagatgtgaaaattcaactaaaccgtgagaccctatggctacggatcctaatgtccaagtgtcactagttgtggctaacctaaatatggctggtcggctaacacattttggccaactgcccaaaacctacgaaggtccaactaggtgaacaaattcttgttggacccactgtctagccaactaatgaagttcctagcataggggttggaccttgtgtttatgctgcagagactggacctagggtcggcaaccctagcattgatgaaccccacatggacctatgggatgatactgaacttgccaagctgagaaaagttgtaagataagtttagggtcatgcaaatctcctacatcatgacaaataagaaacgcatgctactatgggcaatgcttttacccagtagagacccaaattccaagagcggatggatcaacaagtcatgatcctctaagcccaataggcagagctgaactactggagaggctaacgacctgatcagattgttcaacgaaatggttgaatctcaggttgaagagccatccctaataagggatcctcgtcgaggaaaaggtccctatgtcctagagggaatttaatgcccaagggaccatgggcaaacctcaaggccaggggactaaatgcgtcctaaacaaggccatcctatcaactcaatgatggctagatctttattgaaaagattgtatggttggattgaccaatttcaaggttgacttagagatgaagaggggagaaggagaagtcctgccaatgcaaggccagagcaggtgtcacagtaaggagtcttaccccagtcataatgatgatagtgccactagtcagccaagtggtcagtgcactaatcgtagaacttagaatactatgggcaataatgatgttctgccccagaacggtcagacacattctgacctaagactcagagattctatgtttgctagaataggccctcatgtaagagtagatatttgagctagcttgaactgaagaaggaatgctcaggacaggtacctcccacccctgaacactccaccactagggcagaacaagccaaatctgtccaactctgatagagtacctactacccacccacaagccagcctgggcagacagggcagtacaataatttgcctggcaaatgcaagttgatgttgatcctttagtgcataaaaaattaaatcagctcaagaatatgatacaaggcatgtctggccctaagttgttcaacttagagttggataggacgcaagggtcacttttctctacaggcatcaattgttgcccttttctaccaagttcatgaggcctacttggaggatgtacagagagaaagaagatcccttggctcacatcacatattttgaaatccaaatggattttcaaaatgttaaggttgatacccattgtaggatcttcctgacaacaatgatgtctcacgcaagaccactgagaagatgaccaccaaaaaatcaccctttgcattagcctttggctatgaagtaatgatgatcattaaattggaaccattgtcccacaggaggataacctatgaccaaggaacaagccatatcttgttggtagaatcccttgatgaaatagaagaaagaagagaccatgccaacttaaaactacatgcctaccagtaaaaagtttcctagtacttcaatgaagaattcaatgagaggaaattatttgtaggacacttagtgctacgaaaagtattcctgaacgccaaagatcctacggcaggagtgtttggaccaaactggaaaagaccgtaccaagtgacaaaatttacaagtaaaggtgcatacaaacttggccggtacattgaaaaaatggaattggttctcctaccaagatattagagtggagaaaatctcataaagtactaccaatagcccgcttgtaaaaaacactactcttcagtagtggttcatgcacactcaccgtgcaggaattcagaaaggagctatatgaccatcactcttcaatgatggcccttgcatggtatgccgcgtaggggtaggaaaaaaattaggttttaaaagaatactttatgtttgtaagcttttattacaaaataaaaaaaaaaaaatgtacgttgcaaagcaacaacgcatatgtaaggcatattaatgaataaaaaatgttttttccgttcaaattgtgtcaaataatttgctaaaaaattagctttttaaagttaatttttattttagttcaacatgcgtgtaaaatgatcctcttaaaaaaatacataggcaaaggatccatatacttggttaattgcaagtgaccaagagagcataagtctactcgatcacttggggagcacccatgcacaacattgaacaaggacaaatatacttaaaacaaaaatcaaaagctttgaaagcaagaaatagatagctaaaaaatttaaagctttgaaagtaagaaatcgatagctaagtatgtgcgaatggcattcttcaaggtgaacataaaatgcataagtctaggattaaaggctacccagccagctacatgttagaaaaattgaaagaagataaagccacgattaaagactacctggtcagtcactagtttgaaagtgaaaggccttaagtccatacaagaacaaagccaaaaaagtgcaaaataaaagcacgaaaaaaatactaaaactaaagccattaaatgttgtcaaatgcagatgagtctagagtagataggtcctaggcggcagccttaatgtcagaagtctccaagataggatcagtctggccaatgacctgcactgcaggtacctcactgaaccctggccagcatgtgcctccacagaaagttggccagcctgcccaacatggttggcatgtacctcagcagaagcctagctaggctagctggtagacacttttggagcactcttcttggctacactggctgtatacagctctttgccc

SEQ ID NO: 79260 - DNA, 1673 bp, Cannabis sativa
attatagtatcgtcaacacagtggaatgtgattatgatcatatgaatcaaaagactaagtcccgattcatccagtcttttcaattggtacataccgttacccactttatgttggatctcgtacggtccatccaagttttgtcctaagacccccactcttgaatattgacaagctggaaatactcttcttaaggcgagatctctaactttgaaggtttgactcttaactttaaaattgtagcgcctaaaaatcttgccatgataaattttttgttggacctgagattgttcttggagcttctagattaagtccaaagactcttgaagtagagcatgcttccgagttgggtcataggtttctcgtttgtgtgaaagaatggtactttcaagtgcgatgactaattcacatccataagccattgagtaaggtttgttccctcttgaagttctttttgtggtgcgtatgctcaaagaacactgggaagttcttccgaccaatgagatttgcaagcttgtagtttcatctttaatgttgttttaaaatcttatttacagcctgcacttgtatgttaacttgtggtctggccacggctaaaaagcttttgataatcttttgctaggtgcaaaagtttgtgaattgcacactattgaattgcatcccattattttatgtgatcttatgtagaaggcaaaaacaacactatatattcttgatgacgaagtccaaatccttatttgaggtgactatatattcataggttttgcctctacctacttggtgaagtggtctacaacaactatggcatacttgactcatcctttacagttggaggaggttccactaagtcaattctctatactgcaaccctgtcagccggaagctcttcataattcaattactagaagatcaaacctatcaaggagattgagtggcaattatggcttttacccccaatgtttcaatacttggggcttccaaagtgtcaataggcatcacccgttatttcacaatcttcaaatttgttgcatgttttgccaacatatctacaaacaaattctaatcctgcgagacttaaaaaatgttgtggttcttgaaattttgtaataattcctttgactgagatgcatagacagacatttttttctcctttggtttgatacttggtacgttttacatttatcaactcctaagcacatgattctttattgtcgtgtagagattgtgaaaaatgaggtcaaacccatgagaattgcgtgagatcgaggaaaatacttatttaatctaagcaattaaaactctaacctagctctgaaaatagtgaggtttttcgtaacaaaataaaataaagtatttaaatggtaaaaatgataataatagatattttcagtgatatttagggatattattaaggattcagaatccacttaagtgtatatgaaaatatttatgtttatattgattctcataatttaattagtaatcaaaccaattatgttctattaaaaaaagattttccttcgctttaaaaattttaactctaagaattaaatgaaaaacaatttaataacaatagaaaaaaatcaaagaatattatttttaataaaatgtaaaaccaagcattaataatttctaactatcaaaaatacatgatattaaagatgaaagaaaattat

SEQ ID NO: 79261 - DNA, 1837 bp, Cannabis sativa
cttaaatcactaattaatcaactatatagctcaacaaggcatggaaagttcactttctttcccttaaaaaaattgattgtaaagagaagaaagaaaccttttattttacttattcttggaaaaaataaataaaaataatctaaagattcttctttgaataataaaaaaaaggttgggaaagctttctttttctatttttttttttgctcaaaattaggattgcttctattttgcattattttgcttgttattgcttccattcatcatgtcaattttatttgtttattttattgcttgttatgaacgaattgctttaagtaatttggctatagtgtgtattgttatggaagtaagatcccattttcatgaatttttctgatatggggttgcgacatagtagggcgatatttaggaggataagagttacagttacttacttactaattgaataagtcagcttattaataataataataaaaaaatatacttattagagaaaaagaaatgtgatgttaattttaataagaaatatttcacgtggcaagtgagtgattcttagcttgcaagataattataataatagcatcgaaagaaaattgaattttttgaggaatcttttatgtgaaaataggtagagacccaatataggtttccttctatttctattaaaaatgattatcgatcaataatgagagcatccataaatcatatccattcaatttttaagatattaattatgtttatgaaataatttttgtataagccaaaatatgaggtgggttgggtcctatcttgggtttagttggggcccattgggcccgtgagtttcaaagactatgaagtacaagttggcttggcttttgatttggttctctgtagttggtgggctcactagatgacgtggcaatcatattattatttatgcttttacttatttatttattattgattgagtaagaagtaatgtgaagagtactttcttcttttggtgggctgtctgtgtatgtaggtgaccatctaactgaataagattacaaagagaaaaaagacagaattaggagaagaattaatagtagattaatgacttaacatgtacaaaagatattaaaacaatgcaaaaaaaaaaaaaaaaaggaaaagaaatttaattaagatattatatatacagatatgtatatcaattttaggcaaaaagtttttatcccttttataaaatgttttaagtcacatcgtgatatttgattagctgggcatttgtattgttctagtttaatgtttgttatctaaccaatcattaatttgggatcaatatggtgtgatgtggtgtagcaataatagtaccatatacgaagccatattttcataaaattattatttgtattattatgtgaaattagaattgattcttcaattatacaatgtggttttattttttagcaagtttgggtgtcatattcaatgattatatagtctgtactaaagtgtaaatggctttggtaactaaatccatcaacttcttcatttaaaagttaaaattatctgaaaaccctttctttttttcattttattaataattcaacaactcattaaaaccccttcctttttttttttttttttttttttcattttgtaaataattcaacaactcattttaaacaatttttctttacttttttaataaagatagggttgttaaaatttttgtacttggtaatcttttattgttgttatttgtgttagagatattattataatagaagataaatcaagatatatacaactcaattgtaaaaataatacaaagacaataaaaagattgataaaatatatgttataa

SEQ ID NO: 79262 - DNA, 6464 bp, Cannabis sativa
cataaaaagtatcagaacaattaaaaccgtaaaataaaaaaaaaattaaaaaataatatatagagtaattttttaaaaatatatattttttataattactaactattttactaaaccaaacaataagcattcatatgtaatctttttatattatatctgtatagtataattataattactattcttttaattgtaattaaagggaacatactcatttactagctaatattatagctttggtttggtatatgttcttgataataattattggagtatactaaatcagtatagtatcttgttacttataagaatatattcatttaacagtctatttttttggcttgagaagttgtttcccaatatttggaatgtgaatgcagatgggcaatgtttggttttgccgttggactactaacagagtatgcaactggctctgatcttgttgatcaagtaaagatccttctctcaaattttgggatacttgatctagattgatgtagttgggagggcttggtcttcttcaaactacaatttctattctcatactttaaacaatgctaaatatcaccaatggtgatcattgcttagttttcaaccagtcaaagttggtttctatgtaaaaactatgaagctgcagattcataagagagatgttccaaatatgattggttaaaattcagtgatggtcagcaatagtgatgccttagtattttattgtcatgtttaaaattttattacttcattgtgtttactttggtaactttgtgagttttttatctcttcaattttcaatctctttctcttgtctgctatgttattatcataaaagccttgtatcttcttcactgtacttttgccaaagttacacaaatacaagaattcagttttaattttcttttttcgattgatatttctataacgaggagtgctaattacatctttctcaatttctgtgttcgaaaatacatgtcaattgttatagttacaaatttttttacagtatcgacaatagaattatgatatttcagtttatcacgagtgttcaaaaaactttaaatttattttcgacactgtaaaatatttaaaatatttcaaaaatttacattactgccataaaataattgaaaaaaagtaatctgatatgtgtttttggacgcaaaaattaagaacgagtttataattaaagattgtaattaagactcctcgtttataattggtttggtaagacatgtgagtgtgctcctctttagaaatgaagctcatttctcttattgtaactctgatattatcattcaatcaatttggtaatgccagtgattaagaccataacattcttcaggttccatggagagttgagttctaaaattccaaactttatggagcaaatcattggccaaacaaaaaggcattctttagattcttaagaaaaggaaaaaaatgttacgagggagaaaaagtgacactttaaaaggcattcaaaatactttctgttatcagattttgttgagagaatacacattgtaattaataccagtaccatgaaggactcattcgatttgaagcagatcaatataaacggaagaagtgaactttggatctgaacttactaggataaattttctatcttgttttttgagtttttgattgtatgagtttcattttagtttctggtttcattagtgaagaaattctctgctacataattagcaatttagaaagattctctaagatgatcatttgaatatgtaaaactcactcaaaaagacaaaatgagattgccatattttctttcttcacctaaagctttctactttatgggggtttcaagatttcctacaaaatcctgctctcaatcaacactcttaaaaaaagagaaggctttctttttcttggtgatgatggagagagagagagagagacaaatgggtatcggacaatgccggctgataccacagctttactcgtctagaatctccgccgtcatgggtattacaccacgtgttttgttcatggttcttcctctcatggagtgtcatggtgaatttggatttgggtatttttctttcagcggagaaaaccaagaaaatgaagaaaagttctctcttttatcccatatctttacatactgccaaaaattgccggccaaatggccggccaagcttcttattattctctttctttttcatgcttttttgctattttcccaagcagagaccctttgtctagtttttttacagaatgggttgtattcaggccaagtctttgacacaatcttcacctgggagcttagagaagttgaaaatggaaaatgggtatgtgggaaaaggtgggattgttggacctagaagatcaacaggtcagacttatccagaaagagagtttggtactaagcaacacagagctagaactgtgaccattgatgatgatgatggtggtggtggtggtgataagcttggtagcagcaatgggagtggatttgaagatgggaggttgattggtaatgaggaaaaaggtgaaagaaatgttgggaatgtatcaaagagaatttcgatagaggatgagaatttggctgatggatggcctcaatggcttcttgataatgttcccaaagaggttttagttgggttggttccaaagagtgctgagtcttatgataagcttgataaggtgtgtattatataatatgctgttctttattgtgactttgatctttcatggataaccatttttagtccttaaggtgtgtattatataatatgctgttctttattgtgactttaatctgttattgctttttagttaatgacttagtcctatcttaccagagttcagttaaaatttgtgtgttaaagaaagtgaagtactttccggggacataccaagctgtctcgaaaagtttggaacttaataactctttctttgatatcaataagattactatgttgtaagtttcttgggactattgattggctcttatattgaattacgtacacataagagaattttgtttgagaatatagattcctacttgattgagaatattgtaagttaatcaaatgaacagttttttgagaaagatcatcatttgaacaaaagagcttggtttggttgaatgtgctttgttgatcgaaatggatgatgttgttgattgttacaggtaggtcaaggaacctacagcaatgtgtacaaagcaagggacagggatacaggacaaattgttgcattaaagaaagttcggttcgaaacatcagaacccgagagtgttaagttcatggcaagggagataacaattttgcgaaaattggatcatccaaatgtattgaagcttgaaggcttggccacctcaagaatgcaatacagtctttatcttgtgtttgagttcatgcactcagatttgtcgagaataatttctagtcccgaaaggcttactgagccacaggttttatttataattctctgtttgttttgtttgtggtgattcatgtcagttgctaatcttgtggtttaaatgcagatcaagtgctatatgcaccaactactttcaggcttgcagcattgtcattcgaggggaattttacatcgagacatcaaaggctctaacttattgatcgatcgaaatgggatgttaaagattggggatttcggtcttgcaaacaattataatcagaaccacaagcgccctctcacaaaccgagttgtgacactttggtacagagctcctgagctactactcggtgctacaaattatggagtaggtgttgatctttggagtgttggatgcctattagccgagatgtttacaggacaagcaatcatggccggtaggacagaggtaattaaactatagtagcaagatttaagttagtacaataattataaagaaacttaaggaaatcatagaactaagactaagaaaaacactttagcatagaacacattacacatttctcataacatgaatttgttgagattcaggttgagcaaattcacatgatattcaagctatgtggcgcaccaacagaggaatactggaaaaaattgaagctgccatcttctatcagatctccacaaccatacaaatcccgtctaacagaaactttcagtgatcttcctatatcgtctttgggcctattgagaactcttctttctttggatcctacaagtcgtggctcggcagcatcagctcttcaacttgaagtaagtgtaaactcaatagcccatgtttaattcataactataggttaaaacacatgttttgctgctgtacttctatgtttgctaattttatgtttggaatcggttgcaaccacttatgtagaactcactcgtaaaagagaggagattggtcaagtagttataaaccaccaaatgatcacacacttagtcaatgtgggatcctaacagtacatgtccaggaaggcttactcttcatggctctcataccatttgtcacaaccacttatgtagatctcactcgtaaaagagaagagagaggcctactcttcatggctctgataccatttgttacaaccacttaggtagaagctacgttttagggtggtaattggttgcttggtcgagcagctgcctttggcatgaaagaaaaaggtgtccatagtcactttcaaaagactagcctaaacaaagagggtatccaagtagttatatgggatcctaagagaatctccaagatctttagctctattgaagtgatttgatatgatttaattctcatatgtatattaacaagttgttttgtctacagttcttttccaccaaccccttggcatgtgacctttctggtttgcctgttatccacaatgatgatgacaacatggatcaagccattgatgaaaaaaagtgagttttcatcatgctaacaacattaagatgttgatgaattgtaatgaacttattttctatgtcattaatgcgaaacacacaattatttttctcaattttccagaatcaggaactctagaattagaagatctcgaacacatcgagagcgcaggaaaaaaggcttatcttctgagaaacctgaagatcctacggctcccaaagaagtaaaagtaagcacattatctcttggtttatgataatgacaccctttttaataccttttacttgaaacaaatacaaaaatttggtttcaatttgcaatgagtacaaacaaggccgaccctaagattaagtgagttttaagaaaaaagaaaaattatttgaccatttcttacacaaacatattgtattttccaaaacgaaaggaaaatatactttttggacacctttggttcgggtgggcctaggtgcaggcctagcccgacttaacttgactcagctctggtaacagagttgagtgatttgcattagtacttatattggtatgtgttgttttaggatgcagataagactgctgagcagcctaacactcgaatcgaagaaccatttagtaccacgacgactacaagtagtagttcctccggtgcatacttgcatggacagaaagagactagtagcactactactactactactactagtacctcttctagtttatacttgcctgtacagaaggaaaatctactgttttcgccctcacccgttaggccctctaatctaaaggtgtcggtaagttcacacagacattctgatgcgaaacagaccgataagaaccttcctcctttgccaaagccgaaaatacgcatcactaattacagcaatgacaataaaatcaacaggtctgtatctacaagagaatttagaaacttaaaccaaagggagcatttaaaacgttatgtggttgatgattaaagtatgctaattaagagtttggtattatagttcttgagcatttggtttggttggttacttctttcaatttttggtattatttatttgaaacatatgtaactctaaacataccttttgggcttaatttttcttcttcttaaatgctggttttatgtaagaaccagctaatggaaagcaaagggaaaaaggattattataattgtaatttgtacatactcttttattaaaaagaaagaaagaaattgttcttactcttgatcatattattattattattataacagcaattattaaatctgaaaaaattgtatgatttaatttaagtttgtggcagaaagagtaccgtgcttgtatttagacttctttaacttgttatttttggaatgtgagagaatgattttttattaaaaataaataaagtaaaatatatgattatacaaaataaaataataaaatggattgttttcttagaaaaaacaaagaaattaagtgtaaataaaactccgcatgtacaattcatgtccatgcaagagtgctcaacttttcttttttgttcatttaatccatctccctttaaaaatatagtaacacgacccatatatatatatctattctatataaagtgtggctatataacagaattcttagtt

SEQ ID NO: 79263 - DNA, 3398 bp, Cannabis sativa
ttaattaattgattaataaaagtggtatttttcaacttacccaatcttgatcttggtcctagcccacatcaaagcttgaatcgggcccaaatgtattcttaagaattgaaacgacgtcgtacactgcgtttgtttttgtgtcttagaaacgaattcgtcgggttgttgtcttcttctcctactctagttttcgttttttgcagaatatctaatactgaatccatttaccgaacaaatggaagcccataaaccctagaccacaactatcgtcctttaaccaaccccaccttgagctaccctcctactctattttcatgaggaggcctgtgattttataagccattttttcttatcttcatttcttcttctgccaatgaaggtcaccattagagcctcttcctctctgtaccaagttcccctttgctttatcaatggaggagcctcttctattctgagaaatacctcaaacccaccagctgtttccttcagctctacaactcactcattctcaggtacataaagtaaatacctttcctgtaattttttacattatttttcatgtagcttgataatagtacttcaggaataactaatttttattagctttgatgttttttttttggtgggggtgatgggttcattaaacttatcgatgaattttctatcttttgagtatatgacaaataaaaagtatttcttttttttctatatccaaaatgatgttttttgctttcttggcaatataccattctagtaatttgaagtttgtattgaaaccaacttagtgtgtgttgtttaattaaagctaatttagtactttgtatgtgataaattcatattccttgttcttttttggttcaaaatatccaaattcttactgtaagcttttcaagcagtgtgtggtttttgcagaatgattccacataataaaattgcaagtaacagagatgtgttattggcaatgtgcaactcctgtctaactagattccatggcactcaaagtaaagccaaagcttcaacttttcctagtagaaagtctcattgtagaaactcaagaaccttaacctcactagcattggctgcacatgtttcaccatccgacacgcctcaacgttctgaggagtggtttgcccttcgtaaggacaagctaaccacaagcactttcagcactgcattgggtttttggaaaggacagcgtcgaatggagctttggcgcgagaaggtgtttgcatcagaggtcaaaatcatacaaggtgcacaaagatttgctatggattggggtgttctcaatgaagcagaagctatagaaaggtacaaaagcattacaggccgggaagttgattcgctaggatttgctgttcatgctgaggagcgatacaattgggttggcgcctctcctgatggtgttattggatgctttccggagggtgggattctggaagtgaagtgtccttataacaagggtaagcctgagttgggattgccttggtctaaaatgccattttattacatgcctcaggtgcagggtcaaatggagattatggatagagattggcttgacttgtactgttggacaccaaatggaagtacaatatttcgggtttgtagggaccgtagttattgggagctaatacatgggattttgagggagttttggtgggaaaatgtagttccagctagggaggttctcttgctgggcagtgaagaagaggctgagtcttataaacctagttcaacacacacaaaaacagggcttgtgatccacaaaagcataaagttagctgatgagtcaaagttattgtgtagagaaatagctgggcatgtagaattttatggattgtaaaacactatatgtgccttcccatgttgtattttcttcatttgatcattgaattatatagaaattgatttacttgattagtcatatattttgagtttcaaagcttccttttctttttatggtgtccacacacacatttataataattagtgtaaatatatattttttaactaatagtttagttttggtgtgttatttttggttgggcatgaataaaaggactcagtcaactattatgaaacaattttattgtttttgtgttccaaaataagcattggccaaattaagattattcaaattatagtagagagaaatggagggtttaaaacaagcaaatgaataggaatgacaaaattctaaaaaatgactatccaactaaccttttctttacccaacttgtttctccaatcatacacatcaaaatgattagaacctaactaacacatagaataaaaaaaattgcgtatagaaaaaagaagagtaataatggattctgggttgtcatgggctgatcaatgggattacaattctgatcctcttccggtatcaaaagaagatgaaaagaagaagaaaaaggatgaatctaagagcaagttgaagaaatcacttttgaaattcaaatggatgaaagaactatgcaagaaatctcaaaagtaaccatcctccaccaaatgaaattgagataccactttttttttttctttttgggtgttgtattcatgtatatgatgttgtaattaaatttgcaaatccaaaatagcgagacaataaaatttgtgccaaaggtgatcatcaatgctgtggttttcttctttaagagtacttagttttttcatatatacacattttttatagtttattacattcatacacatcggagtactatggtggcacaattattgatcactaaattgaaatttgcttgcttaattagttcgataaatggaataaactataatgatcaagcttatatcaacggttatagaagatataaaatgtaaattcaaaatataaataatcttcatttaactaaatactccaaaccctttcaatatgtgataaacaacttccaaataagttcacaaatgttttatttttttatatacacatatataaataattagctaattagtaatttttttctctgaactttgacatgtaccaaattatgccctgaatattttttgccgttaaaaattcctcccgaactattgagattgttagtacataaacaatcactaaaacagtaaaattgtacataaacaatcactaaaacaataaaattgaatgaaattagacaaaaatccttaaatctaacaatctcaatagtttagggaaattttgaacggccaaaaaaattcagaaagcataatttgatacatgtcaaagtttagaggaaaaattactaattagcctaaataattttaggtagactatctcttatcctaaacacatttttaattttaggcataggattatatattaatttttttatacggctttgtacaagataattttaataggtattctgattacgaattatttacagtgttactta

SEQ ID NO: 79264 - DNA, 4312 bp, Cannabis sativa
  modified_base (3997)..(3997): a, c, t, g, unknown or other
aaccactttagaaacccaaaccataaatttgaaaaagaagttaaaaaaatagtatacggggtaattccccacttttataagggttttttcatttatacatttcaaagttttttttatatatatttttacagaatatacggtgcaatctacgaaacaacttacggagcaacccatatatgtcgcaactaacagagtaacctaaattgtaaaaataaaaaaatcgtaaaaatagaaaaaaaatggttaaaaagtggtatatgaagtgatttctcattttatataatagttacactcaattactgaatttattttttaacaataatattaaatatttgttaatagtagcacttaattaccaaacaaatttttttaatacctaaaatatcaaatatttaataacaggttgtacataaatactaatatttataatttatttttttatctaataattgtataaataaatatagtattaaaaatatattgtattattataaaaatacactttactcaataaaaactaaaaaaataacaaaaaaattaatctcacgacaactataaatcaattataaataaactataaaaaaaaacagaatgaaatcataaacacacatatatatatatagtaataatattatactcaaatgaggtaccgataggagttattattatactcttattttttcttgagatcctcatattatttatcaaattaaattgtgtaaaaaccgatattaaaatacactaataacagtacaatatctcttgtaatatcgtattgtaatcggttacggttcccatattatttattagaataaaaagctattttgcctactgaactttgttactaaaaatcatgtcttatgtacttatatgagcattaaatatacccttaaattttagacagttataagaaattagtatgttacattatgataattttctgtttagttgatattatataatattacctaatttagttttctaagcaaactaaaataaaataaatgccgttgaactttatagactggaataatgctcaaaaaaatgtcgttcctactcatggagttaatggttcggttgatgtagttttagagtattggactcctccccaattttccataattaaagttaatgttgtggtgcaatctttacaaatgaaaggcgttttggcattggtttggtagcaagaatgacaactggggtagtcctacaagccaagagtttgatcaaagtgggggttttgaagccacatgtggtggaagccattggtatcaaggaggttttaagttggattaaagacaatagttggataaatgtggtggtggagtcggattgtttgagagtcattagagatttacaaaagtttaaatatatggcttctccttatggccatatcatctcggaatgtatgactatgtgttcggttattggtgatgtttcttttaattttgtaaaacgatctgctaataaggttgcacatgcttttgtgcggtcttttcttttttaggctgattgtaattttactggggatgtattacctacggtttatgcatccttaatttcggatgatttgatttaataaactttcatcattattccaaaaaaacatcattattccaaaaaaaaaaatattccaaaaaaaaaaaaataataataaataaataaatttttattttaatttaatctctaatatacatgttctatgttttaacttcttttttttttgtcggtaatgaagttagttttaagcttcaagttttttcttcttctttttttttttttgaataaaagcttaatttaaaaattaatttaaatatatcaataagaaaatgacacttaataatcacttcacaaccaagttattacataagttaaaaaaatataacttaaatattattaccgtaaaaaattaaaattaaatatttatctacaaccgaaaattaaaattaaatatttacacgataaattattctttttagtattatatatttaactacaaaaaattaggtgctagtagtttaggttttcatttaattccatatattctaataggatgcaactcgaaataccctcttttattaaaaaaaacgcttcgtatacaagagaaatctcaaaatacataagttgaattattatgagattacatattacacacacacgtagcaagagcaacacttataaccaaatcatcacttgcattaattatttgtagtacgcataattaagatgaaatatttatatatatatatatagataataattaatcagagattggatttaacaggtccaaaataattaggattggtatatttgagaagctccttgtctgattcaaatatggccatgtctttctcattcaaactaacataagcttcaattccatcaccatcactcgtgtcaaggaaagcaatgattttatcaaaattccaagcagctatgctagaccaatcaggcttaccccaaccaaaatcaagtaactcataataacgaaatttgctcaaactagtaacctgaaactcaatcacctcacctcctctcttctctatactcttcgaaccttcttcgatcattctcaactgttcatcctcttctcccatttgaagttttctcagatactccttgtccactttcttcacagcttctcttatcttcttcacaatcccactactaatggaagcttccccattaatgctcgaggccggaacttgtgtcccagcaaacaccaaaaagtttccgaaagagtttaaagccaatggtggatccatcctcgggtgaagattcacagtgtgcaaaatggtataaaccctttcctttgtatttctttttattttagctgaggatgacactgcagcctcatacctacttattatgaaagtagatagagtctcaacgcgcgaaggccgaaagtggtttggaccacttttggtgtcgcaatacattgctcttaaggcttctattgcgaagccattgaaaacaaaaatcttggtcactatatcctttttcatgacgcaagtctctgcgttgatcataggttggggtctgggagggaacatagttgctgaaacgaattcgggtcgaagggctttcggtaaaatggttttagggcttcgtgcaacggaagcccaagtcccgaaaaaccttgtccacgacaatgcatcggcgatcttatctgaacagctgataccgacggcgattcctccacagttgaacatgttgagttggatgccaagaagaatttgatgagcgtcgtcgctctcgtcgtgacgggatacaaatgggcagaacatgtcgagttcttgagctactggattcgttatgacttgagaaagttgtgcgttcacttgggcctcgacgaagggaaccccttcgtcgttgcagctgatgaactgtgcttgtttttcgagtcttccagctaatgggtagtaatgggttaagatgactgataaggatctctttagaatgatggaaatggtacttgtaggtacttctctagccttagttcctttcatggtgaaataaaagaccacagggttgtagaatttgggagacgattgatcgagtagagagagttggtaatggccaagatggtctggggttggataagatggcttgatcatctcattggagattgcttcaatttctatgttcatcttattaattactctcaatggaatcaagaaattattaattttatgggattttgtgaacctatcactactctatttataatgacaaacttttgctcaattgtaaccactcagtttttattaatcaattattagttatttttgtaagagtaatgattaggaatgcacatagggcagggaattggcggggagtgctcccctctaaggattttaattctcatccttgcttattctttattgggaatggggcaggtaatcccctaatgggaacggggacaaagtgggaaatcccctaatagaaaaataaagttacaataaaatttttaatatacaaaaatattaaactacanaaaaattaaaatattacacattgattattatccataacacaacttaaaattcgtaaaaaagatactcgtatactaaagaaatgcaaacatataaattataaattataaaatattactaaaaatataaaataaaatactaagcgggtccctgtccccgccccgttaaatattcggggaaaaaaaagtaatccccgtccctgtcccgtttcccatttaaacggaaaatccctatcccagtctgggcggatctccacaaggccccatccggtagaagaaatgtacattcctatgaaataaaataaacatttcattact

SEQ ID NO: 79265 - DNA, 822 bp, Cannabis sativa
tggttaatttttttctttttatttattcaaaatcatttataaatgtaaataatatatgttcatgatgattaaaagtcatcacgtacggaggagacagtgataaattatagacatgttggtaataatataaatatttatatatattttagtaatttacgtacttgtttgatttccttggtcactttcttctcaattatggtagtttctttgatctgcactttgggcgaaatcaactcaatcttcttcttgctcaatttctgaattcgtttctgaactttaatggggtcaaagcatcctttcacccttatttcacatttctccatttcgatctcaacattttgaatacctgcatgaatatatatatacctccaaataattaattaattaaataaaatatgtttattaatatatatccaacaacaaaaacaaattattattgaaaaaaagtgatacttaatttgaaaaattctcttcaatcatgatcctaatttgatctaagtgtaatattctaattaaaattctatagattaattaaaatgtttgagagattttgatttcataaagatattggaaaattccgaaaacaaaattaagcctatagtatatatatttatatatatatatttatatactcttaatgggtattacccattcatgaataatattatggaaaattgagtttttatgcttagttttttatctaattaaaaaatatctcatttttatattatatgagttgggattattttattggctgaaaaaaaaaattaagaaaaaatgtttttttgactaaaaaaagatgaatttgtattaagtattttg

SEQ ID NO: 79266 - DNA, 1467 bp, Cannabis sativa
ataataataataataaaatattagtttatgatcaagaaggaaaaatattggcgtagtggttagttacatgcataaataacgtttttctttttcagtgttttgttctgcagccctagctggatttaagatctcttctaccaactcgtcatatttgccagactagctaggttttgatcaaacttataataagttcatactatatatcaaaggaacataaactatattagaatttaaacaatttatgtatgtttatatataattagtgtcctactaaaagtatagtacaatatatgtattaatattattacgtgaatgagtatcactcaatagagttatagttgtgttgtgacaaaaaacagtgttgaaaaaaaaattgaagtgggtatagtaaattataaattttaaagtgttatcagtcgttaagattttattataataatattataatccagtatattattatcacaaatatataaaaaaaattatgttatataaaatttttactttctatatgtttttaatttttttttttcaatgatagtataaatttatatgcgtttgataaaaataatttattttatttttatcatttttttaaaaaaattctatatgattttttaataacaaaataaaaatatataatatataatatttttttataacaaataaaaaataagaaacttaaatattatttattctaaatattttattttttatctttttttttttgtagtatataataaataattaaatacatttttaattcaaaataatttattattgcatcttttaaataaaaataattttttttaagttgggtaagggttctattagctttaattgtagtagctactttttaacttgttaaaaaattgcgtcaaacttaccttaaaagttacaattttggtagctgctccataatagttattttttccatcattttatgtattaattaatattttgatggaatatttgaggctgctaatttcttcagtcattaataattttattagaaggcggctaactttataatatttttacttaatttttaattttaggtaaacgtggaagaactatatatatataatgtaatcgtgtcagtcatgtgttaccgtacgtgaacctatatttggtcaaaattattatatcacaaattaaccatttaattttagcctcgtttatgtattttattttcacaaacttccttttaaaaatatataaacttaaatcaataaataaaaattaagtaattgataaaattaattatcattaatacttaatcttttttattcgaattaaaatcaataaataaataatattacaatgtaatatatatttataagctatatttagataaagtatttattatatatattctcaattttatttatttaagtttacattatttttaaataaattttaagctcctatgattttaattttaaacaaatatatatatatatttat

SEQ ID NO: 79267 - DNA, 4014 bp, Cannabis sativa
aaccaccatttgttcaatacctgaaagtgcaaagcttgagagggctaggccgctagtaagaatgcccacaacttcccaaggaggcaatccaagatcaacggaggaaagagtcatgcaaactgcaggagacataaaggcaattgtttggcaaagttttcgcacctgcatgaatgcatttgaaaatattagcaacaaatctagctttaccagtttatctattaacatgtttactcattaaaaattgtgtgtttgtggtttaaggtctaaataaacacatacacatcggagattggagcagcaaaatgattttgcaacagaagctatgggagctacatggtagtaatgcaatttttctaactttagaaaactaaaatatatattatgtattattgcaaaaagagattgttcgacaatgaatgtcaggtatcatcacgaacatttcataatttctccttaccgtagtggtttcaactccatttgcaatcaagttatcagcaatctgtgaggcaatactagtcacaacaactgaagccaaaggaggtagaatggaaacctgaaacaagtacatgataacaatcaaataccaaactccacaaacatttgtaagcacatttcacaagaaatggtcaatagaatttcagagcacgctacttgaaaccacaataatatagcttattgtgcaaatcagagatcatgtcatattttgtctttttatttatttaattcatattattttattttatttttttgtaataagtactagttgggcttcatactattagagaagctgatgattctcccctcaaaaagttaagtataagaaaataatgtacgcatgcgaacagttgtctttcaaataatgttcaataaatacatgaaaactctttttcatgaaatttatcatccatgaatctcttgtacaagatgactaaaatgaaattttgtttcattttatcactttttttgagcttaagttttctgattcagaatttcaccatccaagagatgaatctattgataaggaaggaacttaaaaaacaagatgaatggatgcgacaaaatgaccagaaaaaaggaacatttggcttacccacgcagcttcggtcaaattcaggctcagctcctcactgcacacgcattgaatagaaactcagtttcctaaggactcattattcaggggaaacatgtatttgttgaatgcatggggtatcataccaccacatataatttgttatacatgttttaccaaaatattaaaaacactaatggttttcttttatgacattattgaatatacaaatacatattctgtgcattatgggaaggatcgcatagagtacctgaaataagtaggaagccatgataagcacgtatagtgaccccaacttccacaaaaatgagcgtataccatagcccatactgctggagttcgaaaaaatgccttccatggtacaccctgctcaatacaagagagcaattaagaaatggcaacagatcataagatgaaacccgaagaaaacgaccactgaacaatttatggaattttataaaaattcagcttccagcctagatttataaacttataataaccttgtttgggtatctactagccaagaatatctgcagtgtccattgactaaatttgacatatattatgttatataaaacttcacaaccattaaatttctaaattgacccacacagcataccttcagtgaatcacccaactctcccaaagaatcattccaatttttgttcacggatttagtctgggaacctataaaataattgggagaaaaggaaagaataagaaaaaaaaaaacacataaaaattattcccaaagagaagattaaatgtgagaataaatatgagattagtattgatttaattattcatattgtgccgggacacattctctaatcaaaacaacatttgagtatagaaagtcagcctttcttcttgaaaacaacagagaaatggctatctcagtaatataaacattaactgctcaatcgattaggatttaaggtaagtgtgtaattgtgtatgttaaatatgaggggatcctaaggtggatgtgtatacacatttcatctttgtatttggcactcttcaataaatttgagaaaccccctattggtttcaataagaaataaaacaaacaataaatcctcacctgaggtggattcagcagccaatgtagcattgtcttccagaagctgaaaaccagcgtaccttcaagaaagaggatcaactcacagttaaagcaacagaatatgctttcatttcatcaagtatgtactgccttgagtagagaagaaccatgtacagcaaaacaaaatattttgcaacttttactaattagcaacaagactagttttgctttactcaaatacaggcttttgaaaatattgcagttgcactagcactgaattagaagaaggttagggaatcttcagtgagtttagagatgactcttaccagcctactcccaagaggccaaatatgtagaacacatactcccaaccaagattttgaattaggggtggagccaagagatatctgcatggattttaaatgttataataactaaactaaagcactttagaaggattagaggaaaaggcagagttaataaacttatggcagcactagtaaaccagagttcagtttttgtatgttcatgtcagcaatttcgtgatcaaaatgtcgaagagaaaaatcacgaagaaagaagaagcaacacttccttgagaacaacttcaaagtatataacgtaagaaaatgagatctcactagatcagatgttatagagtaatcattaatgagatgagtacatataattatttattaattcactaatttatgtagtactgtaaaactaaacaaagactacaaagtacggatgatttttgttttcttataatttaaaagtaacctttcagaaaatcccatcttacaaagatgttatatttttgatcaaatataggccatcaagtttgatattccattcaccattatgattccattgcgagagcagttgcttggaaataagggcaagcttttataaatcataaatagtgttcagtaaaacataccctgcaacacttcctacactcaaaccaccaaaaacaaatgccacagctcgtgagcgctcttccaaaggtattgttctgcaggaaaatgtggttatttagttagaagtacagcctatgagctaaatgggacagctagagtcaaagactatttgacaagaaaagcacacttttacaagaacattataacaaacaatatatataatcatttatcagactatcatactcccaaagcaatatgaatgtcatacatgcctggcaatcaagtcagttgcggaagacggggaaactccttctcctattcctacctaacaccaaaataagagaaattaggggtcaatatgggagttgtggcaaaatacatactattcacatcagtaagatgggtcgttctttctttccttcgattctataatatttaataatctgatcctttcaaataaaataaaaacttaaccaagttgaattgaacaacacagtagaattttaacttaaaacaaggaggtggaaccaagtaccaaaatccttgacaatagcaagctgggcatataccctgcaagaacaggtacgagtgctgtagccaatgaccaagtcaaaactccaaacttaagaacttttctgcataggaaaaaagatacagttgagcataacacatataatatatatggctctagcatggtccacaaaaggaaaatgcttatgatgaatgctcaaattcaataatcactggttaatctgatgactgaagaacgagattgctaggccctaggctagctaccgatcaactatgttgactaagaggactatcagtttaacatgttcgaaaactaccactaccagtcttacaaagcctcaagagctaagaagccctgtatagaacatacataataaagtagtgctatactttctgcaatagat

SEQ ID NO: 79268 - DNA, 3853 bp, Cannabis sativa
tatgaaacttataaaaaaaatactataaaaaagtaaaaaataccgcttgaaaatatttttataaaaaaatgtcaaaaattagtacaccatgtaaatttcccattagtaacgagttgcgttcaaaatgggccttgtcaataaacgggccgaaagcccaaaactactgaccttctccggttcatctaaaaccgttgtttaagtattatttatacgtatatataatattatttagggatttttatcacactaaaatattagttggaaaaaaggtatgggtatcttcaagaaaaccatgctcagtgaccaacaaccagaagaacatactcatcggtgcaagaatgttccgcctccgacgaccggtttactcagcgcattaccatcaaccggcgacattgctccggtacagcgaaacgttcttgcgtcaaccgccgtcgaccgacaatccggtaacggagccgatgaaggtgcatctaatacttacggcgataccagagctctgggatgccttgacaataaagccgatattagcggattcgaattgagtgagagcttggggtttgagagctccgtaataatgagaagcgttaatctcaatgatgattcgtatcgggcggtactggaaggactaccaccatcatcaagatcgattttaaaaccgagaaatgaaacagcaatgtctgaaagaattgtgaggagaaacagtattggttcgggtttggagaatttgccgccatttttgtcttcgatggatgagtttggacggccaagatacgttcttgagagagtgaggagtgatggacggttgaagatctttatggggaagaataagcagcgaagaggagttgttcgtacgccgagcctagacggagaaacgaccacgaggctaatgcttccttatactagtcctgaccagtgaccattactactgagtacccatttttctctttcttttattgttttgccaatattgctttcaattcatttttggcgggaagatgaacccatatatatcccctattttatttataatattcatatcatatgcactatttttcttttccattttctttgcttgttataatcaatatttttgcaagaactaataataataaataatgatcattcacaaattggttgatgtttcaatatttcatggtaattttgattaattattacaacttaattcattttcatggagtattattaatttctattaatgttaagttttaaagtcatagattagaataactttctcttgttctttcttgtgttctcctttgtctaagtcttaatcgaatgaaacttgtttcaatataaaaattaatggttaattttacaagcatatatattccgtttataagttaattttctttttcttattaaaagatcagtttataaatagttttgattatactaaaaagaatatatatttatacatgggaaggagcaaattcatttgtacaatttattgaaatgcggtgaaaccttcgtaaagtgttattttcagttggtcactgttccatcttctattccacaaataaaaatggagcgttgctattggccactagtggtacctagcacccttaagactgttgtcttgcgcttgactagtaatattccctaaaagttagaccaataacgatattaacacgtaccactggtatcttttatcatttctcataagatgtgtctattagtttaacatgccagctcaaaaatattaccaagaattgctacttcactgtcacaaagttaatgaacagcactttaaaagctagcaaactctcatagctcctaaatatttaattagaagttatatttataagacaacatgaaaagctagcaaactctcatagctcctaaatagaacaaatctaattgaatttcgtaaaatttcagcttaaaaaaatacgtttaacaaaatttagattcctaattaatttatacaattaaataatattattatttttaatttctactcaaaatacccttcctttcatttctctctctgtttcttcctcttcctcgctctctcttcctctttcttgcaccaccgatacacccaaaactcacgcaccgagaccaccaacaaccactaccgaacctcctctcttccaccaccgaacctcttcatctacccaaaactcaacaacaacctccaaatctcacctacccagatctttctctcttcctcctcctcagcatctctcaaccaccattgccatttgtcaccaccccacgaattgagattgagacggaccaccagaagctctctctcttcctcttttgaatttgtatggttttttttaccaaaatgtgattatcaatggattatcgatacttaatcaatagtttatcgaagattttgtctgtacacagctatttttgtgtgcaaatagaaatcatcgataacctattgataaatgtcatcgaaatactaattttaaaaatttattataaacctataatatttttaattatttatttattttgaataaataggatagttatttatatttatattattatataataataattaactattttttctaaaactagtaaaaggttattataacttattttcacaaatattttataatattattttaaattaacttaaatgcacatttattttgtcttatagttagttaattaaaattattttaaaacttagctaactatatgttatatattgtatataataatttcaaaaattaattaataattaatgattttggaaatatttttatttaaataattaaataaatcctaactatttaattatttaattacaattaataaagacaagataggggtttaaatcaatttaataaaattaattagtaattaaaaatagtacttctagttacataatggtagattaatggtcaaaggaggatgttgtgaaatttctaaagttacatcaaagaacaataaagaagagttcttcatgagatagattgttcttagtgtagtttatttcttttattccaaaaattatttttttagaaataggaaatatttattcagttcacattttatttaatatttaattaattatttgttaattgttagtacatgcatatttaattgctatacataaaatcccacacagtttgcttttgataatcatgcatctcatattaaaaacataattaattatttaagattgttccatatattttatgtgcgttgaatttatagagaaatcattttcaaatgctagaatgtattaaatattttaataatctagtaatacacactaagtgacttgctttaaaagttagtcacataattaactaatatttttcaaaatatggtattttcaaattaatttaattattttcagacctatattatagtaatataattaatgtattacaagtacttgattaaagattaatatcaattttttaaaagagattttaataaagataaacataatttaaaatagtgagtgggagaaggggttgtcatctgttatgaaactcgcggcggtctccattattagtccaacactgagggtatatggaggacctagacaattctgttttcgtccccctaaggaaggtgttgaactatacattgtcaaggttggcttcttttatgataggacaaagtgatatattttagtgcgatactgacccttaaggcggcgctactaagttaagttatgaaatccaaaataatggattacactcacaaagtcatgtccttgtctttgacactaggggacataacttgaccaaacaaacagtactttattttgtaagaaaaataagagttattttagttacaattaataaagaccaaacaagtcttgtagattattcgatattaatttgaccga

SEQ ID NO: 79269 - DNA, 7621 bp, Cannabis sativa
aaaaaaagaaaaaaaagaaaaaacaaggtattattacataattttatatatagttatgccatatttaatgagcatttactttttatgccatatttatcataaccttactaattttttccatacttttgaaaatagcccatatatttatggtattctatagaaacacaagaaaattacatgaaaataataagaaaataacatcaaaataataacaaagtaacataaaaaaaaatatacaaataacaaaaaattaacaacaaaataacaagaatataacataaaaatacactaaaagaccgtattttatataaataaaatctaaaaaactgtaaaaatattaaaacctctgtgcaaaccgtatttttctaatttttttttttttttggttgcttttgtgtttttctgaaattattcaaaaaaaaaaaaaaaatccaaaaatacaataataccatagaaagtgtacaaacttacaaagtgttaaaagttttcaagattggatttaatgcggtacaaaagtaaaaggcccaaaacattcagccgaaaattcaacccaacaacaaatttggagtcaaaaatcagatatcccactgtgagcactccaactcgtcgtcctctcaatatcggccattgacgacgttaagaatcgaagattttgaaaacgccgtcttaccaagaattcctgatcgaattacaggttgctttgattgtcttttcaaagatttttcttcttctaggtacttcaattttcgtttctgatttcgggattagggtttcgtttatcatctaatcttcaacctatatacacctcttttggaacgtgtcttcaactagattaactttgtagatttatcttttttttccttttgtcaaaatttcgaatcgtcatataattttgtagcatactgaacaaatttgggaaattactgtgctttatctccaatttgttattttgaatgcatcgtttcgttgagcattgccagattgttatgcttggatgaaagttggtaaatttgtgatgaagcccattgctgtgatatgtaaattgatggtgcagtatctgatcaatcttccagtagtatttttgtaggatgcttaggactttcgtttattagtttaagatctggacatgtttctttaaccatttttttaattgaaaaaaaaaaaagagtatttgtgttaagaaatgacgtagtggatatgttgaataattgagatggaggaaatcgtaggacttgatatgtgatataagtaatgatattgtatattaccgaatgatttgaattacagtacctgcctcaagggtcagttaattatttaagattgaaaccaaggctgtaatggactgataaatttatgaactaagtacattgtcgatgtactgtgagtagtgacgcttatttgggtcatagttgatggaattaattgtgtatgctgttttgcaaataaaatgagctaattcaattgatgcttgcttgtgagcttttgaaagatgcttcctctaagtttgtttctcagtatcatttctttgttttaatttttgatttgttagttaacatgtatcctttgtaggtttatgagatgttagtgcttattataaattcaaattctgtatgtaagtgcttctttcataaatttgcagattgttggaattttatttcagtatattactttgttggacctgcaagttggagtatataattttttattgaggtgcttgtaaatttccatagccatgagttttgttttccggggaacaagatcagatatagaaagtggatttactggatttgtacctgagcggcgtccaatggtataacttattcagatatgctgtcctcttacctttttattttcatatattagattttcctttcacataagggtgctattttatttgttttctgtttgctcttctcctcagcgtctacattcagcacgtccagtcaattctaattctcttgccttccttgttacaggtaggtatttagattctccattgattcttactgatatgtttcaccagttattctgtattataaatataaatattaatttctcttactgtatctttatgtcagttttattgctattcatgattctaaactcacaccagatgtcccctaattttctggtatcttctttctctgactattagttaggagttaatattagtcttgctggtgatgtttgctgttggtttttggaatcataatatatttatgggatcctctggatttatttatgtagctatggcttgtgcttggtgtctttttgatggccacaacgctaaggatgtatgcaacttgccagcaacttcaagctcaagcccaagctcatgctgcagcagctggtggtcttcttggtcatactgaattgcggttgcatatcccaccatctatctcactagcaacacgaggacgactgcagggcctaaggcttcaacttgcactacttgaccgcgaatttgatgacttaggtgcgtacttgttaatatactgtgtaataagtgtttcaaaaaatatttcttcattagagcatctccaagggtgcaccattccaccaaatagtgtatctcttcacactatttcactccaaggatacaaccaaatgatatatcaaattggtgtgcaccaaatttcacaacattaatggtggtggattttgtatctacaccaaatttgtgcataactttttcttttcattttaacctttttttattatattacaaaataattataaattatttgttggcaatatgcataattatatcataaattggttattaatgtaaatgcaaacattataaaatgtgagattttttaagcaaaatatttttatttgtcgtgatattaggagttgttacactaaaagtaatagattctgcactatattggtgaataaaatgcacaaaaatggtgcaactattggagatggtcttacaaatgaattctgtactcccaaaattttcaaattttcatgatgtcatcacatcaacttctacttaggctcttctttcctgtacatatcaagcttgtagtgtactgttcccagcaattatgccttttttgatttataattacctaaaaaacacaagtcaattatttgtttactaccatttcccaggacacagaacattaccttgagcaattatggtgaacaacactagtttttctcactatacacattccatagtaaaagtattagtaggtgtgctttgatgtatgatatatttccacggttcttggatgtatttccaaaacctttgatgcatagtaacagattacgagaccttgagagcgctagatgcagataatgctccaacagctcattctatgacggaggaagagataaatgctcttcctgtccataaatacaaggttgctgatctacaaaagtaagtttcatacttgttattattgttagagatttcaaaaggcgaagtaattttttttcttgcatttttgtttcctgaaattgaaacaaacatttagaaacttcaaagatagtttcactaataattacaaggcaatgaaaaagattattcatcagactatttgttttcagtagtgcctcatctatgcaacaggcctcatcgtcagcatctgctgaggtatgtgatcaattttgctactttttgccccattttatactaagtttcagagtttggtgtttatgtctcctgctcacctcattattaagaatgaaattatcattttctttttatttagcttgcatgtattactttgtagtgagtaatctctgttgttagcagaaacaaggatctaatgatgcagttgtgaaccccaaggcctcagaagatgaactgacttgcagtgtttgcctggagcaagtaaatgttggagaagtccttcgaagcttgccgtgcttgcatcaggttcaatatattttcttttgtattacctgaatactcttgagctaatgtcgcagatgtttaataatctataaacaaatggactttaactggttattttagtgacaatagtactttttttttggcagttccatgctaattgtattgatccttggctgaggcagcaaggaacttgtcctgtttgtaaattcaaggcaggatctgtgtggcaggaaagtggagaaggtgaagtggatgcttcttttatggtttagttttcttgagtatatgttaattataatgaatatacccgcctataagctttatgtgacttctatacatggcgcaaggtttgagtcatcgacaacagtttcttgtaactaatctttagatattgacacattttaggaaaaagaattgacactatactcttgtacttacttctagctcaaacatattttggtacctttcagtaaatatgagaccatggtttcgattattacaaattgatactgactttatagtgcacgcctgactttatctctagcctaattaggatatttgtcctctaaattttgacatgtactaagttatgttccttgaacttttcgggttgttaaaatttatcttgaactattggaattgttggacttaaaattttttgtcaaatttcatttaattttactaattcagtaattatttatatgttaaatcatatttttcagactttaatatttacaaacttatgccttttgaactatgatatgtattgaatcatccctcttaaattttcattgtcagattttttttattaaaattgaataaatttgttaaaagaacaaaaaatactaattattcttatttttactattgtcatttcacgtaacatattatatatatcagacaatacttgggaatttagttttgcaacgactaacgaacaaaagcaatcagaacaagtgttaaaactaagtcatacagagttgaccataaatatcttattcagtaaaggctaaacaagctaagtaaatctcttaagatgcaaacatttcatttgaatttcaattcagaagcccttattttcctttgccttttccctttcctttttttgaatctaacttggcttgaattcgagcggcagcagcagcttttgcttcctctctctttttcttttcctcctctttcgtggctgcggcaatttccctctgcttcttcagttcactgcataaattgtcaaatttgcaacatatcagagaatgactataaaaaatataatatgataattttttttttatcttttgataaaaatttgacttactctagtctagccctttcctcagacacactaccaaggcttgatcccttccgtggattgcaggaaattagttccacctcaaaaataagtgttgccctacaaaacatatgggtcaggacacgagacatggttagagtaacaaaaacaagttaagcaacccagcaagttctagagccaaaagaggaaatatcatctaatgtctgaaaccctaaatctttttacttaattcaaaaccagcgctaagtggcaacatcattaccacactattaaaaatccctaccttatattaagagcatgaaaaaacagaacaactgtataaagctggtcaagttaaatgcacaatttgggtttcagttgcaagccttactcgggaagctatttttaatatcacaactagaataaagacattactccggtgggatatcagggggagaaccagcacttccataggcatagtctggcttgcaagtgattttggctatctccccaacctggaaacaacatggagaatcatgtgaagtgaaaccttaattattaaaattttctttctcaatagaaagtagctgaccttcatagttcgtaatgcaatgtcccaagccttgatcacagccccctttccaacctcaaaggagaaaacagtattatcttcccgtgtagtgtcgaagacatctcccgtttcagacagaattccctcataatgaactatttagaataaaacaagtatgaccgtaataaggtcatatgataagtactattccagaattacaaatttttgtcacaattttaaatataattaatgccttcattaacaatcagaaactttgtaacacaatctttcactccctaaaatatatataaaaaaaagggtttgattaatgataatccagtgtaaaacagtcttactcttcttgaagatcattgatctaagccacaaaatcattaaacatacttaccatcaacaagaggaaaatcttcagttggaccaactgcatctgctttagcatgcctaacaattttcttaaggacacccccatctccagttaaatcaatttcatcggccatggtttccaacctttctgacagccataacataacaccacacaaaaaaagaaaatcatgaccaaaagcttttgaaagcaataagacctttaaaaccagaaacactaaacattagactaaattagattacactactaagaaatgaagtatcctaaccatgacttgaacaattctagctacaaaatctcataaaccaaataaaaaatgaccttttacagaaaatagcatcatattatgaaactatgcaaaattagagtaatttctagaacatttcaccccaaaaaaatagggaaaaaaatgggattcttaaaataaaaaactcacaccaaatttataggaagcgtgtaagaatgaatgctgcaatttatatataatatgtattatagcccaacccaagaaggcaaaagaatcatatcatgaagcaaagataatacttttcaacagccaagcaattgttgataatcttaaatatttttgggggaactcatttctaccatagattggcttaatttctccccatagaggacttcaatgggttcagtattgcatttctaaaattcataatcaaaacatagataaaaattaaaatgataacacacgataccttacagcgatgaaacggcaaagtggttggccggaggacgcaacttgagcggcgggagggacaacgatttttagggtttgtgtgtggatttcagaaagaaataattgttttgccggagaaaactgtattgggtttacctgatgataaaaattgggagagtaagaaaataaagttagattttttattttttttccttcgtcaaaactaaagatatttttttaaaaaagataattaaatgtaataaattggacctttttttaaactatttctcattctctctgaaaattaattggtcgatgcgattggaaataactgtaggtgtaattatggatgagaatagttacacttcattttaaaaaataaatgtgtgtttagatgttaaataataattgtatatgaatttttatttttatatttggggaataaattgttaattatatagtttaataatattaattattgaaattgggtaatattttataggattaattgcacaatacaacgataatattaaaatatttgtaaaattatcttcatcactttaattaattgaaataccgctatcatttcaataagctttcaggcacgtttaccgaaatgaaaatatattcctcttttctagttgatagtctaatacgcaatgcacttcaaaaaatttctcttatttatttattcaatttatttttctctctcttttattattattattattattattaaaaaactgaaataatgagctattcacgtagtctcactttaataattttaaaat

SEQ ID NO: 79270 - DNA, 4390 bp, Cannabis sativa
  modified_base (2185)..(2190): a, c, t, g, unknown or other
ttattataatattcgataataataatagtataaattgtttaaactgtattgtaccataccgtattttcgcaatataattttttataattttaaaatttcgtgttgcgattacaatttaaaaattataaaaatcacatataaaatttgattttaaaaaaatattacaaggcatcacccacaccataatagtcataggatgcgtattagtattactgctacctactagtagtagtactacccaccaccatatattaaaaactagtgagccccacagctaacttattattcatttattattataaagaaaaaaataataagggaaggaaggaatggggtaagatttggaaaacgacagcaccgccaaaggaagagtaaaacgacattagtttgataaacgaaagtaggtttgtgaaatgaaaacgacaagtttgttggaaaacgacattagtttgataaacgacagtaggtttgtgaaaggaaaacgacaagtttgttggaaaacgacgagagccggaattgattagtatatataaatatagatatataatacaaacagcaaagcaaagcaaacccaaaacaaaagagagagagacactctcttctctcttgtgtgtgtgtgtgtgagtgtggacacagtagtagggcttcacccttctcttctctactcaaacactcatacacacttcaatctgctcagtaagcttcacatctctctctctctccttatatatatgtttatgtactgtacgtatgtgtttgtgtttgtatatatatatgtatatgtgttttgtatgattgggtgtttgtttgaatggttgttgttggtgttgtggtgattgtgacaagtgtagcagtgtgtttgtttgtatgatgggagagagaataacccctgggagttacttccagtaccctcctcctcctcctcctcctcacactcaactccatgcttctccacacaggtcttcttctattcctatcgatcgagaaaggtcagtttaattctttaatgggtcttatttcatttttctggatgtcggtgcctcactcctcgatttcaattattatgcaacacaatagtttattgcctttgttattggttcagaattgaaaatattgattgggtttattgctttcactattcactatcttgtagtactccatattcacttatccaatgttaattgagaaggagatctgggcatttcctgcctttatcttgttttcattgtgttgttctcttttatttgattatcatcacaatggagtaattggtttaccaatgatatgatgcttaatctaattggtttggaaattggcagatatgtggctgaattactggcagagaggcacaagttggggccattcattcaaattttgccttactgtaccagacttattactcaaggtttattgatttcttaaagtttattacctttgagatcattgtttcttgtgttattatatcttgtgccaggttttcctaaacaaaaatctctttgcattatatagttatagtaaacactaaacacatgttcctgcatttttcggtaaaaaaaaaaaagaggactgaatctttacatcttacatgggtctgaaagtttgcttttctttcctcttgtgattattttatcctgcctatgagtttgcatattcagtatttgaaaagaattgtagggctactgcagcaaagagtaaagagttaaatgttgcgattgtgtcagcactagaattcgatgtactgatatatgccaaaagcaattgttcttctttggtgcttaaagtcatcagttctattggttggaagttgatgtgtgtaactaagtgtttagtttgtgtgaactcggtaaccaatcttcttgttcacacattttgtgctcaaaccttacctttttgttcacgccaatcacagaaatcagacgggtaactggaggcttcaatacaggtttcgttgatcatgaaagacttgagcatgagagtccgcttcggtcattaaatcaatttccaaatggtagaccaatggatttggagggatggcctggaatgcaagtggaggtaatgtcatttcgccaaattgcacttaagtgtctcagcaattacatagttaggccaaaatattcactgtggaagtgcctgcagtcttgccaatttagtgttggttttcatagttttctctctctctctctcnnnnnntctctctctctctctctcaagtctaacaaggaattttcaacagtacagttttaagtgcagaagtttatccaatttttttgacctgatgtgatattgggtagaatttgttatccacattttctcgtagattataaagcataacagtaatatgaagaggatgtcagtgtattccattttgggctaatgtgatacttaaccagcttttgcttagtgtatagtatcattgtaggaatctgcaaagtgaaacaggaaaattcatgcacatgaacttagtattaatgacatacaacagctaattaagccatttttaatggactaggagttttgaaaaataatctttatgtgtgttctttttttaaaaaaaaaaaatcaaaatttcgatattgcttaactcttctttaggaaaatggacattctcaaagaacagctccataccagtctccttccatgggatggccaggtgcgcaaggaaatccaactactcctaatgtaaagaaagtagtaagactggatgttccggtggacaaatatccaactgtaagtaatgtgttctcatctgatactaaggttatatcgaaattattatgtatgtgatggttttttatatttcaagctttcagtataactttgttggccgaattttgggaccccgaggaaactctttgaaaagagttgaagctgtgacagaatgtagggtgtacataagaggccgtggctcggtaaaagattctgtgaaggtactttgttttgatcaaagtgaaaggatttttcaaatgtttcttgtttgttgatgctcgatttgatcatcattgagaatcctctcggttatttttttcattttcaggaagaaaaactaaaagacaaacccgggtatgaacacctaaatgagccattgcacgtccttgtggaagctgaatttccagaagatgtaataaatgcacgcttggatcgtgcggtggggattctagagaatcttttgaaacccgtggtatgtagaatattgagcttgcagttttgcattgcctctactccctcccgaagcttattttaacagtttctttcatgttttttcttccataggatgagtcgttggatcattataaaaagcaacaattgagggaattggcgatgctgaatggtacactgagggaagaaagtccaagcatgagccccagcatgagcccaagcatgtccccttttaacagtacaggaatgaagcgagccaagacagggagatgacccaccccaccccctttaggcctttaacgagcgaattgtgtaactgcgaccgcctactgatgatttcctggttaataatgtctagtactgagcctgaggaggaggctggcattgacaaaaactgacacacacaaacacaccacacacacactcctctcctgagtaaatttttgggctctctcctctcctggcaaagcttacttctgcaactgcatcaatatattctcttattcattttgctcaacacactctggttttccattcttttatgtatcattcctcccaaatatgaatacattctatcattattattattatattcattagtttattattgttggtaacttgtagcccagttgctgctgcagctgagttttgaaattcttcttaacgatctctattagtagattcttttcattaactagcttgttatgacatgaaaataaagaaatttcaatttgtaattatatgtttgctgattctgttataatatatttgttatgctagttattcacattatatcagttttactaatttattcaatcctttttccacgaggaaaacagaactttcattaatcggtaagaaagatcgtttatcgtaagtcgaatgaaggttgtgaagaactcttggagactcatttgacatgaagacggagtaagatgggttcaaattttccatgtaaggtaatgtgaaatgtgtctaactcggctgaggaaggggcagcggagggagtgtgggtgtgggagttgcaaaatgggtttcgacagagttaaatgtcattaaatattacgaattaaggttgggaaaattaagcgtttagatgagataagatactactttattttacacaatacattttctttaaataaaattaataatataattatatagaaatataccttcagtaattcatgttgaagttataaaaaaattaaatttggttttttaaaagaagatt

SEQ ID NO: 79271 - DNA, 3268 bp, Cannabis sativa
atttacattaattttagttttcactctattttattagatatttattctttattagctgttattagtggtggttcttacagccattaccgccatttcgcaatcgacaaatagtgttatccacaatggcattctctattactaagagattgtgtttgaataaatgcttgtctacaattttttaattcttctataacaacaaatttatcttaataaattaaaactttcttttaaaaaaaaaaaattgtattatttactaaagtttaaaagtataagactgatattgatattataagatgcacacatattaatataatgattatctaaaaccaatactataccacttacaaataagctatataagtttgaccccttgttacaaaacaagaaggctttcaacagaatacttgatagcttttgtagaaacaaaaacttttgggctgtaactttttaaaggaaaacaaatgaaaaactagttgcgtgcgtggtaacattcattcatttgaactttgaagtgatgggatggatgaaggaggaaggcagcagtagaaacaggaaaacgacaaacgaagggttatttgatcaaaccaaggattgacatgacacgcacgcgctttgaacagagtgggtagtgggagtgggtctcaactttctagtagtactctcttttacaatttattacacactgctcaaattatcagaaccagtttcactgttctaccaccctaaaaagggttatgtcattatacctatatccacacgcttgcctcttagtcaccctgaccatgaccaatacctctcccactctcactaagcgcgcgtgcaaaccaatcataaaatctttataacaccaccaagaaaatatataataatagtaataattaaagaaaacgcatgtatttacataaagcagaagtagtagatgtacactaatatatctaggctcccgatgatcaagttctccaaaatatcacaaacactgatacatacactgaactaaaacgacgtcgttaagatataccatgcccgaaaataacaaactgggactttctactttctaatgttaacaatttatagccataagggtggaggttcgttcagatcaatggggcagccgcgcctaacaagacccaaaaacgacggcgttgcagagagttccggagcggggcacgcattaaggcctccgactgagtttgagccgtgactttcgcgcctaaccccgtgggacgacgactcggctgccgttgcggtggaggagttcatgtccttcaacacgcctgtatgtaaaaactctccaatgacaaggcggttggtcgtggaactccagtgagtaccggtcggaaggttgaggtccagcgagagaccggctgttaccggcggcggaaaattagttttggccttggcaccgcggagtgacctggcagctccgtcgtaggcgagagcagcttcttctggtgtatcaaatgtacctaaccaaaccctagttttcttccatgggtctcttatttcggctgcgtaacgaccccaaggacgctttctcactcccctgtagtgcccttcgcgagaagaagaaggagacgccattgagttgttatatttatctataagcttgtaagatattaaaaatttatgaaagtgagtaagatgaaaaagaggtgtgaaatagggagagagagaaaaataaacaaaacaagaaaagcataaagagagaaagagagccaactcggtcacccgtaatcgtcggctagacggcacggctttttggtttatatatataggcaaaaacgaaatataaatgaaaagattaaaatgagaaagccgaaaataatataaaaataaaatataaatataataataaaaacgtcggatggatcgatggttaatcggacggtagtggaatgaagtttgagaatacacgtcagacaaaaagtggggccccgacccgagtaaaaggaacagagccgccgcctgattagacgtatgcgcagagattaggggggaactgtcatgtgactactcttggcgccgtggggtgacgtaagccctactctctatccttttttatttatttttttaattttaattttctgtacggcgctctcacagcggcgcctgccatattaaaaaatgtaatattttatgatttctttattaaaaaagaaaaacaaaaaaataaaagtgtaagggtgcgggatatgttcgataaaagcggcaggaggagaggtagtgacgtgtcgatataagagtggaggggagttttagatgttttggttttagagtgagagggtgtcagaagacgccccacgtggaggggacgtaggtggtgtctgagttgcaggggacaaggaccgagttgggccggggcctggactactgtgtgtgtatgtgtctcgggagtgggtttggaattgggattgggcctctctatatttattattattgttatcaaaataaaattatatttttgtatattaaatgtggttggcgtgtttgagttgggatgatttgggtaagaaaaaaaaaaggtggtccatagtttgggaagtggaaagagtagtaaaagaaaagagaagactagacagtaataatagtaaaataaatcaagcaatgtacgggtaagggagtgacggtagtgacgattgaccattggtcatttgtttgaatgactctagctttttgattttgctgctgctgctattgctgcagccagctactgcccccaaaccacttcgtcacgtgaactctatgtttttcaattacttctgtttttttttttcctggaaattattattattgtttttgcggtgaggtgaggtgaggtgaggtggtgtggtttggatttttatgtcccttttgaatgaaagtttgtagtttattaattgctctaataaatagggtgttataaacgtgtcatcttagcaaggtggcatgcgtattatgagaaatgaaacaccaaacacacttgaccggtttgtgctcggtgtatacatatacatatttttatatgggaaatttgaatttatatccatgttttgtacctaaattaattttttaaactaatacttatatctattaaaaaagtaggattactttttcctataccctaaaatacccctctcattattttcaaccctctctttcttcctcttttctctgtcaaagaaagcctttcaaccgtatgcacaccaaaaacccaacccgtgaggctagatcgcaccacccaaaactcgacaccacccacggtgaaccaccgcacccagccaccgcaccc

SEQ ID NO: 79272 - DNA, 2949 bp, Cannabis sativa
aggttggtggcggtgatggaggagaagacgacgacggtggtcttgtaattgatgttgacgttggagataatggttgttgttgaggatgtgagtgagagggaaagggtgattgagttccttcacttggaaatgatgattgtctcgattcaaccatcacttgatcaaaagatgaaggaattgaatcaactgcatctagtatcaatggctttgcagaatccattgaagtctttgaaacaatatcaaaagtttcatcagtactatcagcagtactagatgcattgttttcttcttcggagtcaccaggtgaagagtacaaactggtcttattttgaaactttgaaaagtcttttgcatcactcatgatagagagttgtttaagtaaccatagtgcagcatcatcattgccatcaacccactcaacaccgttgaatagttcttgaacccttgaaaaagcttctatgggtaagccacctttttcttcaccatttaaaattactgttggagccctaggtgaagagatgttctcaacgtccccaaacaacacctgatcaaattatcaagtaatcaaatggactgctagtacttatatctacaaaatataacttaaataattagggttaccaacatatgtatctccaaaagtataaaactctatggctcgaagatttcaaggatccattattttaatcaatatattttatctcattccttctagatttcaatcataaatacttaattacctctgcccgaaatccttttggataccgctcctttgagttccaaagtatgtccaagttatcagaatttaacattaatatgtttgaacgaatgaatgcagtgttgaacattatgcgaaacatcataacttctctttcagaatccaggtctaaatggacgcactccatcacaacatctccttgaaccaagcactgaatgtcaattttgatcacatcgcagtctacctgaaaagagaaaaaaagaactcaaaactagaggaacattatgaacgttggaaaaagcaaagaatgtgaagcaacataggtaaacaaaccataacaaaagaagcctcacctgacagtaatgtcgcagagtcttctttttcgacatagaaaataacatttgggtagtaaccccacccttacttaagagattcctaccaaaaatacgaataattggtctacagccattttgggaatcaaagctaggtatagctcgaagaatgatacagtctaaagacaaagctcgctcaggaggtggccactctgaagttatatttcttcttgtcacatactgaagataacgaagttgagatggcaacgggtttaaaggtgatagcagctgcaagaaacctttgggagcttctcgatgaacaatttgaagagtcttgcgttcaccactgttaatctttttgaaaatcagaaaactagctaacagaaatgccaagagtggccaaccccctctctcacagtgtacaagaataatattctgctcattcccaagtgacagccaattatcacaaacacgaagaaaatgttgaatcaaagccaatgggagaagagggcaaccctcatattgccgaggatagtccataacggtaacatcgtattcacatagtattttagcaaattggcttcgcttttcaccatcgcgaaaattgaatgcaaggaaagatgaatcggggaattcttcatgcaactcattaatgatttcgtgcaagtatatttggtacaattcctcggtcaagacttccgttgaaaaacacgaatcgaaaactgcaaataccataaaagaaagagaaaaataaacacagaaatgggaattaatagcatccaaagtcaaatagaaacatcaatctaagagcaataacctcacattaaataatcttaataccatatactcggtcaataaattccagcaacccatctgggggtctcttgtaaaagaatctactaagaagagtcatttcctcaaatagatagcatatgggtgatcaccaataagctagctaagacctgaaaggagtaagaatctaaccgttaaaccaagctttacctttcagtgttaatattatcaatatgtacttgtctatgtcactccaaccaaacaccaacttttcctataaatttaaattttcttcaaaagtagacatatttcagctcaatgaaaatgagaaaatgaatatattataaaatagaggagaaatttacaaaatcaataaattaggttttgaaacttccaaccttgtgggatgacaccacaaacaacatacacgaccgtttgggcaatgcccttctttgctaagaaaattttcctttcatctatccttgttgggtaattgaaatctcaaaataaaaaatggaaaaaaaaaataatgcaaaatccaatctttccttcctaaccataaaaagttaatttacttcaataattatatcaatataatctttttcatccctaattacattaaattagacaaatgggaaggagaaatctactccattaccatcaattactacaaaattgttcaagaaaaagataccgaaacaaactagtaagctaacaatattctcaattccacctcttacgtgtatcaaacgcaataaagccaaacctgaaaaccctgcaacatttgaaacacaagggcaagaccaaaatttcacaaaagacaaagctttacatcaattttcacacaaaagaatccacaaattccatcaaatacaatacttaaaagcataaagaatttaataagaacaaaatcgtagtaaataccagaatgtaactgaaagaaataaataaataatgggttcggttcaaaccagaaaaaagccacggtcagcttcgctgcagttcagtccaagaggtccggcgaagatagtaaagaattaagataaaatccagaaaaaaggttaagagagaagaagaaaatggcggtcggaagtgtggagaggaggg

SEQ ID NO: 79273 - DNA, 3994 bp, Cannabis sativa
aattcaaggagcatttttaacgaccttaaaatttcaggagccatgatttggtacatgtcaaaattcagggggcaaaaatcataattagtcttaaataattagtgattttttatttttagtagaaaataattaccacgtcagatccccaagtgtatatatagtagagcctactaaaccccactcttttcgttccgccattaatagggttttaagcttttcttcaaaagaaaaaaaagccctaatttattattatgggtaccccaaagaagaagaagaagaatcaaaccccagaaacccaattccacagcgatctcaatctctgctccaaaaacaaagatttacacggcgcaatttcactatacaaatccgcaatcgccaacaacactcgactcaatcaccacaacctcaatgccctcctctacctctgctcaaactccgtcaccgacccatctctgaaagctttagctttggagaatggattccacatcttcgatcagatgtcttcgatcggcattgttcccaacgaggccactctcactgcagtggctcggctcgccgccgcgaaaggcgacggagattatgctttcgggttggttaagcgaatgggcgagtacaacgcgttgccgaggttgagaacgtacgacccggcattgtattgtttctgtgagaagttggaagctgagaaagcttatgaagtggaggaacacatgtgttctgtgggggtgactgcagaggaaccggagctagctgcattgttgaaggtgagctcggagactggaagagaagagagggtttatcagtatttgcataagttgagaagtttggtgagagtggttagtgaagctacggctaagattattgaggattggtttaaaggaaagaagggttgtgaggttggtgaggtgaattcggaggtggggaagattgaagaggcggtttcgaggaacgggggcgggtggcacgggcttggttggattgggaaaggagattgggttgtgaatagaacaagaattggtttgagtgggcattgttgttgttgtggggagaagttgttttgtgttgatattgatgataatgagactgagagatttgcgaaatctatggcttcattggctatggaaagggaggttatgtcgaatttcagtgaatttcaggttagcaaaggttttggatttgttatgtttagagttttgtgttttcatattattgtttgagttgaattgtgtaatactttaattttatgagtagagtatgaaatctggttgaaatggataaagttgttagtttggattagttatttcaacatgaacaagtgataaaagaaaacttatagtgactaaatcttttaacttaatagggaggttatgtcaaatttcaatgaaatttcaagttagcaaaggttttggatttgttatctttattatgctgtttagagtttttcagtttttatattatgtcaagaaacagagaaaataaagctcaagtttttattgaattgcataatacttgaattttatgagtagagtatgaaatctagttgaaatagctaaaattgttagatttgaagcttcttttttagtaaaggatatttgtttatgtacgattttttttcatttaattgaggaacagaaatgggagggttcttttccctttataatgtttattttgattagttatttcagcatgaacaagtgttaaaagagaactcaatagtgactaaattttttaactgtaatctttattaagttctttccttttgttgttcattgctcattggtgtattttggggcatatgtaatttgcttctggtttgaattgttttgtttttatgttcttgttattctcgttttttactgtctcgtattgatcttttatttatgtttttttatttacgtattaaaggattggttagagaaacatggtgattatgaagctattgtggatggagcaaatgttggcctctaccaacaaaattttgcagatggcggtttcagtgtttcacaggttatagaactgtcttttgggttgttcatcagctccattgtttcttttttcattatgctaacagttatttcgaaatcactcatttttctttatattttactaaacaacagcttgatgctgttgtaaaagaattgtataatagaagcggaaagaaatggccacttgttatcttgcacaataaacgttctcgtgcacttttggagaatgcttcttacagaaagcttgttgatgagtgggtggacaaaggtattctctatacgacgccgaatggctccaatgatgattggtaagaaccttccttgggagtgctcagtgaaactttttgcaattttatttcacaacataatacttattaatctttgctttgctgagggaatgtcgattattgtttcaaaggcttctctttgtcatgttcttatgccaagtgttttttctgtattgttgttttatttatttaggtattggctctatgcaacagtgaaactcaagtgcttgcttgtaactaatgatgagatgcgcgatcacatttttgagcttcttggcagcagtttcttccttaagtggaaggaaagacatcaagtacgtgcacttagaacattcatgtgatataatgtttgctatctgtatagtaaagagatcactctaaaattatgtttgctttaatatgcttcttttacgttgttataggttaaatatacctttgctaaaggtactttgcaacttcagatgccaccgttatactcttctgttattcaggtaccagttatagttggtcttgtgatttttatttttactttcttgttatttactataattccaatttggtttgtttagctgcattgtgatagttggtctttgtgattttacttggcactcttattattaacaaattacaatgcaagttgtttgaaaacagttttcctgggctttacttttcggggggaaataaaatatgaacgtatgtgggaaccgatatttatttgcaccggtatatagggtgtattatgttattttggttgggctcctaggctgctggttcccaaatattacagggttagtcgggattcttagtttaaaaacaaattagctctgcataaattttgatcgttctaaatttttattgttgaaaaattaaattgaacggtgaagacttttatgggagaaagacacagtgaaatttactttctaattatcggagttaaacttaacaaatttcattgggaatggcctgcccttccggcaaatttccatttagaattttcatcccatgttagtttctaattttgatatgtttttttaaactggttcaatgctaattttgataatcagagagaaactgttttgtttgattcttgacatggagttttaccaactctgtttcaggaatcagagaaaggaacatggcatgttcctatagctgatgactgcaccgaagaatctgaaaaaaaatggttgtgcattacacggtcgagtgaagttctgcagaataaagagacttttcagaagagcaacaatctcagctgcgacgataaactactgagatcatgcacgtcaacgacttcacatgacaacatggattcatcgcaaacatgtgataacgaaaatgtagccgtgacaggcaaaagaaaagagagatcttaatatacatttctaactgaaatatttgaatggagactaactttcatgaatgttgagtgagactacagctgacagttatgaggtgcctgatgatgacgatgatgacactgccctattttcagtttttcggttagagcggcaatggtctctgccagcacttaactctgttccttcatgttatgtcctctattgtattttgtgtaatactagcttcttatactgcaaatgttgtagaaaatggtttataattattcttaatttcttatattcaactttggattttttttttcttttcagaatttataaggtgatgaaaattctgttattggggttgatttttctttaatttttt

SEQ ID NO: 79274 - DNA, 1850 bp, Cannabis sativa
gagttttagggtgtttgaagaatatttagagtatttatttaaatgtggtatattgaaaaaaataatttaaatttttaagtatattttatcaaatttccctataataaatactcttatctatttttgaaaatttaaaaataattttatatataattgtttccgatcttaattaaattatatcaatcattatttgccgcaagatatataattagaactagctggcaccaaataccaagtctacgcatggagttgtgttagttaatgttaacaactttcactgatcaacctgcatacacatatatatattagcagcgaaaaaactcgtcttaggggaaaacattttaatttgttatactttaatggataataaatttacataatattgttatatatattagcatttaataataaaaattaattgtaaatatatccaattgtaacaaaaagtaaacgaaatgtattattgccattaaaatgtataattatttacatggttcaatatgcataatagtatatactaaattcagaaaaatacatggaaatttgtatatataaatggttgaaaaggttattatttaatatttattttattgatcaattgtagtttaattaggaatgaaaaagttggttttgaaattggcctttaatggataagattaaagaaggcaacatgaaaaaggcctatgactctctctctctataatctatatatacatgagtggggtagggtagctaaggcatatgttgttttggcactactttaaaaatgtcaaattttgttcctactcttattactgatcttcttttgttcccctccaatgggattattatgaccccatctcgatgactttcggtcactacacatgacaaaccaataaaccatatgggattcagtcttcaccacaaccacacccacaccacaccaaagaaaaaatataatatttcttttacattacaaaaatatatctctacaaatttaataatgacgactttgcttacctccttatttcctcatgtcctacacagttgcttattatatgacttaatcatgtttttttttctttcataaataaatgttcagattgtgataatttgattctcgtctcttcagcatttttattattttctaataattattggatttcgttataagtatatatgtggaattgtggatatatatatatatttatagcaatttgcttttgctggtttctttcgagcttcatatcatatgagatcattggttactatgataagtattaagtgggactgttattattttgtgtacaaataaaaattcacatatatatgttttgtgtatggacagtgtttctaatttttccccaactttttccttaatttattgctctttgtttttggttttttattcgttttcagtttcagttatatatataaaaagtgttaccgatctgagttgagtggtgtaactcctaataattgaaagaaattaagcttcagatgaggaagtgttaatttattatagaattaatgattgaactgatcagctaaaaatatgggctcagttaagaaaagaagaggaaagaaaaatgagaattaatttaactcactacctatatattatatatgagttctgaattcaagtgacgtatataatcatgacactccataattcgttctttgaaataacatcctctgaattagagagggagtgctctaaataatatactttattttaaaaatcgttaaggtgcgaaagagcatgagtgagttcttttagttcagtaataggattcatgttgtgtgcaaagtaaggaggtgaactgtggcgtccaagagacatacctcaggataaaaaaaaaaaaaaaaaa

SEQ ID NO: 79275 - DNA, 3233 bp, Cannabis sativa
cttattttgttctcatagtataagaacatttttttaatcattgatgtgtatgacttttgagtttacacattaattaatatagatttacatatacccaataacaatattaaattattataatagtattgagctaggaaaatattctagcacctaagaaaataattaaatcaaacacactaaacaacattagatttgtttttttattaaaaaaaaaacagatttttggggcaagtaagcattgaaggagatctctcctttatagttgatcttttctcgtcgatttttatggagatctctcatttttggtagctcttaccatggctaaatattgaagcaaagcttctcaccgacattcatggagattgaaaaaagattctcgtcaacgttcatggtgatcggcaaagcttctacatcgctggtggtggtgttgattttagatctaagattgtttggagaagcttcaccgattatggatgagctgacttattttgtggaggagaagaagtcattgtgggaaggtttgtagataccgtatttttgaaaaagaacgtttttgttttttaattttgtttattttctaaatagcaataaaaaagtaaactttaggcctaataaagctataatagaaacaatcccattataaaataacatatctatcgttactttagtaccgcataacaatactcaaaactaattatcatgtagctaattacctattatacaatgatatgatttggctaatgactcataataaaatttacaaaaaatgtggagggttttttttttttaccaatctcctaacaaaggaaagctaattctcattgatgatggcagtgacggtcctagaatttaaagtgagtggggacgtaattttttttttataaaaggagggagggcataaataaattgaaaaagaaaaatataaagtgtatagttagtaggatttgaacctttaccctttaacatatttatttgcatctaccttaactattacaccaaacttactattatgtttataaatattattttttaatacaaatatatgttgtaactaattaaaatacatatacattttttttccgatttctttttttcagggggacgactgccccctctcgctacaatgtgggttcgcccctggatgatgctattaaaagtcatccagtttctaagcttttttaaagcttttttaatggagataatttggaaaaaaaaaaaatcttattttgggtccaaaacaaatgttatttctaagcattcggacattataatttgtttttttaaataaataattgtagaaagtatttaatcaataaaaaaattaatttatcctattttataataattctctaatatgatgacaaaattatttttatttaatatacaaaaataatatatgaataatgatttgaaaaaaagaatgtgagtgtttttatgattaaatgatagaaggattttatggtaatttaagaaaaattaaagatttttataatttgatattaaaaggtctaaataagcattctcacttatagataattgtagtaaactttgaaattaatattttaatagaaattttatgataaatatctatagaataatattaataaaattaacaaccatacagattcttggccaaagattgattgtatatgataatagcgaattttatgttatgattaaaatgttattattaagtatatttttttttaagtgtgtgctatacaattgcaataaaaatttaaaatagtttgcgtacaaattcgctttttatcaattttaataatagttcaatttctaaatcttgaatatttggtgatcctcactgcataatttatttttatataatatatttttttatttttttgtaatattataatttttttctaatcttgctttagacacctaggctgttcttcttttcctaacacacggtaacaccaaacaattgaaacttgaactgaaaacctctttctaatagtggctccttccttgatctctcttctcatgaactcaaactttctaatattggctctctccctcttctaattcaaactagttgaatccaacagttagtttaaagaaaatgacaaactctcttatccttgagctgaaactttgtaatttttaacgattagttttcttaatcttgttttcccattaatacaaaatatacttttggtgtcggtttgaagaaaagtggtgaaaagtctgtatttatcaagattttttccattcccaattttaatattcaaattctgtttattaattttaatattaacatttttaaaaagtttacattatcttatgttaagttactgtttgagataagcttatagatagaatgaaattagaagattttattctctaaacaatgtggaacttaatcatagttgtgtatgctacaatgtggaactttatacttaaaataaaatttagaaacttgtgtttaattttaagtattaaatattattgtttacaaattattaaatattattcaaaactaattattacaaataaaataagtcagcaaactctattctatccacaactctccaagttggaatggcaaattggggttttttcgcggatcgggtcggagccccgacccgatggggcagtgccgccccgttacaatcggatcaatattcgggtctttgccccgccccgccccgccccggttagatttatttcgggtcggggatgacccgatccgctaatgtattaactttaaaaaaaaatcaaattcttaaccctaaatccctaaattgaaaattcaaagactcagtctccttcttcgtcttctatctctgtgcacctctcaccttcagttggcacatcagctccggcctccctctctatttttgtcgaagactgaatggcttcttcacgttgaggtttgcattccgaatttaaatttcaattcacgccattaactgctagtctaatgaatactgtcttcatttattgagtaattttagatttattgatggtaaaaatactgggttttcttctttctagtctttggatatttgtgggtgtgttttagatttagttttaattttaattattgagtaattttgtgtgtttttttatcagaaaaatataatacgtttgaataaaatagtgggaaaattggcagtgaagaacagcaagggtggtactatatgtatttcttgctttctcttgttattaatcatcttttcttttaatttgttattaatcatcatagaatc

SEQ ID NO: 79276 - DNA, 1771 bp, Cannabis sativa
aaagaaaagtattacttgtttgaatggtatattttgttcaaatacatgtcagattccgtattctgaaaaattaatttaatgagtaatattttaaacctcaaccattatatttctacttttttgaactcatttcatggttgagcacaaaatctaatgttatatttgaaattaaaaataaagttttgcgtattatatactttgatcgattttttgcaaaataaatatattgcttttaaagacataataattaaggtactttctacctaattatttgaattaatctgaaattatgtaataaaaaaagacttatatttgtgtaaaatgaagaacacattacaggacactactggagactcaagaaccatcaaaatttaattaattatagtttctatttgcaatttatatcttggacaactttttcatacaaattaatagtgacagtgcaattcatttcagaagatctttttctcttgatcaactttaacaagtgaactgtcccactcagtttggctttaccagtcaaagtcaaaaaccctgatataatatcattatcatcaaccaaaatcgaattatttctggtccttatttcacctgtgaactgaatcttcttagttgaccgagctttgactttgccttccccaacaaacccatcaccctcgactagagcaacatgagcccccctgtagaagaacccaactgaggccttttcgaattcgaatttgccgaagttggtattctttatgccaatttcagcttcaaatttcataacaatggcattatttttgctactcttagtactgagctcatcaatggtcattgatcgaattagaaacttgggagtgtggacatgaaagattgttgttgtaaacaacaaaattaccatcgataagagcaatacgagaagtgccacgtagcatagtcgtttcatacttttcttgtggtgtagttccttagaattggattccatcgttgctgtttcgacgtcgtcgttttgagctggatgaacttgttgggtattattattacttgacatatttgataaacactattaggaataggattgaatagtttatgttatagtagagatggatttagctgtatttatagccaaatgtgacgcgtagatataatataatattatgctaaattttcaaaaagtggaaaataaaacatattatattggattggcttactaattaggtgatgatgagatcctcggatttggaacgacgactagctaaatagtattaattgacgaagttataatgtgcttataatagttgttgttcccaagatctaatatataatacgacctacaagcatcaaataatgactgcttattgtgttaagtaataaaaattgactctatttactttccaacttacttaaaatataacatatccgtggagaggcattaaaaaaagaactactttgtaatcatcatgaggtttattcggcattagtagtgtccaatcatctacagtgacatttcacgatttgttagtgatattctttaatagctatttttttaagttatatgagacttgatatttaattacatcaatatagtatgacactgagtagggtgtatcaagatttgtctcctagctgttactggtttggttgttagaccgttatgttagttagtgacctctgtgagttagacagatagttcctatttttatgctctttctgttagagtgaagttgcaactctagtgtgttcagttaaatctagttagcttagtctatgttggtatgtatatatatat

SEQ ID NO: 79277 - DNA, 4017 bp, Cannabis sativa
atcatataaacaattaacattatagatatacagacaatatcagaaggtttgatgaatggaaaatggaaaacatagctaaatcagtaatttgtaacaagagaaggctgatattatacatttactcaatacctgattcaaaccacttgacaaaaaaaaaatacctgaatcaaaccatacatccattgtgtctgtcccttttacatactgtgatgctttatcgcgatatttaccaggaagaagatcctccaccttcatgtaccaccaggcatcactacccttttcggctattatagctgccaattcaaatataaaaataataaaattgtattgacctattataggtgcatcaaatttgaagtgggatgattaattgcacagcatatccatttatataaattattctttgtagccatgcacagtatgtgtgtgtgctcacaaagagcagcagagtagagaagtggcacagagaaaaaaatcttgaatcaatctaccattaggagagccgttgctataattagataactcttacatttgatatgattaacagtctcttcattcatcagaggttcctttgtttgcacatgataaaagactggaattggaacaccccacgtcctttgccgtgatatacaccaatcagaccggctagtagtcattgcagaaattctgttctctgcctgcagaaacaaagctcacgcacacaaaagatagtaaacaattttgcaaaatcgcaaggtaccccaagaaaagaagaggaaaaacactataaaatgtcaaaatgtacaggaaatacctgagatggaatccattttatttgaccaattgcgtccatggcagcttggcgaaatccttcaactgatgcgaaccattgttctgttgccctaaatattgtgggttttttggttctccaatcatatggatacttgtgtgcttcaaaataataaatggaatttttttgtaactgccacatgttgtttatatggtacaacctcaagagtaaacagaaaattgactggattaataattgaaagcttgaaccagaataaaagaagacttaccataagattcttccataataagtgacaaattctcatccaagtatttcacaacagcaacattaccatcagcgagtacatcaagcccattaaattgtccagcttcttcagtgaactttccatcatcgtcaacaggggaaagtagtggcagtccgtacttcatgccagtcacatagtcctcctgaccatgtccaggagctgtatggaccagcccagttcctgattctgtagtaatataatctcctccgataacaacaggacattctttattactaattggatgtatatacctggtatagaaccatacttcagccaacaggtattcattaaatatcattttataaatgctcagtatatatagaggaatttaatcattactcagttttatgtttatatcatcatctgtcacctgcaattttcgagatccgaacccaaaagaactttcctgacaacaagctttacactccatttaccctctaatgttgacacaagatctgaagctacaataagaaaaggcttcttttcctccttcagaacatttccaagctgttgttttttatttccagcagataaggaggcatcttctgagagtgattgtacttcaactatggcatattgaagcttagcattcacagcaacagctgaaaattttgagacaagacaagttgctagattataactataaggaagatgaataactcagaacagaacatgactgtattttaatgaatccacgtcatggaaatatataataaacttccagcaaaggaaacagaaaaaaaaaaaaataagcaaacattgtgaaaacattgacctaaagaagaatacgaggaactcaaagcatgattgattataataaaatatataccatttatgtttgatctgtaatagtgaattacagttcaggaactcaaaacatatttaattataataaaataaatgtatttatatttgatgtgtaatagtgaataaccattcatatctttctatagaacgatcaaattggatacaagcaattacattttataactattaagtaaaaaaaatatacccaccagcattcgctggaatagtccagggggttgtagtccaaatagccaagcacaaatctgggaaatagtcatttaataagcccccagaagctggaggtgcactaaccattctgaaagtagcatatatgcttcttgaaatatgcccttctggatactgcatagtgaaattttgagttgagtattaaattaaattaacataatattttgacttaagcataggcgtcaaacaactcgtagaacttgaataattcattaagtagcacattattactaatgacggggaatgaatgttttattccatatatagtttgtgtgtgttgtgtacatagagaggggaaaaaaaaaactctacttgagatgattcagtatattttatcaatttactggaaatacagaaatacatcacaagtttcgatttagatgatgaaagaggtttagagcattacttagaaaagggtgtttccaagcaaaatgtaaaacagcactaatataacttgctagagtatggtctctcctgaatacaacacactaatggaagtggccatattcagattaattaaattttcaatgttacattaagaaaaacagaaataatacctccaactcagcctctgcaagagcagttcgtgatgagggactccagtgaactggtttcctacctctatagatataaccttggattgccatttggccaaatacttcaatctaccagtttatacaacaaacaaaacaatcagataacgacaaataagatcaaaaaaaattatataaaagatacaaagattgaaactgaatacaatgctaattcatgaattgaatgcaacttttacagccacaactttttttaaaaaaaaaaaatccaatttaagctaaagataatctatcttctacagtttgtcctatagaaggatttgtacagagtcaacaaataacccagagttataaagatgtgcataaagtgatatcattggtgcagtaatagctacctgagcagcttcatattctggatcaagagttagatatggattatcccagtctgcccacactccaaaacgctgcaacatcaaatagttcttgattcctttagaaatatccaaaattcccttttatttgaaagtaacattagactgcactaaatttagaacataagtttcatttaatttataaattatacataagaagttcgaaaagtcatctggtaataaattcgtgaaaattaggagtgttcactggatcccattcaatgtttttaagcttatccagattcgatccaattatatattggatgttaattttaccatatgatccaatctaattaatttcagtcatccaatctgatccgatcacaattggatatccaatgtttggcagttaattgtaattggattggatcgatgtatgcacaccctaatgaaaatgtggcaaatagttcaaatcaaaactaaaggagagactatacaggggatgttaccttaaatgaagtcatttgagttttgacagttgctttggcaaatttagctgccttggctcgtaactttactggtgtgagatcctttctagtgttttcatccagtgactgcaaaactaataattaaaatgatgacccacatatgtattagaacttttccttagtctcaacaaaacataccataggaaggttggtaatacatccaaaaaaatgagttaaagtggaagtgatccttaatatatatgtcatcatgccacagtagtaagagaaagttgcaaaatacacttgcctttcaactcaattggtaagccatgacaatcccaaccaggaatataataaactctataattttgaagaagctgtcatcaagagaagaaaaaaaaaaggatgaattcatatgaatattgtgaataacataaacatttgataataagctaaatta

SEQ ID NO: 79278 - DNA, 3989 bp, Cannabis sativa
  modified_base (33)..(43): a, c, t, g, unknown or other
  modified_base (1402)..(1403): a, c, t, g, unknown or other
tcacttttctacttttaaaaacagaaaactgannnnnnnnnnnttaccaaacgccacctaaatttttattatttcatatgtattaatatatatttttttgaaggataaaatattctaagtttgttatccttaaaatatattgttcgtgtatatcttttagattgtatgacaagtcgactaacaattattgagctctaggataaaaaacgaatttgggacacttttaattaaaaagttaagaaaagtgtatgatattaaattatcatttaaaaaaattagacccttatgggctaaaatggtcctaggcgggatgtgatttttttttaaatgtttatatattataatgtataatttgagactggaactcataactttcaacacagacgcatcctcctatagtcacttatgttggtctcaagtgctctaggggacatgggctgagcttgctttagtggaagacaagacacattaatattatgttattttaataatattattcattgcttgtaacttcgtgtgtgtcgtgctggttcagcccgtatttatttgtatttttcataaaacaaatcatgtcataccatgctataaaaaaatatgggtcgtgtcgtatcgtgctaatatttttaaaaggtaagtccagcactaccagtaggcccagtattttcgtgtcatgctttgctcgtgtcggtcggtatttcttaaacaggccagtccattttcacatccggacttaaattcgtgctttactttttcatatatttttttatacaattactaaattacatgtatatttcaaagtgttagttatatttatataacttttataaaaaaaattattaacattattagaatttaaatacttacttataaatacttaaatttttatatcacgccctataaataaattaatatataatcttaattttcttgttttaataatttaaattatataattataatattctttattataattaaattttattattttactttatttataattaataaattcatatcttattattattaataaattataaaaaattttaatatatcgtgtcgtgtttttcgggcttgtcgtgtgtcatatttttcggactagtctattcatgcttatgtgtcgtgccctttgtgcttctcctatatcctgtcgtgcttaagaatatatttttcttgacgtatcgtgccaatttgtagcatcatgtcatgtcgttatcaaacctgtattttttcatgcctagtcgtgcccatacctagactcgtgtcgatttcgtgtcgtgtcaaaaaatttgacccatatttacatcattaatatacatatatatatggaacacttttcaatgggtattactcggtactaaataatttaactataataattaattttaaaaatattaanntattagattttgatccaatggcgaataataaaaaagaaattttaatttctatgcttaatttagctgtttaatttaaaaaaaatatcaaaaataagtttatatacaaaatacttaagtcaaactcattttttattgttgtcgaaaattttttttcttaatttttttcggtcaataaaacaaccccaacttatataatgtaaaaatgagagacttttttaattagatagataaactaagcataaaaactcaaatttttataatattacccataaatgaataatacccattaagagtccacctatatatatatatatacacttatatatagagaaaaatataaaagagaaagtgatttaataatgcaacatgttagttttttcagtcagtgaagttaaatttacaacaacaaaaatataagagcataggcaccaaagtgtctaaacctatattaaagtacaccaatatcaatattacacctcacacataattactagagtgtcattaagcatttctaaaaacataaaagcattagtaagtgaagcgttttggtacaaaaagtgcacatatcattaccctagaagaaattattgatgtatacacaagaaaacaagtagcattttcatgaagttaagaacccaaaaaacaacatgatcgtgaatcatgaatcatgatctacttaatgagaaatttcaactagttcactaataacctcattaagtagcaaatcaagaataggttgctcaaaatccattgaaatttcttcaaacatttccaaattaagctttctttcattcttagaacaacaactccaatatgactcaatcaaatcttcttctgttaacttcccaagttgttctgcaagctctatacattcctcaaccaaattcctctccttcatttcaccataatctcttccattttctgaccttatcttttctcctataacaatcaaaaaaaatataataaaattgtcaacaaataattaagaaaaaaaaatgcccattacaaaataaatgtttaaactaacctgaaaacaaagtttcatgctgaataagaagatcataaacctcatcaagaaaagaatcagagatagtattttctgggttgttgttcttctcatctagttgaattttcttacttgcatgggaattttttctcttcttagcaaatttttccggagctttctttctattttcagtcttcaaagcctttaatttcacaccactacactcgtttcgataattctcctgtggtggtgtaataatttttctccttggctcatttttcaacttagaaatcttattatgaacaacattattctcttctaattccttcttcttcttactcctctgtttcaccttcccctgctttgattctccaaaacccatctccacttttggtgtcgttttcttcttatcatccaaataaacgacaacaaaatctccactttgttgctgaaacgacactggactctcacgaaacgacactgaagttctcacacgacgatggtgagcgtcggctgtgtcgaagttgagcatgtaatccgcaaaattgactgacttgcttcgacagaaagagtctcgttgacttcgttccttggggacccattttgtgtccgcaggtagagaatccaaacccattagcctcgccaccacgccaggactggtttggccttgaatttcaggcttgttcttcttaaccggaaaagatttgaacaacaactcacttgggtttggaactgaatcgttgatattttcagatgggtgtgtgggaacgtttcctgtgcacaacattcgccggagaacgccggaaaaacagccggcgtttgtggtttccgatttggccatagtaatggtacaataataataataagagagtgtgatttttagtactgaggaataagaaagagaatttttgaatatgaaagtactattctttattttaagagtcaaattttgtcagcagattgaagactgaaattggattgtgattgaaaagaaaagggaaatgggataataaataataaagagaggtgtggaggtgagaaaattttggtcagtgttcacacttgggaaaaggaaaaaggaaaatgaagacagctgctactcctactaattcctacttgggctaatagaattgtttagtacgatagaggtgtacttaaatattaattaattagagttatattaaattaattaattaatagataaataagaaaacatttaaactgttttaacaataatatcccacgttgaacgtgtatgaagtagtttcgtgggttaaaactaaaagagatgattggtttggttggtaggagtgagtagtaagtagtggtgcttcagaaaaaatagcgtcacatagtagaactgatgatactacgtgtgcataaataaataaataaataaatagattttataatttatatattatgctataactctaagataaatttttcgtaattggattaatgttatatgtgtgattgaaaattatagtcttaaaatcttgatcgaacacgtgatgcttggagattctaccagttgggaagaagaacttatgctcacaaatgacctagcttgttatcaa

SEQ ID NO: 79279 - DNA, 10970 bp, Cannabis sativa
agtcctcgtgggaacgatctcacttacctgagtattacttgttaaaacgatacgtatacttgcgtgttggatttatcacaacagatattaccaatcaaatttctagaaaagtgttctaggcattttttctatcataaaaataacagagatacaagtgatcttggggagcaaacgagatttctagggagctagaatagggccttagcgtccaggagaccttgttcgcaatcttgaatgtcataaaagtatcaaaacgagtcacgggaagcacccaacacccaatttgacacatgacctggtgtgttgggttctgcttatcagaattcgatttcctttcgagcgttcaactatttttttcgtagtaaatgagagctacaacttgtgatatgtcaaattcacactttaatatttcaccctttcaacaaggtggaatattggcaaaatcagggagtttagagtcttcccgattttacattaaagcgacatctctgagaactggtgaacaacttcaccagaacacaaaatctgactaagtggtgtacacatcatttaggcatacaaaaatacaagtttgaaacgttttttcactcgcacaatgtttaggttgacgtcaggatgtaaacttggtggctaggtgtcaacctggcctcaggatactgaacatccttcagtaaaacgaccataacttcatcaatattgatataatttaagcgattcaacttgggttttgaaggtatttcaaggatatatcaagtcatgtatcacacccatatctcaattctaaatatttcaagtctgaaatttgtcctcaacataattgagattttttcagtagattacccgaaacgatcccacggacaatattcaaactctaaaaattaacgattttcaccaagagtcaattttcaccattaaatcattctcaatggcaaagatcagtccaaaatgattttttcattatttttttttgtaattttttattattatttaaatggatatcatttcttataaaatgagagcttctagttcttttttttacattcttctaagtacccacaatgtcagagcatctctctttactttctctttagaaatttgagccccacactttgtaagtgctattgtaatttttgtgagatataaaactcgaaatagacgcagatctattaccatcgcgtcatggggagtgaataaatttgttgtatttttcttatttatatttaactctcattgcattctcatcaatctagcgagcaagtttaagtaaatttttgtgttaacacatgtcatcaccgaatttggcctttagttttacttacaattttttggcatggcgctgggtttcaattttcgaaaaaaaaaaattggtttaattgaaaaaccggtaaaactaccaaaaattataccattaatttcggacggtaataatttctcaaccatcgattataaaaatcgtaattgaccagttaattataaaattaataaaacctaatcataacggaccgaaattcactagtaattttagcatttctttaagaaaaaatcacataaaagttttacattggagaagttgtatagcgtttccacctgttgccttatccagtgaggtgccagttggcacacttttcattcactctaaataaaaaagcaacacagttttattttgttttgttctccctttcttcttttaaaattgcaattacaaggacacacgatagtttccagtcaccatagtagctagcttctactcctagctataccttttccaccctaataaaataatattatctctaaaaattcatatagagaattgttaaaaatgttatattttaattagtgtaattaaataattggtcttatattccattcaaaaaaaaaaaaaaaattggttttatataacttacaaaaaataaattttaaaaaatattactaattaattataaagtgacactaatagaaaatgctaagtaccacaagtgcccaataacaatactgattaaaaaaaattcaaataaaattattaaataaatcatgaaaatatatattaaaaaaatatatcacacagtaaagcattatatcaaacattatacatatatagttgctctttttttgttttgcattatgtgcaatttattttttgtttgatcacgtgattttaagtatttgatcatgcaatttttgttttctttattaatggaagtttcaaatctcaaaattattaaatttggtaagattagtatttattatttaattgagtaaacgtaaggtgtattgtaggtcaacgaaatataagattgaaaaaaagattttctaatatttattagctattttagtttgttaaattcagttaattaaatttagttagttagactgttgttgatccattcttttttcgtttatggtcttttctagtcaattatgtaaaagatattattgaatattcgatatgagtgccaattgtaggacttcaaaacttacatacaacatagataatttattttcctctcaaaaaaaaaacatagataatttatttctattttccaaaataaatactactttttccttattgatttcaactttagtcttctttgagtttatttataaaaaaaaatgttaaaaaatactagtagtgttagtacttttgggagatgtagactcttttataaattcttttttaatttttagaattataaaaaaaaaaaatcattctagagtgtttgaataaaaaataaaaaattattttttaatttaaaagtttgctaaaatttgtaacttttaccaaatattttttgaaaaattattttaaaattaaaattatttacataatttctaatttatcaataattttttttaataatattcaaatactttaaaaaaaattattgaaaaaaaaattcatataatagttattaaaatagtaaaaataaattaaaacttatacttgtaattataagtaaaagtaaaaatttaattaaatggaaatataagattgctaatggtttaattgaatgttaaatctcatttattttattttaataaacattataaaaaataactttgacaatgacagaattttacttggagtgtaagagtaaccatgtaagagcgttttcattataaaaaggtttatttgataaagtacattgtttagaaagaaaaattatatgtataaaaaaaaagtaactataaaaaattaggtggaatcgtaaaaaaaaaaaaaaaatgaatttgatgcattttatttatttatttattatattctaatccattgtggagaagaagagtgtggtgggagatctcagatatactctgctttgtgcttttcagtgcttggaaacggtagcaggggaagttcggtggggtccaaccgaagattctgtctcttagggttgttcatatccatatatatatatatatatgtataactctcttactctagaaaatttcttcggttttaagcatagaaaaatttggctactatttcggatgagtgtcttcttgtccgaagtgattgattttgtagtaaaaaatatcggaattgtgtttgtttttcagaggatttggaattgagctcactctcttctccataaccatcctcaattttggctcatagttcactggcttgaattttgctgtcgagttcgagtttggaattacttcacttctagattgagtttccaggtaattttaatctaaaaccttctttgtattcaagtgattccagttttgctttagtaccgcatgtggattcagtaatgaccttgcatgataatctaaagtttgaattggagtaaaatgatctatatgagttcgttgctgggttttttcattctttaatgcttgcttttcgggttatttgatactaggttccctaattggtgattagtgattactttccttgtgagtggcaaatgacccattcactatgagtgggcttggttgggatcgatttcgatgggcactccagataagaaattgtctgagttagttgacatagtgaggtcctggatccctcggaagtctgagccggcgaatgtgtccagggatttttggatgcccgatcagagttgccgggtatgctacgagtgtgattcacagttcactgtatttaatcgtagacatcactgtcgactttgtggccgagttttctgtgccaagtgtacagcaaactctattcctgccctctccaatgagcccaggagtcccaggactggccgggaagatggtgagagaatcagggtctgtagttattgctacaaacaatgggagcaggggatatcagtgggtgataatgggactggtgcacccagccctggccttagtccatcaccatctgcagtgagcttggccagcaccaagtccagttgcaccggccaaagtagcggtagcactgctggttcaacaccttattcaactggtccttaccaacatgtaccatgtggttccagccttagccctcgtcaatcttcacaaatggattcagtgacggagcaggaaaagaatgaagcatctcagaggagcacaaatcttaacacagttatggaagattcattgcccaagcaatacagcttttgcagtaacaggtagatcttttcttctttatattattctgtgttgatgtgttgcgctcatgtttttgtaaattgcacctgtgtgatgttctgtaaattgtactcgtgaatggaataagattacattggagggaagagagtaatatagtatatcggttgagacttcttatttgatatattgcctttttttttcttttaaggattatagattaaatatctcgtttcatcttcaatataattggatgcctttacatgctagtcagcaattcatgtcttcttatcctctgggtttaggagtgatgaggaagatgaatacggcgcttatcattcagattcagaaacaagacatttctcttctgttgatggctactatactgctgttggtattgatgacattgaccaggtttatggttcacatgacttgcattcagacgaagaaaatgttgatgttacaactctggcctactcacctttccctgagcattataatgcagaaggtgttgcagaaacaagagtgggggaggaagctgatcaacacaaaaagagtgaagaacatgaatctccttcatatgacgaggagaagaaaaatgctgagcctgtagactttgagaacaatgggctgctttggctccctccagagcctgaggatgaagaagatgacagagaagctgtcttatttgatgatgatgatgaggaggaagagggtggtgttacaggagagtggggatacttgcgctcttcaaacagttttggtggtggcgagtatcgaagtagggagaagtcaggtgaggagcacagaaatgccatgaagaatgtggtagaggggcattttaaagctttggtagctcagcttttgcaggttgaaaacctgcctgtaggtgatgacgatgacaaagaaggctggttggagataattacatcattgtcatgggaagctgccacccttctcaagccagatatgagcaaaggtggaggaatggatcctggaggatatgtgaaggttaaatgcatagcttgcggatgtcgcagtgagaggtaattctgttatgaatcttatcatgcagttaattatgtttatctattttgctatatctacctacttctgtaatgctgattatgttacaattttctagtatggtggttaaaggagttgtttgtaagaaaaatgtggctcatcggcgaatgacaactaggatagagaaaccacgttttcttatactcggaggagctttggaatatcaacgtgtttctaacctcttgtccagttttgatactttgttgcagcaggtttcaattttataacttttcctttctactgtttttttgtaagatagatgttgaatattacggggaacaatagcacaggactcataatcccttattttaatgttcagtatgcttttccttcatgtcttgttttcatgagctttttttttcattttatttattttttaaaaagtaggaaatggaccacttgaagatggcagttgctaagattgatgctcatcatcctgatgttcttttggtagagaagtcagtatcacgttatgctcaagactatctccttgccaaaaatatatcacttgttctgaacatcaagaggccacttttagagcgtatagcccgatgcacaggggcacaaatagtctcttccattgatcatctcacatcaccaaaactgggttattgtgatgtgttccacgtagacaaactacttgaagcccacgggagtgccggccaaggtgggaggaagctaacgaagactttaatgttctttgaaggatgccctaaaccactgggctgtacggtaagccctgcagtacatttgcataccaaatatagattgttaaatttgttaatttagtaatgctcggattgaccagacttgatgggtgaacttcagttctagttaatcttgtaatggttatctcaacaaagttgcctcttgatgagtgagtgtataattttctggtagaggaaattaagaagataaatcattcagataaagaagattgttattggtagcagtcaatgggatatgctcttatggatcataaactctgtgtatcaatatcttgctggttgcaacctattaattatcttattaatatagaactcttaaagaaaaggaaagattttgaaaggacttttatatgttgcattgtttcagattctacttaaaggtgccagtggcgatgagttaaagaaggtgaaacacgttgttcaatatggagtttttgcagcttatcacttggcacttgagacatcttttctggctgatgaaggtgcttcacttccggagttccctctgagatctccaattactgttgcattacctgataaaccatcaggtattgataggtccatttctacagtagccggttttagagctccaacaactagaaaatttttgggtcctgaagcagtaaatgagatagagaaattaaaagaaggcgtccttgtagatgggaatttatctaccaaccatgacccagttttgaaactggaagcagataattcctcttgctttgtagctcctccgtattccccatactctgtagtatctcctacatcattgcctcctttgggacatgatagttcgacttggtctcatgataaacttttttcaattgagatctctaaggatgctaatagtttgggtcctgaatttcaggccaaaacaaccatctacgagaaatctttaggggattctagtttggtttctaattatgttggtgattctgaatcatttgaagaagttaatggcaccaagcatgcagatgaaaacacatcaattgcaaatcaccaaggtactcttgaggaggcatccatacaccaatttggtattgatataaatgaggtaggatcttcgaaggaagactttcccccgtcaccttcagaccatcaaagcattttggtatccttatcaacacgttgtgtgtggaatggatctgtgtgtgaacgagcccatctttttcgaattaaatactatggtaactttgataaaccattggggcgttttttacgtgaccacttgtttgatcaggtaatcctttctctcttaatcattacatttttctacccattttaaatatgttttccccttcccaattgtatgagaaaagcttagactgagttactgttctttcttagagttaccagtgtcgctcatgtggtatgccatcagaagcacatgtttattgttatactcatagacaagggagccttacgatatctgttaagaaattcccggaattcctcctacctggggaaaaggaaggtaaaatctggatgtggcaccgatgcttgaggtgtcctcgaatcaatggatttcctccagctacccgcagagtattaatgtcagacgctgcatggggtttatcttttggaaaatttctggagctgagcttttcaaatcatgcagcagccagcagagttgctagctgtggccattcccttcacagagattgtctccgattttatgggtatacatatatatagtttttttgcttgagagtgttacatgttttatacacaaactcaggtgtattcatcttatgtgcattattttcttgatttgcatagttccttgctgcataagacttaaggaagagagaccactgggtcaccctctagaaaaatttgcctagtattggctcatttctttattcatcactaagcttcgtgggtgtttaaattgttgggtctgaggcctaaaatgatcatatatttagctagagcattcactttaactgtcttgtcacattgttgcttttacttgtacagttttgggacaatggttgcttgctttcggtatgcatcaatcgatgttctttccgtttttcttccacccccaaaacttgagttttactatgctgatcaggagtggattcaaaaagaagcaaatgaggtatagtgattgcacgttacaaccctttattattttttgtacaaccaagcattgattaatccgttgactgcttttgttgtcatgacaatgtctgacaggtgcggaagcaggtagacctcctatttaatgaagtgcagaatgcttttcatcaggttttacagaagatctcagccatgggagtacaggatgccagcatgagagaatcaaaacagcaaattcctgaactgggtgaaatgctacgaaaggataaagaacaatttcaggtaaagggaaatatgagccaaattaattttgagggaactcattagatttgcaatgcacaatgagttgactctgaattaaatcaaacctcaaattatatgtttgttcaatggctatggatgacattgaagcattcagtcaacgatggaaatatattaattagccaattcttttccaaatatctgacattttagtgttccataccagcagaggacatacctattttgatacctagcctgtcagattatgtattttttatttttttatacatggaatagaatttctcctgtttcatttgcctttctcatgtgtttttttcttttggctttgcctaaaaacatgttatgatatccgctgttgtgtcattctgtaggaattactagataaggcattgtacaatgaagtaaaagctggcaaacctgcaattgatatactagaaatcaataaattgcggagacagatactcctcaattctcatgcttgggatcaacgtttgacaaatgcagccaatttgagtaaaaatagtcttcagctaggttccattccaaaactcaaggagaattctttcagttcattggcgaaggttactgagacgaatgtaactgcaaagtcagtcaaagactttagtacctgtgattcctctcttttggaaacaaagtatgatgtaaagcttaatgatcaagggagttctgtaccaatttgtgagcagggtgctggtgcccagaacagtaatgaaattgtattggcccaaagttatagaagtgaggaggaggcttgtctttcttcttgtgcagataccaatgatcactctgaattggaaactggaaagcaagttaggaggacccattcggctggtgaaaatccagttgtggcagatctatctgatactcttgatgctgcatggactggtgaatatccaactagtgtagcgccaaaagacgatacctcttcttctccttctgattcaactttggtaaaaacagtgtcggaaaatccaaaactagaaaattccacatttgaccaaggtaaggttgaggcaattcgttctgttagttctactgtatctttgaaagggcttgaaaatgtagagcactccacaagcaagaatttatcatcgggttctcaaaagcatagcagtggtgaataccatcctgtccacatttcactggttcgagaattggaacagcaaagtggtgcaaggtttcttctgactgttggtgttggaggaattgttctccctgtttatgatgatgaacccactagtattgtagcgcacacacttatttcatcagagtatatttccaagatgtctgaatctgagaagcttaaagatgttggagataattcagtctctgtaccactttttgattcacttaacctgttatcacttaactcttttgatgagtcgattggtgagagctacagaagttttggttctagtgatgaaagcatcttatccacatctgggtcacgtagctctcaggttgtggacccagtgctttattcaaaggacttgcatattagaatctcttttacagatcatggctcccttgggacagtgaagtatacagttacttgttactatgcaaaacgctttgaggcgttaaggaggatatgttgcccttctgaaattgactttgtgcgttctcttagtcgctgtaagaagtggggtgcccaaggtggcaaaagcaatgttttctttgcaaagacattggatgatcgatttattataaagcaggttacaaagactgagctcgattcttttctcaagtttggaccagcatatttcaagtatttgtcggagtcaattaacactggaagtccaacttgtttggcaaagattcttggcatatatcaggtatgaattttatcaagtttgtggtcatttttagaaactaattagagtacatggattgcatacaaatattattttttcacatacaagatatgcgacctgattcaagatccttttattgcctttaatccgtgcttcatctctatagtttttaaagtaaagctaggtttggttagactgagtagcaattattttttcccgttatccagcttaattttggttttttatcccccaagacgtttcttttggactctttttttttttaaaaaaaaaaaatgtttcatggttggtataatctgttgtccgctctagtcctctagctggggcggtcggttggctgtccgacaggttcccttcaaaaaaaaaaaaaaaa

SEQ ID NO: 79280 - DNA, 2314 bp, Cannabis sativa
atgttaattataaacttcaagaagattgtttaagagattttctatctaatctattgaaaagttccttccaagtatttttcttcgtaataagtccagtcgtaactttaaagttcaaatatattttaaatttatgacactggtatgttgtgaaagatgtctctattttaatgctcctattacttgcttgtcgacaatttcagaacaacggaagaaagtggtttaagaaggttcagcaagattggagcatccttcaaaacaaccttcccggtaagcattttcttagctttttgagtaattacattattttgttacacttccatagtcatggtgcagttttggaagtcttggtataatgatttgactattttaatagacgggatctatgtacgagcatatgaagatagaatggatctcttaagggcagttatagtgggagcatacgggacaccttaccaagatggtctctttttctttgattttcaccttccaccagagtaccctgatgttcccccagtaagacatggactttgacttggcatcccttgatttggggttttcttttcgtgtgtaaagtaaattcatttttatgttgtctgacatggtttgttatattgcagtcggcttattatcattctggtgggtggcggataaatccaaatttatacgaggaaggaaaggtttgcctgagccttttaaatacttggactggaagagggaacgaagtgtgggatccaaagtcttctagcatacttcaagttctagtttcgctacagggtttggtgttgaactctaagccatattttaatgaagctgggtatgataagcaggttgggacggctgaaggggagaaaaactcattgtcatataacgaaaacacattcttattaagctgcaagacaatgatgtatctcatgcggaagcttcccaaggtgatatatctaattccactattatgctcaactcaatttaccaattttaatacctagttcatttctctgtttggcttagtaatttgttttcatgttgatgggatgtttaggactttggagaacttgtaaaagagcacttcaggaagcgtggtcactacattcttaaggcgtgtgatttatatatgaaaggttatcttataggttctttgactaaagatgcctcgctgagcgacagaagtgacccgaattcaacttcagttggtttcaagttgatgttggccaagattgtgcctaaacttctcttggctctgtccgaggttggagctgactgtgatgaatttaagcatctgcaacacccgcagtaatggccaatttgccaacatgttttcatccattgattcaaccaggttacttttttttttcttgatttcattgctgttctctcaagttcataggggaaaaaaattgcaatttctctagttgctcaatgtaaaagcttatggaattatatgaactatttgtttctttaattcgccttaaaaaaaaaaaaagaaacttgtgtttttcttgagacccttaatccattttaagaaattggggtttcttgaaacaactttttgttttgttttttggggatttggctgctaactaattgttctgattctttccttctttgcattttgagtctattctttgcattttgttttttagagagtgaaattttggttactaattcttcattttttttttcttcttttcttagttgtgtacaacaaacaaagctttatatacatttctttgcaatatataaaggtacatatgttctgtgttagttatttggaagcagtactgtaatctttttcctttcacttgtactattccaagttatgatctcttgtaacaattgcagtagaatccaaggatcctgagtacttgtgtgtgtgcatagctatatttacattttaataaagagaaatgctataaggtattggtgtatttaaatattgaatttcgtatattttaatttaataattattatagaatatagttaattatttcacaaggtgccacttgatgctctttaataagatctattataaaattaagatttaattatgatttttttcttttgaattttgatgtgtatcaaattatactccttgaatttttctaaccgttaaatttttttccttaaatttaatatactcttgttttcagtaataaaatctaatgtttgaaaaacaatgaaaacaatattttcattttatttaaatacattaagctgttttgagtccatcaaatattgttttggtctaatttttagttctttatagaatgttctaagtgacattaccaaatgttgttaactatttttaaagaatttg

SEQ ID NO: 79281 - DNA, 5143 bp, Cannabis sativa
  modified_base (1904)..(1905): a, c, t, g, unknown or other
  modified_base (1951)..(1952): a, c, t, g, unknown or other
aatattggatagttttattaagggtaaatactcatttagtaccttgtgtttcatttggtaccctgtgttttaagacatgaccaaattgttatctaggtttcaaattcaaatttaattacttaattaagtgaagataacttgataccaaatatgtataatttcatattaaagggtaccaaatgagcattacaaacaacataaggtaccaagttagtatttcaataaaacaaggggtatcaaatgggtattttcttgttttattaatgctataaccattatttactacactaccttactgactaatatggcaacagggatgagtagatgaaattacctgccagtatctccacaacccaagggttttatgggcttaaaatgatgcaggccaattgtttcacctcgtgcagtgatctgtcattggatccaaacaacagagaatgaatacagaattatatttctatgaagtactagctttatctttaaataattttaaatttctaccttttgtattgctagccaagaaggagtatcccttttatgaggtcttgggaggacaggttgagaatgaatcgaccacaaatcctctggtttctaaaataaaaaaaaatatatacatatacaatatgtaatttacaccaactgtgatttgccaaaatgatacataaaaataaagataattaaacttgaaacttagattggtataggaaaaatctcaaaaattcttacagttctcaaaaagttattataaacttggattggtaaagaaaaaatctaaataagccatgcacttctcaaaatcattataattttttctttttaaaaaatgaaattaaaataatgcaacaaacatctgtagattaatattagacaggtagttgttggaacaaaatggtaaagaaagttgtttaaacaaaaaatggcaagagtagtttgcattattattctagatcatgtcatattaatatttcttaagaccaaaacaacaaccaacagactgtctaaaaaattaaaaataaacaaatttgatcaattgctattctttctgttttggttttcatcaaaaaggatagggatattaaaatttgaggttggatcacaaaacaattgaacactccatgtatcattatctgatgatccagaattgacaaaagaaacctcaatctaaacaagaagtcattggatgcaataatggagacataactaccagtgtaaacagagaagagtaccttaccaaattggcatcaggaagttctcggacagcatcattaacattttcggcagttgctttaacctgaaaagagaaaacatatgttcaagaaacagaataataagggacacaaaactacttaaaccaaacaaattcaaccaatgtggaatacatggactcattttcagtaggatagccctatttcaatatcctgaataaatagaataggacagagaagaacctaatatttcagaaaactttttactattatgatccattgaatttattagaaaattaaaccataaaaagcaacacactatagctgatattacacaagtggcaccctcttaaaacatatcaatatgacgcccacacagtttacggctttcagaagacaccagtaagtttccattcagggtactaaaaccataatataaatatattaataaaactatgttagtggtattgtccggaaaaatacatcataaggatatcccgcaagataaaattaaagacatttaccaacttagcactttgttgctctgttttctctgaaagacgactccgtaggggttccacatgatcacttccatcaagttgaacaccaatgaagtattgcaactcaccctaaaagaagtacagtggactcagcaaaaatgggtaatatgtagtcttactatatcaatattacatagcnncttactatatcaatattacatagccaagagagagagagagagaganngagagagagagagagagaagaaatcaagactgaatcttgaactacagtcacatatgtaccttgtgatcacgcataggttgcaagtggaacaagttccaaaacttctttccttcatgtcaagaaatcacaacagtcaataataacagaagaaaagaaaaagtaaatctggaaagctacaaagaaatagtatatacatataagcttcacacaggtaagctatagtttcttaaaaaaaaaatataaactacagaaataaattaaatggaaagaaaaagtatatggcatatttgaaccatcaagaaacagctctttactaaccactcttagtataattgatcagctgaacagtaatttcccgctgttccctaatagcatcccttatctttgagacagttgcttgatccgtttcaggtccttgaagaaacctacaaagtggaagatacaccaataactaatcacaaaaatgctgaatgaagttttattgagcttgtgaaaacttttatcctataaagaggataataccgatatcatttctctctctctttgatatcagatactttgttattggataatactttacggatgccctaattgaagcaaatctcacactctcactagaatatagactgttgcaaaaaagaaaaaacaaacaataacaaagatagcagttttactaaccgacaatttgtacccagaatttcttctcgggtatattctgtcaattctaaaaagctgtcagatgcaaatatctgctcagaaagaaaaaaaaaaacagtcacaacacatcttaagtgtcagtttaggtaagtaaaaatcaaatttcatatgagatgaatccaacgaattaatagattttctttcagaaaatttaaataccaatgataattaaacagttaaaaaataaactcctcaatttaagaaagtgaatcataaacaaaccaaacattggctctggaaatgaacaaaaatgcaagaaatttgaataaaaaggtgctctattagcactggttgtaggtctgagatataagttgcataaagttcaatgtggtaaggtttatcatgaaatgaatatagtttatgagaatgataaaaaagaaaaaaggttctgggttgttgagactatagttctgcattaaaagtaatgagaatgtacattatgtaacatatcttacaattgggttatcaggaagtctaggatcagtaatcacaaaattcttttcaatgcgttccaatgtggtcgcaaggtcaaacccttggcgtgcatgcctttctctttcagcaatctcccaactatcagtcctctctacgggcatcaaattttcttgttcaagatttggtttttcgtcaagctcctttgctgagctcatagattttccctttggcctagaggagaacatcaatcattcagtttgaataatcaagagaccaaattcaaccaaacatttacattacgaaactcaactcaaatctacatacagtgaaagtaacctaggaatcctgtttttaacatcactcttattatagcaaaagaataaaccttgtaactaaaaatctcaccccaataacgacgtgcgtcctgattttctagatctcttgcttgaatcttgagtactcttgcgagacaaatcatttatgggatctaactggggagtttttctaccaggagtgccattactcttggtttcaactgattcaggaacatcattaaggttgaatttatctagctcatcagacttgaagttaacgtcataactaatactccgtgtgtgagatcgtggatccttcactgtttggacaacctcagtcatggaatctagagccttcgccttctgacgagcttatgcatgaagataaaattattagagctgactatagtgacattatcattcaccaatgtgaagaaaataagcttaccatcataacgaattagcgattgaggcagtccattaggccgcaatgtcttgtccacaattccttcagtatatttgctaacctcaacctgcattctgcatagcagcattgaagacaatatcatgacataaaattcccacaaccaaaatatttcatcagtcccgaaattttccattcagagcaaatgttacaaagcatcaacttaagaaacaaacccaagaaaacccaaatccctaaaatacatccttaaagtgcccaaattccaaattctactacatccgtctaagaatgccttctttcaaatccattatacaacatttagaaagcggatatcaaagcaagcatgttcaatcagccatattagcaatcaattaactaagaaaacaaacacaacacaattaaaatcactgtgaaaaggaagtactaacccaataaacttaatggtgtttccttgatcatcttttataggtgtaacagtaagaagattccagaaaggcgtaccatccttcttatagttcaacaacctaccacaataacttctcccatacctcacggcttctcgtattttatccacttctttctggtccgtttccggtccctgaagaaatcgactgcaaccaaaaaaatcgagcaattactttccataaagctccttcgttttctatctccgatcaaattcttcctcttaagacctaaaaccctaactgagaccaaagcaaattctccaaaacggaggcagcaatacacagtgccgccatttacgaacataaattaggagttagggttaagtaattcaaagaaaatgcagaaccagaaacctaaaactagtcgaaaatgtagccggtgatcgatttggcgctttcaaatcggtttagcgcgctttaccgttatctggtaaagactgaacctatttataggcacgtataatcataaaatttgcataatgccactcattttttttttcaaaattaaattaccatttttcaaattgaaatatgcagatttcagccataaattacaccataatgcattaaaatataatgttccactgttttaaaatatactcgttaattatttcattttttaggaaaaggtaagggcaggaccgggtttgggctaaagcgggttaggcccgcctaaggcgggttcaaaataaatatttttctagtattttctgtaaataccacatattttttaaataaatgatctaataattttatttgtcctaagacccacccaattttagggtcaggagcgataatttattcaaattatttaaa

SEQ ID NO: 79282 - DNA, 4182 bp, Cannabis sativa
tctttcgaagcttattccttcccaggtgtcctgtctatcctgcaaactcttgtccatcctgatgactatgttgttgatgaacaaactaaagggaacgtcgaggcggaggctttgggaaaatgattgatcgagaaccaggatggtccactccgaggggagtaccgaccttgacccgatgactaattcattctccaacttcctgggatctttcttagctccatttgcttctgaaatggtgggccatttttcttctgacctggttcagctcccaaccaagaggttttgttatttttgcctccgctaacccaatctaccaaattcaggatgtgagcatggctatgacctccataagtcttactcattttgtcttttatttatttgcttcttcatttcactaatcttgatgtatgaatttgaccagatcgctgctaaagttggtcgcttgttgaagaccttgattgatcaaggatttgttgcagctaagcatggtggcattgataaggccttaaagaagctcaaggagcaagacaagtgggaggaggctcttaaggatgaggtcttggtggaaaaggccttgagggaacaggaccagcgagtggttggggagtcactgaagacagcccaggcggacttgcatactgcttaggaggatatcaaggagctttaggacaaggtgagaaaacttgaagaactccataaaacagatatctagaaggttgccatcatgtctgcggagctcaaggagcttcgtaatttctaggagaatactaaacaagaggctgtgaaagctaccgaaaagtctcttgcagccccggtcactagtgaccagtgtgtgaagcgttttgagcatggtgtattcatctgttggaggtccaacaaatttgagcccaaacttcacttcttacctaatcatgaggctgttctgacccgttcctgggagaagaacaagaagctagatgccaagcttgccgagaccttaggtccttgccttccttttagagctcacaaacttgccacttatctagaaattttttgaaaactttttaatttttgtatgttggggaaacttcttattagcctatccccgaggctttctttttttgtttcctacatcatgggagacactttattagcctgtccccaaggctcttttttttatgtatatattcttttcttatagatgctcttttcttgacattttagccttgtgagcaatatattttgagttatttatgctttatgtcctactacctcccaagtgactaaatagtttgataactttttgtcactttgcataaacttgaaagaatattatattacaaaagttcttggtttacatgaggtcctctttgattggaaatttaaagatgaaattaaatattgaggtcctaactattgatagtatttgcggagataatcagcattctatgctttcgggattagggatccatccatccatgcatttaaccttgtacgtttcagagcctatttcatcttcaatgtcataaggtccttcctaatttgggcctaaccccactctgaggtcttgtgagtcaagagagatctttcttaagactaggtctcctatggaaataaatttcactttagaattaaagtgttttgccactttcttttggtatgcagtcagacaaatttgtgactcttctcagagttcttctacgacatctggtgatccttgcaacaatgctcagttggtggatggatcatagttagtcaaactgagggagggaatggtactctctacttggaccattacttcacatccgtataccattaaaaatgaagagtgcccagtggtggtcaaggcagtagttctgtatgcctagagtactcgtggaaattcttcatgccagtaatttttgcaggccaggagtttccattttagtgtgacttgtaatatcttattcataacttctgcttgaccattttcttgtggtcttgaaaccgcggagaagctttttacgactccatatttttcgcggaactctttgaatatatcactatcaaattgcttgtcattgtccgagactatcttgtggggtggtctgtattgacagacatagttttttttaccgtaaagtctaaggttttctttacagtgattgaattcattggctcttcttctatatattttgtgaaatagtccactgcgactatagcatgtttgactccgcctcctcccatcgggagggactcgattagatcaatgccccatactgaaaatgagcaagggcttgtcatcaatgtgattttatttggaggggccctcaggatgtttgcaaatctttagcgtgggtcgcacttgcggacttagtcaatgcaacctttcttcattgtgggtcagaaatatccttatcttagggtctttttagataggttgggagtcccagtatggtccccgcatttgccttcatgaactacttccattatctacttagctttgggattaaagacatagctcaggtagggcattcttaaaacctctttgatataaaatgccatcaatcttgaggtaccgaggagcttggtattgaaccttatgagaggcagccctattttagggcagttctccttagttaaataattcataatagggtccatccagttgggctctttgttggtgactgcaacctctgccttggccagaatactaggatttagaaggtactcaataggcaccacccacagtctttctacttctttgtccaaagctaatttttctaagcagtctgcatgggcattcttttcctttgggatttgctcaattttgtaacttttgaattcatgaagtagttctcttgcagcagtgacataagaagtcatcctttatccgcaagttttgtattcctcaagaacttggttaacaacaaactgagagtcactcaaaatctctatcatgtgagctcctacaacctttgacagtctcaaccctatcaacaaggcttcatactctgtcttgttgttagaggtgggatttttaaacgcaaagtagtttgaagcctcgatccttcaggcgacaccatcattatcgccactctctatctattctcgttagaggccccatctacatatactttccaggtgggggcaatcactttgggttcttgagcagttgcttcaacttttttacattctatgatggtctccacaatttcattcctttcttcaggatcaaaggcctttcctaacttgaattaccttggttggatcctgatgacaaatttgaatttcctctacttcttccataggttcgagagaggtctcgactcccactcggggatccaattcatcgtgtatctccattaggcgtccttcttctgtgtgttggaccctgaagaaatcattcttggtggctacatgatagcatttgcttgcttccccttggtttccttgaacagttcccactgctaccgagtggggaggggaacttaaggaacaagtgcctaatcgaggttatagctctgaatccaccaatgttaatcgtcccattatggcgttgcatgttgtcggacagtctaccacgacataggtacaatgcttaaatgtactttaatgagtgtcagggcacagggtcattgggagcctaatctttcccatagggatgagggaattcccattgaaccccgtgagctagaaaccacttggtaataaattttagtccataaggccaatggcaaggaaggcttccttgaacaggatgtttattgaactcccattatctaccaaaatttgagctgttatcttgttggcgataagagtttcaatcacgaatgggtcatggcgctataaatgcactatctaggcatcttcctcagtaaacgatattggttagtccataagacgaggtcgttgagctggcaactagcatacttctcatatttcttcatcatggtttagggccttagcatactgttttcactcattgtgagtcgaacctcctatttgagagcctcctaagatcatggtcactctcctatttggttgtcctggtagagccccttggtttcaaggaagagttccctgaagggcctataaatctagggcttgtaccacacctccaggtggtatttgacctccgacttggccttctcccatatgcggcaactgattccttatccactcttacaggtggcctgtccatatcaagttctcaatctcgtc

SEQ ID NO: 79283 - DNA, 4114 bp, Cannabis sativa
  modified_base (2567)..(2567): a, c, t, g, unknown or other
tgattccaatatattagtagcttgtagaagaccaaggcccgaatggttatctcaacagtcttttataattcaggtatttactggtttattttatatttcacttgaaatatatgttctaatgtattgtagagtttgatgggtgcattactaatgtttagccttttaacattccagcactctctttcacctgagattggagttcatggtattcctgtagataatttttcccgctcatgtagcggaggtgtaaatttgtcgaaactgtcattgggggtggatttgaatgagcctgcaagttccaaatggagtagcacaactagcataaagttcgaggttcgggcaaacttaattagagtattgtcatatgagatttccagtgtttaaagttagattaaactcatcaatataaatcttctttcatgcagaatgttcgcccagtgaatgatgatggtcagtctataagccgagatggagatggatttctagtgacatgcaggtaaacaggaacaacaatactctaatttcgaacaaactttcttgtactggttgtgttgctatcataatgtaaatgttatgcagtgggaagacccatgatagcatggttgttctgaagcaagaatctcgatttgcaaaggcaaatgattccagcttttttcatgtaagacttcatttaatggtgatctttaatgtaagattgcacatttttataatgaacaatcatatgaggttcaactaactatgtctattgtgtcatgtgcagtttagcttgcaaatagaacaaggggttccagttttatccaagtggctactcttcaaccgttttaagtttgttgcatcaaagggattgaaagttgggccagcatttctcttgacaaagtgagcagttgtttttgtttcttgttagacatctagtgctaaatgaagagatttatgagcataatgtaacaaactggtatcctgaaaacagctaacttggcttaaaattagcacaataaactggtattctgacatcatgtctagccttgactatttgcagtttcttctcttacaggattgcatgatatacttttttcaatctccaaagtaatgttaaaaaaaaaaaaattagtagaaaactaaaattctaataaagaaaaaggaatgtggaaagaaactcatacttcatgaacttaaaaagataataataatacaagaacaagagtatggtgagtgaagctatgaactagtagatagtctatggcagctttgtacatcactttcaagtttcgccttcatccctttacattataggtcccattttgcaagtcaaggcatgatctattttctttttaattttttgttccgtttttagaattacaaattaaacctcaacctgttctcatattggaaaaagtcagtctcacctttggctctgacaggatgatggggggttccattgtgggggacatggctccataccaagcatttgcaataggaggtcttgctagtgtgcgaggatacggtgaaggtgcagttggtactggcagatcatgtctggttgcaaatagtgaattgacatttcctttggtatgttagtttgacctaatattttaatagttgtttgaatgttggttattgctattgtatatgtacactatgctattgaccaagtctagtctagactccagcggtataactaggaaagtccccgtgagtaatcaaataccggccatcacgaggacaatgagtttcagccactaatactgaaatctttcagtagttttagaagagggtgtagtagtagctaatatctatcaatgccgattttacaagcacacgatggtttgacttaagcttttgaaattcttctatttagcagttagcacacagatttcgctgatatgtgcagtgcaagtaaaaatgcagtgaaattgtataagaatctcatttgacactcttttcttcatagaaatgacaaaaataaagtgattatccaatttctttacctgtagacaaagttaatttcatattgattatcacttcaagtgtttgaccttactagatttctattttgtctttagaccaaaagcatggaaggtgctgttttcttggactgtggaacggacttgggatctagtcaacacgtacctggtgagtctcactagaatgaaaaaaaaaatcagtttgataaatctcctatgatgaaatcctttttataagctcaataattacttgatagttctagtgtacatttattataatcagattagtggtcctaattgggcaaactatcattgaatttcattggttaaaacttaaagggcttgtttagtatgccgttgtattgtattaaataataaataacactatgtttgaacaaagtaatatattgtattaattattacaaccaaaacttttaatacgatgtaagttgtattaacctcaatctccgacacgtacccgaacttgtccgaatgcagactcggaccggacccgacccgtagtcggtgtttcgagtttattgaaaatatattataactttacacaatttattaatacaagtcaataccaaacatagtattatattnaataatactaatacaatacaacacaataaaatacaatacgccgtaccaaatgagcccaaaagggataacaagcgttatatgccataaatacttgactgtctcctccacagttattgagaaaataatcattcagaataataatgcatcatgttacaatagtatcgaataggccagactagagtagttggattgaatctttatccatagttttagtactatattgtgtttggtatgtcattggggattaaaaggttgggaaagtgaatttgtaattttatttatgatgctagctttggaataaattaacaatttaaatttcatttgaatataagtaaagtactattttttttcttttacgttataagataatgtcagaagtaaaattatctatttttgttcaataatgcgaaaacatttaattggtctaatctgtagtgatctgcagggttatagagattgtttcatggtagttttgaatttggattttctgagctaatcttaggaccagcttttgagttatatggaatttgggtcaataatagattttaggatgactacttttatgtttttggtcagattggttactaaacttctatagtaatatttcggtataactccgttctcatctctcttgttcgggaaaaatcaacatttgaattttgaatttcaggaaatccagcattgaggcaaggaaagccaggatctggattcgggctcggatatggtcttcgtttcaaatcgcagtttggccattttcaagttgattatgccataaatgcactgcagcaaaaaactgtctactttggcctaagtaatcttgcttcatgaactccccacaggcaaaattcatgcatttttcatctgcatgagcatgaccttttcttgcttcattggatggttcaacagtccattttaagctgttctcctccacaattttaaagtaaaaagccattgattaatttcatctacttttttattttatttttttctcatgatttttcatttcaaggaaaaaaatgaattagcaaagtcacaagcttattaaattacttatctttactatgtgaggagatcagttaatgttattgttattattaatgtgaatattgtaacgaggaagataaggagcttgaaagttgaaagcattaagaacatcttctcaggaatttaaatttatgatatttatggagttgcacacaaataaggcttaatttatggtgtggtggacttgatcaaagggtggtaattcgtgttcataggtcctttttattgtgttaagacttaggtattacgagcaaatattgaactctaatctgaatccaacccgtttataaatgggttgactgactcgtgtaatccaattatataaagatttatacttaattttggttaacttatcaatcgttgacaagtttataataaatttaacatgttcatgacttttttatgatacatttataaataatatatttatattttatttaactaatttaattcaatttatatgtaataataaatataatagtgtaaattttaaataggttgtt

SEQ ID NO: 79284 - DNA, 6430 bp, Cannabis sativa
  modified_base (38)..(42): a, c, t, g, unknown or other
  modified_base (6093)..(6103): a, c, t, g, unknown or other
  modified_base (6390)..(6397): a, c, t, g, unknown or other
aaattcatgcaaacataaaatcacttcaaatttcttannnnnataactaatcagattgtaaagggttttatttagagcacaaaaactaacaaaaaacactatgttggcacaaggaagatagtggtatgggcttttaggatttacacctttttttatcaagcgatgttaggcttctttatgatgattcaaattcccttgttgcgagggttctgaaagatttgtatcacaaacataagtcttttggctccatgactaaatctaagaaaggatcctttgtttgaaagaatatcttatgggaaaaagaactatttaagactaggtttatttggagagatggtgatggtagagtaaagtgtacaagataattgggttctaatgacttagaatattcttgtgttgtcacctaattttcatggcgaagttaattagtacggtgtcccaattcagatctactttagggaattagggctttgatttgatacatggtttatttgcttctgatgaagctactgccattatttttattcttttgccttctttattaatttgggataaattaatttgggggtatgatagttttggctttttttagtcaagagtggtattggcttgccattcgtaatttacgcatgggttgtgcgtcttctttagctggtttctcaagatggtgggaaaaagtttagtctatcaatttacctccaaaagtgaagatgttcacttggcagatttcgtctaactggattcttactaaatgcaagcttacaaagtatggcttattggcagatgaggtatgttctatgtgcgagactcatttagaaacaacctatcatgttttatggggtttcccttttttttatctaaattttgtaaattgtgtgatgtttttttgggggggggattttccttttgcaatcagtattgatttctataattttattcttaagtttcttgatcctttgcttgtggcttctttagaattgatttcggttatcatgtggataatttcgtttaggagaaacagcatggtacataatgataaactacttgcttcagacattattgtttctcagggtcgtgattttcttactgattaccagagattagccatggcttcaagtggcccccactcggctaggaattttccttctactctaaatgtttattctagtcttattttgatgccgcatgtgttcaggaactgtgaaaattaatgtcgatgccaccattaattctcttaataatagatgtagtttgggtatggtagcttgagacttcatcggtgaggttgtggtttttgttgtttggcacatattgggtagtttctctcttgaaatggcagaagctttagcgttataagatacaaccattctatgtcgcatgttgggtttttcacaacatgcaattcgaatgtgatactgaaatttaataaccagattctttgggctacttattaggtttctttacgctgtttcataaagataacacgaaaacaacaaaaaaactacataaaagtaacagaaaaataatattgaaacaaaaaaaaaaatacatataaataaaaaaaataaacaacaaattaataagagtaaaatataaaaataaattaaaataccatatcttttataaataaaatcataaaaattataaaaaatatttaaaatatcgtacaacaattatttttttgttgcatttgtgaaatatccccaaacattaaaggataattacataaggtattatttttttaaaaaaatttatatttttacgtttattgaatttttcttatatttttataatttttcataaaaataataagaaaactacataaaagtaatatgaaaataataacgcaataacaacaaaaaataacatgcagataataaaaaatcaacaacacataaacaagagtatagtataaaaagaccgtattttctacaaataaaattaaaaaaatcgtaaaaatgtttaaatttttgtgaaaccgtattttttgtaatttttttgttgtttttgtgtatttgtgaaataatcccaaaaattaatcatgttctcaaaggcccacgaaggcccatttcggtgttgggccaattttagtgtcgactcaagtatgattttccgtctccatcggaagcgtgaaagcacaaccgaaaatggaggcaactgacaacactcctccccaagaagaaccctctgatagtaaccctaacgacatcgtctccgattactccttgccggagagtgatgccactctctctccaacccctcctgacgagagccaatccacggaaaacccctcctctgctccccaagtcattattgacacccccgtttcggactctctcgaagattcctccgaaccagttcctgaagacaccattgatgaacagccgcaaaatcttgtcgacccacctgatgaacctggtccggcagggccaagtcttccgaccaggaaacgacgccgtagaaagaagttctttactgaaatcaatggtactccatcggtggccaagaatcgtcgggctggactcgccaaggaggtcgatatagaatcaagaattgcagtttctgttgggtttccgattgattcgcttactgaggaggagatcgaggctaacgtggttcccaccgtcggcggagccgagcaagctaactatatcgtcgtgcgaaaccacattcttgcgcggtggaggtcaaatgtgtctgtctggttgacgcgggagcacgcactggagtccattcgatcagagcacaagggtttggtggactcggcttacaactttcttgtggagcatggctacatcaactttggggttggaccggcgattaaagaaccgaaactgaggtcctttgatggggttgagaggggtaatgtcgtcattgttggggcgggattggcgggtttgatagctgcgaggcaattggtgttcttggggttcaaagtcgtggtcttggaaggtagggcaaggcctggaggtcgtgtgaagacgaagaagatgaagggtgatggagctgtggcagctgctgatcttggtggaagtgtcctcaccggaataaatggtaacccacttggggttctggctaggcaactggggttgccccttcacaaggtaagagatatatgcccactttatttaccagacggggaagcagtagactctgagattgattccaaagtagaggcgtcatttaacaagttgttagatagagtctgtaagcttaggcaggctgtgatagaggaagttaaatctgtagatgttgcattagggacagtattggaagctttccgccaagtttatggtgttgccgaagacccagaagaaagaatgcttttagattggcaccttgctaacttggagtatgcaaatgcttctttgatgtcgaatttgtcaatggcctattgggatcaagatgatccgtacgagatggggggagatcattgtttcattcccggagggaatgaaacctttataagggcattggcggaggacctccctattttctacaataggactgtcgagagtattatatacggaatagatggggtgttggtttatgctggtgggcaggagttttgcgctgacatggttctctgcacagtgcctttaggtgttttaaagaagggttcaattgaatttttccctgaacttccacaacgaaagagagatgccattcagagattaggatttggtttactcaataaggttgcaatattgtttccttacaacttttggggtggcgatattgatacttttggacacttgtctgaagatccaagcatgagaggtgaattttttctgttctatagctattcttcagtgtccggaggtgcgcttttggttgctcttgtggcgggagatgcagctgttaagttcgagttgatgtcccctgtggagtctgtgcgaagggtgttaaatacattaaggggcatttttaatccgaaaggtatagctgttcctgaccctattcaggcagtctgcactcgctggggcaaagataatttcacctatggttcatactcctatgttgctgtgggttcttctggggatgattatgatatacttgcagagagtgttggtgatgggagagtattctttgcgggagaggcaactaacaagcaatatcctgcaacaatgcacggagcttttctaagcgggatgagagaggctgcaaatattttcagagtagccaaaaggaggtcattaagttcacctgacaagttaaatagtgttaccgaagaagaggatgagttgaacaaattgtttgacgcccctgatttgagttttgacagcttctctgtattatttgatcctggttcagatgatgttgattctaattccttgctcagggtgaaaattggaatagaaaagtttgaaattgtttgcttctatctctatgctttaatatcgaaaaggcatgccatggaacttggtggagttgatggggatgtgaacaggatgagaatgttgagtgaacaatttggagtgagttgggttggaagaaaaggcttatctgatgctgctagatctcttataacctgcataaaattagctagatcgaacaataatggaggaaatcaagtccaatccaacgttacggctagttaaagcgtcactatgcagcatctccattagtatgctgctaactttgtctggctggaaagatcggacaagtacctaaaacatgtgcatatggaggattttagggtggctattcgatgagggcatgatcctattctcagagctgcatttagtgcactctctattgtgaattcattaagaattttttgtacattcatcatttcaattgccttcagaatttgttagtcattccattccaattagttttggtgctctggtcacaattcaggatgttccctctaatttgacttcataattgttttttcttctctttttgacatgggactttataattgtttggaattcagatcttatataagagaaaaaatgggggaaaatgtttttgaatatgtgacttttttccctacaagttataaaatgatattcgattgatttttttttttttaaaaaaataataaatgaagagagaatgaaaatgaaaatgaaactttgtagatttttctatatttttttcttcaactttttctattttgcttgtgtagtgtgaaaatcgtcgtgtactctctattagtgtcaaattacaaacttgttgccggtaggattgacgatttgtattattgctttgtgctcgtattaacatatttatgatgacacgacacaatacgtagacgacacatttgtaagacatgttgacagctcaaattcaaacacgacacgataaattaccatgtcacacgacacgatgatcaagataacacaattttcttaaaaaaaaaatatgaaatctataaaaattatttgtgttattgtgtcagtacaattataacacgacatgacaagattattaaaatattgacatgattaaggtaaacactataattagtcaactattaaatgttccaaattattattttttatcagttttgaatcgtgtcatcgtgatccatattcctagtttcctactcaagaagaaataagtcactagtaaaataagaataaagtgcagcaaaatccctaaacgtttcatttcgctaacaatgtatccccaaatctcattttttagcaacaaaacccctaaacctgcattttgttagcaatttaccaattttgtccgtttttactgttaattgccatgttgaacgtagacataaaatattgtacacatggatatagtgtacaaattaggggtgttcgcggtgcaggtagtgcggtttttgactattttttcaaatcaacccgcatatgcggtttttttaatttcccaaaccgcacccgcaccgcgaaactaaaaaattgcatcgcaaaaaatggtgcagtatcgtgcaatttctgcagtttttccagtttagactatcaccaaataattaaacaatcacaaatacaacaaagcttaagtaacacatgtcaaaaataccataaggcttgaaaataaatatgaaaaaaaatttcaagtttaaacaataaaataattagttgggccttcacatattggacctannnnnnnnnnnaaattagtatttttataatatgcggtgcggtgcggtttgaactgcatattaataattcaaaactgcaaactgcaaaccacaccgcgcggttcaggaaaaattcaaatcgcgaccgtaccgcaaaaaatttcaaactgcctttttctttgcggtgcggacggtttgaacggtttgatgaacaaccctagtacaaatggcacaatttaattgagccacataaataaatattaaaaataaaataaaaaatttaaattattaatttgaagttgtaaagtccttttttggcnnnnnnnntgacaaaataatttttccatttatggtaagatt

SEQ ID NO: 79285 - DNA, 1908 bp, Cannabis sativa
tttcgaattgattttcaggcgtcccgtggcaatagtgcttcaaagaatgctgtccgcaaagttccaaaacatgttgcatcggcttttgtcaagcgtacacttaaccgatgtatgaattttgaggaaactggcaaaagctgctttagtgatcccgcacttcagagcgtattgtattcttccaacaacgatacgaaatctgtcgaatgcattgggtcgggaactgctagtaacacatgcaatgaagtttcgtatcaagctgatgttagaggagcaggtatgttcagaccactacatgaactattgcatactcgttcgcttttgttttttatctttaacttactgatcaatttcgctcggtgttacaggtggggtttcttgtgcattcgaaaggcacgagtctcatagcgacagtcttgatattcactcctccgagcgaacttcttacaaccagggattcactcccaacagagttcggaagagggaagctctgattgacgatgttgtcgggagtgcttcttcgagggtaacttctgctttcgacaacactattcccgaggcaaagggaaggagaagtgatcgagataataacttaagaaacaattctctttccggaggtggtcggtcatctttagacagctcccagaccgaacgcaaaacaaaaacaaagttgaagcaaaagaacactcaaaacggaagattcatggaatcaacagaaactcagttcaatagaaaaaccgaatcgaaagatgcagaggaacccggaatcttccctaatttaccgatcaacgaaatagatccaatagaagacctagatgattcccgcgacctcggtggaaatcaagatctgagtacatggttgaactttgaagaagacgggttaatggaccatgactcgatgatcggtctcgaaataccaatggatgatcttgcagagttgcagtttatttagttagttgagaaggtatcaagatgtggtgatgatgatcaaatgtattagcacacagtccaaccaataaaaagagaaaaaaaaaaaaagaaaaagaaaaaaccccccaaaatttatcaaaagagaataattagaagattgtaaatataatttttagaggtttgaagagattgtataatccttggatatctgaaattgaatcagtagcaaggatcatactatttcttctctcatgaatcattataatgattttactgtattatgaaccaaatatattcaaaatacaaggcattaggcctctagagaaagcaaaagttttctaatgatttttcattacaatttagttggtattattatctctatcaattgtagtgtattaattttgtgtaactctattattgttattatttcatcatgcttactttccaataaaattcacttgttatctattgttgtatttgttgtttgttttttttttttcactttggagtggagaatttgaacttcactaaaaaaaagtaaaattgttgggtttattttggtatgtataaagatgagacttttctaaaccctataaaaacacaatatttataagtgttagcttgtcgttttgaaatcttaaatttactaaaagaatattgacacaaacactactcgtgagaagaaaaatgaaatacaaacacgaatacgactcgtatatattttttgtcgtgttaaacctgtaaaatcttgtatcatgttagcttgttatatgctaaattgttagttttagtgttatcgtatatcttcgtgtcattttgaacctaaaatttatgtttaatgatgatttttatttttcatattttgacatgaatcaaagggaaatttgattttctatacttaaaaatgtttaaatttttttttttgaaccaatacattttacactatgaaaaatatgactcttttttcaaaactccaaaaat

SEQ ID NO: 79286 - DNA, 5445 bp, Cannabis sativa
taataaaaaactgtaaaactaaaaaaacatttgttaaaataatatattaaaaatatattttaataacggtatttaaaaagataaataaatacttaaaaaaaattaaataaataatcttagaaagatgaaagtaatataacaggaataggaataggaataggacaattaaagtttattatagaaagagaaagagaaacatcagaaaaaagtgatgtcaatactcattaaataccacaagagagtgagaccaatgacaatttttaggaggtaaaagagtaacaaaccctaagaccggttctctacaactacaacacaagcctactcacccaacccccatctcctcccttcattcttacacgtgtgccaaacaacagccatccgatcacacgtgccttagcttcttccttccgtggatatacatatactagtcacggcaaccacattctcccctttttttttccctctttcaaccaaattcagcgccagaataatatacagacgacaacgaacacagctgcctcagtcactctccccctctcatagatctctctgtaagtttctattcattttcattttttgtccttgtaaatgccgatcattgatttcgtcgcaatatttctaattggtttgttgtcaaatttatacgattttgtgatttgtggaaaatttgaggtgattgattaatttccgtgaatattagagggagaacataaatggagtcagaactggtggagctgtttgaagcggcgaagaaagccgctgacgctgcggcgacgttgacagaatcgggcgcagaggaaggccgatgccttgatgcattggaacagcttaagatttttcccgtaacttatcaactccttgtctccactcaggtgaatttccattgcttttttttttttttaaagctcaatgcttggatacaaaaggggtttctgtggatgtatgtataatggaatttgtaaaattaggccaatggaaaagttaatgcttctacttaacgagattagtcaaaagaacgataatttagatctgaaacttcctcttttcttagggtttctttttattcaaatataatttggataagattttgagtttaaatgatggaaaacgttttgagctacgtgataatgttcaggacttggtgaaaaggaggaaattttctttgtctatgagaatgtgttgaagtttgattaatcactaaatgtcaccataagaaaattaaaaaaaaaaaaaaatcggatcttagggtaaaggtgcaaaattaggcagttgttcttccaagaaaattttctgaattgcattaatttatttctgatatttcacgagaaagttatttagtattcgggacaaactagccgtttctattagcagattatttttaccctggatgttgcttcagtgttatattgttgaacattaaaagaataagttatgctgtttaatttatatttttatttatttattcgtgtccaatgatttttttagtgctcatctaatgttacatgtcacagaatcagatttgtgcttatcgcagtgtttctgatttagcttctttcaatttagagttgggacgttggatttgattattaacatgctctctttcaggttggaaagcgtcttcgacctctcaccaaacatcctaggaagaaaatacagactcttgcaacgggcctgattgagatatggaaggacattgtcataaaagaaacaagcaaagatatacagaatggaaagttggaaaataaaccttctttcaaactcgaatctccaaaagctgagagtcccaggccttccaaatttcaaaaaacttcctctgggaagatggagaagggtttcaaggcagaacctgttaaggttgagaaagttgagcgcaatgtagtagaaagaaaggttcaaattgagaaaaagtcttctgtggagaatgtcaagattgaaaagataaatagagatgtgaagaaaccagcagcagtgggtgcttcatcaactcccaagctcacatctatggtcaaatctcatgatgtctcacgagaccgagtacgtgacatgcttcatgaggctttgtccaaggtctctggcgaggcagatgaagatatggtggatgacgtcaatgcctgcgatcctattcgggttgcggtgactgtggagtcagtgctttttgagaattggggtggtgctactggtgcacagaaggtcaagtatagatccttaatgtttaatctcaaggatccaaaaaaccctgatttccgcagaaaagttcttctaggacaaatcaaggcagagaggcttgtggacatgagcacagcggagatggcaagtgatgagaggcagcaacaaaataaaaagctcgaagaaaaagctttattcgattgcgagcgcggtttgcaaagagaagcaacaaccgatcaattcaagtgcggtcgttgcggtaaacggaagaccacttactaccaaatgcagacgcgaagtgcggatgaacctatgacaacctacgtaacatgtgtaaactgcaataaccgttggaagttctgttagtgtgagggagttccttttaggtgtttctgactggccattgttggtaatttgattcatctgatgatataagtggcagagctgcccccagttagatgtgtatgtcttgagtcaattttactttattagagaattatcatattgtagaatttttctatgacagcctattttattttcatctagtgttctgtaggataaatttgttcggagtatttctttttttaattgatgtatctccaaatttactacacatttctagttccatattcatgtacttaatgactaatgtggcacacactttaatgtcgttttccgaccgataaagttgaaccgagtttcaattactgagcttttttcatctttggtacgtaaaagttgaaatcctcttgttctaatctagtattaacaaataaataataacgttcaacaatctatcaagaaaataacaccgccatctatcacagtaattaattaaattgtttttcttttcttattaccataataacagaaaaggggaaatagaagaagaaaatataatctacgacattaacagaccaagattgttagacaccatcaacagtagcaggagttgtagtattagtttcacgttccctaagagcctggaaaactctagagcttctatcgaatatctgagcccttcgattgtaatcatttggttctctcccatggtcatcccccataatggcctctctctccaagcactcaagcaattccaccactcctctctcagctccgccgcacttctccttcaacctcccggatttcatccattccgccacttcttcagcgtcgtcgcccatctcgtcatcgaaatgatctgatgatctcgtcacctccacaggtcccaaattggtggcacactccgcagccattttcactctcgtgtttttaagtaacaaattattattagaccaccacactctcgaacatcttacatcaaggtggcgcgtaataaggctttggcagcaagaaacagaaggacgtgaggttggaaaacaggtttgagaaagtggaacaacttccataagagcctactggatcgaactagaagattattcttgactaatatcccatacaactctatatatactaatactatatatatatatatatatatatatgtagggcgccaactccagtagtccacgtagcaaaaggagatcacaccgcacacacgtgcaagggcgtaaggacacgtgtgaggaagtggatgaggagggcgttcgagaagataggcacgtgcgaggggattgtcatgtgtcattgtgtaaggttaccttccctaagctagtaacagcagtagtaaattagtaatagtgtgaaactcttcctaggccttaaaattgggtccaattttctttggattacgttaagtaaacataggaatcttgttcaacttgtcaaagttatagccccaattttgagtggtcatgtcatgtggtccaaattttttagttttaattgttgccttctactactggatttaatccaaatacatttcatattgaggatgaacataaatgtgagttatgcgacacatcatttgttacgtaaattttacataatgtagaacttgcaagtctttatgtgtacttttcaagttttgattttagatgaattaaggctatacttttcttctttcttttgttaaaggatcaaatatttagcattcatttggaaataactatataattattaaatagtataattattagaatagtaattataaattagaataattatactatattttaaatacaatatatgtatagatatattttttttttgaaataatatatgtatagatattaagtatgtggcgtttgattggaggtaattaaatacaatggaaagaaaatgaaacaatttttattttatttttttgtttggttgcatattaaagtgttgaagtattggaatgtcattctaatagaatgacttttttaccattttcgtagaatgactattccattttaaaatagaaagaaaaaccattccaatacataatgagaaaaaatttaataatttttttttatcaatttttttatacattttaaatttattctgttcatattctcatttccatttgtatgttttcattccttccaaccaaactcaactatataagtatctaaaaatagtaatattttaaattatctagtgtgattacacttaatttttattggttacgaaaattgaagagtttaattgagatccttaattacttttaattatatgtacggaacaaatctatcaaacttgtgattattttgaattatattcattctaattttataataaatttctaaacctacggtagaatttcattcctacactacttgataactgatattatctaaattgattaattgttgacattttattcttattatcacaaattgctacacaagcaaagaaaaaaatggggctatgcttttcagatttgaaagattggatagtgatttcttatggtacgtagttctacttctagttggtaatttgatctgactggagtggcaaaaggttgaatttcaaaaaggaagtaaattcaacccatcatatttcatattacattatttatgctctcaaagttaagccaataatttttttttgaaaataaataaataaaaatagataaccaataattgttggattattgtcacaactttctctctctcatttaagataaagaaactaaatatgtgcaacaccctaatgattaggcacgtcacgataatcgataatgaaaccctaatcccactaattcagaattactaaaaatataagcgcagaaaatttaaactttatttacatcaaaatgaaaataaaatttgtaataattttaaactttacaaataaaccaaaagttatgtttcgggatcccataaacatttt

SEQ ID NO: 79287 - DNA, 1109 bp, Cannabis sativa
cgcgatgtgcataactatgaccaagcttgcttgacttgtcaaatagttgaatactcaccaatggctccttatggtttgctacaacctctccgaattccaaatagagattgggaagaccttgcctatggatattgttgtgggcttgccgagttcccatggactaacaaatattctagtggtcattgatcaattcacaaagtatgctcattttagtgctttaccgatccattattcagccatgagagttgcgaagttatttacaaatatggtgatacgctttcatggcatgccttgtactattgtatctgatcgagaccccatatttactagtgctttctgaaagaagttgtttgagctgatggacactactttataaatgagctcagcttactactatcaatccgatggacaaacggaagtcactaatcgttatgttgagcaatatctttgcgcgtttacagctgaccatcccaaacaatggatcaatttctttcttgggcaaaatatcattataacaccagtcaccactctgctatatgaatgacaaatttttaggtaatgtatggcagatttcccccatccattccagcttatcttaggggtattacttggatacaggtggtggaagaagatttattatctcgggatgaaatttgacagtagctccaacataatcgtaattagagtcaaaacaagatgtgacacacgtacaacaagtaaacaaaaagagaagaaacatcgaagttcaggtgggtgatcgagtcttagtgaagctccaacgatattgccaatctacagttcaaagcgtctcaatgctaagctttttcgttgatattttggtccatttttcgtggtagcttaccgaggcacaattgcttacacattagcattaccttcgtggagcaaaattcatcagaccttctgtgtatctcttctcaaaccattctattgaaaacaacccccacaacttactcgctgccagagtttagcgtcgctaacaaacctctaatggtacccctagcaatcttggccgctcaaactacaatgatcaactccaaaccggttcgttaagtgttggtttgatggtctttaacatatgggaagaattt

SEQ ID NO: 79288 - DNA, 1900 bp, Cannabis sativa
aatagcatatttcagaatttacttcttattattaaattaatatgctatttttgatacttatattggagtagtcaatctttattatcgtgttttaatggttcttatgattgtttttctattaaagttttatctctactactcattagggagctagatcctttatggataaaataatttgcaaagatttgttttaagctatatatattctgaattttaatttgaaaatatatgtataattgccattgccaattaattagtaaaatatttttgaggagctatttccttgtttaataagaagtagattttgtttccaggagagatggtgttactgtggcataactggtgcagtcatttatttggttttttttttttcataatttcattgtaaacatatttatatttatttaattgagaaaaacatgtacataatagaaagtttcgatgagttaagaagaagtacaactccaccgctacacttgaggaatatatagaacaatgagttcttaattaacttcttattcctatgtatatgagagaaaatctagggccaacgaaatcaataactgatgagcagtgatcacacacaaacgacattcctatagatttgtggctcatccgttaagattttgttttgaaattaaagaatatttctaaataaattaacaatctaaataaacactttaatatttatatatggaataacttatttttatcaaaacattttagaggcattaacccaatcaaatctcctaactatgtatttcaatggcatacattacaactttatccaactattatttgtcttaatttatcgttggcattagatgaactactcatttatttttgtaggtttttcctgttatatgttctaatccaattttattttaacaaaatatcgttttaatacataactttaattgaaaaataaattagttttcatacataaccaaaattatgtgttacactaattttctattactagcatatacatacatttttcttcaattactgaaaaactttttaaaattaatgctgtataaatttatttatttatttatacattgttatacatgtaatagtagttttggacagtatcccatatggtcttgtttccaaattccaatcatgtcttgtttgtcagaccaaacacaggtttggagttttgtgccataaatagaacacctaaaacactattccatgtagcttagggagggactcaatatatacatatatatatatatagctcaaacacttttccatatataatttactatatctgtacatatagtaataggcctataaaatattcatttgaaagttaacaaaagcaagccagtaattcatatatagcaattgcagattgatgagatgtaacatcaaataagttgaagaagaaatcaacaaaattgtcagattgatactatatatatatatatatagatgataatattaggaagagaagttgttcagtttattcaattgtacatgcagagtcaataggagcgagtcacggatatgcaaaatcaatatagagagagtgtcgttttaccgaaggaagtgtcagagtttgtgggtttttcactatacaaaacagagacgagaagagccacattaattgtgcatataagctagctagaataagattatttgaattaaatttaggaaactgttactccaaaatatatttgaatatccaccaccaaggacatatcagtataggtttaaactaaaataaaattatttttagtcataacaagactaaaataaaataagtatgactaaaattattatcaaggttataacttaaaagtttttagttaaaagataatatataaattctattcctttatatatgtataattgattaactagatttacattaataaaatttgtaattata

SEQ ID NO: 79289 - DNA, 2704 bp, Cannabis sativa
ctctaacaattttgtatttgcagatatgcttacccctggtggaaagaaaaaataataaattctgacttgaaaaggaaagatggtttgtgtcccttgacaccggaagaaactgctctcattttgactgcaatgggaattgatcccaatgtccagatatatatcgcagctggtgagatatatggtggagagagaagaatggcaagtctagcaaaggctttcccaaaagtggtaagcggatgaaagatgtagccagccgtgttccctcatttggtaattttaatattagtttctgacatgtaagcccttttgaatttttctaaacaggtaagaaaagagactctattgaatccatcagaccttaggtttttccagaatcactcatcacagatggcagcattggactatcttgtttcattggagagtgacatctttgttcccacatatgacggaaacatggctaaagttgttgaaggccatcgcaggtattatttcaaaaattcagttctgttcatattaacaccagtgtaggatgtttcttcttagataggcttggaagtttttaaaaagactaaaattgttgccttttgttcctcagatttcttggatacaagaagacaatattgttggacagaaggcttctcgttgatttgatagaccaatacagtagtggatcacttagttgggatgaattttcatctgctgtaaaggaaacacatgcagaacgcatggggaacccaactaaaaggttggtgattcctgacagacccaaagaagaggactatttctatgccaatccagaggagtgtttagaattgtcggatgaacaattaagcagtacatgattatttacgctaggaatattttgtgacattcatcatcagtgttctcccacagttggtagtagcttttaattaacaagagaccgttaagagaattctctatggagaattatatagagtgggatgggattttgttcaatcgtagaggccataatgaaagattaaaagaattccaagaagaaaggatctatggatcaactggaggaccaatccattatctttattatatatgaaaatattgccaaataatccactcaaaatttatgtatagaagaagccaagggagacaacagatccaactgccacttacacgagagaaatatgcgaagaaagagggaactgctggagtcatgagaggtcaatgtccttttcttttctctaatagtttcctttcctttccttttttctttaatttttttattccatatgtaatagtaagcccatggtttcgtgcttttgtggccataaaaatagtacaattcctttaagatttttctgtttgcacatattgttacctcattcctgttctgtggcgtgtatatatagaattatatatatatacaagtatattaaacagggaatgaagtgtgtgcgatatattttgtatttactttttgcagatcacgtaaataaatttaaatgttcctagaatgttaatactgtaactctttatttggtgtatatgggtgtggggtggggctttcaagatagtttggttttggttcctcactcttcatatgtatactaggttgatattcctatattcttacttttttattttaactacgtagtttataattaattttttagatgttattaaataaaatacatgcttttttattaaaaaaaaaatatttaatttaagtgatatttatgtatacataaaaatataataatatttaaaatttattgttaattataattttagttttttagtaataatatttttaattttataatattttttatttttatagaaatgtcatattattttcaaaagatattttaattggtaacggtgttaatatattttagatatgtgcaatttaaatttaaattgtaaacttaaaaaaaaacatcttttgttaaataacctcttaatttgtttttacatatttacttttaaattaatttgtattcaaccctttttgaatgcctgaactatttttcgtttgatgataaaagttttaattccaattatactaaatgcctacgaagactttggttttacataataaattgaatgattgcatgtgtggtgtggtccgtttgagtagttctattttgcgcgtggtggtttattctttgtagtgattgggaatattatatggtgcatgatccacattcctttttctagtgttggagggagacttaaaagagtagtcatagaaaatgatagggggtttaggactctgatagggggcccttaaatcaatttttgtttggcagaattcataatatttataataatgataattttaaaaggaatgaaagcgatttagatttttccttttaacgttttggctagcaattaattgtaggagatgccttttttctctcttcttcttttcaaatagacaaattctcactggctacactagctgactcgattagtaatgttttgatgagaaaagacaattcaaaaatccctaccaaaaaaagaattttcgatggcaggtacattaaaaattacaacatgaatttgaactgcgtagcatacctttttgtaaaattgaaagcgtttcttgggagggtaaaaaagtaatcaatatttctctacggacaatttccatttcatgtgtgatgaattcatgagatgttattgttaagcaaaattttttatatttaaaatattaaaaataaat

SEQ ID NO: 79290 - DNA, 3089 bp, Cannabis sativa
gccttatgcaatttgcatacatgattaggatagtttggatcaacaaatccaggaggttgagtcataaagactgattcttttaaagtgccattgagaaaagcgttagagacatctagttgagtgatgtcccaattgttggagacagccaaggtgagtaatgttcttactgttgtgggcttgacaaccaggctaaatgtctctgtgtagtcaatgcctggagtttgagagtatccctttgccactaaccgtgatttgaatttgtcaattgaaccatccgcattgagtttgatacaatgtacccacttattgcccataaggttcatgtctggtgagtaagggacaagtgtccaattgttattttttttagagcagtgtcctctttatgcattgatgcaagccatatgggtttggtaagagcctgtttgagtgttgtgggaactttagggagggtggattcaggtaaaggatgtagagtagagtgatatgtttttggtttgatgatgtccgatttagacctggtctgcatgtgatgcaaattggtagtgtaaggttcagtatttggctgttgtatgggattattgacacaggttgtaggatcaggatttgggagaacagacatagaggcagtaggaacaatagtggtgttctggacatcaataacagtaacagatggggatgttgatgcaactaaagggaccactggtgcagcattgctcacagcagcagcagcagcaggtggatttgcagtggatgatatgttggcatttgcagcagatgtagagggcatagtgttattagttataatgggagatgtaagaaatgaagtagagggaaaaaatgttgtgaagaagaatatacctttgtggaatcacatgatgtgagggctagaagttcttcttcattaaagaccacatttcttgctataaacactttgccatttttattttcgcacatgtagcctttgtgattcatggagtagccaacaagcatgcatttttatgatcttaaggacaacttgttgctgttatatggccttagatgtgggtaacaggtgcaaccaaagggcttcagcatattatagtcaggaactttgtgaaataaagtttcatatggggacatgtcaccaagaacacgagtaggcaaactgtttatgagataaacagcatgctgaaatgctaaccaccaataagggagagacaaaccagcatgagcaagtaaggtaagaccactttcagtaatatgacgatgttttcgttcagctcttccattttgagcatgatcatgaggacatggatgttggaaatggactccatgatgcattagaaaggatgctaaggacctatattcacctccccagtctgattggacagttttgataggaagatcaatttgtttttcaacaaaggttttaaattggagaaatgtactataggcttgagattttgtggataatgggaagatccaagtatagcggttgaaatcatctataaagtgaatataatattgatgcccttctttggattcaacatgtgatggtccccacaaatctgtgtgaaccaattctaaaggttgggaggctcgagactcggatatgggatgatgttgtccatggcttttgccttttttgcaagcatcgcagaaaccttagatttctaaggttggttggaacatgtaatgcagataagatttttacaagtgtctctggtgtgggatgaccaagtttcgaatgccaaaggttgacatcatatttgtgaacaagataagataaagactcagtattattaggtaaaaaaccatttttattattgcaagaattagtacatgggggagttactgtgttaacagtactcatattacatgtagaagaacaagaattagaacttggtacagattcttaactggttacatgaaaagcagaacatggagactcagatttggattgcttggtgacaagttgacattggagctgaactttagatgggaaggagctgtgagacaggatatagaggccattcttaagcctccccttgaggagcactctccctgtgattttgtccttagcaaaacaacattttgagtgaaattctaagaaaacattattgttagcagttaacttagaaacactaatgaggtttttgataatggaagggactttaagaatattttttaaacgtatagatgactgagatgaagggagagaagagttaccaatgtgacttataacaagtcttttaccatttccaacagctagggtgtcagaacctgagtaagggattttagattctaagtgttccatgccctgagcaatgtgattggttgcacccatatcagcataccagtcgaaatcttcaacgaattcaggcatggctgaactggagtatgcttgatgttcttcttggtcatcgatttcagcaagaaagacttttgaatcattgattttgggggtgacaaatgctttgtcgaatctgtagtggcaaacagcagccgtgtgtcctgctttgtggcaaacctgacagagcaatcttgggatagatggattgtttctgggataagcacgatcctggggacgattcatagaagaatagtactgagcaagagaactaagaattgtctctgtcatagatgagcgaagccagctgagaagcaattggtctttgcgtttccagatcgtgaattctgggttagggcctccattaacaagaactcgaacatgtgcaataccagtaaggagtatatcatcaagaccgtggccaataacagtgggtattacttgaaatttccatgcaaggaaattagttcgatccaatcgaacagtgagggaagaattcagggaattctgaaagggattccattgctgaactggttgaagaaccggagttgcagcagtagcagtagcagaggttggagcagcggtttgagcagtgggttcagggtggcgaggatccatgaacgacgtaggtcaaacgctatctgataccatgtgaaataagtgaacttatctatgcaattctaggaggacacaattgaagaaattgaatcacaagactttgcaaaagttgcaagtcttgaaatgagacattgtatttata

SEQ ID NO: 79291 - DNA, 4310 bp, Cannabis sativa
gttaaagacgaaattcaagtagtactgtattatgaaacctgtgcttagatatttatttgattgttattttttggcggcaattgaagtccgtaagcatttgttttcagtttacagctgaattctatcagtttggtcacctggaaaatgtaagaaaaatattgtatgaacagagagggagaattttttcttcctaaccaaaagttttattgacccttttaggctgattgagcttttcagaatagttcctcattggcttatatattgtgggaaaatgtacatgattctgattcctagtttatgaatttgttttggtggtgactttaggtggcttcgatgttgcctgcagaagcattctcagtgattcggaaatcttttgatgcacggaaggtttgttcaattgtgcagaattatgctaccatttttttatttttgtgcgttaatcatgtcagaaatggaatcttaaaaatcagttttttgtttgaaaagtatgagctgctaaaacagccaaaacaaatatgtatgatagaacttgaagttagttaaggaactttactaatatgctttgttattattttagatgctaaaggagccgaaatttgtatacgtagtggacatggacgttgagaaacttttgagtctggagcctcgtacttgggacttcatttctcagatggagcctaaagttgggcttatagaacatttgtctgaggaaaaagtaactggggacttgatcaatattataagagattgtacaaggatctctgaagataccatttcaggagatggtggaaataaagataattctgtggctaagggatctttaatagcgtcgtccagaaaaccaaaaattgcagttgtgggtagtggaccatcaggtctatttgcgtgtctcgttcttgcagaatttggggcagatgttacattaatagaaagaggtcagcctgttgaacaaagaggacgtgacattggtgctcttgttgtgcgaaaggttttagagatggaaagcaatttttgctttggagaggttttatacattaaacttgactcactcttactgtatgccattcttttgttttacactgagatttacactgactcactcttactgtatgccattattttgattgatgatttccttaggatctgtgtatttcctcaaaattctgcttagattgatatgtttgtttttgtttttgatatttatatcacttatgattgagtgatttatcaaggacttatacatggcagggtggtgcaggtacctggagtgatggaaagttagttactagaattggaagaaatagcgacactgttttggcggttagcaccttatctctatcttcttgaaattttgttatctacttccttttcatagcttttcccagtagttccaccgaaaaatgtgtgcatcactacttgcacttgaaatcttactccctctcacaagaatttgatgaatgaacaacagaatagaccaatggattttttttttttcccatctttaagtacatttgatttactgaacacttcatgtacattactttagcttttgtcagtaatggtatggactaacggctttcagcaattattcttttaggttatgaaaactttagttcattttggagctccaaaaggaatcttggttaatgggaagccacatctaggaacagataaactgattcctttacttcgcaattttcggcaacatttacaagatctcggtgtgagtgacatacatgcttttggctgagtcaaacttatattgtcagagatatgtttttttcttcaaatttgtttgctaacttttctttttccttttcataatcaccttaggttactattgagtttgggaagagagtggatgatcttctcatagaggatggacaagtcgttggcgtcaaagtatctgattcaaaagatcaatcacagtctaatagccagaagtggggatttgattctgttgttttggcagttgggcattctgcgcgtgatgtttaccaaatgcttctttctcataatgtggctttggttccaaaagattttgctgtgagtgtttttctcttcccttccttcggatctagtgagggtatatctggtagttaaggacattttattcatgacatcggcttgagcattacttactataaacataccttccacaactacaaagatttgatgctttttcaatgttgttggaaatgagagcattttagactttaagcatttaatagatgatattgtatctatacaccacaccattaaacagtaacgaacatagggaacttgaacaaggtcttccgggatgaatatattattagccagaaccaccttttgtttattttattttttctaaaattgtttttggtattgaaatatttcaggtccttttgtatactgtataactatgcgcacagaaatcttgtcaggtcttgtaacagaaatgactttgtttgacagtgcaaactgttgtttagataatggataatgattttcatacagacaattaacatctgtgcatgctcaatcaaatatggtgcgcactatgcacaactatagtgctagcaatagggagtagtggtgatggagaatgctgtttttttataatcaagtgataagaaaagtttaatccagaaaaagggggaagctagtaattacttaagttaattggcatggtattggttagttctgagttattttttaaattaaaaaatatatatattataatgtgattcttatatggctgaacagataggtttgcggattgagcatcctcaagaagttataaacaacatacaggttggctatactatctctttcgctttagataatatatcaaaattttgttatgcatgtaaaagaatgcctagatgtatgtatacttgtccatgattaagtcatctctgccacctattctactcttatatctgttttgaaagttttaatagttcaaggcatgagcaagaaggttaaatctgcatcccattgatacaagaatttttcttttacatatcccagaaaagcctgtaaaacttattcaactcaagtttgaaactgagtgactcctcccactacaaactatataatattttggagagactttggcataagtatagtacttttttttttcaaactgtttttcatctgatcagaattcgaaaaatttgttgtgaaaatgtgtagtactctcgtttggcttctgaagttcgcagtggacgtggaaaagtaccagtggcagattacaagcttgtcaaatatgttggcagggaaaacggtgatgtgtctgctggggcaactcgaagttgctattctttttgtatgtgtcctggtgggcaggtacctctcttttccttttaagagcctgctttgcagatcagtgaaatagtaaaatcttttacctgaaataagttacaattttttggagggccaaataaggattgtacttgacactggttaaaactcaagaagtcttttgctagctgtaccttgtgaatggacttctagatgacaagattattcattaattggtgttgataaaaatgattaatctacctgtaatattactggaagtagtaattcaaatttgttatttgcaggtcgtgcttactagtacaaatccttcagaaatctgtatcaatggcatgtcattttctaggcgtgcatccaagtgggcaaatgctgcccttgttgtgactgtctcgacaaaggattttgagtccttgaatctccatggtcaacttgctggggtcgaatttcaggtatatcatatgtttatttttgttttttttttctcctggcattttatctttagcacttctgaagttctgtattaccatctttgccaacttatttctttaataattctggtaatatagattgacaacctttatgaattctcttatctttgttgaagttctattttcatgattttcagctattaatacattttaaacaccatcctgatttcaatttctactgttgtgctgttaaaaaattaagagggaatttgaaagaagagcagctatattgggaggagggaatttcgttgtgcctgtacagacagtaactgactttatggatggaaagttatctggtatggttttgtcattccattttccaaaattgtttttcagctgcttgcctgttaaaaactccatctataggtggttgaagtacttgttttttgtctagtaacatctataccgccatcaagttatcgattaggagtaaaagcagcaaatctccatgagttgttcccaattcatataacagaggctttgcaacagtcaatctcaatgttcaatgaagaggta

SEQ ID NO: 79292 - DNA, 6318 bp, Cannabis sativa
acaaaagttggatctttaacccatcgatacttgttattgatggacattttactaacttgtacaactttttccaactttatattatttacttgttttctcttgaattgttattaatcaccatcaatatataacaggccataagatagtaagcagtttttcataataattactaaatttaaatatgtggaactaatataaaattacaccaataatataacaattcataataatattagacaatactagtttcttttaacattttttttatttaacaaattcctaaaataatcttaacttaaacacaaaataaagtggtaatgaaatgtaatggaatagaaatgaagaggtttttattctattttttttttgttcgattgtaaatttgtaatttaaaatatcgaaataatttttctattatttcggtagtacgactattctattttaaaataataataaaaaaaatcattccaatacaagctgagaaaaaatttaataacttttttatcattttttttatacattttaaatttcgtataagttttctttttgatcaaatgagaaacacagagacagttttaaagaatttagatgggagcttaataattggtttaaaacaaaagaaagaaataaagatagggaaatccaattccaagcaatgcattatgttcaattcatacacatggaataccaaaaaataaatcttgatttactggtgtgagaatccaatgagttgaaacataagagacaaagacaggtgttgcagatttatagacaaacacaacaaaattggtcccacaattagtcatttacaactaataaagattcagcaagagattttccatctcaactcctgaaaatcttgttacttattactttaggttacattgatcacattaatgagcattgggattccttttttttttcttttcttcctactacaagttacatgggattgagttttgcacgaattataagaaaccaaaaagaaaaagcagagtatatgttacccttttgattaccatattacccagccaggaaagaaagaagaaaattcactcaatttttttcacttggagttctgctggctgaccataacttactgaaaattcttttgggtctactgggaagagcacatatagtatttttaagcctagagcttcttgcagtcccatcagggttgatgtaattttcatccaaaccatcatcttcagccaacttcattcttaaagttgagatcttggaccttggtgacttaaggccagagacactccattgatcatcacctgctatggtggttgtggtacttaatggtggtggaggctttgatgggtcaattccatgtgaggctagaagtgcttttatgttgctgggtagttcagctactttaccacctgccatagcagctctagcttgctcaaagaataaaacttggaccaccactcttagtgggagtaactcgttttgtgcagcgtgcatacaagcctccatagatagttttttgcagtctagaattcgacataatctctttctttcactcttattgagatctgggtgtgcctagatttcagtcattaagaatttatgttaacaaagataaatataataacatcatcttcaaaacagagaaagataagacctttttaattaagattaactatcagaatcaaataacttcaggcattactaaactcatcaagagaccccttttgctgattagttttctggtgggtcatcctaatcccaactgctaattaaatatgcaaacgtgacaagattttttttaaggtcaagagagttggttagctactgctataatgacccacatcctaaacaatgatagtgtgagcatgctcagatattaaaatttattcaaatgtaaacaaaaatcagtgaaaatcagtagttttgtcttttaccttaagataaatgtcaatagctctgtagagatcatcatggtcaatcctagcaaaatcaggtatagactcagaaataacaatgaacttggagagtgacaaattcacttccctagcaatctcttgaagataaccatccacaagctttgccactttcaactttgatccatgtgatgcagaagaagacctcctgctctcctgaaactcaaagtcaatattctcagctgaacgagacctcctcctttcaaagccaaacttagacctgggaggactagttggaggactctgcccctgtaacaggaactgttccaatatagtcatcactatgtctacatcataacgtgtgccgtttaagtaagaaccagaaggtattaacaaatcactgacagtagcttcatctaattggagtgccaccctttttgccaattccattttagaagaggaagaagcattaagaagattggctgccttgacaagtttgagaagaaaactacaagaaacagcacctttctcagctggaagtagactcactatagattccaacagtaatctatgcttagaatttacttcacttgctgactcagaatcagaatcagactcagaatctccatgcttgttgtgaacaaatccatttctaggaatgtttggtaaccatctagcagcataaattttcaaggcatctccaattagattggtggggatctttccacctgatttaatagctatcatagttctccaataaaggtctatatccaactctgctaaatcctcagcccaccaacctttggatgttgtcctatgtctttggctctctccaccaccaccaccattgcatgatgacacatcatctctagtacctctccttgagtaactgtgggaaaggctcacctttgaggggtgagttaagaccttggaagcaattgcttcaatacatctgcttgtaatttcaagttcctctgaccacaaagcataagcttttgtgctttgtagtgtcacaattgagtctctccaaccattaaggatgcaagagttgaagaaaacttcaatcttgtaaataaggttacctttctcaacatcttctgtcatctgcaaatactcagcagcacaacgtgtggacactatgttgtatgcactaagtgttatggttataccataacaaaacttcgcacagagctcaaatgcttcaaccccacctgggaaatcagggagttgtactatttggtgttgtgatgactcaggagattcagaacatagcttctgaagcctagaacacttggacagaagaggaaactgtatgcaaaaaaacaaagaacatcaattaattaaaggaacagtttaattaattacttcttttaatataagaacttgaacttaattaccttgtgaagcaaatatctgcttcccttgacttgaattataagatcactagaaacctcagaggaaatagacctgaaaataaaataaaaaatcagtctttcattggtgaatttcttcaaacacctttaagtctatacagatacatatatttatatatatgataatgatatgttcttacctaacagcttcagtagtataaaaagtatctgggcgagatccaagcttcataaacttcatgactactgattcttttttattctccttctctccttatgagtagttcatcagacacttcttaaggtatctaaataaagattatatatatcaaaaattaaagaaaaaattgaaaacaaaaattgaaaataaaaaaaaaacacttcctgatttataaaagactaccctttcagtacaccaggagccagtaaaaaaataagaatggttccttctttaacagtaatctaatcacaaagctcttggaaaaagaatacagtcaagaccaaccatttcctgtactaaaggaaaagaaagctttttcccactaagtttacctaactaactagaattcttctcaaacacaccacaaccccaaaaattcagaatttaattaacttttaccttttttttcttaataaagagagtatttttgaatgagaaagataggtaagagttaagggatatccaagaatagaggaaagaaagacaagagctttttgtgagtggtgtggtgagaagatacaaaaaaatgagtttaatgtaattgggaatttatatctatatatatatataacagaataacagtcaaaaatgacaaaaacccagaagaagggccatgtcttatcagtcaaaaaaattgttctttctttctttctatctatctatctactatattctatactataccccattttgattttgacatgcaaacaaagaatcaaattcactacaatcacaacaacacacttcagtcttcctaataagccactcaaaaaccaacccacatagctaagaaaaacatatcaaaagtagaagaagaagaagaagaaagaagaaatatttgtgctttataaacaagcatactaaccagaatacattagagaataatacttaaattagaaagtatatagtgaataataatgataataatatataatatatgacaacctgaaatctaaaaaagtttgtgatacttcttagctgcagatatgccaatcattcaccagacaactcaatctgaaaaaaagaaattaaaaaagaaaaagaaaatcccatgtatcattttttttttcttctcttttgtaaattgaagaataacaataaaaatttaaccttttttctttttaatcttctctgtgagcttagtataaactacagcaacatgccatgccagcgtgcaattctaaagagaagacgcccacgtgcttatcctgcacccacttctatccttctctctcatcattgcccctctctaaaatatatatataatatatttatatatgtataggggtgataaaaattgaatcttttttttttctttgttaattagagtacatggatagtgattattttagtcaaacactattttatacgcaacatcgtacgtctcacaattccataataagggaatattagcttaaaactaaaatttataataataagaaaataaactaaagaaaagtattatatagaatggtaattataattggtacttttgtgaaaaacaaagcatacccaaaaaataaaaacaaaaaagtaagagaaggaataggatatgtgtatcactttcaaaatgcctttaactatcctccacctacagccaccagaatccacactaaatattattattattaatatcattagaggtttatataaataaaagtgaaatatcaaaactaccctttgtcttttttggtaatagctaaaacacccttgttattcattaatggcatatatggcccatgaacatgaaacgtttgtatattattggtgtgtaatgaagaaaaaccagactaaaataatttgcctatgcaatgcatgcatggttgccagaatattactatcgtcttttttaaaaaataaataaattcattaacaactctagcaatgaatcaatgatattataatttctaaatctatatttaaaaaaaaaaagtgataagatgtatgagattttatctcaaaattatcaattaataataattaataatgaaagaaataattttgcgtttattatatatgattctttacgttattaatatgaaactctctaacaatacaaaattaaaatttctataattaggaataacactatgggtggagtattaatttatttagctagctagagcggcaaaaagttttaattaattaaaaaaatcagaaaatttcttggcagttgaaggcttgaaggtcatgttcatggacacatttcacatcatattattttagacttattccatgttttttttttcttcacatatagacttttttataatcctagcattgatttattaacaatgactccatttttttttcttttggctgggtccactctatatcaatcgttaaacaaattaataaatacacatatgagttatgatattatccatgtgtgatcgatcgatgttatagtttagtatcatataatatatatgtgtatgagtgatcccttaggtactacttttaatacttgcattaatctcataaagtatatttattgatctatctatattgaaataatattgatcgacattgcctttaatttgctatcaaaagaaattaatgtttaataaattagagactttaattaagaaataaatttttatatatatatggggtagattcttttaattttatgaattatgggtccctaaaaatgcaaggtaccctacacctacatcatttgtgagccaatattaataaagtagaataatatataatataatatatatgggtatgctcttaatgggtattacctatgtatggttattttattcttgaccattagatcaaatatctaatggttgatatttat

SEQ ID NO: 79293 - DNA, 3070 bp, Cannabis sativa
aaaaaaaaaaaaaaaaacaaggctaatgggacagacaacattcttgattactaccccatccccatctttacctttttgattcagtaccataataaaaacagagaaagaggatcaaactctatatataaatttatttaattttataaaagaataataatttaattgattgattacattcccaaaccaaacaaacagatcatagttttgtttagcatataccttttcatgcaatgcttttttcctcttgcttgaacttcccaactatctaaattcctcttttctcaagttttctcatattctcacccttcttcttcttcttcttctacttcttcttctcctcttctcttatctctctctctctctaacacccaagaaagctatgattccttaagattttattatatttaacaattgggtttatgaaattaaaaataataaataaaaaaaaaattactcattgaaataacaccctccctcctcattggttcttctcttatttagtatattgtattagcttctccatcatctatctatctaagctctaaactctaaactctaaactctctctccccaccaagaaaatcaagaaaggaacttcaaaaattttagcactaatttattgaagaaaaacagtttcgagatatgggtggcggcaatggcaatggcggtgtcgtttttcctttagttttcttctcgttcttcttcttcttcttcacttcaggtgattttgcagttgcattattcttcattttttttttcaatctcttctcttcttgttcatacactttaatctttgggtcttttttttctgttaaaaatgtagttattatagttttcactctttttggttgcattttttgatgggaaattaagtgttttatctttctaggctatggtaagaagaatttctataaatttataaaggaaaaagaactaaatatatgcaagcataaaggattttatacacatatatttttctttattaattaacttttttaagatgattttatacactattataaggaagtgtctcactagctagattctaattatagctttatgttaccatttttgttcatttcaaatattcagacattaatttgttacttcatatatggccaaacataaaagatgtttatatatactcattcatgcatgtatagaattttttggttgttcaattcatgtgttttatgtttcaatcttttagttccattcatgttcataattatttgtgttctatcttcaggtctaagtttggcagagaaacctcacttgaaagcaatccagagaaatgaaattaaagagaatcaagaaaacgagatacctttctcaacttcggggttttctgaagagttggattcgattcctgttgtcaacccgactccaactctgactcctactgcaccttcgtttaaccagccttcccaaacaccaccgcaactgacaccgccaacaatgacgcagccaaccccaacaacaccgacccctacaacaacgacccccacagcgccaaccacaacaacaccgacaactccatcatcatcgggtggaggaagctggtgtgttgcgagtcaatcagcttcagagactgctatacaggtagctcttgattatgcttgtggctatggaggtgcagactgttcagcaattcaaccaagtggaagctgttataacccgaacactcttcgtgatcatgcttcttatgccttcaacgattactactcgaagaatccagctcctactagctgtgtcttcggtggagcagctcaacttaccaacactgatccaagtaaggcttttatcctgaaaaacttcagctcatcattaagatatctgataagaacatgaaatttaaagactttccatggtcgtttagtgatttcgagaagtaacttaaactcaaagattattaatccctaaactaaatgtgcttctcattgcaggtagcggaaactgtcactatgcatcagctaaatcatcatccaggtaaaaaatttcgaaactacctctagcatataatttcctagtgaaaataaagaaaaaggaaaatcaaattgagttcttggtatgtaaatgcagcatgcctccaccatccccaatgaatccgagcccaatgattccgagcccgatgaatccaagcccaatggttccaactaccccgagcatggacacacctgccatggatacaccaccaggatcatctatcttcggtacagagccaacagcatctcccaactcagccatctctgtctcgtactccagaacattgttattcatcaccactggtctctttggcgcgaccattgcagcaacctatcattaaacagaataaaaccatgtcccaacaaattctctgcaagggaggaggcggttattacacttgccgccaccaaaaccagaagaaattcaaggaggcaaagagaatcttgagctataatattctctcaaggcctctcaatcttagcatttgagttatttttatacttcaatatatgtatacctattattagtagactaaagaagcaatagggagaaaacagaagaggaaagaaatttaggttcttgtacttgtaggcacatccttgttctctctatagcaatagaacaaataaatttattatacaaactcatactaaacactgactattgctaacttattgattgactaatcataataaaaatgagtgaaaaaacaactgaacaaggcatgtcacaactaactagagattacaattttaacaacattctctaacagaatgaaactagcataatggcagagttagttaaataatcttttaagaccacaagatggcattatactgttttgatcaccgacaacttaacaaagtcggtatcacttatctgcttactgtatggaatatttttctgcatttttatttttcaaattcataatctggtagaatgtaaatcttagactgatccagacactgaatatggaagcacaatgcacaagttataaggctcatataaacaaaaatacaataagttcaaatttacatttacaatgcaccacagctattatttcttattgcatttgctgaacaag

SEQ ID NO: 79294 - DNA, 5186 bp, Cannabis sativa
gtaataatgtgtcacagtgtatgttaccatttttaaaccctaatcactcctagatcaaccccagccctcagatcaaataactaccctatctaacggccgccgtacatcacggaatacattctgtgaaagtacattaacgtgacaaaatcgtatccctatatattatataaattatcggcaatgaaaacattcttctaaaaacaagaaaaccaatcatctgtattttagtaaaaaataaaaagttcgtacgaagtaaaaaaaaataatataccgttttgttatttttgggtactggtaaaataatcccataaataattaggtcttagttcgttacaaagtctcaagatatgttgttctcgtttgctatctttagtcactaatgcaccccaaaagttgtacaagaagagttttaagaaaagccaatatttcattacccaaaaaaagaaaaagccaatagtttacctcttcaccggaaattctcacattggctcgcttagtcaatcaataatcaatattcaaaatttcaaatgcagccactgccaatcacataatcataccatgtatgccatctttgtctgctttaacgaatccagtattagaagatatctcattattttaatttttaacattacaacagacttaatcaaaccaatcctagcaaaacataatcaatcaaaacttgactacacaagaagcttgtgctgtacaaaactagccacaaatacaacacaaatcagaagctaactatacatgcaatgcaaagccttttttttttgttcctcttctttcgttcatataatatatacataaactagaatggaatggcaaaaattatcaacataatgtgtagtcaagtagtccgacaacacttgcaatatctccatgtagaacataaaatcaaatttgaggtgggggtggggtggaacttagaagcactgtaatcttcttcacaccttttcgagaatttaatctctacccgcttttaagtatttgaaccttcagaaactttgcaggcagtcaatagaaggaagcttatcaattttatgctctatacaatcttggcaacattcttgggttggtcgtcattaaatggtctgatcgcatcgctctgatttgtggtatctggttcaatctcataggatgaaagcaattttcgctgtatcaataatggaaaacaaggttataagaatggaacacacaaattctaattattaaatgagactactgagaaaaaattaaataagcccatattttggtcggttaaatgtgccaagagcactattctgattatattagacatttgtgctaagcacatacagaaacaaaaagacatgttagctcactgaaatgaatacttacatgatcttcaaaatcaggactggttaaattgatggatagatttctcatcaaaagtaatacctggataagagacaacaacaaaataatattacgcattccattgaagcatactggacttatgaaacattactattacagaacaatttggaagtgaaaaagtaattaggttttcagctataattctgaacgaagacatagtaacatatattctgaggtgcttgttccaggatcaggcattgacactgtcatcacattatcaaaatattaagtaaccttacaacgttaacttcaagaaaacataccgtctcaacatcaatctggtccatcttcttaagtttttgcacatgacctgtagtatttgggtcaaaaacactgccaatgaagctatagacttgagcaaagtcaggaagaactgcagaatatgattgaatatcattgagattagatccaagaatagaatcaaagcaataaaatcaagaagatgaacaagacaacatatttgttcaacatgaacctaattttatacccagttcaccccgacattatgatttccaacctaaagaaatggcagcgggattttcaaattaaaagtaaattactatatgtctttaaaattctgggtgctaagttgtgagacatagtactcctaccatatacggtatggacaatatattcaataaaaattcaagtaactgttcagcacatttattatgcgttccaagttaaatgagagaaactaacattagacaactaaactagttagatgactatgttatctattggggatataaattcaaggaatacctctcaattgatgaccatgatttcctagatcagttgtttcaacaatgggccgtgcccttggagtgctttcggtgctactacaacagttatttgccgcacttggtgctgcaaagcacatgtatgaataattaagatgccaagtttgtgatattgcaaaacaaacaccattggcatatgcattattattgacatctatgcatgtaaaattataccttttgtctcatttgacaagttgactgcctgtggagaattattattccaggacgagatagaagcaccagcgaggggactcctaagtgacggatccggtatttgaatataacctggttcgtgcaaggcagatgaagactgaaaagctcctgaaacctgtacaggtgctggtggtgctgaaaggaaaataaaaagatgtaagataggttgcaaaggtggtgatttacaatttggcatgctggagaaagaaataccctgactatttttagaagctttctgaggatatggatgagcagctttccgctttggccgaggtggtggtagatgttcacttgtcccattcttctgaaccttcagaaagtatttttgtgcgtgactacgtatctgcagaagaaaaagcgaagattctcgttggtatagacatttgttgatttttttttatttattttatataagaatatttttttattcctggtattaaataaaagaatacatgactacataaattaacatatcatgcctttctcctttttaactcttaaaataaatcaatcaagagtattgactagagattatatgagatacactgatgtttttggcagtccaaacttgatgttcaatatgcaataatgcatacctgtataactgtctttgatccaacaaatgcttcaatctttttccaatcacggtcaaagctggatgaagaaaagggtaaatgagtaaggtcaccaaaaatcaaaaagattataaaagcaagtgggcaaacagaaaaacaacgctaaatgccatacataaattcagaaaaatccttgaaaataaactctcaaccacaacactcctaacttcactgttctaaattaaaaaaaaaaatagcagcaagaaaacacatacatcagtgaacatatatgaaaaagcacctatcaacagccttcttacaatgctagttttttttttaatttcaaatattaagtttaaaattaagtcactagaatttaaactaatattcaaattatttgaaataccataaagaagatctctaatattttgaagctctatgacaggaggaggttagcatttattatattacagatcataaattatttttcacatttaaaatcgatttttttctaattactgaaagatagagtggcctccccaatataaggacaatctgcaggccgaaacataattcgactagacattagtgaaacagctaaagttcatttctgagtcccaatgctgagaaggaaaaaaaatattcctctttcactctaaacttttcatctcttttcttgtattagaaattctaatttttaaattctgaactggagatgaaacactgaatattatttctctgatatcgtaaaaaaaaaaataactaaattgcgccaacacccagtgctggtgttggaaactatatagagcttaaccttaaaccaaaaagcacagttctgagagagtgataaaagttttcccactagaagtaccggccacagatctgcttttttctcaataaaatctagaaattctgttagatgtctcccattcaggtttcaaatatcatcaaagggtaaagagtgaaaaaaacaaaatgactacaaacccttgaaatgtcttcaatttagggtttggaattaacttttgacaaatattaaccataacgttttccattgatggctagtaagtacagaagcagatgacaacaaacaatttccgttgctttttagtaaacaaagcaatacacattttctcttgacaaccaagaaaagcataataataatttctattcactccaaaccttttcgcttctccataccctcagatgtttaaaatcatacccatcaatcccaattacaaaccctaaaaccctaattctcaacgcattcagaaattacaaaatcacaaatgaaattatatgaatataaaaaaggagaaataatagaattgcgaagagtattgatttacagttggagggcttcgaggaatttgtcgtgttcgggctcggtccagctttctctagacttggtaatggtgtaaggcttacggatcttcttagacaaatcctccgaagacgaagtcgttgaagttgtagtggtcgtagcggtgaccgccgccgtgaagggtccgagacccggcaaagccattccagtcgggtccaagtaaaagctctcagacgggttcgggttgttggataccatacagaagaaaacccacacaaaaagaacacagtaaagcttagcttagaaatgaatgaaaatggaaactcaatttcagctacttaccttttttgtgaggcattagatgctcttatatctaagaggactgggaataattccctgcgctgcagcgtacggtaagatattgaccaatagccaatcattatgtgccacggaaaagaatatatttaaaataaagaatatactcatttagtatatatttactaccctttattttcaataattctttattggcatttcatatttttaaattgtacatatttagtaccttaaaataaaatttaatcaaacaatcagttatatgtaatcaaataaataaatttgaattcataattcatacaattttaaactattaattgtattaattaatttttatcaaaagaatttgaatttaggatactaaataggtgttattttaaaatataaggtacaaataagtattattaaaaatacaaggtattaaaaggggtgattttagggatgtactgatacacccttaacttgtttcggcctcgagaaaaattttttagtctaatttttttttcatattcatgtacgttataactatttaagata

SEQ ID NO: 79295 - DNA, 1853 bp, Cannabis sativa
cttcaaagttaaggtggtaataccatggtacgccccattttagttagttcattctgttattgcttcagttgtttaccataatcctttattattgttttcatagaagtttatacgaattcagtcaaatcaagtgtggctttgatgatctgaaatttcatgttaaaaaactttatattgttcttttcatttatttagtgtattctgcttcttccaggatgaagttgatactttctcagctttgtttcactttggtcgaaataatggcaaatttgttgtttccattattgaggatatcttacaacaggttagcattgtttaccaaatagcattactagttcttatattaacctatggctcgggtgatctatctattacaaaatcttgtccagggtcactggtcctggcacgaaattaaagttgagtgttatgcttcaagaaacttttttgtaaatgccaatcttgtaattttttgtttttctgtagaacatgttgcagactcttgtttgttactgttatggtacttgtacactttacctttcaatactaatttacattatagtggttgaatcctataatccagttgatgcacctctctttttctgagaaaatacattgaggtattcaattattaattaaccatcacacttcaaaagagttaaaattgtgtttttcaaaagggaggccctactataatataaatgtgttgtgtttattattaatgattggattaatgttcttaacttccttttccatgtcagataatataatttttactgttcattttcttttgccagattgaaccaatgtctgatggcaagttggattttgataatgtgagagtagctggtttgctagttttggcaatctcagttccactctcgggtgaaaacttttccaaaattccgcatgtagtgttttcttatgcccttacaatgctaggaaggattaccaattccgtgagtgatgttatggaccaaactggtcttttagcgtacttgtctcagtgcagtaattccacaagcctctctgcaattgagctcaaagaatggggacaacgttttcctatggtcaaaggtaacgttcaagtttactctaatgaaaacacaattggttccctcacaaaaccatcacagcaagagatagatggaacatctgaaattcagtttctagacatggatgagccacaaaaactcacatcagttttaaattccaagctggaagcccatgatgaaataattaggtctataaacgctatcactgcgagggtcaaagatatctggccattagtacaatcgggatgtctgcatcaagtgctgagaattttgaggttgaattttactctctctattctgttctatcgtgtttcttcatttttaagggccattaatcgttttgtcatctttcttcatggtaaaataagtgagggaacaaagattttggggagagaacgtatattgcattgaagggaaaatattatgttagtcattttatcgatggtttgagtttattgcatgtagattggagactagctctttaatagaatctagatgtttgtgtcaatacaaggaattgcatggccaatgcaatttcttctctactatctgcagaagacaaaatttaagatatcatacatctcattgtttgataatttattacaccttgctatctaatgtttttaattacaataattctgtttttgaaattgtatatacaacacccgggtccatgcaggagttgcaaagaagagttagcattgtttgactcgaattcttgtgaatctgccggggctttaagcttcacattgctatatctccggtccatagaactgtttgccaaggtgtggggccacttcc

SEQ ID NO: 79296 - DNA, 4931 bp, Cannabis sativa
attcaaaactgcaaaccgcaccacgttaggaaaaattcaacccgcgaccgtaccacaaaaaatttcaaatcgcattttttttgctgtgcgagcgatttgaacgatttgaacaatttgataaataactctaatatatatagattttttttttttgaagagtaatcaacttcattgatcagatgtcctccaataataaggacaataaatcaataaggatagaatctttactaatggtacaattagcttttaaacaagagtcccgcataaggaaatgggccaccctatttgcagattgtttaacaaaattaaaagacacattaactaactcaaacaataaaagtttaagctcattaattaaatcaccatatatggagaaatcatattattggttttattatgaataacatgcacctttattaatgcagtctgtctctaccaccacgctcgtctagtcatgacgattgattcaacttaacacttctttgataacaattgcttcagcaatgacaatcggcactacacatggtcttgaatcttgaaaggattcaataagaattccctcatggtcacgagccacaagaccaaagccaaaacatttagcttgagagaaaataaccccatttacattgatgactttgatcatgtttatgtaaggtttaatccactgctttccttcctcaccatactgtgagtatcattatgagaaggatttttagtttgagcagaaatctattgatcaaaagtacgcttagataatgagactacctttttaactttcggttgaaaacttgaccaaacaatgtcattgcgacaattccaaagagcccaacatagcatcgacaccatttatagaacattttgagaccaagtattaagactatgctaaaaccatggaacaaaagtgccttctatactgtctcgagcagcaccaaaaagagacctccaacattgttgagcaaagttacagctaacaagcaaatgaagagttgatttatagggtatttttacaacaagtgcaagaaagatcagtagccacatgcttggtttttaatttcactttgttaggaaggcaatttgaacaagttctccacataaaatcttcaatatttttaggggtatttccagctgccataaagctctccaaaacttagattttggattcgaagttcaattacattttaattttttggagaagattataagttgacttgtcagagtactaccctttttaatcattgacccaaacccaataccagtggctatgaggagtatgaggagatgtttgaagttgcaagatgagatctcgatctgtgtcaataaataaattgttgagaagctcaaaattacaatatgagccatcaacaagtaaaagagaagaaaccttgcttattataaaaggtaggatggcgagtttgaatgaaattgtcctcttcgtcaggtaaccaaggatcattgagaacacttacatttagacttgagcttatagtaactcgagaactagatttcaaaagttcttttacttcaaagatgctacgccaaatgtagctaggattagactccagagaggaagacagaaaagagccattggggtagtaatgggctttgaaaatttgagcaaccagaccattattattgttgaaaaggcgccaatcttatttttccagtaaagcaaggttaaaatcatagagattacaaaagcccattcctccaatagttttgtgcttgcatagattcttccaacttttctagtgtatgctcgtgttttgagaagatttggattgccactaaaaacgggtcattaagctctcaagtttcttacatgtatccttggacaaaagaaacatgttcatagcatacgaaggaagatattgaactatagacttcagcataacttctttacgtactcaagataaaaaaaactattgtcccaactttgaattttttttttctatattttgtccttaaggtaaccaagagccgcattttttgttcctacctatcatgcttggtagacctaaatactttcttcctttgccagcttcttgaattctcatagcaaaacaaatttggtttcttattgatacactagtgttgctactaaaaaattgagaatttaatgtaattaactttttgactagaagcttgttaaaaaatttaacgtaaatccaggaccttagaagcctcacccatgtttgcatgacgataaagataagagttgtctgcaaaaaacaagtaagacactactggagcacctctcgcaactcgaaaaccatgaatccatcctctttgttcatagcggtggatgatggctgaaaggccttctgcacaaatcaagaagaaatttgtctcataatctccacaaatgactttatatttgactgagactaaacactgtttaatgagctccacccaacagtcatcaaaacctatttgaatcatcattgcgcagagataagaccattcaattctatcaaatgctttactcaaatctagagccatgacaccctcttttccttgttgctttctctttagataatggagaatttcaaatgaaaccatgttgttatctattataaggtgactcgggatgaacgcactttggttttcaaaaacgaccatacttgtttcatacggttagctatgaccttgataattattttgtataacacattacacaaagctattagtctcaactcagccattttctgtgaatttttcttcttaggaatgaggataacatttgtatcattcaaattgtcagggagtctaccagattcgaaaaaagtttgtactgttacaacaacatctcttcctacaatatgcttggtagaaggaaaggacttataccatctgagttatattatattgatataattataaatataacattatttatctaatcaccaaacttttattatatagagttacaacttgataagtgtacacattatttttgatagatctaattacacatataatataaattatacaaatcacttagtgtattataatatggacttatatgctaattagtgttgtattgctagctaaatttaatctatataaactatcattttaatagttgtgagttattggatattaaagtgtcatcgtgagttatataaatactttaagtgatacttttaatatatcgaaagcttaaattagaaatattaaaactgatacctattagtttatacattaatggtagtggtgatttccaaaaaataagagaccagtactttattcttatcttcctcatgaaaagaaaaaaaaaataaagaaatcttaaattttgtattcttagaagattattatctaaaaaacatcaccacaaagatcatcttcattgtggtatacttatttatgtttatcttctctttgaattatcatgagtttatttagatatattgattttttgtttatacatttgtattagtatatgtgtatatatctgattaatatttgagtgttaaataattctaacaatttatattttatatatataaatttatttagcatttttaagtactcaatactaaatcaatactaatatgatgtagcctctcatataattagcagtttgattatattatttatttaatcaaatggtatgaaatctgataaaaaaatctaataataatattacattttaaggtgctttcccttaacatttttatgaatatcacaataggatcatgccattttatcctatgccactcatatgtgtaaaaccatatgccacacgcagccatattctagtctctagagatttccatttatccatatttacttctctctctatctacattttcctacgcatccatataagtcaccaaaatatttagtggaaaaagatatattgggcaagttggcaagttggatatcataatttatcatatatactatacataaatatatatatagtggtgttttgctaggtcaactgaatgtcacgggcaacaatatatgcatatatgcaaagatcgatatatatatatttatatatattagagtttgtgcatttaattaaattaatgattacatttgacataagttttatttaatgttattatgatgagcaattattagtacaatatgaatactattaatgggaaaccattaagcatgtagttagctagagagaccagcttcgatcgtcatgaaaatattacagtcaacgtataaacatagtactgttcacttacgttagagatgtcactactctttctgactttaataattaacagctaatttgaggtatatattatgtcatgacataatatatattggatatatatattatgcatataaatatgtacaaattaaagttgataataaactatatatatagcacatgtttgattattgggaaactataatatgaataatatataaatatttaatctaattaatatatttgcagctttcactcagacctaattatagctattaatcttataagttataactaatagaccatcgatcaatcattattattataaatatgtaatatatttatgtatatattgtttatgccaactacacattaagattcaaagaaaaactttcttattattagtttttctaactatttagtgcagcaaattattactaattaattagttcctcctgataaataagtttttatattttatggttttatgtgtactatatgtatatgagggttgcttgcttgggttggattcctatgtatggaccatccatacagggccaactttgattaataatgaatccaataattttttttagtaaagtgtaagtgttattggatttctttttataaaattttacaaaattattatcttttttcaatacaaaaaaatatattaagtaaaaattttggaccttgaatttgggtggatcctagacacagtcggacttgaccaactatatacatatatatatat

SEQ ID NO: 79297 - DNA, 3142 bp, Cannabis sativa
tatgaattcacatatttctttttcaatcgtaggcagtgattgctgtttaaatttttgttgtgtttggattggaaaagttgttgctttggagttgttcagtgttgggattttctgggtaaggctgttgagaaaaaatatcatctcatatcatatggttgagaatgataactctctataataggggatgaaagtaaaggtttctcctcagtcctctgttttgagggctttaaaaaaattattgcccttgctgttattatgctggagatttgtatttggtcaatgtctagttatttatttatttatttttttcaattttgtttcctccaacctctgtcctcgtgattgtatttggtttctctctccaataaatttgtctttcttatacaagagaatccagagtcttccattgtgacaacaatgtagtttataggttgatgcttgaattttttttttaatctttcgtgcctattcaaaatcatagctctacttactgggagactcagggaataaattatggctgttaattatttgaaagacctggatagtggtacccttaagtatgaataaaggtacaaagaagagtcaactggcaatacaaacaggagtttatttggtacacacactaatatatttatattgtaagagatgggttttcttatctcttgatttttttattcacaaaggtctttctcctcaaggtattgaatttgtcatttggttttgcatttgttgattttgggtgttataacttatgcattatgtacaggtgtccctgttggattcttttcagcccctttaaagcagatggcagttgatgagaactcagattcatatgatcattcaaatagatggaagtgggttgaactaacctcagaggaaacaacggtaaagttctatcatcatactttatacgtgctttcatattatagcttaaatgctaaaccttgcgcggatggtatttctgcagaatgagattcaaggggaagacagtaaagagtcacgtggtagggtgtgctgtagtgttcttttttcaccaagatctgaaattgagaacgatgaccaatctgccgttagcaatcaaaaatctgggtttgttcagataagcccaaccagggaagggccttggactactgttaggctgaactatgctgctcctgctgcttgctggcgattaggtagtgatgttgttgccagtgaagtaagcgtcaaggatggcaatagatatgttcatattagatctctggtttcagtatgtaatgctacagaatttgaacttgagttatgccttgtttcccaagcttctagggaaaacatgaaatcaccaaatgatgcaagtgaccaagaaggtgttcaaattgacttcaatgaaatttgtattgggagtttgagacctggagatactgtgcccattcctctctctgctttgaaacaaacaggagtatatgcattacgattaaggccgtgtaaacttagtaatccagttgaatattcttggagctctctggtagagagggttaatcaaatagaagatccaagtactccttatctaccacaaggaataagtgtgtcgtctcttgttgagtcggaggaacttttatactgtactgagataagtggaacatcttcaagtagctcccaaaagatgtggttttctgtaatcataaaagccactgagatcgcgaaagacattcgatctgatcctatccaggattggaatcttgttgtcaagtccccactatctatcagcaattttcttcccctcatggcagaatattctgttctagagatgcaaaaaaatggaaattttgttgactgctcgaggggtgtttttggttctggaaagactgtgaatgttcataatgctgacataagaaatcctttgttcttttcactacttcctaacagaacatggcttcctgtgcatgtgagatttttatgctaatctacttgtttgccttgtgttgatataagtttcttgaatttgacttgaacattttgattacacaggaagctgttcctttgtctcatacgaaaacaattagtttgagaagctcagtaactggaaggtttcatacatcaacttcattaattttgaatctttcatgctctttgttttcttatgtgtagtaattaataattattattatttcttcttgttgatgttcttgtattttttttcccctccaggattgttcacattattcttgaacaaaattttgatagcgagcaactgctgcatgctaagattgtcaaagtgtatgctccatattggcttgatattgctcgatgcccctcactcacatgtagactcatagatataacaggaaaaaaacacactcggaaattcagtgttccatttcgatccaaaaagaacaatgaggttgtccaggaggaaataacagaagaggagatgcatgaaggccatacaatgacatcaactttgaattttaaattgttgggtattgcagtttccatagctgaatctggcaatgagcagtttggacctattaaagatctttctcctcttggtgacatggtatttgttaaatatattattatggagaaactcattacgctaaaaagagagtctttgatttaagatattttttttttcctgtctctaggatggagcagtggatctgtatgctcttaatgaagaaggaaactgcatgcagctttccattaccacaaaatcatccccctttccatctatacctacaaaggtagctctacaagtataaaaagaatttaaaaatatttacataaggtgtttaatttgttgcttgtttttaggtagtatccatccggccattcattactttcaccaacagagttggtcaagacatattggttaagctaagcagtcaagatgaaccgaaaattcttcgtgcatcagattcaagagtctcctttttgtatcggcaatcaggtggacctgataaactccaggttagtgaaatgcttcttgatacaatagactggtgtcatcgtttttatttatatatttaaatatgcagctcatctcctagtgcatcttcttctgagataattatttgttgctttcctctatatagtcaaattacatagtttttttcctttttcttttgaacaatcaaaatacatagttgaaaataagataatg

SEQ ID NO: 79298 - DNA, 2587 bp, Cannabis sativa
actataatacatcttaaattaactaactcttggtatcaacatatgtagtgggttcacttttcttcattttttctcttcatgaaagtatgtgtccatgctgtgtaggcacaatcttcttccaaaaccagtgttttctccacacacaagtcatatcctcaataggaacacctttagtctcaggcaagaacagacagacaaagatggtcatgattatgatccaaccaccatagaaaatgaatagtccaaatttaaacgcacaaagtagaggcatgaatgactctgccacaactacaaccattccaaagttcacagccactgtaatgctttgtccaattgatctgatctccaatggaaatatttcacttggtattgtccaagcaataggtccccatgaccacccaaaagctagagcaaatacacatatcagaatcatcactagaatagataagcctttagataaattttgatcatctccaagcttgttcaccaagattatgccaattataacttgacatataatcattactattccaccactaataagtagaaatctcctgcctaatctgtctactactgccatagataacagtgttgacaaaaccagtgctgcaccaaccataaccgaagaatagaaggaagatttttcaccaaaccccatgtttagaagcaagattgatgagtaatagagtaaagaatccatgccagtgagggcctgaaatgctggcatgaggattgccattaccagctgaggcctattcttcttccaaaatatgcttctaaaaggggtctttacagtactagcaagttcacttgcagcaactatgtcttgaaactcttcctctacctcttcatttcctctgagtttctctagcgaccttctcccttcatctttcgagcctcgttgaattaagctattgggtgtttcgggcaggaatttcgctccaactaccatcaacaaggccaaacatgcaaccatcccaaaggagatactaatccctctgtagtcagtccaacgatgctctccttcgactcgagtgacatagtttatgatgtttgatgccaacattccaagagaaatcgctaactgaaacataaagttcaagcctcctcggtacttcgctggcgctatctcagacaagtatagtggaatcgcctgcacacaacaagactctttataagcctaatcttcaaaccaattggtaatgagtgaaataacgataatattttggtgtatgcaaagtacctgaactccaaatccaacgcctacaccagcaaagattcggccaataatgattgcaagctgatcaggaccatattggactaatcgtggaacaatggcaatgagagttgccccaataaaataacttattccaccaacaatcatactctttctacgtccattttttctagtcacacgagaagctattaatgtggctattataccaggtacgtatacagaagggagatacattgtatcagaccctgcaccatccctgcaatactggtctaaatagtgttcatttctgtacactagttcctcgtttgtgtctgctatgccttcgttcaaggtagctccacctgtaacaaccaatatttagttagacatataatatgtatctatgcatgtatttttaccattgacaaaagtaaggaaaagggtacctgaaagtccaatataaccaaatagaaaagctccaattgaggcaataatggatgtgataataagctgaactgtaatctttccttggtgttgtttagtagctgtagtcatatctcaatttttcactactaaataatctatattctatgtttgataaaaaacttaattttttttttcctttttttgagggttgaaattgagagaggagatataatgatgaatattaggagcagttttttcaatagaagtagaacggaaaaaccaatacaatttgtttagacaactgctatatattttttgaaagatgaaatggagatgatatatatatatatacaattttttttttttttataaataaaaacaggcacgcagtggaagacttttttgtttgtggcaacgcagtggaagacttcaaatgcgtgtttttggtcatttaggcatacttttttcagcagcggtggcacattgaattaattttcagcagcctctttcgttacgttaagcctttgtatttatttgttcaaccacaaatgttaaaaggcgtattttttttttttttgagatatttaaaaggcatactagtatacggttattaatataattaagtatgtaaaaattacataatatatataaaaaaaattataaaaatgtttctccaaaaaaagaaaattataaaaatatttcaaataaataaataaaaatatgttaaaatattttgaatacaatatatataaaaacagatatgattgaattaaatataaattagaaagaaatttagttaattttttttttttggcaatgtaagaaatttagttaattgataaataaaaaataggctaattattaatttttctcccgtagtaaatcgtgcccctcaatttttttggccgaactatggagatggttaaatttaaagacttttgtcta

SEQ ID NO: 79299 - DNA, 5948 bp, Cannabis sativa
  modified_base (61)..(70): a, c, t, g, unknown or other
tttcatttattttggaattaatttgatatatcccttaagtaatttttatatataaatattnnnnnnnnnntttaagttgtattaatttaaattttcacactgctattttcaaattctatagagaaaaaataaaatttatttttctctctattgttcttgctcatgtgttgagaactcaacaagaacaaaggtatacactttatcctaatagcctacactattccttatgtgtggttgatcaatttgaaagatactggtgtgagtccgaattgttaattcctcatcaattggatttagggatacaacatacaagaagtttcaagaataccctgataggcttcaagaggtatactctaacttatatcttttattattttgatttaatgtacacacatatagagatcctaagggttgtggtatgatgataatcagataatacgaaactcttccgttgcgtacctaatttagtagcataaaactaacattcatatcatccatagaaggcccagacttgagaagagggagccaaaataatcttcaaacacagtagcaatacctcttggagtctcaatccaatttgaattttcatcaaaaatccctctaataagatttttcttcttcatatgagaaacacttttatgaaaataggatgattttttatcaccagatttgagccaagaataaacataagattttctaaacatgtaagctaaacatgtatgcatgtatcattatactaatcttaccttgattatgatttcaagtttatcgatcaacctaagtagaaacttctactcgaggatttaaaggtcataagtcacaatttacttaaaactagtaagtgactcgctaattcacttttgaggacttaaattcaaaattaaaagtttctctatcgataaatagcgtgacaataccctacatatggataaaacgtgaaaattgaggctcccaaaactgccccaaccggtgaaccggattctcaaaatggtggaccgttttttgggattctttctgagaaaatggttcactttttgtttttgcagaaaaacacaaaaaacacaactccaagttcaattctaccccaaatagaaccaaaacctcaaaaacacctagaaacaacataataaacatatttcaactgaaaaatgcaacatcaatgaactaaatcaaaacttgtcattgttgagcaagctttgtatttcaaaaactcaaacttcctcaacacgccacacaacaacaaaaaagaccaactaaaccaaacccaaacaactcaaaataacctcacgtaacaacccctaaatattccaagttcaaatagaatctaaagctcaaaattgcatgctcaaactaaacttttcttaaaaattcaaagagaaaatggacttaaggcttaccttggcaaatctctttattagctactgaaaattctgctgaattaaatttgaattggttggaaaatgttggatttgtccctgatttttccttgggtttcttgggccaaaaaaaaaagagaaagaaagagtcttgtttaaacttattatcatttctttacaaaatcctcttttatttataatctaactaagataaatccgaatgaaatcttaggtaaagactctagaactcccactaaatccaaatagtaaattataagataaaataaccaatttgccatttacttcactaagaagtaatctaataatttaggggtaatagtccaaaatcataaccttgattaatcttgacattccaaatgtctaattatcttgtcccgctaattttaagatattcaatcgtatctaaataactctaatggccaaatcgtagtattccactattaccgagcataagatatgaaaataaaaagaaatcatatataacatgtataatacacataaaattcaataaaatctccataattgagaaattaaaagaaccctattttataatgctaatacttgttttagatgtagtcaaaaatggttttttttttttttttaaacaaatgtggttttgtattattgttagtggaattaactccttaatttgtgctgaataattttatgtttaattagttcgatattttatttagattgagatttgagatgtcaaggaaaattttaaaatacatctcttaaaataaatttattgatgcacccattcgacatttttaggacattttgcaaaaattaagaaattaaaaaaaaaataacatgctaaaaatagagttcaaattgtctatttcatatgcatataaaataagcaactgactgaacactactttaagcgttttaatttttctgaattattcaaaattttacatagtgtactaaataactataatgtaaataattatggaaaaaaaatatctcaaatatcgaaatagatagaagtgtttcagtggacccctgtcctataaaaacactctatataagacaaaaaaagtagttaagtacaaacataaccaggatttgtcccaatcacaaagaagacaaaatccaaaaacaaacagcaccatttcatatcaatgtgctatattccacaccttttttttcaacacaaaattttgaatgccaatggtaattgagaattttctctgttacaattcggtcttgatacaacctgtgaaggtggatactagaggctgccataaaatattattaatgcactcttaacaaatataatttattttttcacagcaaaaaacaacataatttttttaattcaacaaatatattatctgaaattgatattatcttttatttctagattataaatatagcatatgataccttatcagtataagtcaatgcagaaacaattttctgcactaaattttttctctaaattgacaatggctccactaatgagccccaacagattggcatattccacatgccttatgaaggtccagaacaagaacaagattgatctctcttaccaaaacattatcacttatcacaatgaaaaaattgatcccgagctctataaaagacatctaattcatactagtaaataagctcacacctattgacatgtttatggacacactctaccatcccgggtgagacaagtaccatcaagcactttttagtctgcccctggttagcaacagatactttcttattgcaagtatgagaacccatgtagttttggtaatcttttccttgatcatcaaaagcaatgcagaactcaaaactgtcttcaggatctgagcctgcaatcccttgaaaaagccagatatcccttccgatttccaaatggcaaggaaaacagcaggtagtgttttttgcgacttaggtcgaggcttactagcaccgccatcatcgtcgtcatctggatctgcagcttgtatcatcactttacacctgtagccagtagacattttaattacatccataatcatgtttatgagtagtaactatcacagtttgagagaacactaatgcacctgattgcaggatatgtgagaaaggtagcaacactcttggagattgcacctaccagaaatgctgaaaatgcagaaagagcttcaggagatgaacccttgtcccgtttatccagcttttcccccagatgtctttgttttagttgatcaaaaactgtatactgaagataaattatgaatcaatatccaatctccacctagtttctctttgattaaatagtgttaagttatagatgacacatgaaaatactaaaaccttgaaagttgaattaaataatctactgaattcttatcttctaagcttgaagaatgctagaaacaacacacctgaatagcagggttcgaagtcagtaacagggagattccaagtccatcaaatgcatcactccaagttccctctgtaagcgtcttccacagtcctttggattttccaaagctagttgtttgcatccttgaggcagctgtatccaagggctacacagaagtaaatggtaagttgaagagtcttaacacattcatagaaaaaagagtagagtcacaatcaactggcaacaacacaatggagtatcacctaacactcgaaaggatgatcatacaggaccacataaaacatagcatgccaaactacatcaatgccaaatcacaattttcattcctttcaaattctaataccaggtaatcaagaaactgcaaaacttgccactcttaatcttaacacagtgccagaacacatgacagcataaagtttgtgaatggcaacgacaaacattcatcatcataatgagtaatgacaatagtaagccttctcacctgtgtgacaatcgctgtacaagccccagcagctgcagccaaaagcaggtttgccttagttccaatctttatggcaccactctttttcagatacaatcttttgaagtagctgtatccataaaagtaaacgaattgtgcaatgaaggactgcaagtttttagtccccagaccttgatacaacgaaaggacctgccggttagatatggcttcccacaacacatcagaaaggttcctacacaacccagaacaacttcagagtcagtataagcaagaattcaaacacaaaaagccatttgaagattacccttttgcaattagataccttaattgttaataaagtattagtagtagtgatcttgattcctaaggccttcttcacctatcagccaaaatggttccctaaatattataactaaacttcttgacaacaatgaattgacacaacaaccaactaccaagtctctcaaaagtcaagccatttttattattaataaaaaaaaaaaatcccacaaattttaattctactgttacaatacaaatcaaagagaaattgtgtcctgtgaaccaattaatccacatataaaaattcttgagacccagttcgatggacttttgactcggatcaaggacaacagatagaaatatatatctgaattctaaagagagagagacagagagaaggggacctgtattttcggcgaccatgagctccaacctcggcttggtatctggttttgcaggtgtcgagtgggtataagagggtggtgctgacaagtgatcctatggcacccgaggtcgcctctgatatcgattccaaatcaatactactcatcatcttcaattctatcgaaacacttttcctttctagaatcgagatgttatatttttctacacgtacactatcttgtatacaaatatataaatatatatatatatatattatatatgagagagagagggagagagggggtgatttactagagagatacgtcagatgttgtttggtataaaaagaagtggaatggaaagaaaatttgatgagagaagagaagagaaaatgaaaacgactcgtttcgtttcgtgggaactgggaagaccagaccaatggattggcgttttcttgggatttgaaaaacgtgaaaagctttctcaccgtccagatcaactcttctcccactttcctcgtctttcgtccgcgcgggtcccatctctcaaactctatcaaacaaaaattagaatcccaataaattaataaaatggcatacatagaaaaaaaaatgtgtaataaaattatttgtaaacaaattttatcttgctaataaatgataggtaaccagaatctttaaattcagtaaattatcaatttgattaaaataaaacattattaagtagttattttataaggtatatttaaattatcatttaaaatacattggcacacaaatttcacacatacatatgggtgcattgtaccaaaaaactttttctctctggaacactctggtaggtatgagaacactcttctcttttgatcgtgttttggtccctgatatggggattttagtccacccatactgttcatgtggtggttttccttctcaatgtttgttgattaggtgtcttctagtaattaatatgggtattaatttctctgaatctctgggtatttctctctccaatcccatttgtt

SEQ ID NO: 79300 - DNA, 3924 bp, Cannabis sativa
ccggtattggtttatcttcacaataagagttcatgtgagtggaacttattaataaactaaatttagtgtacatagagataacacactaaatcccggtcttgattattctcttaggtggcatagaagtgttctctgaggcctgatttgaaatatagccaacatcattaagtaatattcctttcccctcttccctagttgtcttcttccccacaacaaacaaaattgtttgcagtgttggtttgtctgacaataagagttcatctgagttgaacttattcataaacgagattttgtgtacatagctagaaccctctaaattcctgatcttgatttttctctgaggtggcataatagtatgtgttaacctattgcctatagttggctgaaatcactaaccttgtcatgactttgcagaatgaattgtgtcggatgaaattggatgtcacaatgcttgatgagcttgtacatgaatattgtgtttataggggcattgtggattctgttgttgcacccccgtctggtgagtaaagctttttctccttttttttattgattgctaaaatgttttcacttcccctctcgttaaccttttgaattctgatcatttcttatgaaactataactatcttttatgccttctgtcaggaaatcaccctgtttccaaacagttgaaagttgatcaatcagtgcttgttcttcgctcatcaagagatttaactggtgatgtggattgtagtgccagtaaaaactctgaggatgattcctccattattgatgaacagatggatgtttcacctgaaaagaatgttgaagcaactaacatgcaaggaattaatgttgaagtaagatatgctcgtgaaccaacttcctttcatgaagactgtagcaccagtggatctcaacgacctcaaaatttaagaattcagcaaagaagcagagtcactgctggagaaaggagtaaacgtaagcggtggaggggaagacatgatgaatgtcatacttcaaacactttttcagatgaatctagtaagcaagagcctagcacaagtaatgcatacatctctcgagaacagcaggtaattgtttggttgtttatggggagtgagaagtagctattgctatttcatgtcaatttattgattcttactcctgatggttttattgaacaaaatattttgggcagagtttggaaagatattctccgttagatattaacaatagggaggatagatatgagatcctgcttggggtgaaggaattagctagtaaaggaatggctgcagaggttgttgaagaagttaatgctttagatttggacttctttgtgcaaaatcctactttgctcttccagcttaagcaggtatgctgattttatattgccaatggtatcgtctaagtggctgtaaatatatttattgaaatcgttcttatcaataatactttctttttttttttctttaacaatctaggttgaatttctgaagttggtgagttctggagattattccagtgctctgagggtggcatgctcccacttaggtcctttggcttctagtgatccaactttactgaaacctttgaaggagactctgttggcattgctccagcctaatgaggatgcaatcagaaaaggcttgcctttacatgctctttcaagttcactccaggcatgtgatagctttccgatagactttgggtcctggtcattattaatattttaattagttctctcttcttattttcagtgtttcatgcccattaagaagtcctccttgagaatacttttctcctccaattttttatttgtttgactcggaaactgccaacagccttttaagattgtgtttttacaaggcttttttattctcttttttcataatttaatatattgttaacatattcatattggcaggttgcaattgctaagagacttggaatcgaagaaccacagcttatgaaaataattagaactacccttcactcacataatgagtggtttaaacttcaaatgtgcaaagatcgctttgaaaatcttttacaaattgattccttgaaagaagccaatccttctttgcttactactattgctacatcaaagatggctacggacgggtcttctagtggatcaccccaggttactcaatcttcaagtagtaggatgtcagaagatggtagcagtcctactcaagtgtcctctagagatgtggtctgtgatgaaaatgcaattttaaaagttatggtaagtatttctattcttagtaggttgaactcttcttgaaatatgtctcttcacatattgtcatgccttatttagaatggggttgtagaacttgtttcgtaatatagtcaatatgttctaataatatttattggacctttgaattgtagaagtaaccttaaagtaacacctgatttttgtcagctagtgttgtggtaactaaatgaagtctagaaagttgtgtagttttcttttatcactttcccctcttcacctaattttgatgtttaagtatggtttgctcttacaaagttcaaggaacgagtcgtccccgtacacctacaaagttcatgtttcataaaaagaatgcaaaagaaagagtagaaatatatgtttacaatacaattttttcgttcaaaaatattggttcacagaagaagttggcttaaagtaaactatattatttttggatcaatgcaggagtttctggcattgccaagggctgatgctattcatcttcttgctcagtacaatgggaacgctgagatggtcattcagcaaatttttgcatagcttgaatcgtaccactaaaaatgtacccaatggcgtgctttgtatattaatcattattacaatatctctttccctctcttgttgtgataaatttatttgttgattcaatttagcttcagtacagagcccggttgaaagggtaagcatgcaaaatacagtatactagtacagtagctgacacttgtattctagtttgtacaatatcataaggtttttccttgcccatataatcaaatcaacggaataaaaagaaattgttttattgattctgaattttttccatattaacttaattatcctgatatttctttgggtatgcatgatctaattcctgtcgcaccatgacttcattgaacttattttttagaatctctagtctataggtagagttgccattatcatgtgacactaatcaatctaaaggcaataatctcattttgttttgtcgtgactttctagttaattgtcattggattaatcaaatattcatcattgcatacatgatttacacttttagagatgtttcgaatttttacgatagccatggtactattacagtggatgaagagtgactttattagttttctgtagtgtaggtttgcaatttattttagtgttttgactttttcttttgaacactattttagtgttttattgtaatttttttcaatactcattttaaacatctaaaaacatacataaaaaatttcttaaaaataaagctttaggcattgaacatgttggtgcttcgagaggccgactccttcgccattgatagtctatgcaacattagtccatgaatgttacgaactctcgcttcggttatgtacagttccatcatcttgtaggatctgaagctattggaattttgatctatctcccagatggagtcattgtaaataataggcgcggaaagtgaagctttggtctttccttttgcccctgatcctctctgcttccgcggttggggcatcctcaaggataacctcaaggatggggtcatgttgaaactgcagatgtcattgtctgtgcatcctcaatattgcccgccttaaggttgaccttgtcatttgaattagtcactggaaaataaaaaaaaaatgagaaacctagcaattaaaatacctaatatc

SEQ ID NO: 79301 - DNA, 2496 bp, Cannabis sativa
  modified_base (2467)..(2471): a, c, t, g, unknown or other
gtagctcaccatgaaggaactctaaagttaagcgtgcttgacctggggtaactttaagatgggtgatctcctgagaagttttctcaggaagcgggtgagtgaggacaaagcacgttagaaagactcatattggtatgtagggtcagtcgtcattccatgaaacagccaagagtggcgtactcgtgtataagagtctcattttagtttggtgggggaaaggcccaatagaggcttaaagcggggatgttacaaatggtatcggagccttgaccaagctaaagtgtggtcgatgaggatgtcggatccccaaaggggggtgattgtgacaactagagtctcatgatctgcaaggggaaggatgaggaggtgtgcaatcccacatcgcctagggaaggtcaagtgtgatgattatgagattgtgtaggtatgtgactacacagttgaagaggacttaaatgaattaattggtactatctatatcaacaagatggatcttcttttcggtagtctatcatgaaaaaacttcaaaattaagtgtgtttgacctgtggtaatttaaggatgagtgattcctgtgaagttttcccaggaagcagacgagtgaggacaaatcacactggaaagattcttattggtctgcagggccagtcctcattccatgaagcaaccaagaatggcatcactgtgtataagattaattagtctgtgagggaaggcccaatggaggcttgaagcagggacaatacaatattcctgagttattatgataccaaacaaggccatcaccatgagagaagaaattaatgggatgaatgaggatgtgctctatatcaattggagagaaaaactaatgtaataaagggatattccaatgtttttcctatgtgataagagcaacaaccatcaaatttagagggccaacataccgaataggtgtgaaagaattatgacctggtatccaagggtcaaaccaaacctgactcgatgtccatctccaatcttccaacaaagaccttcaattaacaaatcactcccccaaatgataccctgccaagtcattgatggtaaattaccatagcttgcttcaaggaaggagttattgtactagtatcgatgttggagtaatctgttcaaaagtaattgtggcttttaaagaatcctccaagcttgcttagccaataaaaattgattgaagtgaacaaaagatctaaattcataccaccttccaatttggatttgcaaagtaaattccaactcttccaatgtatattagaacagtagcattcgaaatcaccaaaaatttgatatcatagactcaatctaattacaaatattgatgggtaaacgaaaacaactcatcgtgtacgtgagaataaattgcaccactactttgagcataacttcacgaccacccacagaaaagagcttttcatgccacaaattcataagtttccaaaatgtgtttcttaatgttgctaaagagttgtttcttatctttcccaaaataagatggcaagcctaggtatctatcatggcagttagaaatagacatgacaagttgtttatgaaaataacatggtattgccaaagtggtattagatgagaaagacatcacaaactttgtagtgttgagaacttgaccagaagcacgatgataaatatctagcacccgtttaattgcttggcacaaagcttcagtcattaagcaaaaaatgcaagctgtcatttgcgaacaacaagtgcaaaatagatggtgcacgacgagtaagagagtagcccaagaggtgccatgaattgtcagattgcagcaaaagtcttgaaaagccctcataacatatcaaaaacaaatatgctgatagtgggcattcttattgtagacccgatttaattcggaaagagagaccgatagtagtaagacatgtcataattagcgtgattcatttatcatgaaatcccattttgcgcatcacttccgagatatgactcaattccacatgttaaaagccttaatcacattcaatttgaaagctgcaattccctttcgacccgtgttcttatgcttgataccatgaatgagttcaaaagctaccaaaacattatctgctataagtcaattcaatgagaaagcactttgtgtcttgggtataatcaaaggcaacacatccttgaagcggaaaacaagcatcttggagattagcctataaaggacattacaaaggctaattaggcgataatctcccattgttgaggctttttgtttttcggaatcagagtgataatcgttttgttgagtgggatcagctccatcattcaagacacttaaaatggcttgtgaaattaaaggcccaacaatgtgccaaaccaaaccaatccaatccaatcaattacaaaaaattaaatagggtaaatactattttagaccctatgttttgcaaaagttaccaattggactctctgttttgttaannnnnaaaatggaccctgtatttttcaaaa

SEQ ID NO: 79302 - DNA, 3230 bp, Cannabis sativa
tacggcggagcaggctgcgttgatgtacgatgaggctgcgattcgactcaaaggacccggcgctcaaaccaatttcgggctcgatcctcggcgggagccctcgaatcctgtcgttgttgttgaggatcaggatcatgatcatgatcatcaagaagttgttggtggtggttatgattccgggaaagaatcccaagctcctctgtcttctcccacctctgttctaagatttcaaaacccactcgatcagtcaaatcccgagtgtacggacacctgtactcctactgatacgaataatagtacggaccgaagcaatatatactgtactgaaccccaagtgggacttgactctgctgattcagaatggtgttttgaagatgatttttcgtttttggattcgcatatcttgagtgatgattctttatatgaacaatgtcctcccccgctattcctagacgatggagttcattatgttccaggccaaatctcagcggtggaggaggatgaattcggggctgttttggttgatttggatggagattttaggtcgtgtaaatgggacgttgatcagtattatttttaggaccataaaaatgagaatcaagtctcaagacctaaacattgattttaattaatggattgggggttagtctagggaaaagggaaagaaactaaatgagttttgatacataatgcatggcgattaattctgatcatctttgatctatttttgttttgtctcctatgtatattgcaggctcaccaaaaaaaaaaaaaaatgtaaatttcttgtcttgtgtccaactatttttggttctttccaccttgtattttttatttggtcagcgttttcatttacttatttggatttgagtgttggaaatttttatattgatggttatgctacttgtataaatgatgatgtttgtttttagcttatgaagagtattacttaacgatcaagtttaggagtgagtgagagagtggaaccgatatttatgagttttgtgcttattggctacggccttttgtggtatgttggtagtgggatacttaaatgggtctgccaaagtaaggaaaagccaatttcctaaagttcaacggtgcactacatgaggtttttaagccactcacaagtcaattaattctgtttctgcgatttttctccagccattcatttagtggtaaaaaaacccccgaaaagggtttagaaccaatgtctcgtcacatgcataattcaaccaaggcaacgctagtctccactttgaattgtacttcaatttgtctctctttagttatagcaacatactcaaattacaattaaatgacatatatacataataatttttagttaatcagacaattaatcattcccacttaaaaatatatgtaactattgtatcaatctttcttttttttttttttttttgaggttgtatacttttagtactagcgtttagtgtaagcgaggaatgaattttgggttcagtattttggagcatctttgttaccaaaattggatgttggataataatgaggtattgcgtatgacttatagcatagctgcaacacctaggacattgccacatgctctctcaacactcctacattacattattcttggtaaaatgtgacaacgtgatgtgttgacagagtacatattatacaatgttctcaatacaagaataatcatgagtgcataatgaagctttcaataccatatattggtaaaagtatagtatagtggtatagtacttaatcccaaaaatgttaggtaggtgacaattttgatagaccaacataattttgtttcaattgaatcactattccccataatccccagcatgagtgcaaacttgatttgaactttgaagtactagtggaccaaattaagttacccttggcaactgatatgtaaacattgaccctcaaaagtctttgataaatcagatatgtgcttgtgatggtaaccctacactctgctcggccccctagaaaatcagagagaaaaagtccactgaaaaaacacaaatgtcttggaaatgattggttggtattggctaggactatgaaagcttatatggactttgttatttctaagaatagactaaagaaactccaagacaaattaacacagggcaccagctaggctagctttgctttttctatgtgcatatatagctctctatatacatatgagctatatatgtgtgtgtataaaaccagcgtgcttcttaatttaccggctagtttatgagttgaaaccgtacataaaagggtcagtctgtggttactttacaagtctttctactgagacaaatttccgcaaatggattggtgggtgagcttttgtgaatgtataaaattggaattactaagaaaagtatcagtaatagtcacagtaaaatttcaaaagaaagaaagaaaaagtctttacctgcattgcatataaatggaaaagaaccatttctgaagataatatcctatcatatctcatgcaagcctgtactggggccttgttcacatcattttattttatttttttcaattatgttatgattatataattaattttatttattttaaacatgcttttaagcctttaacaacgtttgaagatattcaaacttttaatcactattcatattgatgataaactcttttcttcttttcttttgttaaattaatattcaaaataaaaagagtaatagtacaaaagttgatttctataattaaaatactagatacaagttctattaatagaggttcaagaaataaatttgaaaactaaaatattaaaaaataaaaaaattttgttgagattttaacacttaaccacaatactataaaaatggtttctcccgtcgtttttaaatagttgtttaaaatattctcgtcggtttttataactatcgcctatacgaccatcgtaaaacagacaaaataagcgacagttaaaaaccatcgctaatgtggactttttgacggtttaaaatcattgcctatactctgttataggtgacggttttaaaccgtcgggaatgtaaaaaaaatatacagatttaaaaccgtcgcctataagggcccaataaattttacaaattccaattaaaaccgtcgtctatttctgtaaatactgttataaactgtcgggaatattaattttttttgacggttttaaacagttacttaatttttttagcgacggttcaaaaaaaaaaatatttttagga

SEQ ID NO: 79303 - DNA, 4069 bp, Cannabis sativa
ctttttcatttttctattattttatcatcttcttgataaagtaaggaaattgtgtaatgtcttacccatttgagttttgaatgagcattgatcctaaatcttttctggtttggtgctatgttgaaattatgaaatgggggaaaagtggtctctttgtttacttgatcaattaggaaaatttggattcagacatttctaaattttgtcatagatagcaatatagtttagagtctattagtttgttagagtttgtaatagaaaacccttttggcaaataccaatatatgaacttttgtattggtctttttactcatccattacaacagatacattttcttcattctttctttttctctttcctattttccttctctccctctgaattaaggatgtttatagcaaataattccttaagtagatattgcaattgactgaaaaaattaagcaagaagccaatgaaagtaagagcattgttagtagtttctgttaaaatagtatacatggcttcctatatagaatgtactcttttgctttagcttttcactccttttgataacagttccacactatttaaagaagtttttctgtttaaatgatttatgaactgacatagatatgattttctctaaggcactgaagttttttgtggggttgatgaatgccatatttgaaggaatcaaaatgtgttttctgattcagttcaactgattttatatcttcttttagtacaatacaatgttcttgcattgaaaaccaatcgatacgatcgagtaagataatctgccgtgttaagcaatcacctcagatttgtgtgcctttgtgttagtttagcaaatctagttaggactgcatatgaatatgttacatgattttacattctgccttatagtaaatgtgattgagttgataatatgatacactttcttcttgattgtcttagtgttttttcttcataacacttgtcatattttttaaccaaatgctcttttttctgattttttgtccctttgtttctttagggtcataaacaatggcttgcagaagttcaattcctcggtgttctcagtcatccacaccttgtaaaactcataggatattgctctgcagacggggaaagagggattcaacggctattggtttatgaatacatgcctaatagaagtttggaagatcatcttttcaaccgagcatttcctgttcttccatggattaaaagattggagattatccttggtgctgctgaaggcttggcttatttgcacgacggagtggaagttaaggtacaaaatcttgttattcagctcggagaattggtgacgatatcccatcataagctctctttagttttgagtagttattataattcggattgttcatgatgcaatatgcctatttaactacctagctattctagcattgtcaagatggatgatttgaatagccataaaagtgtactcttcttcttctcaattatagtagtaattttcttcactctatttgacttgcaagctttcaaactgttctgtaattaaccaatttttcattttccttttctgaaggtaatatacagagattttaaatcctcaaatgtactattggacgagaactttcagccaaagctctctgatttcgggcttgccagagaagggccaaccggtgaccggactcatgtatccacagcagtaagtacacaacaaattataattatgttatcattaataggaaagcaaagatagcattaccaactctgaggtaaggcgagcaaggcctgtggcttgggcccttaccactcggggtcccgaaattgtgaagaaaaaaaaattattagtatatacataaaatattaaataataagataatgcatcgaaatctttgtagtagtattaaataataagataatgcatcgaaatctttgtagtagtagggagagtcatttcaagctacgagtttacgagatcaatttcaaatttacaatttctaaactttttaaaaatacttatggaggattcaacttcgaaactttctagagttttcaatgattttatcatatatcttatatgtttagaatttggtataaggtgaataaggttccacctcaaaaattaattaataataagaggagtaactcatttatcttatacattctattatttccacacattaacaatgtgggactttttaacatgttcttttaagtcccaacttggtatccaccaattccaatgattttatttaaagtgcattcattagagaagttgaagtgcctaagttatcttatcttagtctgtatttttcttcctcaacaggtggttggaacatatggatatgcagcaccagagtacgttgagactggccatctcaccgtccagagtgacatatggactttcggtgttgtcctctacgagatcctcactggaaggcgagtgttggaaagaaaccgtccttcgggagagcagaaacttttagattgggtgaaacaatatccagctgacaagaacaggtttagtatgattatcgaccctcgtttgagaggagattttgcaccaaatgcggcgaagaaaatcgccaagttggcagattgctgcttgctgaagaatgcaaaagaaaggccaacaatgagtcaagttgtggagaggttgaaacaagctatacaagaatcacaagcctcatcatcaagttcatctgcaaatggtacctcttcttcacataaatctaatttagtgaagggaaaatccaaatagaatagagttgggtaacataacatatatatatataatatttatatctattttttttttaccttattctcaaagaggccaatgagaaattgattatttgttcttgattctgagtgagatctcttatagttctccaaagttatttatgaagaggcttttattttttttttcctctaatatacagaaataaatataggtaattttttttaggtgtagtccatgtatgtgtctgtaaatacatgttgttacttgttaagtaatttctttaattatgtgtttgtggataagttggaaagccccaaaaaaaaaaatgatgcattgaaattgaaaagagatcacaaatatataatattcatttaactaatctcttaagtttaaagaaatactaacaccaaatgtagtacaaaaattataaaaatatggatttacaatttttaaacaaaaatttatattgttgttatgttatttacacgttatttttatgttaatttgtatttgtattgtgattgtttatagtttattcgttgtttctatgttggtttcatgagattttgtgtaatgtaactacaaaaaattgtaaaaatgcaaaataaaatttgtaaaaaataaaaatattattaataataataatagtaataataataaaactaagcagtttgtgtaaaaaaattcaaaaaataaatatatattgttgtgttctaaattttaatatacaataatattttaaagagtactgttattggatatcagtagtgcttagcaccttctacatatattatcttgtgattatttttttaaaagttattacattaaattattttagacaaaatacttaattgaactaatagtgatattgacacgtagaaaataatttaatgcaaactaaaaaaagtaaaatataattaattatgattaataaattaaaaagtgatgcatagaaaattacttaaaagctcaaacaatttccatggtaaactgatgatggaaaaatgatggttctagatggatgttcaaataagagaacatttatttattacatgttacaatgctatgatggttctatattttaattacttaaatagatactctttttctgccactatgatttagtagtaatgatttagtgactaataaccacaccaaattgatataatatatgactaaaatattgattaagtgcaacattttatattttatactactttctgacttttcccacaaagacttattttgtaatatttgaaactactcactgttttttgtccttaattaaaatttaaaatcttgaatgctcttttctcttttcaaggatttatagtgacaaaaaaaaa

SEQ ID NO: 79304 - DNA, 3717 bp, Cannabis sativa
tctacaacaatggttgcaacccgaaacacaatggttaaacccaacgctcatcaagacaatgaagatgatgttgctgatgttataaaccgacctccaccgatggacgtttaggcagacattgtgagggatggtgaagcattagagatggccagccatccacctcgaaaaggccagcagctagaaaaacctgttaattaaactcccctcgaagaggaaaatagggaaggccttgatgagaatgagaaggagggttatgacaaaaattatgacaaaaattacatataaaagtactatgaggaagaccctgaggtggtgaggttaaggtaattagtagcaaaccaacaaagacaaatggtggagcaacaagaagctacatgtcatatacaaggtatcctcttatagttgaaaacatggtagcaaaggggaacctcaatgttgaaaacccataagtgggaaagtttaaccatctcggggctagactaatccaacaaacgacaaggggaaggccaaaatggctgagcccccaaggaggaattatccttcaaggcccatgaacaatgctccacggaataactaaaatatgatcgacccactcttgtaaaaagataagaacgtttgagccttaaggctagatcctctagtcgatttatggagcaaagtcgaccaaaacaaaaatactgtactcaagtatcggagcgtgtcgcttggggaaagaaaaacagcccaataattatgttaattagagcgttgaaataaagttcttagatctcgaagacaatatgtcaacaatggacctcagggaccagttgaatgctaaaagggaaaaagtaagatatgagaaggccaaccttcgtggtggagacctcaaaaataatgtaaatgacgaaattcgtggatgtgaggttccagatgacaacaccagaaggttgaggatcaaatcactgccttaaacaaaatcacatatcgactagttcgtaagcaaagtggcaatgtgtctgatttttacaatgaagaccctaaagccatgcatcaagaggattttagaagccttactactagaacactctcgcatgcccccgaatagaactatacgaaggctggacaaaccccaaaatcatctatcccagtataatagattgatgacagtggctcaagtcattgatgattaatggtgtctatgtttccctcagagtatgcgcctatgcagactactttctctgggttaagagcagcacaaactggatggagtgttgctcctaaaaaggcacaagcaagtcaacaaattgtagctctagagttggaaataagtcagccctagagcaaaaaggaacaacaaaacttagagctggagtgagcctccaaaaaaaggaaggaagtggtatgaaccccagtacacaaaatataccgacttgaaagatactcgtgagaacatttatcaagcgacttgcaacatagttcacaactgaaagccacctccaatgtataaaggaggtaaaaacaagagagacccaaacaagaaaatgtgagtatcatggtgacatcaagcataaccaccaataagtgtgattacttaaaatatgagatagagaatctgatttaaaaatgccagtctccacgtacgagtgggtaaggatccccatcataattttgggacagagggtagcacaaggaaaattgattattcttagacatcagggagcggcttaccaataagctctgggaatacaactcttggactgagaaaccaatatctactaggtatagctctgccacatgttgacagtcatgtagcaaccatctctagagggcctcatattgccaatattacacaagtgggtaaggatccacatcataattttaagacagagggtagcacgagagaaattgattattcttagacatcagggagcggcttaccaacaagctctaggaatataactcttggacaggggaacccatatccatcaggtatagctctgccacatgttgacagtcatgtagcaaccatctctagaggacctcatattgtcagtattacaagaaatttctagaaaaggtatttgaacaagttggaaccagaaaggaagtgtgcaccttagtacaaacacatgcacaaatgtcgcgaatgatgaatcttcctatcacttttatataagaagatggcaggcgtgtgcattttcccctcaacgacccgttggtgatcgaggctcagatcaccaacaaatgagtatcccgaatactggtgaacaatgggagttctgtccacatcttgtttaaagctacattccaggcaattagattagttgaaactaaccttgcaccttgcccaatccaacttcaaggctctaatggagattatttactgcccacggggaagatccaactcctagtcactctaaatgggggtatagctagaagcaataattcttccacatttaagtattatacattcatcgtggtggactacccaactgcctacaatgccattttaggacgacccgttctagttgattttggagcagttacctccatcagacatttatgcatgaagttccaaagctataatggaagtattggaatggtaaggggtgaccggaaaggtgcacacaagtgctatagtgtctccaccaaagcagttttcatggtgagagaagaaactgaggagccaaatcttggagtaccaatccacccgacactaagggtggtctaggaagaagacgagttagatcctttagtgggagttgaaagaatgattgatctcatggaggatgtggaagaggtctgtatcaatgacacatatcccactaaagtcatcaaagtgggacaaaacctccctctaatggtgaaagagcacatggtggccaaagttaaagctaacacagatgtcctggcgtggagccatgcagacatgatgtggatcaattcccatgtgattttccacaccttaaacatagacccagatgcagaccctatttgacagaagcgaagaccattggattcggtatgatctgtggcagtaaaagtagaggtctagaagcttacctcgatccagatcctctaggaagcattgtacccagtttggctggccaacctagccttggtcccaaagccaaattggacatggaggatatgcatcaattttatagataacaacaaagctagcgcaaaagactatttctcgctaccgcaaatagatcaaatggtagacgccacactcagatacaaacttatgggtttcatgtagcgaatactctaactataatcaaataaagatgcatgtatcggatcaagaacatacaagtttcagacaagggtgtgtacaactacctagtgatgtctttcgggctcaagaattccaaagcgacctaccagcgtcttgtgaatcagatgtttaaagatgttttaggaaataacatggaggtgtatgcagacgacatgctggttaattccaagatctctaaggagcatggagatgacttagaagaaaccttttcaataattaagaaatatgggatgaagctaaatccaaagaagtgcacctttggagttttctcaagaaagtttctaggtttcaccctcagctcctagggcatcgaagaaaattcaaagaagattatagctctcttagacatgccttccccaagaaagcataaggatgtccaaagtttaattagaaggatcgttgcactcagtaggcttgtgtccaaagccactaat

SEQ ID NO: 79305 - DNA, 2804 bp, Cannabis sativa
  modified_base (54)..(60): a, c, t, g, unknown or other
accatgcatttctgaattctataattaacagtgataaattatttaaatagctannnnnnntttcataattaaacataaacactgctaatttccaaattaactaagcgggctttacatgttgcaccaccttacatgtaactaggcaatgcaatatggtttttggttcatcgttgcagagagggcactgctgactaacagccactcgtttcatcgccagctgagccagagttgggagacaatctacaccagcacgccacactagatttttaaccttcggaggtacttttaaagcccacagacatctccaaaatgaagacacagtcgcatcatcacccctccctttgttcgattgcagcatttggtatgcactactaaccgagttttcccccatgccttctttagaccaacaaagatgatcacgggatgagcttactttaatcgggattcgaaggatcaactctctatctctttcgacgaagagatcatttaaaatatccatatcccaatctctaccttccgtacttataatgttagccactttttgacatgttgtaaagcaagatggtctgagattacacaaggattaacagagtcaggaagccacgactcccccaatatgttgatacccgtaccatcccccacacacaaacgagccccttcacgaactaaagcctgagcctcccacacactgcgccacacaaaactgggattgtttcccaactcaacattgagaaagttcccctaggaaagtaccttgctttgagtatgcaagatgcaagagaattcggcctagataagaacctccaaccttacttaccaagtaaagccaagttaaaatctctgaagttacgaaatctcattcccccattgtttttatggtcacacatacgatcccaggacatccaagaaatacctctcgtttcaccatttgagcctttccaccagaattttgctagtaaactctcaatatctctgttgatttcccaaggcagtgaaaaaacactcatagcatagctgggaagagattgagtcactgatttaatcaagacatccttccgcgcccttaaaagaatttttgaatcccaccccgaagttttttacgcactcgctaaatatcccaaaacggccgttttattcctccccatggtactaggcaaacctaagtacatactcatgtcattcgcttggttcatttgaaggagctgatttattcttgttctacaaacatcatcagtattgagacggtagaaaatggatgacttgctagagttgatttttttgccccaaagtcacttcaaatttatgtaagagctcacttcaaattaattaatgtacagtttaaaaaaaaattaatgtatttgaaacagcatgcttgtgtacttttatgatatatattgactttgttttgtgaaacgactgccacacaataatattgtaatagaaatcaacaaaagtttttgttaaattgtattttaatttgtgccaacttattatagtactaatatcgtactagagtaatataattaataaagtcaattataccttacattctaaattaatgtcattaagatttaagaacattcttatcaaattattttatgagcattgttattgggtactaatctcagtatctcttttataggtggtgcctcatgatttgttaacgatatttcttaaaaattattttttttaagttatataagacctaatattcaattacaccaataaacggcatgacaaaagacaaggtgctaacactaatagtacattttagcaatcctcttattttatatgcagtttatttctcaaattgcgattatggcttaattcttcttaatttaaagataattattaagaaaatattattggtgtctagtataattttcggtgatataattaagtatcgaatctcatataatttgagaaaataatttttatgaaatattactaaccaattgtaaagcgcagaatgtattaagtactactgatacttaataacaatgctttaatttaaataagagtgttattttgtggggcttgatatagggtcacacccacacaataaaagttaaagaaatcctatataactaactgcagtaaaaattgtactaattgttgtgatatcttatgtaagaattattacagtgtttagctgtaatgattatttttactacacatatttagcttcaagaatccataataatctaaagcaatgtaatattcgcttttgatgttgctttgatttattagaatctgattattcatttgttaaggaaacttgtaaattgtaagtacatgattttctttattgctttctcctttcacttcaagaaagaataatactttttccacgagtaaatttgttattattatttatgtgggtaggggtttaagaaaaaataggcaaaattgattaactttttgggtgtaacccccaacgctgagaatattaacagaagatggatcattttctctcttaatcttattgtagcctaaattttcttggattcataattatgtttattttttttagaatgatcattatctaattttttttaaatggattcacgggtgtcgcgtggctcggcgagcaccttacatcactcatatgttgtttgctgatgatagctttctctattgtgccgctactacggaggaggctcaacgagttctggagttactcaacaaatttgaacaggcttcgggtcaaaaggttaatctcagtaagtcttctgttttctttagctccaacacgggtgatgggattcgccataaacttatttccactcttcgtatgcgtgctg

SEQ ID NO: 79306 - DNA, 3945 bp, Cannabis sativa
ttttctattttgatcgataccctcttcttacccttaggccaaatagattattttttactatatatggagcaagttataaattcagtgttgtagctagctctcacttaggttttcattaaattactctcttaggcctaaactccttgtttccttcaataaatatataaattatttatttcacaaaaataaagattattattgagaaattatatctataaagatgatgtcatatgggatgaaagaagatcatgaagctgagtgttcacaaacaattcaaaacaatatacagggatttcatattcaagaccagtttcttcttcatcaacaccaacagatcatgcatcatcatcatcaaccagatcatccaattaccagtgatcatcatcttcatcataatcatcacatctataataatggaggtggaaggtcagccatgctttttccagaagtctcaccaatgctacagcccacaacctggtcacttcccccggttcacgctttcaacccggctcactttggctcaaacccagtccgggaccacgacccgtttctcgccccgactcaaccgtcatcgtcctacgctagtttcatgaacagaagagccggcggtggtggggctccttctctacagtttacatacgacggtggttctcatcatcatccctcttctgatcaccacctacgaatcttgtctgatacaatcgggtcaggtgttcaacccggttctggtccgtttgggattcaggcagagttgggtaagatgacagcacaagaaatcatggatgctaaggctcttgctgcttcgaagagtcatagcgaggctgagaggagaagaagagagagaatcaataaccatcttgccaagttgcgtagcctcttgcccagcaccaccaaagtaagtttattcacacaacaaacacataaaaatccaatctttaataataaaaaaatctaatcatgtgaattggaaaataatcatatcaaattccaaaaggaaaaaactttcttatatacatattatcacgcgtacaacatggtgtatttatatacacttctcatcttttctttaattatgtaccctttttgttttgttttgttttatagtgaacttttatttttctaatccgagatctttgtggatctttctaagattctattttgttaggatggtctcatcatcatcatcatatatactcttttatttcaaaaacataccattagaaaggaaaggaagagttgcaaatattcttttttcttttcttaaacttgttacataatgtagaaagctttttcatcttttttattttgttttattttttcccttgtttgttttcttctgcgtttattctcttttctgatcagtcgtttggtagttccgaggtggaaaaagagtgaagaaaaaaaaaggggagaataaggaaggcgctaatgtcgctcggctgatatgataaagagaaaccaataagcagttgaaaagcttctcgtggaaatttcttgccggatatttacgacataaaaaaaattctttctcttttaaatataattacttaaaaaataataaatcattagacaaactagcatgattgtcagtcagtagtcattttaatttttaaatagttttacctttttcttaataaataaaaagacaacaaaaactcacaatcaatcaaaactgctcaaagtaccataacggaattcaaactgaaccgtaaaatactgtttcatttttttcattgtcacattttattaatgtaatgttaatatattaataactttagctcatttttgtttattttttctttagacggacaaagcttcgctgctagcagaagtgatccaacacgttaaggagcttaaacgacagacatctctaatagcagaaacgagtccagtcccaaccgaaactgatgaactaactgtagacgacgcgtcgtctgatgaagatgggcgcttcattatcaaagcatcactttgctgtgaggacaggtcggacctcttaccggatcttatcaagactttgaaagcattgcgtttgagaactctaaaagccgagataactacattaggtggtcgagtaaagaacgtcttgttcattactggcgatgaacattctggtggtgctgaccacgaagatgacgaaaatgataataataataatgatgatgatgataatgatgatgatcaaacaacaactcatcagtactgcattagttcaattcaggaggctcttaaggctgtgattgagaagaaagctactgaagattcttcttctgggagtgttaagaggcaaaggaccactaataatatcaatatatatccttgaaaaaagagtataaaaaaaaaacaactattacattatatatatatatatatatatataacaggtcttgttttattattttatcaagatcaaggcctttataattttattattacgtactacttttttctcttttggtttcattgtcattattctcttgttgggggtgtgggtttttttttcttctttcacttggagtgttttgttaatcatgttgttatgtatttccaccagttgaacaaataggtaatgatggtgtggtttgtgtacttgcatttttacccatatatataatatttatatatatgtttatgagtaaaaaactgagacagaaagagatttgtagatagtaactgagagaaacaaatccttggacattgattttggtttgtttggattatggcaaagaatatgggaaggatctttttcgtgggaagaggaaaaaccttataaagaggcagaagatagaaatatgtggacttgatagaactcagatccggtttaaactcaatgttttcagagtgtggggtttttggggttttgttttgtagtgaattattatgattaatattattattttgtttttctctttctttctttgttcagttgttctcgttcgtacttggcagtgggaattatagtcattcgtatgaataatgaatggtcatgacgacgtatagttatcaattatcatcattattatttttctgtgtttgtattgtgatttgtacgtatatatataggttgagtctagtgagtcatcagtcccaccaattattgttttgttttatctccttatttcctaatccgtacatctaatgcctgtatttgttctttgtatatttctgttctagttaattttcacatcaaaatgaaggtgaaaccctagtcagggacaggcattttctgtattgacgagtgtataagagctgtgattgactgatttagcaaggtagaaacgtcttatgaaatgtacatttttgtgtgtgtaatgattacatatatatgtattgacgtatgtatgatgaaatgtacatatctttgtgtgtgtgtgtgatgattatatatttgaaagtttgtaattatatgttacgatatatatttgattttgttttccaccacttcatttccttgattccttaataattaatgtcttggctgggtttttcgttgcggtcatccttgaatgcatgtgcaaaggtaaacattgttttgacaattttattactttttgtattgatttttttttcttgtgcatttacacttacatttgcagtatattaaccgttaatatatgaatgggtgtttaatacatttttataggtaacgattggttagcatatttatatttatatttatatttatacgagatttgatacttaattataccgatagcgataagataccgataagataccgataagagtgttaagcactactagtgataccttttaacaattctctttatatttagagagagaatttttttttttatttagctagaaatagagagaattgttaaaatgtaccactagtgtctagcatttttttttttatgtcagattactattggcggtttggaataggttaatgcttgttgaccgagattttcggcaactaataaa

SEQ ID NO: 79307 - DNA, 1804 bp, Cannabis sativa
aaattagtgtgtgtgtggtatatacgatattatatatgtgacgtatgatgatgatatattaaattcaatcaaacggccggtttttttatattatatatatatcacttggtttttggcagagttttactgatgataagcacatgggatttttaatattgtttatcccttaattaaacaatttatataacatgtttataattagaacattaaaaaaagaaagtgaaaagagagagactagttatgacaactgtcgttttctttgaactctttcgtattcaaaactctcttctgaaaaggcacatattagattgtccttaattattaaagactataattatagtaattaataaatttttcttctttttttggttctggctaaatatatagacgtgtttagtcaaggaaaaccatttaaagtaggtagtaattaatcaattaattagacagtgaaataatttttctatcgacaaggaatgtgtcaagatggtcctcacctgattatatataagtatattattatgtaatatttggtctcccatatagatgaaatataagagaatactatttttatcacgtgcatttgacagcattattggtgtttggccattcctagtttttaaaatcgaacaagcaaaccactacagaagagaaagagagcaatattgtagtaaatgagtctgaaataataaaaataaaaataaatttttttttttaacaaaaaaaatcttgagatcccttcccttcccaataagcagatagatgagataagatttgtccaattggagaagaaggccccatttcggtacagtcgtgtttcaatcccctcctcacacacacatattctttcttctctctctctctcatctcattaatcacacactactctcacttgagtcactcttatctttcttttctttattatatatataacgttgcaatcaattttttaatatatactttcttgtaatcaataaatattatattagagtactatatatagtttatataataataataatattgatagaatatatagttgggattacgtcttttctatgagttgagacaaaacccacctcaatttccaggtagattcagagaccctttttcaatatatcactacaaaaggttggatttgttgttttatttaattttttttttaaataaataaataaatatactactagttcttcttgttggaggagacacataatagaggttgttgggtagttgttactttccttctctaaatattacaagcaacattgtctggtgtcacacatgtataaatgatatcatggtatattatataataataattattattattatcacaatcatatcttaattattgattggacatttcacgaaaatattaaaagattgtgcgttttaattaaaaagaagaagaaaaaaatctacacaattttaataattatttattatttggtgatgatattgttattaatgatgatgaatgctgaaacctgaaattttgtataagtttcccaaagatgttgtttggccaagtgtgggaatccttgaccacaaagaaaactatatagctctattataatatttatatttatttatatatatatgtgtgtgtgtaagaaagaagagctggaatctgggtgggggttttatttgaaatgtagtctttataattttagtttgttttcagagaggacaatgaacaggacaaagttcccaattgagatatatatttgaggaaaagggtgtgagtgatcaacactcgagatgaggaggggtaatattgtaataataaatatgttttatattt

SEQ ID NO: 79308 - DNA, 2058 bp, Cannabis sativa
atatatatatatattattttttctggaaaataaatgaaaattttgaaggacttgcaagtatggaaatgacaagaaatatctcacctttccaatcaagtgtagtgtggcaggccaacccaaagatacagatgtttgcaaagtaggtttctctgtgtcctctgaaagagctgatatgtagctgtttcattaaaattgtaaacatactcattaatattttactgaatgcaaatacctcatattcaaaaatatataatactttaacctatcctcaataaaagccaaaaaagtttcagaagtttattacacaaccacattatgaataatacttttggaaatatatatacatatatatttatataatttacagctattagggaactgataaatttaaacataatatgtttaggatttacataagaagaagttttaccccagcaaagcatcaaaccaaacatatatagtttgcttgctgtcattaggaacagggataccccaatccactgatgctcgggaaatggaaaagtccctcaggccactttttatccaagtttgtaccttaataaaagaaaatatgaaatttaagttctcccttgataaaacataaattgttaaaagtaaaaatgaaattacagaacaaattgaaagtccataatgattttaatatagactgtatttggggtgtgagtagtggtttcaataagaaaatcacataatgattttgcaatatgactgagaagactgtgtccatctaaaattcctttcattttgattttatagataacttttcctttcattttgcaggatgacttgccatttaagtctaatataaaaagtggtgtgaagtattattaactgtattagacctgagaaactctccccaaaggatgtcagttcaattaaatcatccttttgctactactccaaaagggcttcttaaaagtgtgaatgttccaccaaaaaaaaaaagaacaaaagtatgaaggtttcatatattctctactactaattgagagcctcaactattaatattttcccagcaacatcaatgcataattactaaagaaaacaggcaactgaattttcaatcaaagaaattttaaaattattgctttggaaatgaatcatctgatattagcactatttttttttctcccaacttctgacctcatttagacgaaatgagggcttcaccatatctgatgtcaaaatttcttccaaccttttttgatactttgacaaagcaaaaaagtaattatcctcttttcgtgctacacatggcttaaggtgcgtagggcaacagttgttctcaagcagttctttctcatcctgcagatgacacaaagcaaaaacatacacaaggcattgcataacctatccatgttagactaaactgaaaaagaaaaggcaacaaacatacaacattatcttcatatcttgtactattatacaaatatatattttaaacagttgtatttataggtttcgaattagtggtcccgatccattctgcggtaagtgttgaagtaatttaggaataacattgcattcatgatgtcatatattactccagaatggaatgcaaaatctggagcagcactacataagccccctaaatctatatttatgatattaaaattaaaataaaaaacaaaatcaccttatactcttcacagttgatacaatagagcccctcatagtctgcacggtaaatgtcaccattggcaagaactcttgagtagaactccttcactatatattcatgcttgggatcagttgtccgtatgaacttgtcataagctatgtctaactgtgaaaaagaaaaagaaaggaatgacatcaatttgagtactcaacaaaacaaaatacccaattgagtagtcagccaaacaaatgtacaataaagatatacaatgtgagtaatcaacgaaataagcttcatagagtaaaatcgaataatcagctccacacattacatcttcccatagtttcttgtaagcttgggaaacgacgtcgcaatgttccttcggactggaaccagcggcggcagctgcggcggca

SEQ ID NO: 79309 - DNA, 1523 bp, Cannabis sativa
ctccatgacaacaaaaataggcttgcgctcatacgagtgaaacccaaaaggtgtgaacgaaagggctaatctatgggcccacaactgtttgctcacagttcttttgggcctcataaattgggaccactaattcaagcccaaagttctcctcatttcacacttggtggtccctactatatatttctaaatgttattttaggttgtatattatttaatttgaagtcaactactcttaaaataatcaattaaatcctttccattctatatgactttactgagaacattttcaattatatatcttatgaactgagaatttcatgcccatttttataattgcccacttgactttttgagttgcaaaatttcacttgtcttgccctagttcaattaaaaaaataccaatatttgaatttccaattagttaagcaagtcaaaattgagagagaccaggcttgaaatgaggatttggaactaattataaattaaaatattattagtttgtttgtacatatgtgactcctttcttaaaaaaattataaataaattgtataatatgactcttaggtcaacaatatacataatcttttacttactttacattgtatgacatgttgacatgtgcattacttcatcactttgcattttgattttcttttcaaaatgttattttttgaaaagaagaaatgaaataattagagatcaaggtgggcctgaattttagtaattttaggtccacggtccaatgagtttagttgttgaaagcccagcccacaatataaaatccataactctgagctttcactaatattttaggaaaaagaagaagagaaaattacttataaacacatgattttagttttgaattggtttattaataataagtatccataaatcgatccaattcaatgataatcgactaatctaattagattggataagatgttttctattcctacttgccatccacaaaagtaaaaaatatgactaaaaggaagccatcagaggcaatcaagctcaagtgattcatgacaatgaaatttggatataatttagaggatattactatttattgtgataaccaaagtgctttacagaaaatatacactcattctgctgatatatttactaagagtgtaatcagagataaagttcttcaatgtttgaatctacttaacatactggattgcaagagttctcactagtacaactttcaattcactattggacataagaaaatgtatcaaatcaggtggaattgttgtgaatttgattcacttaccggatgttcacatattctaattttatgtgttcgagaatggtagttaagttagttggtcctcatttcagctcaataactctaactgtccatctacaactagacactataactctacattcaagactaattcagcacctaggtatatctctcacatgtacatattcatctctctcgagtccagttttgtccaagaaatttttgagtgaaggagggttgtaataggttccttgtgtgtttgatcaat

SEQ ID NO: 79310 - DNA, 3292 bp, Cannabis sativa
acactagttttagtttggattaatgatatataaatgttaataactgatctctatgtgactctgactaaagaaatatattggagacaatgttcttatgttttgtgttcattttgctactcccctccacagaagcatcatccatgagtatgtgtttgtgtatgtatatgatcccactttgtggcgaagtatgagggtgtgtggggtcatgaacccaagtctttttttttttctttttgctcctcaaaatggctaatcacatgtgggccataaattgctacagacaacatttatttttggagtggtctctaaacttcaaggtgagtctgttataatacacaccttgaaaaagattgtttgggtagattttttatttatttaggacatgataatttttattgctaaaaataaaatttaaatattttattgtatacttatttttttttatatatatatatacatatagtaagtaaatatttaaattttaattttagtataataaattattcagaattttttttaaaatttatagatgattctatataaatacaatgtaaacaatcattaaaaaaaaactaaaaaaaatttcttgaagctaaaatagaatctatgtaaatataactaacaaatactcgtgcacaaaaaaaaaaaaacgagagaagtagtaagttataaaggcttaacaacttgtttgttatatggatttgccatgctgagatgaagagattcagtgattgtgagtggtatagcaaatcctttacctttgtctgttagtttagaacactttacaagtggaatggaaccttttgctattatagaaaagcacagagattcttcccacttggacaccttgactaatgcctctttgttatttttctatgccttaaataagaccatatactaaatggttggtcattggtgcgtgtcaacagctctgcaatcttacttgtctgtctcccttatttttcttttctttaaagtctacaatccatcttctgattttggatcacgtttcttttcttctttcaagtttcaaattctgggactttccgaagttgaacagatttgatcttgaaactctgataccgctcttaaagtcaacatttttggagatgggttcttgtttttagcttccatattatagaaacttggtgaagcctgtggctttctgtgccactgaatcaagaatattattcaagtttaactgatttggtcagttgggttttctcatggaggaagaatcttgaggatctttgtatcttcaacgtaataatcaatagccggatctggtagagatttctaaggtactttttctgattctttttcttggtttgtgaaattcaaagatattcagataaagtgaggagggagatgtttgatgcttgcttgatgatgaattttaatacttctttgagttacccaacacacaaattgggctatgcaaatgtaaacactcaaaagactttcttgtataagtcaaggtcaaatcgtgttctagcaatgcctccaccttctccatttcttttaaacacagatgaagatgggaaatttggttcaacaagtaatgattctggtgattctttagttagtttggaaaataccattggtataattggaggggtatctgttgattctactctgaagttcttgagaaaactagttaagttgggtttaaaagatgaagatagtattccttttgtgctctgctctgaccccatgttgagtaaggatcttcagttacttgaaaggagttctttgccttctttaagtggtcacaaaacccaacgagtacaaatggatcctacccgaattgtggagaatctgagaagcaaaagggtcttcttggaaaattcaggagctcgttgcattgtcatgccttgtcatttatcacattgttggtatgaagaagtttccaagggaggtaatgttcctttcctccatatgggagaatgtgttgccaagcagctcaaggaagccaagttgaagccacttgaagctggaagtgaagtgaggattggagtgcttgggaccaatgtaactttaactgcaggattttatcaagacaaattgcagaatgaggtaattcctttacattttgttttttctcttgctgcaacttacattctttaatatgattctaaagactaaacacacttgcaggggtttgaggttgtgttgccagataaatcaactacagaacatgctgttgttcctgctatggaggctttaagtagaaaagatatagaaggagcacggaatctattgcgaattgctctccaagttcttttggtgagggctgtaaatactgttattcttgcctcagatgatatgagaaatcttttgcctctcaatgatcctcttctcaagagatgtgttgaccctttggatgcattagccatgtcaactgtcaagtgggctcaaactgctgaaacaggtaaatgaagatagtttacttcttctatgccatattgatttggaattcatacagaagaacatgttattggtgtaaaacttgatttgtctgtgttactatgaagttggaggattgtataaattttgaaaagcttttccgttgattcttcagtaggaccaactctcttacatatcatattgagtagagtatatcattgtctgtatgtaaaagaattccattttatgagagctggaagctttttgtcatggacatgtttaaagggctgtacaaaaatattccaattaagattggttgatgttctttctgactaagtaattgggataagtatcgagttgtttatgattatgccccacttaataacacttaattacattctaaattactttaatggtcatcatatcacatcatataaccaagataagtgtcacttatccgagaaaataagggaagaattgcaatgagagcatccattacgtttacacgtattttgttcgagtaaaacaagaaaagttaataattactatcctctagtggcatcttgcttgtccccacaagaccatgtgtaacagatttaaatggctacaaaaagagaaatgctactgggcactttaagatgcccctaagtaccacaaaaaataacacatgttagattttaatagagtctcatatattttaaattattaatattggtgtaattttagacaccttaagctaccaaatatcaattctcttaaaaaaaaaaagcaaaaatccctttttactaacacattttcccacaagtcaattcccatattgtgttttccaaaaaattagcagtggaaatggaaatgtgtactaaagcatggagagtgtaaaagcttt

SEQ ID NO: 79311 - DNA, 2804 bp, Cannabis sativa
tccatattatgtgaaaattaattattcattagtggaggagcgcgcatgattagggtgaactaaggtgtttggctattaattagcccaattataaattaaaaaatgtttattatcaacacattgttaaatattttaagcacacattttgacttatacggatacttcttaaatagtttaaagctatgatttagctttacattaaataagctcttttaactttctaccttccgaaaaatttggcacacctattatgacttttactagggcatttaaaaattattttgtcatagggttgttattataggtgactttatgttaatttgggtcttagacaaaattaaaaattggagcccaatgaaaatgtgaagctattcgggttttaactctcaacctcttacttggtaaactaatcaaattatcactaggctacaacacatatttgacattatttattttattactaactatattttattttgttttcgaaatagggcctgagcggtgcggggcctataaggcggccgcctccttcgtctcacctcaggggcgccagccttgataggtggtgtggattatgaccaatattttttttttcaaattaacttgtgtatgtagtttttataattttttaaaccgcaatcacactacaagactttaattaaatcgcaaaaattaatataatatgatacaatttacactattatcattatcaaaataaaaaataaaaattaacctaataaaattcaacaatatatataaaaaaattcaaaaaatatacatatatattacatatattatatatatgaacaataatatatattagcctaaaattttgttaacataaatgagacatgataattaatgatctgtattgaatgtctaatatatagaaaatatatattttattatatatttaatatgaaagatgaattttttttgcgtgattttgtaattaaaatctacatactctatgagtcattcttatttttaaatttttttttcgttatatgtataatttgacagaatttcctctaagttgaaaaattgctcgtcctttaaacaacgtgattattgctatttataagaatgggagacatagtagttattttttatcttatttaaataacagttatgaaacgtaaacattccccacgtttcatatatctactaaaatgtaagaacaatttgtatgtaagtgctcttatttgtaataaaatgaataattatttatttactatttgaatcttcaataggcttttatcgaactgttcggttcacagtgacacttcacagaataaactgatggaaagatatatatgccttctctcaccctctcacccctctcatcctcactcaccctctcacctgctctcaccctctcgcccgctctcacactctcacgcatgctcactcgtcagatcacgtgtgagtggctcgatgcaagcttgagagtgccaaatgcttgcaagcccttgcacttcctttcatatttgagcataattccctaaatattaatctaatttggataaaaagatctataaattcttgtgcttcccaagatgtttgcaagccaacaagctttccaagatgcttgtcgaaatgcatttacttttcttggctaatctcagaaccttactaatttttaggattaacatttgctcctgagttcataagagtattttcaagtgctcttgtaagcttttttatgctagtcttcttattcatgtcttgacataagaagatttttcttttggggtcctaaacttttgagaaggtgaaacttttccttagggtcctagatcataaggagttgaagacctctatttagggtcttgcggaaagcgcaggtgtgagcctcgttgcctagtttctcttgtggacatggacgagacggtgcttaaggcttctttactgagattgttattattattattattataacatgagggagatgttggttcgtcgtaccttcttaaccttaattttggaatttaagggagacgttagttccttgaatcttctcgaccttctgatggttgtaatcttttcattaaggaagtattgactcttagagcagtttcaacctcttctttgttacccattgggtgcttagggagcttttttttcctttaaactttgctcaacctttttcatcattctctacattcatgccccgcttttgaatatttgttagtgcttgacgactaaggatgcatcgaccctatgggccagtcatcctcttatgtgttggtatggataaggacgtatcggccctgtgagctagttatcctcttattagcttataatttttgattgacaagcgtccttctcatttttagccatagtactatttttacaagcgtctatttaagaccatttttggctagccaactcaagtcattctaggattattttcataaggtagatttggtgcctcctcattgttattatcttggactgcaagggtagctaatcctattcttgaagaggcttttttggcaagtagttattgtttgtgttggcgtcgcccaacacattttattgttccaccattttggttactttggcaatttcaatcgacaattatagtaaacaagtagagtgtatgggtggagggcgatgagcatcgcatgtaagatgaaaattaaatatttcattaataaagatagacccacatgtaagtacctgggtgcagttgctactactagaggactggaggtcaacttaagtgttccctttgatttaataagacatactaaacggcataagatacttcagggagccaacctaaagaatattttctg

SEQ ID NO: 79312 - DNA, 2897 bp, Cannabis sativa
  modified_base (2288)..(2306): a, c, t, g, unknown or other
ttttgaagcatttaatcacaattacctttcactgtgttgaaatcactgtaattgtgaataattatatgttctggacttaacaaaaattgtataaattaaactaaaaacctgaaaactatatgtaaacataaatgatttctaatcttctattgataacaaatcaggttgtattgaaatgggttttatttagggcataaaatcccaacagaatattgtggaaataattaggtgtttaaagtgaagataattgcaaacagatctttttaaaggttcaaagcacaccttgtggctaagggctttaatcagagccgatctgtttagaggttcaaagcacaccttatggctaagggcttcaatcagagcctgacatttattttttagagacgtttagccttgttgtaaaggcttccataatcagactcgtgttaactattactgtgtcaaaggcttgggttattaggcagttgtatattaacaacatattcttaattggtcacttgagtgaggatgtatacatgaagtagccacaggggttcgatcacaacatcaaactagattttatttttgcaaattaacaaaatctctctacggattgaaacaagcacctcatacttagtttgacagaataaaagcaacattgcttggttggaattttgtgtgctttcaaattgattcctcttttttctttttctttctacaagcagtactcgactcatcctagttcttatttatgtggatgatatattcgtcagtggcaacaactcagaaaaagtacaataattcaccaagaagctcaatcagatttttgctttgaaagatttaggtctcttacactattttcttggcatagaagtctactaagatgaaactgggatgcatttgtctcaattgaagtacatagaggaactgctacacctaaaaccatgctacacctaaaaccatgtcccacatctatgattatttacaaaatattatctatatcagatggagaaccactggaaaatcatacactctatagaagcttaattgctggtttacaatacctccctcaccctctgtcaggcctatgcttcgcagtaaataagtttagccaattactaaaggtatcaaccatgagtcattagaatgcgactaagagaattttgacatatgttaaaggtatgtgacagacttgcattactggatacttggatacgaattgggcttattgcctagatgatagaagatcaatagtagggtattgtgtgtacccgggagacacactagtgtcatggtcatcaaagaaacaagttgttgtcttatgctctagcatcgagttagagtacaggcccttgcacaagtctccatcgagctttcatggattcaagcactgcttcaagaactacaatttccccttcctagtatttctatcacttggtgtgatagcatgggagccagtgctttagcatctaaccttgtttatcactcaagaacaaaacacatagagcttgatgttcacttcatatatgacaaagtgcaaggggaagacactgcagatagttatataccatcacatgatcagattgcagattgcttgactaaaatcttaactcctacccgcttttatttcttaatcgacaaacttggtgtggttcaatccccataaaattttagaggaggtattaagaaataaaaaatatagaaagatgtaagggatttcttctagtgtaccttaacatagtcaccagtactagtactattacaattgtatcaccttatcattgggcacctttatatccattagaataatccttttgtattagtgccaatgataagaagatattttgtaaggattgttctaaaaacagtgtgtaaaatatttccctacaatgcaatctatcaacctcaatttgagataatttaacttatagttatgaaaattattgattatcatagttatcaagatttatttgttaaagaatatatgttcttttgggttggttacaagtacttgttttgaattgtctagtcttgaagaggatgttatggtttcatctaagctcttaattaattgataaatgctcgagcaaatagtatagatttgtggttgtgttttatgactctttaaggacttgtttggtacgttgtattaggtcgtattatattgtgttgtattgtattatattaaattagattatgtatcatatttttatataatactatgttaaattttaatttatactaaaatattatatagttaggagtccataaaattcaataccatatatagtcttacataaaaatattannnnnnnnnnnnnnnnnnntaatactatacaatacaatactatgtaatacggcgtaccaaacgaaccctaaaagcattggattaaacctgttaaaaatatgatcaaaatcaataacgttgacgatgcaatttttgaagactattcttgccatatagctttagtggtgttgtccgtaaccatcatgctaagtttcttgcggctatttccaagtgtaggagaaggataatgcagcttgagtttgcagaagctttgggtgtcaaaaaagctctaatttgattcaagtcgaatatatgacaacacgtgtttctttatactgactatcttgtggttgttcaagcaatttttggctagaactgtattgatgaacacttcctattataaagtcttatcttttattgaaaaaaaaaaataaaaatgaaaataatgagagattagcaatatataatttaccttctctaattattctttgccgcttataaatagcggaagaagatgttaaaataactattactcattatcattgaagccaaaatcagtatttatttagagcatcaaagacaataaaatacatacctcccataccatccatgagagtgattatccttcaat

SEQ ID NO: 79313 - DNA, 4129 bp, Cannabis sativa
  modified_base (3893)..(3895): a, c, t, g, unknown or other
gtgaaatgagttaaatagtgaatgatgtgaaatgagtcaaatagtgaatgatagttaataaatagatgcaaatttaatacccttcacattttttacgttcatgaataatagaataatttttttcttttttataataatttaaatttttatttttatttttagttttttaatcattaaagtaaaaagggtgaaaggcatttaatttgcatctatttatcaactatcatccacggcatcactcgcttcacaataaaaattatattttgaggggtattattaacaaatcgtatactatggaggtacaatttggcagtgtagaaaattcagggacaaaattaacaataataataataataataggccaagggacaaatagataacgagtaaaaagaatagcataaacgcttacagaatataaatattcaacagctctttcagggttgttgaaggcagcacgtaaagcacgaacaactgtatctcggtcccaacttcctccccccatatcaagaatctgttggacagtagactccaaaccacttcctgcgacaagatttgatgcagcttggccatagacatcagtttcagaactgcgaaaacccaaacacaaataagaaaacaagaccatcaccaaaagatacaatgaattattatacagcttagaataattactcacgaagcagcagtaggagctactgtagtagctgcaggagcaggttctggagcagactgcggcctgcacaatttaaccaatgcagaggagaaaaagattaatgacgattgtagtaggaaatgcatgccttaaggacctgattttaaatgtaaatagtcacactatcaattaaggaaggaaaaagcactcactgtgctgcagctgaggcaggaatctgagaagttgtagacggtgttgttgatattggagtaggcgcactaacaggttgggcctacaaaaacaaatatcttgataaaatacgtctcattgggagcaattacaatttttttagcaagataaatttctgcaagcagtcctcagtaataatctttacacattcagaagaaaacgaacaaagtattaaatggtaacaaaaattatattcttaacaccaaattgcaatcaagctactacaattataatgctggaaaaaaaaaacactataattcatgtctagtatatcaatcaacatatatctgtggattaaatttctaatttagttattttcctatagctcatgcctagtatatcaattaaaaaaaatgaacattctttcttcaaactgtacgcaggcaactcatactgatacttctttgagtactcatcataaacttggaagaaaaataatttatctgcatgaagaatgggaaagaaaaagcctaagcccctggctttgcacttacctggcttacggctccccctgatgcacttgaggctccacttggtgctgcctttgtctgcattgtttttttagcataagttagacagtcagagcaattgccgattattccaatgagaaatagatcccgattattcctaaatattagtctttcctaccaataaattaaaatattaacaaactacattgccctggattctccccatccttcaatcaatcaaacacgaaaagacaagtccatgtaagaaaaaacacaaacacctcagtcacaaaaacacaccttagtcagcatgatgactataaaactgttctccgcaactgcattttcttcaagagtagtcgtatccttgagaactttcccttgatgaataagcatctgttgagacgcagggtaaacatcggcaccctgtacggcttctatgtttttcttaacatcaacaatctaaacaataaacaacagtaacaacaataaagcattagaacaaactgacgcaataagcaaaaaagtcaagcgtacaatacaaagagaaaacatatactgtaagcttaggggtacaattaaaacataaaacccctttgaaataatgtatagaaacccattcctcaataaaagtcaaatacagattagcatcacacccacacacatccgtgcagtattgcaaacagtatccttatctaattagaaccggacctattgaaaccgaattcatgaaatcaaaaataaagacacaatctttcagcaaatgaaccgagcatataatataaaccggaaggaaggaaaaaaaaaaaaaaccctagttgacactcgactccaaaaccctaataactcaaaaccgtatccaactaccgtaaaataatcatggcatctgtaaactatttcatctattgacctataaaattataaggctacgtatcttaccgaatcttgggggttcacttcgatcggaaagttagtacccttgagggttttaacgaaaaccttcatcttcttctacgacgagaaaaaatcaccgttgtgattccccggcgataagcacagttgccgccggcgaaaccttctctcgggcaaagaaagacggagagagagaatcgagtcaccaccgaaagctaatttacagaaagcagcgagagtcctgtaagttcttgtttgtatatatataaatatataaaatataaagagaatttgggtatggtcaagttatggtaacatctatattagtaggtttgggatctcctttagggatagccacgtgtaaactcgtggggtagtattattacgtgtcgccaaataattgggtggaatgctacagctggatcagattttagattattgtttccaaaatggccttaaagattcaaaagtgtatatgtaaatgactatgagattgaattatatttgatgagtgaataaatatttgttactcgttttaactttgttcatgcatggttggtttactctaatgaaattttaatggtaataaaaataataatggaatgtaatagtaaatagtaataagattactactatatttagtttattttgtaataaacattgtaattagtttatttttatttagtttagtataaaaataaaatcaaataattaatatagtaacaaaaatatcctcattttatttattgttaagtaggggtattcattggattacctctaatgtttttggcttatttcgatacgatccaattatatattggatgttaaattttaccatccaatccaatccaattaatttcagtcatctatcgattcaacatctatgggatgttggattggatcagttctatccgttggatgtatttcatatatatttgttagtttaatttgggtttattcaatattttagacctattattttttggatcggatcagatccatccaatatgtattggattggattggatccatccaatccaaaacaaatgagtaaaattttaagattaatttttatatatacatgtatattttacgtataacaatataaaatctaattattcatccaaactaaatgaaaatactagttagttcgattggatgttggatgtattagatttttagacactgtatccaacattcaatccgatccaattggatattcaaaaataacatccaatctaatccgatcacaattgaatatctaatgtttggcaattaattgtaattggactagtcggttctcattgaattagataatttatacgcacccgagtacatttggtaaaaaggtaggagagagaaagtcttttgtaatatattggtaaggggtattataattacaccccacaaaagaatattatatttacaccccacaaaattatataagcaccccaaaattataattacatatttacgtttttgtgaaaggactaaaatagatacattgatatctttatttagtttattgatttaatttttattaagtacacccactatttttttttataaacactatactattatataattataaatttaaaaatatatatatnnnttttttttttgaaagagaatttaaaaatagattgatatgaatatttttcactccaaaattattaatggaaaatcagagatttatttttgagattcattaatggagaaatcattctatacaaaataaatttctgtgtaaatgtatttaatttagctttatattaatattatatatatgccttttcgtttttcatgaaaaacaaataaatatacattaggggctcgtttggaacgc

SEQ ID NO: 79314 - DNA, 2966 bp, Cannabis sativa
actgcctgtaataacataaaaaaagtacccttagttaagatcttacatgtacttgtatgtaagcaatggacataggtagctaaaaaatcttccttgacacattcaccattgcttagttggagattttacaaactaatttgaccccactttttcactcttaagaattttgtgtcataaactttagatagaggaacaaaataaaataaaataaaataaaatttaatgtgattaaaaaattaatattcagttaatttgtttttcacttttactttttattgaaatagcattttaatactttgaactacaaccaaacaaataaatagaatgaaaataattcaattacaatatccccgacaaaacatgttcttaatattttggaggtagtaattgatagatacaaagtagtacaagtcatttaagaatgacacaattaagaaaaaaaaaatagaacaaaacagaaaaaatcaaagtggagagactaaaaaaaacaaactacaagggataagatattggtttattgacaaaacaagatgttttcacatactattaatgaatagggtaaatagcggtataactattcaaagtttcaagtttataagtggcataaattcaatatttatttttaccggtataagtacccaatgtttgtaagattataaattttcttctaatttcgtcagtacaatctcttttattgtcttaaacatggcacatataatgctcagattctagatcattgggtctagacaaaaacatgtagcatcagttatttctaacttttcttttaataaattcaaaacgaagtatgtactaacgaaattagaggaaaattatagttttataaacattaggtacttaagccactaaaaataaatattgagtttatagtgcttagaaacttaaaattttgagtacttatgtcgattttctgttaatgaatattctgaattaattgaaattagatgctttgtgaaaacatatggacatagtaaatgatttatgaataaaaaggtccaaatttccattaaaccaatttattaaaatcatgcatatactactctacactataccattggttgagagaattgaataattttagtcttaccttgacagaaggcctttcaacaagaagttccatgataccattttcaacttcttgagtatcaactctctctttattaattgaacccacacaaggtttgtgtataccaaatattggagccactttcttgtatgctttgctaggtatatgccagaaaattacctcaggcaccctgtgttaattttagccaaaaaaaaaacttggtgaaacattaattagtatacttaccaatgtaaaactagtatattcaatttcaccaaatggtggtaactgaatattatgttaaatacgagcctgggcagctcatcatgaagagagaatccactttacaagtccaaggaggtccgatcttaaaaccatatggcaacgaggggaatacttcattggccttataaagtgatcaactttctattcttttattaatatgggacactcacaatgtgttgtttgggaagactactttaacatattgcaagtttgttatccagtcttctcgagacatattcctaattacgaacttatagactagttgagtatgtttttcgagtggataaaaaacttgtcttgtttgaagacttttcttctttccgcaaagattattacacttcgattattttcaacgaaattattattgctagaagaaaaaaagaaagaaagaaagaaagaaaaataactattgttaccttgaattagggttgatgttttgagatgtggagttgaaccattctacttgagcacttgaaataagttggggataggatccaccaccagagtccaagaaatagagaaaagccactggtgagtctgaatcttctggtgatgagagtttgagaacataatttgacacacttggccaaagctctttagggccacttttagaatgtgatagcatatgattatgcttaacctcatttttcatcaactccaaacgagttgtacccttaaagctacactcttcttcccctgatattatagaaacaaaataccaaaatagaaataaaacttacgctgcgttactatatattactcttatttgaagacttatcgtaaactggtcatataaaataattacaatgtacatcatcatatcaaataatctccttttcatggaaactactaaagatttatcctagttcggccaaaccagaagaccaacattgagttgtcccctcaagaattaaagattttagctgttataaaacttttgtacgaaaaatatttgtagagaattgctattcgtcacattaagatgttcaatacactaacataacgtcctataatcggtattaatatgctactttttttggtgcttgacagaaaatttctcgcatttgtatgatataaactttagtaaggaagatatatataatatatggtcacctggaaaagtagtagaattgggaagagggcaaagaatttggggaatcccaggtgttgaaaaccattgaataggccattgaaatggtgcatcatcatggttcccaaacacagtagcaaatggtatgtccctctctcttgttggggaaattgcttgatcccaatacaagcttgcatttcttattcctatgttgtttgctgttataacatctcccaagtaaattacaaaatctgcatttacataatcaaacataaataaataaatttactttactatatatatcacattcattctcaaaacagaactggttcgatcaaggaatcaataaccaaaacagaaatgaaattaaaaagcacaaacacatacacggttcaagtgacgaaaccagcctcaagggcccttgtaatctctttattcaaaacttgtttcaaatctatacaacaatggagtcttgctccatgaatcaactctcaatagtggacaaaa

SEQ ID NO: 79315 - DNA, 2783 bp, Cannabis sativa
ctctctctctctctcttcaatattttgtcccttatagtgataaagtacatgtccacacatagtatgttggtacgtcaatcatagtgtgtaaacctgtgaagaatccaatcaactgaaagagaatcgggctcaaatcttggtgatgctctgctacagaaaggatacaaggcttagagatctgagtggaaggagtcatttaattctgatgcaaccaatgtaagatttcttgaacattagaagtcccaacaaatgagtggccacaaggagaatgtgggcttctataggttggagcgatccagcaggagcattccctatcgcacgagttccacgaagtacacgcatgacttcaaagactactacttcttcaccttcatcttcctattgaaaagagttcctacccttagtttggattttaatcttacaagtaagtctcgttctttcctttagattttaaaattctatttttcttctgtttattacattttaatctcctactttttgtatttgctagactgccttccccaattgcctctgactacagagttggaagagaggatgaattcttacaagtctttctcacccaaaaagttgcaagtggagaaacttgcgaccatagagaacctctgagaagtgggtcatatcgccccacatcaggatgtggctcatctttccatgaaggatgcaatctaggatgctttacggggggacccggacggggttaaaaagccatcacagttattaccgctgaagaggctttaaaggcggtgaaggccaatgagccatggcaggcagattggaggagacaattcccagaaggcctaagcgagggtgaagaacttaccatccacttcaaggaggtggtgcgtaatgagggtgcttcgggagcgagtactttccgtagtggtgagaaacccttccatttaattagggcttccagtatatatgattttgagacctttagtcaatgtggatttgattcatatttcttgattttagatcgtcataagtattcatggagtaggtctatagatagagtagattgtatcgtcaggagtcctaaccatttcattccacttgtaaccatcatgtcacagtggatgcatttagtaaaatttacttcccaggcttcttccaatacgagactaatttaggtcaagaagatgttactctttttacaaagggaaaggtcagttatattagaattaatggtttagagcctcttaacgtcttccatgatgatgtgttgtaaaaaccatatgatttgttaaaatcttgtttgatggatattttgtttgctttttgcagatcaaacaaccactctacaagtggggcacctaaacaaattcttgggcaacgtcaaaatctatctgatgagattcaagatagtaatcctaagggtactatagaagatccaagctatagtgatcggatagtaattccctcggtataatacaactaaaaggggagtaggtcattaccgctatcacaaaggggtcgaacctatataacaaatcatattgtctatttgcttttttattcttatttgtgcacacacgtggaaagcatcagatctgcatgaccttgttgtcggttgatcactttttgaggtccgaaatttggtgctttcattgagagtgtggatatcatgatttgatcaaacgccatggtgagcacaagaagaactcctattgcaccatctgcatctttaggtctccgtcaagacccaccgattgaagatccagacactcaagttccagtcacaattggaatccccatgaatactagagatgtggtgaatcccgtcaccaaaacaagcgcaaaaagtctgccaccacagctcgccaacttgatgcgagcatccggatggatccaagtagcaggcccacacctctaggagtacatccaccaatggcgcctcccactgaaagaagcacccaggggcgatagccccctagaataatgattgaacctcaactctagttctacactttaaagacatgcccgggagtgggcatgccagaaattggtgaaactcacctggacctaggagaagaccttgagttggccagactcagggaagttgtaggtcattcaggcctaactaaaaaaaccacgcgctactaattgcggtgtatttactcagtagatatgtgaattcctaggatggacggatgactaggagtacatccttcggtctcaccaggtagaattagatcgcaacaactggaaggccagtgatctaataagatagttcaattagagaaccgatagaagaggccatgatctccttagagaaacacttcaaggaagactaccgtcaacttccttaggtactaggaaggatcttccctgccataaggatgacagaccttttctcaaaggtcaaacagtgagaacagctagatctcgacaaccagcggattaggggcaggctagggatctctggctcaaaagcaacccccatagtgcaaccactgccgaccaaccatcaacaggagtacctatttgccggctagggtacgacacttcctcccctaggggaatgaggtgcacagagattgatctttcaccaatgagcactgagagtgggtagaaacacccaaaatggtgattcaagaagtgaaattgatcacttcaggcatttagatccatcaaactcatgcaattggtgtgtgtttggttttgtgccctaaataaaacccatttcaatataatcatatttacttattaataaagatcagaaataacatttttatgttgcatggtgcacatgatttatttca

SEQ ID NO: 79316 - DNA, 1562 bp, Cannabis sativa
aaatagattttatgaattatgaacttctttattagtttcttcttttgatatggttataaaacctggagtgagggaaataatttgaataaaacaaagttaatatctgcagtacatcctgataagacctcgtaaactgtttaaacaacaaccagatcattttacttttcttaatcaaatttttattttgagaattaaaaagaaacaaaaacaaattatcccatgtaacaaaatcactatataaaccaagaaacagccttttacttttacatccaagattcaattttcaatgtctgtttggagtgagaagtagggaacataaaaatgtacattgatagagctactaaatcaacataaggaagaaaaataagtgaacactacaaagaaaagctcacattggtaagtagttagtcaaaagggtcaatccggggatcatgctcacttgccattaccattccagtgcacagacaggtagggcacataacctataaacaagatgatcaatcacttaatgaagcaaaggtcaattagtgaggataaagaaaggaccatgatttttgtacctttcctgcaccggagcaatttaaacacctttgtgttgccggcacttgcagagggcggtcagatatgttagatgttaatatgggctcaactttcacacacacaccacttgctgaacatctagcacaggccaagtatcctgtacatgcatgattatgcaaaatctcaataagaataaaagatttctaaagctttacaaaattgtatgatgtatatcattcatgaacccttcaaacaatgttgaaatcaccataacaatgattattgacaaaagcacaaaccagttccattgcaatatttgcatcttttcttctcttgctgttcaacattgttggcttcgattaacatcagcgctgaaatgacacccacagccccaccagaaaaggatgctacaatcggatcaacctgactgaatccagtgagtacgaagaaaagtttaggatgctagccaaaagttctgatttccattttggaaaaagtgaaaggaaaaaagaaagagtagaataccttaattgcataggtaagtgcatactgcgaatgaaatcttcatatgaggtgcctcctaagcctagttttagttctaactgccaagaaaaaatcccagttgaggaaacactacaccatcctaaagactgaaaaaccttttacttatggttactagattaagaacttacagttggtgcaataagtcctccaaacacaattataccagaaacaaacgataaactggtcaagtaaagctgcttcaatgtctttggtgtctacaaaatcatatacaagcctagtcaaaaatcagagacctccattactacactctttctattccttttctttttccaaaacaaataaacaagataattaatgcatatgcaactccatagtcaagcaccaaatacacataagatttcttctttcagaaaataaaagaaatataaagaaagatttgcagcataactaccaaattttttgggtttataaccagtagggacctattggtttctttt

SEQ ID NO: 79317 - DNA, 2545 bp, Cannabis sativa
gaaacacagttaagaggactgggataataatatttagcttcataatttcatcaaacgcattaggagtatttaatctttgattatttgaccccaaaatgtccaaaaacctataagatatatccattttagctaaattattattggatatcctaaagtgtggtgtcataaaagtccttatggggggctcttctttctatgtgtagttggctatgacccaaagaaaccttccaagtttttgtcatttgctgatcttcacgactctatagcacattattatatataaaaattatttgtctatgattgtttatacgtgctagttataactttttctaaagctttatttatttttatatatcttctaagctattatcaatagtgcaacatctaggaggttttgtcaaggctttaccctaattaattatataataataatcaagtacttggttggatatatacaaggcaatattcaattgctctatcttaatatcaatttcaaaaatggtggataaaagttgttgccactccatgaattctgttctttcagcaaaataaaatactgattcatttgaaataaaaaagaaaagaaaaaaaaatgaaaaaaaaaaagtagaaaagtagaaaagttcatgtactgcaaaagcaaatagcaaaagaaggtgtgttttgttcttattcaaacttctttatttaagtcaccatcatttaggtttaataactcttgctgggaaatttgggttcacactagccactactattttgcaagaaccatccaaaaaaaaatggccagcactatctcttatttctccttttctttttctatggagacttgttcaaacgtggatcccacctaacaatattttccttgcagtttccgtctacaatgaaaattactacaagttttatttttgtttaatgcgtaacagttttctttttatttttttttaatatctcatttgaattttttgggcagcaaagagctagtgtttattatttatttatttattttgttcaatcttttaagctttggtattccgatttaacctttaccttttccattgttgttgttcatttctggtcttaactactttgaaggtcctcatcatcatcggccatggatatggagtcagattctttaacaaagatgaaaagaaccaaaacccatcaagaggattgtcaaccctcaaatgggttcgaaaatctgccgccggagatcaccttcgacatactttcacagctcccaataacatctctggtccagttcaagtacgtctgccgatcatggcgtctgattggccaagacccgaatctcctcgaagagtacagttcacgaacctcagacgaaaacccatgtatcatcttccactacgattccccaatccgaaacgagctcttcttcgtggacctccacggcgactcttacagagaccaaaaccagagtcaccccgtcagaaagatcagaacaccgtttagctcatccatgcccgaatacgatgtcgttggatcgtgcaacggtttgttatgtttgtctgactccttgtacaatgatgctatctatatatacaaccctttcacaagagattacagagaacttcccaagactaatcgttatccggaccaagaggttgtgtttggcttcggatttcatcctatcaccaaggagtataaggtaatcaaaattatctactattacaaggatggtaataaaggtcaccaccatgtgagccatcgtttcagagtaccaacacaatcagaggtccaagtactaactttgggaagtagttcaagcaggtggaggagcttaggcaaagtgtctcactaccttcatcattgcccagctgtcttagtccaaggaaggcttcattggatgacttgtcgtccaaggtaccggaccggtcgaaacctggtctcgttcgacctcggagaagagaaattttgtgaggttgcgaaaccagatgttatgggcatgaggcggtgtgactaccatctggtggctgtgagaggttgccttgctgcagccttctatttgaattatgggaaaatggagatttgggttatgaaagagtatggtgttaaagaatcttggactaaggagtttgttattagaagtaatatttccaaagccattaaagaagtgaatcagtgttcctccattgcttgtggtagtgtgtccaaattttctgtgaaaggaagacctgttcgggttgtttgtgttttgaagagtggtgagattttgttggagtataaaagcagagctttaactctttataatccacaaactggaaagcataaggatcttgtgtttcaggggatgcctaattggttccattcaattgttcatgcgggtactctcaaccagattcataccctaattggtacgtaataatttatatacatacatataagtcctctatttgtgtcttttcaaaaaaaaaagtcctctatttgtgtgtaattgaggaaaaaccaccccccaagaagaaaaagaaaaatcttttcaatatatttagactacaattttcattcttatattagtgatttttatttc

SEQ ID NO: 79318 - DNA, 5159 bp, Cannabis sativa
gatgaggttagaggttaactggttaactggataactggattagttatccagacttctaacatgccctggattgcacaaattaacctttctaatccaatctagtcctgcgtaccaaacgggcccaaaaagaaaaacccgtataaaaagttgagaaagacttctgttctggtcaaatcagtcctttaagagattgttcagaaaaaaaaaaaatcagtcgtttaagattctttttttgttttttctacttctcactccgtaccatctctcagtctcagcgggaacagagagcaagaaaaagaaaagcataccaaaatcccttcaaaatatatttcagaattttctctcttcctccattgtaagtattttactcttccttacatttatattaaatttttttttgtaactgtgtacgttgcaattgttatctttctataatgttacacttataatcatatgtaaatgtgtgattttttgatcgagtgtattttgggatcacggggttgcatgcgaattaaaaatgtgattaagcagttcatatttggctcaaatttgttttttttatccgtaaagggcgagacccagaaaaagtttgagtctttttagtttatttacaacttcttttaggattttcaaccagaaaagctctaaagttggtttgatttgggggaaaaatagttgtggattttgatgagcggtagttttaggcaatgtctatgtgctttttgtgaactttatttttggggggtatttttctctttttatgagtatcattgtttttcaggtttttttttttgaatgaattgtttttcagaatttattaatttattgtaaccctaaaaaagatgtatctgtgcacattacttttcgctgtagttgattattcggttcggttaaacggataatttgattttattttttttagaaatctgcataactgtagctggcatgagcaatatgggatggttaactctttgtttggtttcctagaaaattagggagaggagaaaactaaaagatggtcatgatagagatttgaatgtgggttaatattattaaattaagtggatggtttgtttcagtgtgatggccaatccaaatataaatcaagatagtcaatgctaatgaagattataattccaaactttttattataggacattttgtatttagggttataacttctccatgtgttaaagtggaaggtatgcaccagtacatcctttaatgaagatttatttttgttttattatgtttctgatattgtgaatcccattgatatgtattttttacagaggaaaaagagatgcatagcaaggttaaagcttgcgcacaatgcactcgctcgtgttggttgattcatgaagggaaacctgcttgttctgcttcctcttttctcaaaataatgtttgatatgcaagaatttgaatgcccggtattaaatgcgtatccatgatatagttgtagggtcttggtttttatttgatgattggaacacccagtattacctgataatataaatccatattattattttactactttttgtttactcaaaagactaatttcatatcaattgcattagaagttgccgattaacttggggaactatgttctagttcaatgaaattatctcaagccttttgtagtgtggcttgcttagttatcttgtatataaataaatgtagtcaatgcaagattgatatgcataaatagtggtccagatttcagagaaatatcatgggcttgcttcattactttttgcattatggtcctaacaattataagtgtattcacatagatatattatgttaccagaacttcatttttcacataactaatgggtattggggtctataactattttaattttattgcagtttttgcctccaaagtttgttaaagagttatcattagtggctggtcagaaagctattcttgaagatgcatatggggagcaatgggatgtgagaatttccagagttaaaggctcccttgcttttgaacaaggatggagtaaatttgcatcggatcatgatttggaacttggtgattttgttttgtttcttcacataacagagactcatcttgctgttaagatttatgataaaacttcatgtgagaaactaaaatttcctcagagatcaagcatcttgactaagaggaaaagagatttaactacaacttctagtgggagaagtggtccatttggtaccgctgatggaaattccattgaccgtaatggtattggcacctcttttagttctcgtgggactgcaaaaaatgttagaggcagaaatgaagtgattgatgtagtgaaagaacccattgtctcacaaaacaagtctctttgggattataaaaatgaaatttctccagcagcccgcaaagtagaatatattgaagaaacatgctgtataatgaatagagaaaaagaagaagaggatcaaagaggtcacttggatttgtctgttcttgaaacgttgaacgatgctggcagccaaagaaaccacaaagagtccttaacagctgaaagatttcctaagctatttgattctcaaatgagatctcaaaaggccgcttgcttgcctaataaagatctagtgaccagggctcaagagatattaaatgcagcatcccctttacattcatcaaattgtgagaaaaagggatctttttctttcaaagattattctaatgtaaagacctctggtactcccataccatcgtctgtagttaatcctttcgaaaatggaaagaacacttttaatatgtcaaataaaggaacaaaagagtgcctggttgctacagctgcaggttgagcagaactctaccaagttcttcagttgtacattatgtttatgttattttaattttgaaaatatttaatttactattacaatcaccaggaaacaatcaggtttcacaacccaaagaacagaattggaacaatgagcatcctactgccaaaaatcacgttcagggaaccccagttacttctagtattttcactcactttggaactcaaaaattctcaatcttatttgtggttctctaattgttctcatttctcttgtttaaattgtttggtatctcctccaataagattttactacttctttgaacaggtaaactaatgaagatcactaaagaagagcctgtggagattgaatcagaccctgaggaacctgctcaaaaactatctagtaaagtcttagttcttcaaccttcattacgttttctcttgtagaaatctatcaagtacacattattttgtttactctctattttcaaagctttgtatttgtatgcatatacgaacatgaatgatccaaaaaaatgcaggaacatcatttcagaatggttttggtgtaagtaaagatgataaggttcagccagtggtgaaaactgaaaattttgatttcgatggaggtcctacacccagtttttcccctgttctggcgacaaacagtaaagcttttattgtatgtcaattgttttccttttatgagcttttactattttgactgctgatatggttttcaactgaaactcattcgatttaatatgtttatggtaggctaaaatattttccatgtgtgaaagggtggactaaatatttcgacgtccttgtttttcttcatctgtctaactagttaaacctcttttcttgtacttttgcaggagttgccagaacgtctgccatttcccgttgtgaagggtaagtatgggtcggaaaggaaattagtatatttacgcagctcttcttcacaattgtggccagtgatttaccatgagaaacttaatgtgtttgttatatcaaatggttgggaagctttttgcaaggcaaatggcattcagcctggagataaatgtcttttcaaggttgtaagtaagtctgaaggcacatattctgtaagtgttgttagacaataggaactaactaggaagataactaagttcttttgtacatcattggtactttatgtatctgatctaagactttgtggtacaaagcttatggcaagcctttttgtgaatagtcctaacaaatgtaaaggctagttttgttgacaaaatgcctacctcaaggataaatgaaactaaatgaaatttcttgtagtagaaagattcatattcttgtaaaatgccatcagccataaaccccagggtggtctaggggtaagcgggagtgtttgaaagtgcgtgcagtcatttgtttcaagattttgaatccctacaaacttggggccactggaaggtcttgtcgaacatttagggctaaaaactcgaaaaaaaaagtcaaagtcataaagatgactagctttacagtcatctaaaattttaaaacattgctattggacattagtggtgcttaacactttcttagacgtgttaccttgtagttggcgatactctttaaatgttattacattaaattatatgatacttaatacataattgcactaataatattgacacgtaggatgatgctagatatcagtagcacctttttaacatttttcaaaattttattgtctttgcattcgaaaataaatgttatttacacaaaaagttggtcatagcttttcttactagataatctcatctcaacaaccattccaaagtcttttaatgtgaatagctttggttttagaatgaatcgaaaggagattatttgctaagaaatttatggccagcggcattgaaattttgggttattatgatcttgaatttctccaatttttattatctcatataagctatgtccttaatcttacatctatttgtattaaaaaaaaaggtacaacagttatattctcacagcctatctcagacaaaactacaaaataagtactaatgaaagcaactacacattttgattcactaccaatgtctatacaaagttagcattgaaatttgaaagattcccttgtacaccaatggctaatagatcaactaatgtctacaaatctaaaaatgagtctttctagatttcccaattcccaccacaccttgaaagtttatacatttagatgatttcaattgttgggtctgcaacagttgtagcagacacttgattatgctctttcacaaacacttttctcattatcatcaaccacttagtcaacccaactaaataatcataaatgttaagagca

SEQ ID NO: 79319 - DNA, 4010 bp, Cannabis sativa
gtacgattcactcatgggacctaagaaggatgtggtgctggaacaaatggatgagttcatggagaacttacgatcggaggtgcacaaggaaatcgcagaagtgcgatctcagctgggcaaggaagtctcggaaacaagagctgaaatccaacgactgccggagttgttgatgacccaaatgacccgattacttgcagcgggcaaaacgcagattgagataccggttgcgggcggcgatcgacatcccccagttatgcccagaaatggttcgtcttcgtcggagccagtagaacccgagatgagcttttcccacaccccaccgcagacgacttttcccccacaacctccgccccacccgaatccttattttcaagctcaaaatcacggtgccgatgtccggccgccgagaatggagctgcctgtgttttcgggttccaatcccgaaggatggatttaccgagctgaacggtatttcctcattttccgtctcactgaaccgttaatgctcgaaacagccatcatcggactggatggggatgccctcacctggttccaatgggaaaaccagagacggcccattacttcttgggaaattctcaaacgaatggtgttgcaacggtttcgcacggctccgatcgggtcactgtctgaggagctgttatcagtgacacaaaccaccaccgtgcgcgactaccgacttcgatgggaggcagcggcgtcgcgacttccaggggtgccggagtatatcctggagggaagctttgtgaagggccttaaggagggaatcaaggggactctccacatgttacaacccgtgggtttgacccacatcatggatacagcacaacgaatagaggaggggaatcagctaattcatttgggtcaaccaattcgctccactaaacccaacttaagtcccattgttcctaatcgcccaacccagaatgtgttccacccaaaaccccatacagccacactaacatcaccaccttcgcaaacaactatggtgacctcaaccggaaaacctcctactgtgcgtagaatgtcagagaccgagtatcaagaaagaagagcgaaggggctgtgttttcgttgtgacaagaaatatcaccgcggccatgaatgtgaccaaaagctcctacaagtgttgttgttcgctgatgaggacgaacctcaaccagttgtggagtcaccaccaccatctccgacggcagaggaagctgaaactactgaggaaacactggcgacactctcattgaattctctagtaggtattacttcagctcataccatgaaacttgctggaaaaatagggcagcaacctgtagcagtgttaattgatagtggagctacacataatttcatttctcttgaggtggtagaagctacggggttaccaatcactcagacaaacgggtatggcattcttttgggtaccggggataaggtaaaagctgaaggagtttgtgctaatgtgtccttggagttgggagctcttcgggtagtcaccgatttcttgcccttggaattgggaggtgcggatgtgatactaggagtgaaatggttggagaccttgggtaatatgcaagttaattggcgttccatggtgatgaaattcgaaagagatggaacttgggtcactttacaaggagaccccagcctttgcaagtccccaattaccttaaaagcaatggttcatacggtggaacaggagggctatggattttgggttcacttgggatctattcatgggcacgaaaatcaacaagagatcaaagtacccgcaccggtggctggtttgttagaaaagtacagagaggtgttcaatatgccccacggattgcccccaaagcgagacaaggagcatcggatcgtgttgaaggaaggggtagggccaatctcggtccgtccctatagatatgctcagattcaaaagggagagatcgaaaagatggtgcgagaaatgctggcatcgggaatatgtgtgccgagtacaagccctttttcaagcccagttcttctagtcaaaaagaaggacggtggttggcggttttgtgttgattatcgggcactgaatcgtgagacaatagcggacaagtttcccatacccgtgattgatgaactcttagatgaactccatggagccaaggtattctctaagatcgacttgaagtccggatatcaccaaatacgaatggctcctcaagacgttgagaagacggcgtttcgcacccacgaaggccactatgagttccttgtcatgccatttggcctcaccaatgctccggccacgttccaagccctcatgaataccatatttggggatcttctccgcaaaagtgtactggttttttttgacgacatcttagtgtacagctcctctttggagactcatgtgcaacatttggaggaagtcttacgacggttacagcagcaccagttgtacgccaaccaaaagaaatgcttcttcgggcaagatagtgttgagtacttgggccacatcatctcagcacaaggagtgtccgcagacccttcaaaaataacttctatggtccaatggccggtcccaaagactttaaaggagctccgagcctttttgggattgacggggtactaccgaaaatttgtaaggaactatggaactattgctcggccactaacggaccaactcaaaaaagatgctttcggatggaatcaagacgctcaacatgcgttccaacagctccaagaagctatgtgttcggtaccggttctagctcttccagatttctcaaaaccgtttgttgtggagacagatgcctcgggggttgggttgggagcggtgttaatgcaaaatcagcaacccattgcgtactttagccaagcattgtctccaaggtcgcaagccaaatccgtctatgaacgagaactgatggctattgtgttggctgtccaaaaatggcatccttatctccttgggcgccgattcgtggtcagaacagatcaacgaagcctaaagtacctccttgagcaaagattggtggcggacgagcaccaacggtggatgactaaactcttgggttatgactttgagatccaatacaaacccggtctagagaacaaggcagccgacgccctctcaagagtcaacaacaacacgacattggcagccatttcggtccctaatatcatctccattccggaattgcaggcacaagtaagaaaggatcccttgctgtccaaggttattactgacttggaaaagggtcaagatgggggaggatacactttgattcaaggggtgttacgtttccgaggccgacttgtgttgccatctacttcaccttgcattccgttgttgttacaagagtaccacggcagtaagattggtggccattcaggggtatttaaaacatttcagcggctggcagcggatctttattggccgggaatgcgcaagacggttcaacaatacgtagctgaatgtgcggtttgccaacagaacaagtatctagcacaatcccccgcgggaatgcttcaacccttgcctatcccggagcaagtttgggaggacatatccatggacttcatcgaaggattgccaatgtctcacgggtttgactcaatttttgtggtggtggatcgtttgacaaagtatggtcattttattcctctacaacacctgtattcagcagcaacggtagctgaagtttttgtttctgaggtggtgaaacttcatggttttccacggtctattgtatcggaccgcgacaagatctttctaagtcttttttggaaagagctattccgtctacaaggcactagcttgaagcacagtacagcctaccatccccaatcagatggccaaacagaagttgtcaacaggtgcttagagacttacttgcgttgctttgttggtgagaacccgaagaaatgggttaaatggctggtttgggccgaatattggtataacacctcatatcatgtgtcggctggtatgacacccttcaaggctctctacaatcgtgatc

SEQ ID NO: 79320 - DNA, 3850 bp, Cannabis sativa
  modified_base (3161)..(3161): a, c, t, g, unknown or other
  modified_base (3227)..(3245): a, c, t, g, unknown or other
ctctctttgtcaaacaaaatagaatgtaaataagagcactcttcatattcgaatttctctctttttctccttgaatttttcgaagcctatagtgattgagtaattatccacacaattcaaggcaatactcaagataatatggaagattgtgtagtttttattaactgaaagagaatccaagttcagaccttgatcatattctgcaacagaaaggattaagagttagatacttgaacgaaaaaaaagtcatatcattctgtttaaggttttctacaatttttatgtgtttatttcgttgtttcagagaattaatatttaagttattaaattataagatgttagattatagtattattataaataaaaaaaaaatcaaaacgtaaaaataaattttttccttgttatttttatatatccgagtgttgtattattgtacgggacgttccacaattgtgaagatcgaactcatacgccagccgttggattaaatttgatgaaggtttctttcggtgtcgtcgtcttcgtacttccccactcgtcgtgttgcctctctacaaatcacctctcatatcaaatccatctctgaaacttctcgtcgtttaaggttcggactcctcttctacaggtaccgttgttaacttccttcattccctctcgtactcgcatttataattatacatctatatctgttctttttaaaatcgactctttttttttcttgtggaaatcaaacagaaatttaggtgttcattggattatacaagcttttgattattctgtatagttctgaattcatttatttccattgattttcgactgtatatttatcattggttctcttgatatggctttcaatttctcaatttactagttaattgatttttcaaatctggaaactcatttttagggtttctaatcacattttagggatattgtcaattttgatatatttgggtgcaaatagattctaagatttggtttttacctttttcagtgtcaggggattgagtttctagctgtgcaattaaagtttagggtccgttattcttttatggaatttgaatgccaggagactattagggtttctgagaaatcggcattctttgtagtaaatgcttgtgaagaacaacagattgatcagaatcaggttgattccaaaaccaaaattgataaagctgcaagttcgaagctggacataaaatttagctgtaagaaaggaattttggctggttgtagtcagaaatcgagtaacgatgttcttcctaatggtcacaggtcgatgtccgaccttcctgcagcattgatatctgaaattctggattgtcttggtcccaaagatttaggtatcatctcttgtgtatcgacgaatcttcacaggctcgcatcagaacaccatgtctggaagcaattctattgtgagaggtggggtcttccagccattccagcaaccatcgatgcagggcttaacaatgagaagtcgtggagggatttgtttgtggaaagagagtttaggagtaggacttttatggggcgatataatgttgatgttttgtatggtcacactgaaggggttcgcacagttttccttttggcttcggctaaacttatatttacttcaggttatgattcaattgtccgaatgtgggacatggaagaagggttgtccattgcatcatcacgagcccttggttgtactatccgggcaattgcagcagatacaaagctattggtagctggtggcactgatggctttatccactgttggaaggcagtggagggtatccaacatttgtttgatataagggctcctcagaatcagaatacccagttccgtctatgggagcacgagggacccattacttctgttgctttggatctcacaaggatttatagtggatcatgggacatgactgtccgtatttgggatcgcttttcgcggaagtgcttaaatgtcttgaggcatagcgattgggtttgggcacttgttcctcatgatgcaactgtggcaagctcatctggttcagatgtgtatgtttggaatacttcgagtggggatctgatgacagttgttcgtaatgctcatgttggtaatgcatactctctggctcgaagccacacaggaaatttcatatttacaggaggagaggatggtgccattcatatgtttgagatatctgatcattgcattgagactgatgttttgaaagttgcaacatggattcctcactcaggtactgtgtattcgctggcttttgagtttccatggcttgtctctgcttccagcgatggaaagttgtcactgattgatgtgcgaaagctgcttaggactaacaaaggtgcttcaaagagaagtgtagtcaagcaattggataggaagagtttagccaagaaactggatcaatctagtgtagagcccccacagagaatgttacatgggttcgggagcaatctattctcggtggatattggtgcagatcgaattgtatgtggaggcgaggaaggtgtggttaggatttggaactttactcaagccttagaaatcgaacgtagagtgcgtgcactaaaaggaatacggttagagaacaggatgaggcggcgcaagcatcagttagagatcaacaataaaggtagccacactgaccaatgttcagttgctgccaagaagaattcagttaatggcgataggaatagtattaggtacaacaaacgcgggatgaccaataagctgaaggcctaacagctgttgttgaagtccccgcatattaagcaacacatgatttattattaaaaagaatctttggcacttatgtttattatattattactagtttgcactaataaatgcttttgctgataacacaacgagtatagttcatttttagctacatatgccaatatatggcatcaatgaagttatgttggctgctaagggatgagtttctaaagtcctctcgttagccaaataagcgtatctaatgtctatcttcattcatagacttgacaatagaaaaaaaaaaaatatggtggcgtttagttgaaggtaatgaaagggaatggaaaagaaaagaaacaatctttattccattcttttgtttggttgcatattaaagtattgaaatgtcattctaatagaatggtttttccatcattttggtggaatnactattctattttgaaatagaaggtaagactatttcaatctataaaaaaaatttaataattttttnnnnnnnnnnnnnnnnnnnattttaaattttatttcatttttaatctcattcttatgtttacattctttccaatcaaatgccaccgatgtgtttgattaacaaatgttgattttttttatcttttgtttgtatgttagatgttgattttgcaacatgaaaatgtaatttattgctaaactcaagcactcttatttttatggacgttaaataaaaaaagaatagataaattttaactttccaaatatttctttaataattacaaacttgttcattcagtggtattttcttcattttgtaaatagtttcaagatttctatataattggaatttaatttaatataattcaagattttagactaaaaaaattaaaatttaagatttctatatttgtaatttttttttttttttttgaaagaaactatatttgtaattttagatttgatgtttgaatcgtaaatttattatacttattacttagtttggttttagttagtttaaattagtagctcgtattcacagtaatgaattattttaaaaaattaacaaaatagagaaaaaattgtaattatttccattagaggaggcaaaacccaaaagattaaaattctatttattcaataaca

SEQ ID NO: 79321 - DNA, 2004 bp, Cannabis sativa
aatatgaggaatcttaaacattatatatgttatacgtcgttttatgatttttcatattttaggatattaaattatttatgtgacaatcaaacatacatgttattaaattaagattctggtaaaacaagttccaacacactcaccatagtccttcaaggaagtggcttaccttgggcaccattaagatggctcgctcccctagccctcaaaggaggtggctcaccttacttagcctccgagaaggtggttttcccacctttggcaccatgaatatggctcgcccacctagcattctaaggaggtggctcgccttagcttttgtgaatgtggtttacccaccttgggcaccatgaagatggctcgctcacctagccctccaaggaagtgacccaccttacttagcctctgagaaggtggtttgcccatcttgggtccaccttactctccaaggaggtggcttgtcttagtctctgaggcggttctcctgccttgggcaccatgaagatggctcaccgtacacctacctttccaaggaggtggctcgccatacttagcttttgagaaggtgggtttcccaccttgggcaccatgaagatggctcacccacctatccctccaaggaggttgctcgccttagcctccgagaaggtggtttgcacacccctgacctcatgaaggtggcttgtccacctagacctccaaggaggtggctaccggtggcctcgaaacttggtaaatatttcaagcacaaggaggaaagggtacatgatgcacataggggacaagttgtggaggtgtgctcttcgtatgttagtacgacctgaccaccattatctctgctccattacaccagctgcacctgcagctgcacctgacactatcagagtaatacatggtccccatagggaccatgtaggtatcaacttgtaaataagggccatgagagccccatgtttatgtttctcttccattgaataaggggttagaaaattaccatttgtaagagagcttagatcgatattcaatataacacgattttactccattgatgctcttaattaatttctcttaaatttttcattttagccttttgcatttgatttttaagtaaagtctaattgacaagttcttaccatctacaataagagatgaaagaaacaaatttttttacctctgtcaactataaataagggaaataattaaaattattgaagaaattaaagatgaatttttcttttttctttcaaaaataaaaataaaaattaaagatgattttttttcagggattgataaagatgttccactagatatatatatattcttgttattgttttgactcatattccccaaaatgtggatcccgagctcgatgaaaaaatgagattacttctcatggactcgttgagccgtcgagaaacgaaataagacttacatatctaagtttaacttagacgtagctcgcttctttctgggtgtgacaaaaaataggtcttattattcagacatattattaacttaacattcctttgagaattctgatacttccaagtcaatcttttcatattttgcttgtgctaaatattttccgattatacttgaaattttttaattattaacttcgaataatattagaactggaagtggaataaaaagtataatccatgaatacaataaatacatttctttttgtttgaaaattctcccaatataattattttttttacgcgtgatgggtttcatattatatttactcgccgaattgggagaagctgtagatattattgtggaggtccactacagattagaagttgttgaaaaaagaagatgtttcttttgtcccttccagacaatcactacaaaaaattgctacttttggtgtcaactttttaattacaacataattttcacatttttaatcacaataaaatgttacttgtgactaaaacatactatttagatacaagttgtcactaatattttagttttagtcataacaagtattgt

SEQ ID NO: 79322 - DNA, 3346 bp, Cannabis sativa
ttctctgaaattggaaacattcacaatgtagaaaaaagagatatcaagaataaggataaaaagtaaacaaatgacatggctgcttcctgaaatgtgaagctctataaaagattcaattcttattgaaatcaggaagaaaaaaatgttcagtgatgtttttaacccgctcaaagtgcaaaaaagatgtctacaaccataaaattgagggggaaaattcaatctccgataaaataaataaataaaagctggaatttatataacactgcaacaataatgttattatgcagtacctctatacttcacataaaatgaaagaatctaagtgtgcatctatacttcacattatcagcaggatatagatggtaggtgcaaccaagtgtgcatctaagtgcctgcgcctgtacatgtcaaccatgcttcaattgaagagaaaaaatttgctgtgtgacaatttccatacctcaaacaaaaaaacacccaaagagtagatatttgataacattttgcagctcctctcagtcagttcctcgggacttctataccacttctcttccaactgctcacttgcatatgtcatctgttctcttgcattagaggctggggggctactaggcttgctttccgttccatgttttgtgactaattcacctgattcactataggtaattttttgctctgtaatgctaatgtgactggcatttgcattttcttgcttaaagcctgaatttgaaggaaactggggccactgtttaagacctcttgcattctgaatgaacttttgtttctttgcacttgaaacaattccaattgaggcaaaattattctgctccactggcctcttcttcctatgcaaacttttctcagagtgagaaggatcttgatcatttgcactctgtaatatctctttcctgtcaggtgatccaacatacttgaccttaactgaaggcaacaacttgaaataagatggacttaggttctgcaaggcaactccctcagagtgagaatgatctacaagttccacaatctgtcgaaaaatatacaggcgctcccctttgttaactttagagcccccaaccttgagccattctctcaaattgactccactacaatcagaaccaccagccctagacctagttttcaactcataggaaggtggattaacaattttagaatccagaccctttgatgtgtcaggagctgccacacttccaataccaagcctggatttactctttactctaggctcgggatgaaaggcaacttttggcgggcctttacatattacccccttgcctttcaaggtacttttcacaaaaaactccgaaaatccagatttagatagaatctttgttcggatagaacccgaacccggagcattacctaatatcaccctattttcagaatttctaggttcctccacaacttcattgtggttatcatcacatgccttttgtgccagaaagtcattgaaagatgagtaacccgcatcatccaaaccgcttgtggttctcttgccgttatccctatatgcaacatttgattgtgaacttccactgcctgaaccacttcctaattggtatagatgttgccactgggtttgtctagtctgcacccttcctaaattagctgatgtcccaacaatagttaaattagacccattgacatttctcacagtcaattcttccactgaaacaccagcatcatccattgtgcgaggacagctatcgtacggggtttctagtgtatttacatggtttaaactctgtacatttttaccatctaacagttcttcaaattcctgatgcgagctcctaccataatcgttctgacctggcagtagcatctcctgcgagttcaacaattctcctgttgatttcataaaaaattcgacctctttgccttggaggtgtccacattcaacagtgcccagtggacgaacctcctcccccacttcatcatccatgctccttctaaccaaaactcattcactaaaatcgataaacaagagttgccctctcagtccaaactcccaaaccaactaatctctacactaaacacttctgcacagggaaaaaaccacactgccaaattacaatacaaacaagttaaaaaagcaattatcaaaaaaaaaaaaaaaacattttgaaaatattcatcttaacatcttagctagaaaacatataaaccaaccacaaaccaataatatgtctacactaaaacaagagttgcactatcagtccaaactcccaaaccaaccaatctcaacactaaacacttctgcataggggtaaaccacactgtcaaattacaatacaaacaaattaaaaaagaacttcccaaaaataaaattgaaaatattcatcttaacatcttagctagaaaacatataaatccaaccacaaaccaataatatgtcaatttcaattttacaatcaacaaatttaataacacagctaataaccatgtactaactatcatgatcgatcaattaacaacagcaattcaatcttccggttggttacgaagaaatacacaattcaatttcacaaaaagagaaccaactcaaacacacaaatcacaaaagaattcatttcaatttcctcggcaaccaaacaaattaaattaaaaggcatacctttaggacttcaatcgggaaaaaaaaggatgaaaaagcaatgtgaagggcgtgagaaggtgaatttacagagatggagaaacgcaaaaaccctaaagagaagggaaaagaggaaaagtgaaagcagtggtgaaagaagaagaatccaaaaaacacaatcaataaagtgatagatattagatagaaagatacagaagaaggaaacgtatatgttatttaccagaaacaaagaaacaaaatttaatataaataaataaatatattgcagcctcacatttcatttttttattattattattattattttgggaatttaatgattagaatttagaaaattaattttggaggaagaaggtggataaagaggaaagaaaccgacttcttttctttcaataagagataataaaataaaatccatagaataaataaatagaaaaacaattatgtcagtgatttcttggaaatgtatgtagtgaagtgaacccttgaagggttaaagggtttttttttttaaaaaaaatgaaatttgggtagataataagcggctaaaatacttataaattagagaacaaataaatgtgacatcaattccgtctttgttttctatttatatcctattcccgtcttcgccccgtttaatcctgtgacagtcagtaatcccgtaatccgtaaggggaaacaccgggtaagctgtgcaatcccacaccgcct

SEQ ID NO: 79323 - DNA, 2637 bp, Cannabis sativa
ttcaaaatgtcctccctcgacacgagcagggtggtatctttgcggctgagggttacgctcgctcctctggtcttccaggtgtttgtattgcgacctccggccccggcgccaccaacttggtcagtggcttagccgacgcgctccttgatagtgttcctttagtagccattactggacaagtcccaaggaggatgatcggtactgatgcgtttcaggaaacccctattgttgaggtaacaagatctattacaaagcataattaccttgttcttgatgtggaagacattcctagggtagttaaagaagctttctttttagccaaatcgggtcgacctggtcctgttttgattgatgtacctaaagatatacaacaacagcttgttgttcccaattgggatcaacccatgaagctacctgggtacttagctaggctccccaagctccctaatgaagctcatttggagcagattgtgaggctgatttctgagtcaaagaagccagttttgtatgttggtggtgggtgtttgaactctagtgaggagttgaagaggtttgttgagctcactaagattccagttgccagtactctaatgggtcttggatctcaccctctttctgatgatttgtctcttcaaatgcttggaatgcatggtactgtttatgcaaattatgctgttgataaggctgatttgttacttgcttttggagttaggtttgatgatcgtgtaacagggaagcttgaggcatttgctagccgagctaagatagttcatattgatattgattcagctgagattggaaagaataagcaaccccatatatctgtttgtggtgatgttaaacctgctttggatggaatgaatcagatacttgagaagaacaaatcaaaacttaaacttgatttctcttcttggacaaaagagttggatgatcaaaaacaaaagcaccctttgagtttcaagactttcggggaagcaattccacctcagtatgctattcaggttcttgatgaactgactgatgggaaagcaatcataagcactggtgttggtcaacatcaaatgtgggcagctcagttttacaagtacaacagacctcgtcaatggctgacatcaggtggactaggagctatgggttttggtttgcctgcagctattggagctgctgttgcaaacccagattcaatcgttgtagacatcgacggtgatgggagttttatcatgaatgttcaggagttggctaccattcgggtggagaatctccctgtgaagatactcctccttaacaatcaacacttgggcatggttgttcagtgggaggataggttctacaaggctaaccgagctcacacctacctcggagacccatctaaagaaactgagatattccccaacatgttgaagtttgctgatgcttgtggcataccagctgcacgtgtgacaaagaaggaagatcttagaggagccattcagaagatgttggacacacccggcccttatctgctggatgtaatagttcctcatcaagaacatgtcctgcctatgatcccaagtggtggagctttcaaagatgtgattacggaaggagatgggagaacaaagtactagagatatcagaggagtagcagttatgttttttccttactttctatgtacatttttgttctctgttcttattaggccacgcttaaggcagtttatggattagagctatagtagttatctttgctttttgcagccaacatgatgtactttcttatatctattagcataaaagtgttgtgtggctactttatcaaattaggacatgtatttcaattttctggtagctaagctagatccttgtaatactagtattcattacccctttttcttcaataatataaaatatgtcatttggtgtgctagggattatattcattcaatctcaagctttaagttttctgaattggtttgtgacatgaaatttcattcatgattttgacttaatttgctcaacaaagttattattggcttatcattaaattctctgggcaataataagtacattatttctgtaaggaagaaaatgctgagaaacaatcttgtgtttagctaactccatatcttcctacagatgtgatcatttcactttctcatgtcattatcatataccctctattgttaccaggttgaaagttgataatgtacttattatcaggtatttttgcagggctagcattgcccttgaaagttgttactttaaacttgtattgtattttcatgtgactgaacgttaaattaggaggcaggaatcatagcccatgtgcttgagaaaagaaaagaaagagtgttcatttcatctatcagttggaatattggtctaattcagagttgattttagtctggatggaatactagagcattgttagaaggcacccaatagtgagttaaaatatgtaagagcatctttgagggattcaatatttttttacctaacttaagtaactaataagaaaactaaaaatagggagccactttttctcatctcacccatttatgctttaattatttaataatttttttatgggattatttcacaaaaacataaacacaacaaaaaaattacaaaaatacagttttacggaattttaaatat

SEQ ID NO: 79324 - DNA, 1732 bp, Cannabis sativa
  modified_base (116)..(132): a, c, t, g, unknown or other
atattccttggctgtgaataagttggaaaatgaatgaaaataagaaaagaaaactttgcttaagcttgaagaaaggaaggaaagataggaaaatttttctctctctctctctctcnnnnnnnnnnnnnnnnnctctctctctctctctctggtgcagctcttcctgggctggtgctatggcaaagactagggcgaggcaagggaaattgagttctgcgatcaagaaaccaaagaaacgagggccttcatcatctgataaggtccgaaagatgaagacactggatgcaattattggtattgaactagtggaattttttgaggaggaagagaacgaagaatctgagcaggtgcatgaagatgtgacggaggatatcgatcttgttcaggctttatcaccaagatcttctctgcaatcaatcaggagacaagaggaaattagcagggattttcaattctttcttcaggctaaccgatcctgtgcggcttctctaaaagaaggtaatcctacttctcctcatattcttcgatctggacatgtagtgaggattttagaaaatacctttaagaattctggtagttctagcaaggtgaagataactatagaggacattgaggatgaggttcattattggagtccttctatagtttgttatgttctaggctccaatcccccattgtctgtgattgaaggatttattaggagggtttggaaagggaaagttgataaggttggtgctctgtcttatggggttttccttgtctggtttgatacaattaaaactagagattaaatccttaatgggggatatgtatttttcaacaatagaccggttgtcatgaaggcttgggattctgaaacaagcttcaagaaagaagatatcaggtcagtaccgatttggattcagttacctgacttagaattgaagtattggggagagaaatcccttttcaaaatcgttgggcagatggggaagccacttcaagttgatgaaatgacgaaggtgaggaataagctaaattatccgagggtgctagtagaagttgatattcagcaagattttccagcgagaataccttttgaagatgaacatggttttgatgtttatgccttaattacctatgaatggaaacccattctttgtcaacattgcaagggattagggcatgctacggttgattgtaagaagaagacagtgaaagagcaaaaatgggtgattaaagggtctaaagataatacagatgctgctgttacagagattttagatgagaattctgatgtgaacaaagcagcaggtgctaaggaaggagaggcgtctctacaaccggttgttgttggaaatgagggttttaagcaaggtgtgaaaggaagtaaagctagaggaaaagaggtcatggctgagactcacattgaaaactcttataatgctctggaaggaatttcggagcatggaattgatgtgttagttggagctgttacagtcactagtggcaagcatagatctctcactgttgacaagaaaagaggagggggagcacctcctcttggagatggataaaatagtatgctggaacgtccgagggatcaacgacccaagtaagcaaaaccttgttaagaacatgttacatgtccataaagttgggctcgttggtctccttgagacgagaactaaggcctcaaagcttggggccttatatgttaatgttttcaaagggtggtgtttcacatcgaata

SEQ ID NO: 79325 - DNA, 3024 bp, Cannabis sativa
tcatatataagatattttatccaagtccaagattgtagtaaataaacttaaacttttgtttctgattctaatattgacccatcagtgataaaaatcacaaaatattgagattccaataagagtgtgaattaataatgattacaacgctactcaaaaacgacaaataaatatatgaaatgacaacaaaacgcagtgtcgcacaggctcgaaacggagctttcttgctcagtctttctagcgagtctttctctctgtgaccacgtatataattactgatatatatatatagatatataatagttattatgagagagtaagagaggaaaagaaatcagaacatggcaccttcgtcttcgtcttcaccttcaccttcttcttcgtctaaatcaccaccttctccttctccttctaatcaagagattccttctgggccaaaccagtcatgtactacagttacaacaactacccatttcactcctgtaagattttttggttttggaattgattaaaggaagtaatggattgttttttttttttatttttttcgtgtgtgtgatgggaaagtttgttggttgcagattcaagaagaagagcacgaagaagataatgaaaccccagttagtaatcatcatcatcaccatcatcataaggcttgtacggacaagggaacgaccccgaagcacataccgactcctcttcatcatcaacagcagcataaaaatgggaaaatcagctccaagaaacggcaggaatccggtaccggcgccggagatgatggaacggttgcttgctataagtgcagaccaaatgctcgagaaaagatctctgttgttcctgttgacaacaacggtgtgcacagacatagttcttcgtctatgccgagccccaatagcattttcaagtctattatctcgtctttgacaagaagaagccccaaacccagcgacggttttccgtcgtcggcggcggcggtggcggcaagagaggatcagtggaaaattgcggtggctgaactctcacataagctaattcaagccaccagaaagagggatgatgcggttcttgaagcttcgaggctgaaatactccatggcagagcttgaaaagaagctcaacaagctcgaaatctactgccggaacttgaaaaccgggctggacgagtgcagcagcatcaatagtaactcgtcgccgtgtcaagtgggcaaaatccaaaatcgtcaaagtttcaatctttccacatctagaaacgatgacaaggaagttgttgagaattttcttgtgactgtgtcagaagctcggaccaatatcagagtgttgagccggtcactcactatgcagctccgccacatgggtggaaaagtatacgacagaataacatctcttctccaaccatacgacatcaaaatctccctttcgaagagcccaagaaccttactcatctacctagaagccttactgaacaaatcattcttcgaggacttcgaatcaatcatgttccagaagaactcagcagcccaagtcctgaacccaatcgacagatgcgagacaaactactcgtcgtttaaacacctcaagagcctcacatgggaagaggttttaaccaaaggaacaaagcatttcagcgaagagttcagcaggttttgtgataggaaaatgagcgaaattgtggctatgttgggttggaacagggcttggccagagcctttgttgcaggccttttttggggcttcaaagagcgtgtggttagtccatctcttggccaactcggttcaccccaacttgggcattttccgggtcgaaaaggaaaccgggttcgaccctgtttacatggaggacatgggtggtggtggggataagaccaggaagttggtcccctcgatggtccggataatggtggctcctgggttctatgtttatggcagtgtggttaagtgcaaagtcctttgcaggtaccaaaacgacaagagtagtagtactgctgctactagtagtggtggtggtaataccaaaagttccatcttttcttccccaccaccaccttaactagtcctttctctctttttttttcaagtctttttgtgaaatatttttaaaaaatttaatattaaaaaaaaaacccaagtgagaatagttatttttatataatacccttttggctactttgatcttgtgataatgatattgttattatataatgtaagttatgttagttgttttaggatcatcaaaggaaattggcattttgtaagattgactttgtttgttttattctttgtttggtcaattctaaaactttttttctgtttatcatattcttctggttggtatttgtggggtttaatttttgttctttttttatctatattttttgggttttggggttgggatatggaaaatgagagtagtggggtttaattttagtctatgtagataaattcaaatatatatatttatagatgaactggtgaactgatgaaaaaaatgaataagatggaaatgagcatgtggtttacctggatggtgggatatcttattatgagtctcttgtgaataaattttggaactttgtttggatttgtgcaattaagtatttggaatttagttttgcaattatagaaattttattgtggatgtgtaagagtattgacagcacaaacgtattgtacaaacacagaaacaagtagagctgagtttggactgtcttatgaattcatccctgttctgctacccaaataatttaaattatttgcttaaacatacaatcttcaattcaaaccatgtaatgtaggtttgtgcagactagaaaagtttggtgattggtgactaatgttttttttttcatgtatgtaccaatcaatgaaacccttgtccttttgtttttgttttgagcgtttacatgagatggtttaagttttccaatactctataagacatgatgtcattttatgttagtttagaagagtgttgattggagagttattttaccttttaactattatacatcaattgttgtgagtgttcttaa

SEQ ID NO: 79326 - DNA, 3310 bp, Cannabis sativa
  modified_base (3281)..(3282): a, c, t, g, unknown or other
ctctctctctctctctccttcaaaaatgtctaaaatccatagaatgttatatttcattgtcattctttttctcttaaattgtgtccaaacactaagccataccaagggaattcgaccaaaaaaaccaacttacaagccactaccttcgaatatgactaaaacccaattctcagagcagcaattcatgaagtggatcaagtttgttggtcaccttaaacattcaattttcagagcagcaaagaacaagctcttcccttcttttacactacatgtagccaagaatcaggccgccggagacttcacctcgattcaagacgccattgattctcttcccttcatcaatctcgtcagagtagtcattaaggtccatgcaggagtttacacgtgagttctaacactatttatttatttatttttaaagagagagagagagagaaagtttctcacatgaactctgtcgtttactctgtttgtatttttcttttggctctgctcatattggtatttattctgttctttctactcagctctggatttcgggttttgtctatattcaacaatatgctcgttttgttcaatgtgattacttgttacgttctggtttttattttccttgtataaaaaagaaaagatctttggaattcgtcctctgactacatagattactttattattttttgtgtatgaattgtggacatgactaaaaaaaatgtagtaaattttcagggagaaagtgaatataccacaatttaaatcgtttattaccatagaaggagcaggagcagacaaaacaattgttcaatggggagacactgctcaaacaccaggaccaagaggccagcccatggggacctttgcttctgcaacttttgctgtcaattctccttatttcattgccaaaaacattactttcaaggtaatattatacatgcataatatatatttaatcacatgacagctaaggactgtaatttagttaaatttattatatttgttgttggacttttgtaattcaaattgtataattaaaatgtggaaacagaacactacaccagtgccagcaccaggagccattgggaaacaagcagttgcatttagaatatcggcagacacagcaaccttcttgggatgcaaattcttgggagcacaagataccctctatgatcaatttggcaggcattactacaaagattgttacatagaaggctctgtcgacttcatctttggaaatggcctctctctctttgaagtaataataatttataacttctaaacataaccaccttaatcaatgaattcacgagttagaataagtcttcagttattgacattgcaagaagtggagtagagtaggtataagtgccatatacatacatatacataataataataaattaaaataagctttttgttgaattccatcattacattgcatggatatagaaaaaagaaattagtgatcaccattgagtatagtgcgtagtccatttatatgtgggaccaaaatactagctagtatctctaatataattctatatattttaattgttatgtaagataattagagagagagagaatttgattgaagaaaattacaatgaaaattgcagggttgtcacgtgcacgcagtggcactattgactggagctctaacagctcagggaagaaagagcataatggaagacacggggttctcattcgtgaactgtagggtcacgggctcaggagctctctaccttgggagagcatggggtcctttctctactgttgtctttgcttatacatatatggacaacattatcattcccaagggctggtataattggggtgaccctagtcgtgaaatgtaagtatactctatatatagctatacctttattactttacttgttctagtgttctacgatactctatactatagtctacaccttagattgattggagttcaatatcaaaaagggaattagtatataattaagataaaagaagtagtgtcattatactcttgttgttattgttgagatagtattattctttaatattagtaatagtttttggctgaaactcactgaaaagtaagttatacatttataaagtaaggcaattgggcattttgatacactcataaaaaaatgggcggtttattattacatggatggagtcatgacctaaccatgacagactacacaaaatgtccttttacccatttttctactccaaaaactacgtgtaatgcaccataaaacaccatataaaaaccctcaaatcctatgtgtccacctaacctaagataactcgaaccttcttctttttatttattttttttaataaaaaaacggtggctctatctacaaaagccagccacaataagctacctaactcttttttcttttccaccatgaagatttggtcttttaatttgatatgtttggaagtttttgagtttgtaatttgaatataaatattaatattacaggactgtgttttatgggcaatacaagtgcacaggaccaggagcagggtatgcaggaagagtggcatggtcaagagagctcaccgaggaagaagccaagccttttattacacttagcttcatcgatggctctgaatggatcaaattgtagtcatcataccaattcatatactattactaataataatagtagtttaaaaataataataataataataataatacaaaaagtgttttccaaaatcgcctctctactctattattgttttttccattacaaattttggtcggtacataattgtttgttttgtgctcactcactatcttcactcattgccaataaaataataaaagtaatttgtggtataaatatctaattaaatttaatttttggttgtaaataaatatttaaatttaatttttagtgataatactactaaattatatttttaaaattgtagtaaatgtaaattgatattttcttattggtatatttaaattaatgtttaaaaaataaaaatttgtgacctgaacttataagagattgtcatgtaataatttacttaagagaaatgctaaaaggcaccaatggtgccaagtactctatatgactattggtctaattaagtatcgaatttcatataatttaatataatagtttttagggagtatcgctagctaatcgtaaagcaacacgttttaagagtgttagacacttctgatgttcgatgacaatgctctttacttaattctatttattaataaatcagagttaaatttaattatttatgtaaagcccgcttagttnntttggaaattagcagttgtttatgatta

SEQ ID NO: 79327 - DNA, 1648 bp, Cannabis sativa
gttaataatatgtcatctactagatttgtaacaccttttcatgatttggtagatgatatttgttatcttttgtcctcttttcctagagcaaaagtaccttatgttaaacgagatgctaataaagctcatgctttagctaaatttgctcttcgatttgatgaagatattttttggttgggggaaataccctccccaatctactttgttgttattaatgactctcatttttaattttttaatgataacagtttttttttaaaaaaaaacacaatataaataaactttttgtatattatatagtatacaatataaaaggagttacaaaaatactatgtactagtataaatataataatttaaaaaaatatatattagacagtgcaaataccccttaattatatatacttggatacatataaagagacgagcaatccgaagtgggaaataaagttatattaatataagatatagttagttgcaattgttaaagagttatcttcaatgagaatcgagttgattgagatttgaagaaccaagttgtgttaaattaattataaatgatgagcacataactcaagtacttaatttcattattattattccaaggcctagcctctcacattttggtctcactatgacatgaaagaaatatttaataagtttgacccaaagttccaatgagataaacacgtgggttatgctctaatgtgattctcctcatatctcaaaatagaaacaaaattatattgttgcttcaaatgcatgttgaagaagagcagtgagcaatattatatctccaaattaatcagaatgttttcttttggggttaatattttcataatctgacaaatgatcagagcattgtgatagattgtaaggatcttattcttaaatataataaagaacggacggagaagattaaaaaggttaaaagtaaagaaaataggacaatgaataaattttaactgcacgtgtggtaacttttgcagggtattggaaccatgatgcacgaatgtaaatcattagtgaaactacaataataagataatgtagtataaagcatcaacaaatcagcttggttgtagtggtagagatttagagtgagagaccaatcaattctttgaattacacaattattcttctctatctacacattatatatataaatattatatatatatatatattaatgccttcattttgatgcataaaatatatgtaaaaataaatagaaaagggaataggtagtggtggtgtgagttaggtgagtgagtgttgaaggtgtgctttgtttactttggatgctctgaattattgacagtatcacagaacgatgacggagcgataattggacggtgctgctttgtcttaataaaattgccacgtggagataaaacaagtcagcagctagtagtattatcatattcaaaaaaaagaaaatatagtatagaagttatataataatactaatctcttcgaattgtgtggaatgaagtttggatctagttatagcttctcaattatagattcattaagaaacaaactcgttcagttatattttatttagtaataattaaattataaaattatatttaaatttaaaatttgataatattttataatttcttttaataatatgagtaattctt

SEQ ID NO: 79328 - DNA, 3425 bp, Cannabis sativa
  modified_base (135)..(138): a, c, t, g, unknown or other
  modified_base (957)..(960): a, c, t, g, unknown or other
gcatcctgctcggcctgtcttcccgagcagatgttctaagtggactccacgtgtcaccattcccatgatgtcacgtcagagcgtgaaatttggggtaacaacttccaatactcgagctcaaaaaatattgacttnnnnttccatggcccctgaggttcatttttaacatcgtcacttttctcacagtgaccttttcttttctttggattagcttttcgctttctaaagtagaattaaactttattcaacttttcaaacacttgttctccttgtaaaggttgtagtggcacttcaaatgcttgcttaccatcaaatacttttttcagagtctgaaacacaggttcttttggcaaagcctttcggtgtcccatagaaaatatttttttcgagtgttttaagtacataaaacatattctcctcacaaataggacatgctttgtaccctttcacactgtatctagaaagattttcaaaagctggaaaataattaatggtccacagtaatatggccttaagattgaattttctttcctaaaggcattgtatgtaggaacaccctcatacaacaattgactgaaatcatcaactagaggggataagtacacatccatgtcattaccaggctgtgaagggtctgatatcaatattgtaagcatagtgaacttcctcttcattaccaataaaggtggcaagttatacatcacaagaaaaattggccagcaactatacttactgctaagggttgtatgtcgattgattctgtccatagaaagaccaagacacgtattccgaggttcattgtgaaattcaggccacctagcatcaattgatttccaagcgggtgagccagctggatgtctcatctttaccatctagttctatcgctgtcatgccagattaaatttttttcatgattaacttttcaaaagaaccgaaccaaacgaggtattgggggtnnnnaccataatacctttgcagggacaccaacctttacctcatcagaattctttttcttttgacacctagattcacaacaagttggacacgatattgcatccacaaacatcttacgatataggatgcaagcattaggacatgcctgtgttttttcatattgcacgcctaaggaagagagtgtcttcttcgcctcatagaaagttaaaggcaacgcattaccttctcgtaataactctactaagaaagctagtaagtctgtaaaactcttatcactccacacgtgtttggcttttacattgtataatctaataagtgtcgataatttagtaaacctataacaattaggctaaataggcttctcggcattctctacaaaattttgaaatttcaaagtatcaacatttaattcaaattgtgcatctcctatcatttctggaatgtgatcatactcatagtccaacttaacacccttaacattgttagacttagacattccctcttgcccgatactatattcttttccccgtggtgaacacaaaccttataactcttgtctatgtcgttcctaaataaatgctcatttatcatagtaatatccatgttacaacatttaagaaaaggacaaagaactaatttaggatttctgacatacttctgacaaaagtccaagaaatggtcaacaccttcactatactccgctgataatctattcgcactcatcaaatttctatccattttgaaacttctagaaaaacataaatttattcaattattattttttttttgaatatttgttgtagacacttagttaaattaattaccacacacttatatatttttagtgatattttgcattttagttaaatttatcctaattctagcaaaaaattttgcagcataacgactgtaatcagacactcccaaaaatttaaaacataaaaaaataaattataaacacataaaacaacataataataacaagataacattaacgatacaaaattatccactcatctgaccgcagtacatgtatttgcagaacttacttcactaaggatgaatatttaaaatattcaaactcatctaacatgcatattttacccatctgatcgcattacaattaatcgcagaacctacttcactacagatgaatatctaacgtcaataaactccactaaataacgaattttatagttttagagattatacatttctccaataaagatagctataattgtccactcatcaatcaacacaaagaactcgatacctagaaaatatttaaatattaaatttaaagcttactcgaacaacaccacactaatacctaaacataattcaaattaacaattcgaaacacttcaattttttctaacatttttaaatattgaataaaaaagtttaaatagattactaagtctaatatagcattcatgttttgtcaaatgctatcaccataaataaacactgacacaaaattaacaatacacaattaaaaatattattaaataaaactaattaaaattaaacttataataaactttttttccctaactatagttaacttatacacaaatatttatttatacctaaattaatactattttatatttttactaataaaaataaataattttacctaaactaaattagaaaatttaaaatatttttacaataacaaatgatataaataaatcttttactaataacaatttatacattaacaaataacaactatttttaaattaaacacattacatttacatatatatttggttttaataagaaaaattaataaataaatatgtatgaaaatatataaataaatattatacataccttgggaggttgaggttgaccggtcagagatatagatggagacggcggtaaggccacagcactgaggagagacgatgagggttttatatggagaaacgatgaaagagaggcaaagattgagagagatgttagagacgagagagagacagaggagacgagggttaggtttgaaggttttatgtggtttttatgttgggggtggggctgctggtgtggttttcgtgttgggggttgggtgactggtgtggttcgtgttggggttgggctatgctgtggaatgatcgatgaagtggcttgtgtggaatgatgagtactcaaaaaagtggctaattagctaggtttaattgggcttggcctgtagttgacgatttaaaaccgtcgggaataccaaatttctcctgacggtttaaaatagttacttaatttttttagcgacggtccttgaaaaaaatcttttttaggaccactgcaaatttgatatttgtagtagtggcaatacagactgcatgttatcttatcaatagatctccattcgttcctttaaagtttgatatttcaaaaagagtttggacaaggaaagatgtgtcatactcacatctaaaggtgtttggatacaagacattcgtgca

SEQ ID NO: 79329 - DNA, 5590 bp, Cannabis sativa
tatataagaaaaattctaggttagtgttgtttgttaatattaaaataaaatataaattattttttaaaagaaaataatagatttaataattatttattttagtattattagtttatttttattttttattttttaatatataataaataagtaaatatggttttagtacaaaaaaaaacatttaatatagtcttttaatcaaaacatctttttctaaaagttggatttgagcagttttagcttttagttgtagcttctctaaatttttttcaaaaaactgttttttaactgtttaccaaacatatttttatcacagtttttcaaaaagtaacttttaacttttctaaaagatgtgtcaagcgggccttatattttagcaatagattaccaatatacatctccataaaataaaatgtaacactaaatctcacaccagcaacctcgcacgtaaactccataatgctgagaaaaataaaacctgtttaattgagtgatctgaaatttcatatattaaacccttttatcttcaacatcaaagatatccaaaaaaaaaaaaaaaaagattgattgagctcaaccaacaaaattggaagaaaaaacaatcgtaaatgaatagaaaaaagagagataaataaagtttaattgtcaatggaggataaaatttactttcatattcatttcaatcatacatttcctaacatatattattatatcttgatggtaaaaactcgtcaactaaatttaagtcagaagattaaatatttagaacttaagatgaaatatttaaagaagatttggacacatttacgcgacaatggagtaaagaataatgttctattaaatatcgaaactctcttagaagtgatattttccaaccgccttcacaagaattcaaatgatgtatttatacttccaagtaaactctattggctctgaaatacgagtagtactagaatttgagggacaatgtcctcatggtacattgtggatcagtgtgccagggggagtagtggaggttgcgttggtctagtgtcaactcgtactagcaatatggtgatatctccactactcatacctattgtacctttttgtacaaccacctcctctcatcaggttttggcaaaggtgtactttccttaatggactagttatcacttgtacctttgtaattcttcccattcctagtttgttaagcaagattagtctgtgaattttggaggatattggcgaggtatacacagagttgcactgagatatcaatagatatatatatatatatattaagctttgtcgtacgaatattccagacctagtacgtgtagaacgcgggataggattgtaattgggtgtatgggcgcctgattataatatagtttatatttatgctatgtttatacttgttttaccgaatttgtcggctcacatatattatttacatgtgtaggtaaagacaaagtaaagactgaacaacaatgagctcagactagatgaagattatacatatcgaggtggttagacctagagtgatcagatcttcgagagagctaggctttattttgagggtgactaagtgacgacttttgtagcttttaaatcgggatcccaaaatatgtattaaaaatatatttatataagttttagtttatttatgaaagttttaattattcacgttttttaaaaaatcctttaattagcaaaggagtgcattaatgcttagaataatacaataacgtgtctaatatagtagggcgttatagattccattttttctcaagagagaataggtaattcaactaaattggtacgatggtagaatgggatttggaaccttggtgtgccacctaaagttaaggtctttatgtggcgaatattttattcagccttaccagtagcaacacaacttatgtcctgaaaaggttcaagttttgactttgtgctcgatatgtgaagaactagttgctgaaactctggaacatgcaatgctattttattttattccacatcctacgtgggttcacctagggtttggccattgttatgtcgatgtggctagggtttgctacaaaaggttttgattttcctttctgaagagttattttgggagagctttgagtttgtaatgatggtgatgtggtggttgtggtatgataaaaattcaatgttgttttgtggtactcaataaaaaattaatgttgttccagagcttgtcgaaaaccaattgatggaatttcacgagcaccatcggcgtggactcttgatggaatgttcttctttagcgccgatagtttgtcgaattgtgcagtggtttacgccgcttgctggatgtttctcgtggccacaaatgcatcggtgatacttgatagggggtttttggggttaggggtgattcgaggtgatgatggatttttttggttgacatgggtagtgagactcttgggagactttagtgttaatgtggcgaaacttcttgctatcaggatggggctaatgttggcacactattttgaatttaatcttgttagtattaattatgattcaattgtggttgtgggcggggtgaataatactcattgaattgttagtttaaattctattattttggatgttgattttttaacagccaatgttggtggtggttcttgtaatgccattttgcagtatggggatgatgttgtccatgcactggctacttctgttattattataggagagtatatttagacgaatgcttatccaagatttcaaatttttttttgtaatagttgatttatcttaaataatatgttttctctctaaagaaaaaaaatatagcaaaaccacgcacctacttaatgagagagaattaggtgccttaaggctaggtacaaaatatgatctactttagatgaaatagtacaaaaaaaaatataaaaatttatccaaaaatatctaaaatactatattattatgtgagtgacaaatttggtgttaaagtaacgtacatttgacgttaattaatacaaaatctatgctctaaatagtcactaatagttgggttggtattaattaaatacaccctagcctaccatagaattagcctttaacaatacaaatttatattttatattggtctttttttttgagatataatatatatctacaagcaaacgcgttctaaaaggctaaaacacacatgttctataatattaacaaaattaaaaagatactattacaaaaagagaagaaagaaagaaaagaaatggtcaaaactcaaaacaaaagctcgaccctaccacatacaacttaccatgtgaccaattgattcaattcattaacatttatttacaccatccactactggttgttacttgttgggccatttatttattttttgttcttaaattaaaaaaaaagaaaagaaacattatctcgaggtttacaaatatacgtgaataacgtgattaaatttaatataaaatgttacaccaatcttctaaaaaaaaaaactagtacacctaattttcctggcctattgacttgtgatgcatgtggagtgtgtggactttttaagtgtctgccattcctattaatttttagtaataatcaactgtgcgtgctatattttaagatgccctaaactaatcaataagtgacctaaaaaatgaagaaataaaagtcgtacatgtcattaataataataataataatatgttttgttcacatgtcattaaaataactattctgtgttcaaataatcagtccgcgtgcatatttgacattaataaatataaatcttataatttattaaataaaacattgaggaggtgtttgatggtccatggttgatccaaacgaaggaatggtcaagttagtttcatttttataatggagaataaaaaatttgcagagttctttattttgaaaacatgagctacaaatcaataattgaaagtgacaaatttgggattttatggaagaaagaaacaccctttgttcataccattccccatgttttaatttgtcaaatgatggtgggagtggttggaaagtattttcactattatctaataattttggtacctttattgaaagatacgagttataaaaaaacaatttatttattttcaatattatcaaaagaaaatacattcgttttgttccctattagaagcataaaataatggcaagaatcaaaaggtagtgttcaaggcactccaaataatttctcacccaaagtaccaaaaataaaataaagaagaaaatttaaagatcagtaaacaactcaaaacctatatcttgttcaaattcaaagaaggcaagcataaaatatgtgattacttgttcatctctttcatccagtcaggggatacaatacaatacaatcattcataaagaataacagtcatagaataaattgaaagcactcaaatctaccagtagtaactaaaatcttttgatttataatttaattacagaatctaagattaaacaagagttagatacttagatctaaaaccaggctccagtccaccagagccagatggttcaaaaaatatattaattattatattaatgaaaataaaacataactgagaaaaatagcagtagacctaaacccagcaaaatcggaaagatagaaggcttaaattatgaaaagcctaatatttcatataatatatgagatcaaactactgtgttctctgtgcagccaagcctagccatgagttgccttcagttgactttgatgcagctacttctgggatttggtgtggtgctctggcattgattctgtaaacgaaaaggcaaacaaatggttaatcccatgaaccatacataaacacaaaagtccaatgaagaaaataactactttcatttttgctcatgaatatcatgatacaaagccccaccatgatgctatgatgctattattatgaacgaaaaaattggttgggtgtagctaatgaagcctaataaagatatgtatatatattgcagattatgtttcgatgcctacctgtcctttctcttctccaagaatcggtgaagcgaagctttcctagcaattggtagatctacaatagaagagcaaagaatcaattagcaaatagctatggtatctctagtaaaaaaaataatgatgtaaattgtcacgcacataactaaaatgtaagaagactatgttaattcacaatttccagacccccataaaggggaaaaaagggggtaaaattagaaaattcaacaaagatgaaacatgttatcaaagtacacctactgttacaattacttgctaatatcaaacccatctacactatgttaagatggatatttaacatgtaagcaatagagtatgaacatgtgacccagcttgatttttataagaaatttttaagccttagggcttatgcttcttctcaacgtcataaagcacacacacagcagcagctatcttcaactgtataacattaacagcttgcttgaccgcccatccaaataaactcaacccaggtagaaaagcaagcaatgcattttgttttgccgagtgtactaaaacattcatcaaattctcagagtcgttctttgcaacaagaaataacaatatgtaaagaac

SEQ ID NO: 79330 - DNA, 5507 bp, Cannabis sativa
atatctgccatgacaaaattatacaaattgccattatatgatacagaatctagcatttctgtgacaaaaatagaatcagtcctgaaatccaatcaagcatttctatgacaaaaaaatagaatcaatacccctcaatttcaaaaatctctgatcatgttcccacaaatttctttgtgatccgctcccaattcaccttgattttctgtcggggtcgaaggttcacatctgctcgaggaatgacttttgacatgaagttttaagttttttaaagaaaaacacaaatgtcaatagaagcaaaccatcccccgaaacattacgggcatagacaaatacaagagaaaggaaagcatactattcttcaatcacgctagaagcgattagtcacttcgaactgccagctttattgtatgaatcagtacatcctgtagggaaaatctgtgttagaactttgaagtaagaatttttgcaataatggcaagaatcgaacaaagtagtttaggcacggtatgagcaataccctttatctcgctccacacgcagattcgagtcaagacttggggagccatcacagaacaaaaagccctgatgatcttgatacaagaagatgctactcagagagcagtgagcaccacaatcaaatttctaaactaagcaaaagttactcaaaagctccatggctcatctaatccttcaaggtaagaattactcacaaagaaacttgcacattttatggtaagaaagttcaataatattgcttcagacgagtgaaaatcgtcgagaagtagatttcatacaaaggcaacactatcaaaagattgtacattcaactacatgtaacttttgggggcaagaatcaagacacaaaacccaatcagaccaactaaaattaagaaaaaataataatacttaatattgatttctagaaaacaaggtaaaaataatctcaatcttagtataaatagctatatcataattggtaacttactcacaggtgtaatacagtaagagaaatacaataactacactaacttcaaccttgttcttgctacttcaattcatgtacatcttttggccggagagtatgactccgtgaatggattattgctactgcaatcgagaaagactgtagtacggacagagtccgttgaaactgaataaaatgcaaatcatcctggacattcacaattctcaacgtcggtgtgctaggttccgaaccctgaaagattagacaagagaatcaacacaacaaaattcagataaagaaagtactgtatagggataaatcatccaaaatatatggaatctcaatcgaaaaaaactctatagggattaggacagattgatatagtttgccaaactaacaacttgaaattgtaaaatttgtaaaataaccacattgaatttaccaatgtaaatttatggttgcaaaacgactgttatgatcgttttatggtcgtagagtgtaatttttggttgctcgtgcgaccaaacatagttcttctgcttatactattaacaaatttcataatgaaaatggtaaagaaatgaagataaaattgcaccataaaaagataaagctgactgacctgtatagtaaaatcaaatgatttgcattccccttggatgtgaggcaaaacttcattgttgcttgatatgggtttaagtattttgagaggacaacctatgtcccaaccaccacagtcacaaaccccaccagatttccatctttcggtgagactggaaggacctgcatttcttgttcttggtccaccatgaacaccagctgggatcaaaatgtccatacttgtggagcaatcaccactatttcgaaaaccttcagaggcttccaatgacttagtggtttgtttgatcccaactttcttgagaaatcccaagccccaacctccaggctcctccttctgactgttgacaatgtggtcttttacaaccactgcagccaattcaaaatttgtaggaggaagatcttctaacctacccgaccctactgctgattcgtgattgtcacttgtatcgagggatgattccaaggagcagtcttccagtattgcagacgatccactatacttaggcacggttttatgtttagatgagatactattcttaaatacttctgacattttctttgtaaaggctttgctcttcctgagattatggctccaagtttgcaattctgtcatataatgttcatttccaccgtacaatacaaactcggtttccatgatttttgaattgctcggggcgagggtgaaagagcttgaaaccttcatctttgcaacaaggtgagaatgactatcactaatctcatgatccttttgcccaccaccctttcctgaatggaacaagtatatatagtcaacacccttgtcaccaccctttgactcaactttccacaagttggctacatagacatctttatgatcatccatggacaaaacaaaatgaggatttccacccttccaagtacattggagcatcccctgattgatagtggcagtagcagacgatgaagtttgatccgaacaagcagaattcgtgctcgatgaagaaacaagccttttttgtgtgatatcagatccatatttgtttctttccctggttggagtacccgtgttcagattcaatggcgacgacatacttaacacactaggagattccatataatcatagcatattgaatcattgacatcattggaattgacatttttcgagtttgcattgctatctaatgctccatattgctgtagcaaagggctcttcaagatgtttaacatactcttgcttcccatgattgtacccaaaaccaattgtcctgtcgggcttataaccaaattttcagtcccggctatcattggacacgcgaatactaatccagctgaatcaaatgcattcccacttcttgtctctggactcaagttttcaaccgagctcatattgaccgaagcattccatcgagctgctcttgaagctctaaaatgaatcaattccaagcaacgacgaagatacttttcatccaaactaatcataggcttcggaatcatatagtctaaaccatgagtacttttaaagaaaggatgtttcccaccacttttaccaattttcgaatgcttaacacttaagatcaaggcttgctcaggatttacccatctaattattctttctgatttcgacctatacttaacctcaccacacaactccttctcctcactcaaactatctaatgaatcctcatttccaaagccagttttcttactctttacaaatttattagccatctttgttttcgcccgaataactaacttaaacccaagcaaacaacttctccaccatcttcagtattcaccaaaaaaccactccaaactcagtccaagcaaacaatattaaaacctgaaaacaaaacatcaataagaagagttttataagtgccaaaagaatctaaatggaacctttcataaacaaaatctataagaaaataattgaaagcaatggaggtaggtaatcatgtgtaaagataaggacttgttattcaaaatctaaacagtaacacatgattaatctatttagacttaaagaagaaaatctaaaggttgtactcatttcaaatacacctttgtatcaaatgcaatagtgggttgttcttgttctcaacaactcataattattaaatgatttacacctaatccaaatcaagaataatgattgagaacatgattggttagcaaattaaacagtacaacagcaattagaagatactaacagatattaatcaaaatccaaaatataattctataaactaatgggaatcaaaactaagagattttgccattctaatctgaacccaactgagataaaagtctaataggtgaaaatacaagtcaagttcaccttcttccaaaggctattattgaaaaaagtaaagtctttccaagaaatgagaaagaagaacagcataccaaaaaagatcaaatcttttccacaaattatctctcaattaaaataatgaaaccccagaaacaaaaacccaactacttattagaaaagagtggtcacttaaagcataaagtactcataaaaaattacaataaacaaaacacttaaaaaaataataataaaaaaattgtttaacccttttacagtttctccttaccttgaagaatggatccagcaaaaaccaagtgaagtatccagaatctgatgaagagaagaaccagctggtacccaataaacccaacaacactatctcttttttctgtttttctttttattataattatcaaaatttgagcttgtatttccaaaacactgaaaagtaaacaattaagaaaaagtttgaaaggtcaaagagtggggtgaggtgagaaaataaagaccaaaaataggcttagcacatggaagaagaaagagaagccaccatgactaatgatgccattatactaagttccaaagacccctctcactctctcctctcttctctgttgtgttctactttttttcttctctcctccttttaagaaaagaaaagggtataactgtttttagacattattattatatatactcaaaaccaaaaccaaaacaaaacacaagttaagtacttaagtactctcataaaccatgagaaacatcattataggccaaaaaaaaaacaacaaatgaaatgaaaagaacagtggtggggttatggagagagagagaaacaatagattcgtaagccacgttgtttgggttgaaatatttggtctctaacattggtagagatacttaaaaccgagtaatgtttaggacccacttctctcatgttgttatttttatttatttatttatttatttatgagccaaagatatagtttttttttttaatgaatagaatttgcttttttttttatttttatgggaaaaaaaatcagtaaattactaaattgtaaaaaaatttgggaatattttttgtttttttacatatttataattttgtctaaaacaatttgatgatataatataaatagagtattgttattgggtactagtattattattgggtaccagtagtatttagtatttagaatttttaagatgtattaccttataattagttaacgatactctttaaaaattattgcattaaattatatgtgactcatatttaatttgaccaatattaatattaacacgtaactataatcttatagcataagatgctaaattattgttgtttgagaatttaaaaaaaaatatatatatatatatatataaatagatatgcaaatagtagtttaataataactaattgatttttagaactaaaatttatataattagtatgaaaaaaaatgaaatttcaattattttaagtagttaaataaactttcataattacaattttactagtgacttatggccacgtaaatattatttaaaaaatagcaaaatataattgaattaatgagatatatatctctacaatacacaatcatgattcaaaatagaataat

SEQ ID NO: 79331 - DNA, 4795 bp, Cannabis sativa
  modified_base (302)..(306): a, c, t, g, unknown or other
  modified_base (460)..(477): a, c, t, g, unknown or other
aagaacataaataatacaactaaggtaaacctaaccatatcagaattaagatctatagacctaagatcatctagtgatattaacttataaagacataagagtaagtttatgatatcttatccaagataaatatcggtcccatccaatgtatattccatacatccgagactggtaaactttgccaatgccctggaaatgacataaaatttatccaaggtgtaagtataccttatcgccaaatatcatgtcagtctaaatttagtgaactgacatatcacaggaattaaacttttgaacatatnnnnntgattatatttcactgtgttgatgacactgtaatcatgaacaaatatatatgtatatgttctggacttaatagaatttatacattaagtataatatcatgaaataaatcaggtgaaccatgcaacatagaatgatttctaatcttttattaatnnnnnnnnnnnnnnnnnntgaaatgagttttatttagggcagacatcccaacagcccgatagggttctgatgatggtttgatggttatttggatttgaggttagggaggatgtctatataggcccaatagtggtccgatggtggcctaatggtttagatggtctaatataggaccgactatcagtttgatgtccaattaaaatgtagtttttgtggtcaagtctgatgttatgtccgatggggtccgattgttatttcttgaaattggtcagatggggtttgatattggtctgatatgggcccaatggtgttcaatgcttgactaatttattgtttttttggacttttctattagatttttgttctacatttttaatcgtgttttttattttttatgtcagtggatgacaggtttaattgtttctgtatacgttatgtataatggtgtttggaagcttgagggtagagattgagtttataatcagtcaagagaatggaatcatctctagcagacttaaagtgtggctctgtctctgcctctgcatctagccttctctgatcttccatgaaggatattaagggtcttaaagtaacccataatctgtgtctaccctttcacaatagtagcctgaccttgcttcaaagaattgtgttccctctcaacactctctaaccttgccaatatggtagagaatactagttcctgaggttgtaaagtgctaggaatagatgtagatgggggaacaggacattcctctgtgatggagatggtggaggtactgtagtgtctctaaagattcaggttgcatctgctcgctcttccaatgttgagggaagcttctaggcctggctgtgcaaagtatcctgagctggttacccatcgtcgcctaacacaaattcctctatgtcaacaaataaaggtgcctcacctccggtgatggtcctcacaaacacttcctcattagtttggggacataacacggagtatactatcaactgcaaataaaaatataaatattataagattaaaattaaaaaataaaataaatatgaccaaatcaaaagcataaaaaatcttacacttttagcaaataattttatgactttctccttgtcgagtgtcaccttgtctttactctcttagttgaccactctaagaaagcgatgtgacttcctcactccagattctttagctagctccaatatgaacacatatgtccaatactgtaacgctatagtatagttgtatgctgagaactttgcctccttctaataattccccctttcaatcttttttttttcatacgactattcagttatataaagtatttatttcaattttctatcaacttgttaaaagaaatcttttcccacgggtactcatagaacaactctaagttgtgagccattcttatcacaaaaggaggaatgatggttttctcctatttaccaatgagaatatccataacaaataaggtcattcccaacttgtaaacatcatcagcttctgtgcaaccctcgaaaactttgcgcaattagccaaatgtgatagattgatcacctttgaagtactctataagcaaccgattggaatttacgttctcttctatttcttgcaccataggtccgggtaacaagctcaaccctatcaccaaggaaaatttagttcgaatgaatttgtatctcttctttgcaatataatagtgcactttgtcttccttctcagatttaatcttgtgcatgaataattgattgatcaatgcacctaaaaagtggagtggctctctctcaaagaattttttgaaaggggattcatttaccttgtcaaataatttgtattctgcaaatttttatttaatcttcgaatagtaaaaactatcaccatgccaagagatactgttagatttatttttatgcattttaaaagtccatttcactatgtgttttagtagtttttaaatagaaagagtaattttgggtttaataaaaaattggcttattttattttaaccctattgatacacttaaatttaatgtatcaatttacccctaataaattcatataaaaaatcaagtttcccaaggacaatacatgtaatatgcatggatgaaatgatgtccattaacgagacaagtgggatggtgtgtttggacagtggtagctacctagctaggtctttcattttctactgtatatacccaccaccagtactctagtactcctactagttgatactataggaccacttacgacccttaattttccatataaaaatggctttctatgctaacctactacgtgttatgtgacctgcgcttattcttattagatcgctctctctcatatgctctcttccgatccctcttggaccttatcttaaagttggattcactcctttatttcctttctacataaatatctcctttatttatattacgtgcctatatatattcagattgtcgtatgggacccaaccctttatttaaaggccacttaattaatatacagtagtaacagtacttgatcttgattagtccctctcgtttcttagtgctttaacatattatttcgtatatgactagttaccgggcctctcaaatgaagtcgactggacacattaattttttttttttttttggagaaagaaaaatgtaaggctgaccgtttggagtgggtgagtggtgcaacaattatgagtattaagggcgactctaaagctatagaattttgcccctaatactgattagggaagccacccctaaaaagtcctaaatatactattagggacaacaaaaaaattatctaaaattaaaggcgacaaagtcgctcctaaaagtaatacacaaacttttgaattttatttgtagaggcaataatatcgctcctaatacctctaaaaaaatttgtcaaatttttatttttgacttttaagagcaacatagtcgccaataataatcattcctaaagatttttattagatataattttaatatatgacatactcacatgtgtttcttttgttacattcttcttttttattattcatttatttccgtgttatcaaattaatatatatttttaaataaaatcaaatcttaattttttgttttacaagtgttaattgtaacataaaactactcactgaattttttatatacaaatatatatacatttgcatttcaaaacaaaagtataatcaattcagttatatattatttcattattttgttactcaaaggaaataaaaaacataagatctcagtaatttttttttagaaaagagctaattaatccttagtaaaggtgatgggcaaattcatcattatgtggtgttgtgtaagagattccaccagcgcgtacacttccctttcttctacatgttttaggtacctattttctgagtttcgagtacttttggggagatgggttccacctgaaattgtggtcatgtgtccatccaccagaggtggagcgagttcgggaggatatggggttcccggtcctggtgcaagtaatgcaaccccagctgaggctagcagagcagggagtgcaggcaatgatgttcctggagcttgagaatgtcctaccccctgtggaggatttacaacattctgttgtctaaaaacgatcatgtgtccgtgtacaaccccctgtctaggatagatgatcaggatttggacccattgtcccagatgttccgctcggaccaacatttcaatctcgtctttcaaataatctcacccattcgtggtgtgacccttctccccgtgatactcacatgatttattttaatcacgtctattactttctccatgtgacatttagggaggcttcttgtaatgggccatgttgcaggttactttatagacattttcttgagtgtctaccaaacttgtatactaggtgtattttggatcagagttcctccttggcttatttgaagagtcgttgtgattatggcttttaccccctctcttgttcaaggaatggcttgtagtatactctgagtccttaatttttacttattcaggagctatactacatccaatctgtgccgccccgtacctagaaaaatgggtctgcgtaggggcgagactagaagtagtaggtctgtaaatagttggggaaagctgagctcctggatgagtgaaggctagagctagaacttagagtttgaagttaggagcagtcttgtaatgggttagagattcagggactctgaaagcctgtatgtaggcatcctcaaggttgatgatgccttgggccttcgccataaattcactcaatgtttcagctctttttttctacatctctccccatagtagggagccaata

SEQ ID NO: 79332 - DNA, 3184 bp, Cannabis sativa
taatatacttaattatttctctctacttttcttctcactattctcttgtcttttttttttcttacgaaacaactcaattctatctctcattttcatttcttccaccacttttcttctctacgaaaatataaacaaaagggacatctttacaaacacaacacacaacaaaagttacttactgagagatgagaatcatgctgttaaggatttacttgtgttattttataaatagaaaaaaaggttctaaccagttaccaaactgtattgctcgtattgtattatataatattatattaaattatattttacatcatatttttatatttgatataaatcaaaatttaatataatattttataaaaatataaaataaatactatacaatacaatgcgataatacgatacaacatactagaacaccctcttaaaataataatcactcaaaaactattcaaggcaaaaaaacttagtaatattaagatactcaaaatcacttcaaaagcagcattaccatacattatataaatatatataatatgtacattacatgttatatactcatcacatagaactattgtagcagaaaaaacccacttaacatctcatagcaccacatcagtacatgacaacatggtccacaatcatggattcacaaggttctagttcagacataccacaaacttttaataaggacttagttactcaatttcaatctttactttcacatctttgtatgccttgcttccaccatttgcatatttactatctgaacacattgaaaaatttgatgcttttggtaactaaacaaaattagatgactccccaaaagctggaatttatgaatttaagctactataactcaccttgagaccattggcaacattcatattcagcgaatcgaactatggaaacttcgaatgtagtttgaatcccatcaagaagctcaaaaatgcagacatcaccaatttctaaattgtaaccctttgcgaattctcgccaaccattgcagattctaggaccgggattcttggtttttacagtcctcattttgaattcggatgaccaatatctgccattaggaccggtaagaatgacatcaccttgattcttaatgtatgtcatggcaaacttaagtggtataaactgctcaaacaattcatgaatgaaaacattattagatgcagaaagaaagaggagaaaaaaaaacagtattagatgaaatttaatgtactatgaatctcacaatttggtctttcctagagtcaacatatgatggttgcataagaatcttaaagaaaggtttctttgattgaaagggaactcttgcaagaattctagctctttgactacaagtcaaacgatgttgacttgttttctgagtagtaaacatatacattcacaccacttctatttgataatcaacttgaatattactccaccttcactttcatgtgctgaaaacaaataacaaaaaagagatgataaaaacatgtcttgatccttgagtgctcattcagatttcccaaatcaatataatactcatcaaaatcaacaggcttaagccattgaacaatgtataagatcaaaacaaataacaaaccagagataataacaaatgagccaaatagagctaagaatcatcttaaacaacttaattcttgggtactcagatttaccaaatcaatgtaaaactcatcaatatcgataggaataaaagggtaatcttatctcaacaatgccatcatgaaattcagagataatagcttaatgactttccactaaactcagcttaagccatttaacaatgtatatacataactatccaaaatataaggggggaaaagaatcaaggaagaatatgcataagatcaactttctgaaaacccctaactacaatagacacattatctcaattgaacccttattctgtcaccaacaatgatagaaaaaatcacattaaaatgaagagaattttgagaaaatggagagacccagatcaaaatgtgggatggttactctttccatggatcacaagaggaagttgatagtataaaaaaccagagtagataaatctaagagatccaatccaagggattttttttgtttatgttttttgtaatgattaaaacataaacacccactgtgattcaaacttcatgaaaaatcaatcgaaaaacaagattaagtaatgtttattgtttaatggtaagatggaaatataccctttttacagcttcagtagatagggaaaggtcgtcgaaaatgagggccaccaccaccatcaagctttttttttttttttttgttatagagaagccattgaaataggaaaaggcagtagttgttgaggtgtgtagaggagtgtcatacgaaatttgtgagtaaatctgtaaaatggtttgtgtattttggtaaaaatgagaaaaaggagttaaggtaaagttaactaggtacaccgaccacaatataagtatgaattttagtacacttttaatgtgtactatgaaatggatcatgaataatacaagtccatttggctgaacatcattggtcacattgaaattatgcacttctctctctttctctcactctctttttgttcttcaacttacaaaaatttgcatgtccaaattccaatgatagaaaaacacatggattttcctatttcttttcttttcttttttattttaaaaaaaaaattcagcaaagtttcatatgtcttctaagttctcacagatttcaaagttatttatttacctttttagcattgttataaggcataaaaatataagagatgaaaattgagtgggtaataagtgaataatgcactccaactctttccttgtttctcatgctccgcttaatttcaatgggttcggaataagggaattctgattgagtatggggatctattgggtagctattaaatttaaaatgattgtaataagaagaaataatgtagtgtaattgaaaatgaaaataaaaagaagatattgattttaaaataaacaaacattctacataatttttattataccgttattttttgaggttgatgacttatttgtatcaaattgaattttttgaaaacttctgtcgcaaatttctctaaaatttatgattagctacttgttataactatttatgtgtaattttattatttttaataatggatcttagaaat

SEQ ID NO: 79333 - DNA, 1895 bp, Cannabis sativa
tagtcaatgcggattatcaatttcatagtattgattattgttcgttgtagtcaaaattgggggtgtggttgagcgagtgaaataacaattgtattgaaaagaattgagaaactaaagcaatgatatgttattattctaggttgggaatatttgtaattgtgttatgcacattacttgtgcatgaaaaagttagtaaatttgattagattggtacttttttttttttttttttttaattaggttagtggtattagtgtttgcttattttaacgtaactgtttctcatgcttaattcatgtacaaatttttgtagtaaaagacctgagggggaaaccaaggatggcacagttgcaagaaagcttcaaaaggctgacagagagaagttgaggcgggatcgattaaacgagcactttatcgaattaggaagtgttttaggtagaaaaactatgttgaaaatttttaatggttgttaactcaattagatgacatgtgatgattctgattttaatttttgtgtggctttgaactttattttattaaattacattttgcaaaacttaaggggatgaaactctagtcagttgctgaggtttaagagaagtagttgagaaactttggccagattttacggaggtgtctgttgttgacaattctagttttccaagttcatctttggttgtaaatatgataatggtacatctttgtgatgttttctttttgcatttttgatttattgtcatgtttttcattctaacatgcagatcctgacagaccaaaaaatgacaaagcaactatcttaaccgatactatccaattgctgaaggatttgacatcacaggttgacaaacttaaagctgaatatactatgctaaatgaagaatctcgcgaggtgatccatttatattttttttcattatttgatagatggtttcaaatctttaaactgacttgatatagttgatcaatttattgtgtttaaaaacagttgacacaggagaaaaatgatctcagagaagagaaaacctctctcaagtctgacattgaaaaccttaacgttcagtgtcagcaaagagtgagaacgatgtttccttgggctgctatggatcactcagttgtcatggcaccaacttcatacccatatccagttccaatatcaatgcctcaagggcccattcctatgcatccgcatatgcagccatatccgtattatggaaatcagaatccaggcgtcattcctaacccctgttcaacttttgttccatatataactccgagtaccctggttgagcagcagtctcaacagtacgtgtctccagttgttcaaccagtccaccggtccaatgtttctggcaaacaagattctagaaataagtcctcaggagaaagcaagattgaaaaaagtgaggattcaagtgatgttgccacaaatctggagttgaagactcctggatctgcaacagatcaggttagttgctgactttataagaagtttggcaccatcttgaatgtaaatcagagtcattctgttttttcttttataattttatttgcaggattcaggtcaagggcaatctcaaagatatgtgagtaaggaatgtaaaatcactgaaaaaagctcttcaagtagatgttcttcttctcgaagcgtgcaagacagctcatctaatagcatagttagcagcagaaagcccgataaccaaaaaaaagattgaaggcaaagattacaacaaaaacaggtttttatttttcatttccattctcgaacttgtgcttgttgatttaattctattgcctgctagtctaatatatttgattgttgtgtacatcctcattggttgacattatttaacttctttgaattggtcacttttagttaaaccacataatatataagt

SEQ ID NO: 79334 - DNA, 1216 bp, Cannabis sativa
attccatattagcagaaattcaaataattattttcatttttgacagtaaaaatccagttcaaaagagatccaatatcaccacctaccaccttgccatatatgtgttttacaattgaaatgaaatgtaatttaatatagaatgaacaaaaacacatgcacttttctggtttatgatcttcttcattggataaactatgctgctaagtgtttgatatacattacatatacatgttcaaattgtaactgtaatctccattttcaggatcttttgaaactcaactgagtgattttccatagagttgagaatagactcttcttgttctgtaaacaacaatcaaacttagtactgatgcaataatgcatacaccagacagaatcccacaagtgagggaatagcaaatagagcccaaacaagtgagtgattggttttgatgaagaggttctgcaagcattgatatcgaatgctggtagtgtcgaagaccggcttgcttcttagcatagtagtcatatattgtaccagcaatgagttctgagaatattagtgagccagcaggatttgccagtgtgataaaattatacaaggcaccaaaactcttcaatccaaatagctcagatactgaagcaggcaaaatggcccaatgggaaccatagcatagtcctaccaacaatgagacaacatagattttccctggccatcccattgcatagtagaaaaacccgaatgacatgatgacctgagctattgacatggccagtggccttggatatgcaaaatctctataagaaaaagaaaaaaaaaacatgtgactttagatgcagagaaaagatatcatatcaaatttagtttttgagttataataatgtcaaatttagtttcaccttgttataatctcggataagtagccaccgccaacacggccaagaaagttccaaatgctgatcatggcaacataaatgcttgaatcattgtagccaagtgattgagtgatctgaccaaggttgttgaaaattgtcaaaccagagccagcagccagtatcatagaggtgactatgagcaaaaagtctgccttcatcaatacttgtgccaatgtgaagttctctcctctatgtggccctttcctgccgctcttgactctcacagctccatcagcagctgcttgaataagtttatcctgaagttcattcattcttttgcgcctttctgaagccgggagca

SEQ ID NO: 79335 - DNA, 4402 bp, Cannabis sativa
  modified_base (3529)..(3531): a, c, t, g, unknown or other
taatggtgtttggcacaaattttaaaaaactgtttttagatttttttttcttacgaaaaaaaaaatcaatattttagcatcataccatgacattaacccattagggtctaggttcgggtatggtttcgggtctaggatccgagtatgcgagcaaaatataaaatataatatgttagacaaaaaaattgtttttgaaaattgaaaacaacattttgatgttttctgttttctagttttttaaaactcgatttttaaaaaatagtttttaaaaatttttgccaaacaactcctaatagtttttaaaaactgttttcagttttaaaatacagaaaccagtttttaaactgtaaagccaaacaacctcttaacctcttaacattcctgtcaagttatgttaagaccttgtaccttgttatattagcatcagtgctttttggctttaagaatgtgcaacattaaagggaatgagtcctacatttaggagcctattttatatatctactgatcttgttctgatgttataacttttgaaaaacttgatattaggagcctatttttgtgaccaattaggtccattaacattggccattcctatctaaataaattattagagctagatggacaattataagcacaattaactttcactaattgcagatatagttaaaacaacaactaccaagagttacaactctcattatctcagcaagatgttagaataatctttgaacaactcaggcaatgattcaagatcttggaataatttaggcaatgacaaaactaattatatcagatgaaagataaatagttttagtaagagcttctaagatcaccaactagaatcatcatagcatgtctctggctactagccaattttatctacttgcttatctttgttttcaccattcattatatggaaagagaatgataagtttcatcctagttgataactatcaattataaagaaaaatttaacaaaagggattaaaaaaatgcaggggagttattactactatttataaaaaataactatgtactaaatcttttgcaaatagggagataaattggaaacaagtacactcaaacacacacaaaaagaagggatagaaaaagagtgagagaagatttacttaccaggggaaatagtgaactgatttgtgttccctttatctggtgcaaaatcagtggctcttccttcatgcttggtggaaaagagtagttcaccggtgcctggtttttccatggataaaggtttcagttgaccacaagagtctccaaaaactgactgagatccataggcactccaccaaggtagagatgaaattgaggacaagtggcctatggtgttagggacaagtccttcatgttctttgaaatatatggtttgcatagccatagttaacttccaaaatgatcaaatcccccacttcttcttaattattgttgaatctaacaccttacaccttcaagattgaaaatccaccaaccttattttactatataactttatatctaacaacattcgttatgaaaagaagatatatttttttattaatttaatatatagttgatatgaaggattgttttacaccaaaatattgggaaagaaagcactttttttttgcactaaaaatttagccatttatgaagaaaaaataagaagagaaaatacataacttatcttgacaacgagattagaaaagaacaatattgcccttattattgaaaaaacaatatcaagataatttttttattatgagaatgattttgttctgaatatacgatgtttaaaaacacacatacatataaactaagcattcattgattcaaccaaacaattgagaaaatcaacaaaagcctcaaacccagaaagcaaaatgaagaagaaaatttgagagaagaccctccaactatattggaagaacaagaccaagtataaaaataataataataataaaaaagaagttaatatttgagaactcagacatgaaaaaaattagctgaatagagcagagtacttaccaacagtttacttcgtgtacaacgctccagtaccagagagagagagagagagagagaatgataaatgagtacaagtgtaatgtaagaagacaatagccaataagcttggtctttcatgcaagtcctctttgtattatgtgccaatatgaatgtgtaatattttatacataaacatatatttgtttaatacaaaacacacacacacaaacacaaagaatttagtgctctctttctgtcttgtttttttcttttcttttttctacgtattttcataaattgtttttgttttttcgttttatattattaacgttatcaaattaagccaaaacgttttttggggttctacttttgcttttaattattgattaaagtttcacaaataggaagtgtttggaatgtcaaagtggattttttatttttaataataattactcaaaaagcatgtcttatactttataatatggatatacttatgttattgatccaaaaatatctgttaatatttctttaaagtttacttatacaagtgggtctacacagaaaaaataactgagataaggttttttcctttggttttctatacatcaatttggcttgtgcatggtcagatgggattctcatatattttttttatatcttttgttctaagcaaaagcataaacttatgttatggctatggagccataataatatatgaatgctcctattgatccaagtgatgaccatgctaattcttttttatcttcaaaaaaaatctacaaatttattactaatttaatttaatgatcataatattttatttacacatatatttttatagttgcgactataaaattagaaatgttataatctcatatatattttacataaatggtctaaccacaaaccttttcaaattttacataatttttttgataattgttaaacgataatatcgatcgcatatatatttttcaatactatatagtactaatatataaataattactaagttatactaaccacttgaaaaatatcaccgaatatcgagcacgtaataatatgttgtatttaactaatacgcattgagtttattcaaaaaaaaactatcaattagtgttgagtttgcacatgtatatacccaatgaaaaagataattacattacatatgtatatataatgaaataataatgatgttgaatgttatcactgtcactatcatttcacttctactgtcaattctttttcttcgtaaccctacaccatttaaaaggttgactattatgaagttttgtatagaaaaattttagctacaagatttttttcccttattgtttggtgatcaaatataataatatagttctaaagtatttgaaaatatctatatagaatctgaattagatgatttttgaaattaacaggattattctcaaacaaaatgttgcaacttcacatgttcctatattactccaatgatagcattctttaagaatgttaaaaatttacacattatctaaaaatataatannntattttatttttcttccacatcatttttagcactcttatttttaaaacactcaaatatatagcactctttaaaaatgttataattatgatcacgtacatattattattatttaatatatattttaatttttagttacaataactttttagcttcaatatttttttttaaaaaaatgaatagcaccaattctacaacatagcatccatgcaaatttctggaataacatcttttttctccaatagtatagcatctcaatattttgccacataatatgtctacctcaccaaacatcctttaaaattttactactggagatgctcttataggaggagtttgatcagagctaaattgaacttataaatttgacaaataaaaacagtatttattaggattaaagagagaaggaagagagaacttagagaaatttatattaatctgaatggaatgatttgttacaagaagaagcctttatatatatataggagataaagagtaacaaagatggaacacacactcaaccaataactaacaaactaatcaacctgacttgttctaataggtcccttcaagttagagtgtaaaaagtttttagaccacttggatacaatctcactaaaatgagtaggaaataaaggttttgttaatatgttagctaggtttgtcttgtatgagacatgaatcatttgtagagtaccattggtaaccttctctaaaactatgtggcaatctatctccaagtggcaatgttgaagtctttgatgattgaaatgagccaccaagtgattagttcgcatgtggcattggccatggcacggtattataccttggccgaggactgagagatagtctattgtttcttgaatttccatg

SEQ ID NO: 79336 - DNA, 2876 bp, Cannabis sativa
taaattaaaattatgattttaactaataatttgtcaacacatggcatttttttaaatgaacaaacggagcatttaactaagaaccaatggactaacaaaaaaatgtcaccttgagaactattatcgctaatttttgaggttgggaattaatctgtatcaactctaagtttttgaggacttttgccgcaattatcccttattattattattatttgagagttgttaattgatatttttattgttaactatttcattagaaaacttgaaatctccagcggaaggtattcagttataagatatgaggacaaaataggtattcagttttgcatgtaggcaacgccagttttcgaatgaaataataatgtgtacatgtgttaatcaaagcacgtgtgaattgattagttagttagcaaagttgttgagagttagttagtgaactgttttctgttattgttgtattaactaactctgttcttacaacagattttcctcttgtattcagagctatatatagctcattcttgctctctttctgtaactcttgtacaatcaataacagagttcattcttgttcattttctcttctctaaatctaataacatgcgaagaataacacactatattacgtacttggcaaacagaaaacagctacttaaatttttgtggcatgtaaaaaagcttatgatactaaacgtagatttcgtattctttttctgtacattatattacgtacaaaatacttgttctaatttgatcatcatcggattaagagagatacaccgaacatcaccgaatttgtacatattgtcgacgtagatttggcaattcactttcttcatccgatgaagagagcgataaatgagagtcctacaacatgaaaaagataataaatatactttctatggggaaaactagatttcaccaaccaaaagctaaaaatctggcacaatgatattttccagccatttcgtaattgaaacgttaaattgaataggttattatgattctgacctgctgatttcgttgacgctgaatggaagtgaatgttcttgccatgatgaagaccggaagaagaattccaatggttctcaacacaaataactacaatgaaatgaaaaaatctatcaagaaaacaccagagcatcactgtcatcctttttctttttccctggtttgtcaccaatttatttaccacaactaaagataaatttgattacagaatgaatgcttagataccaatctcattactttctttccctaagaatgtattctttgaaaacttaccatgaacgcagtcattgtatactcccctgctccactaattataattggtagagtatggcgtaaaactaatagaactataaactgcatccacagaaaaggaaaatataaacagctcagttttagattttactttacatttggtcatgtgattagtatttcttccaaagcaaattcacattgagaatcttaagtagcattgacttaatttacattcttaagtttattaaacaagacaaactatttcatacatggaaagtaaaaaacaaactcaaaatctaataaactcaggttgctcaggcatggtaaatattggagaattttatattagagtatgatatcacactatttctgggaaaaaaaatgtatctaatctcaaatggtatggaaagaaccacacagaattaacaaaccctaaagcctaaagcagtcttagatgaagattaacaaggccctgtgcacgatttaaatgaaactgcactcgacttcaattggatcaacgactaagccacctcactttgaggataatcttacaaaagtagtctatttatgctgcctgctatgctgtgtacttctaaacaaattaaagaacaaagggataattactggttggcagatgtccctgttggacagcagctatatagcaactcgggattcgaagaacataacaaatcattacatttgaaattatgtccatttggtgacagattaatttttcagcatgctaaacagagtaatcatcttttagactaatgctcaatagttctattttctaacttgtaacaaatgaaattgaaaagaaaaattaatttctgtttcatttgaaaatcaaagctaaagaagccaaacactaatcatttttcttatatattttgatataacttttaatgaagatgtggaaaggtctattattgtaatagtaagccattagagcaaggaaaaactgagaaagcttactattatagcaattactctaaagcacattatacttctggtagagggcactggatagtcatcaaaatcagaaccaacataatcgccatcactagtaaccatccctatgaattgagaattatgtagctctcttccagaaatttcccagtttcccctgaagatgaagacaccatataaaacttcataaattattttgtatatgaaagggtaaccaactacatgtacaacacaattatgtaatatacctgaagttcataggaacaccagcataatgaaacaaaggaggcggtgcagtgtaacctgatttaaattgctgcaatttcaaaattcaaagtcaaaaaaagaaaaaaaaaaaaactgaaaattaaagtttgtgcttctaaattgacaccaactggaggtgaaaaacaaagtacctggtggcaaatttcgcagatgatatcgcctttttcattgcaccatctctgaacacatttacggtgagcatactgcaaattaaaaatagttaataagtagaccatctatatccattataaaacataaatggccaaaacaaaaaagtgcacaatgtcagtcacaagaattaacatgaaagagctttaacaattagattcttattaaggaagagagagagagagaga

SEQ ID NO: 79337 - DNA, 5542 bp, Cannabis sativa
ctaagtgttgaatcattcccgaaaacttgaaactcaaaattagttagttttttttttttttttgctataatttacttataaatccattagtgaacaattgaggaaattgtctaaggacaacaaaatcatttttctattaaaaaatcttagaaggagtcaatgaaatgacacgataagtaataaccgaactacttttaataccattagatatcagaaatcaaatgttctcatatgctttcatttagccaaaatgaaacaaccaaacactctttttctttcatatatatgtagctaataatgccaaaaaaaaaaatatgccaaaatgacttgatcactccttttcattagttctatttttaataatcttcttcttcactgaaatcttgaggttgcatcttcctcactcttctttgaaacttccattcttcttgctctgatgcatgacaatgtgctggttttggctcagtccaagatgaacatggtgcaggtttatcacaaacataacaatagcactgcaaatcaaatcaaatcaataaaacacaaatattgactcaatttggtaccacaaacaatatcaaaaattaagttttaccaattcacaatagctttcatgagaggtttggtcaaatgggtatttcaaacacaaatgccttgagtgaggataatccctacaagccacctatttaagaaaaaagcccaaaatatcaaaagggtatctctaaaacaagggtttcaacaaaacccaagtcgaaagattcaatcttttttcaaatattttctcgggaaccaaacagaaaatttgaaaaaaaaaaagaaaatcaaacctttcccttttcggctagaacggttaaatcagcactatcaccaccaccaccatcatcaccatcagcttttcttgaaacagaaagattagatatatcattagatggatcataatctagaatgaaacactcctcagtctcttcaaatcgtttcacatcgtaaggattcttgagacaaaggatttgttttattggggttacggtatctccctccaatgtcgttttgacaaacactctcttctctttctccgatgaagatggtgatatttcgatcacctcaattgtttcctccattttcgattttcggtctctgatcattgtcgaaatttgaatcgtcggaagaatctgagagcaacgcaactgaactgtggagcgtctcgtgtgtgtggctttttagcagaccaaaacgacagtgttttaaatgttttaaaccaaaacgacattttaagataaacgacagtgttttaatacaagcgacattattttaagccaacgacagaaagtgaaccagcccatacttgtttaaattgggcctgggctttaacattatgggaaatttaataaatacctaatttacattacatttattgatatttacccatgttattaagtttattactttttttacccattctatttttattttatttttttatggaacttttatttttatataaatctttaaaattaaccttccgtcacttatccaaaattattattatattttcaatgaaaaaaattggaaaaaatatatgatttgcatatacatgaattagaaagattaataattttacttagaagatacaaatagagttacataatgaattaagttgtgggtaagaatgttgaaatgaccaataaaaatgtattattgttaagacaactttcacaatccatttactgatatttacccatattattaactgatttttaaatattaaagactttttttttttcacataataacattttgaacattttgtatgatcgtattaattaaggtaaactagctaatgttgatgcacatatctacaactgaactaattaaaggtgagcactaataacttggacacaataaaaaagagaaatgctaaaaggtatcagtggtgcctatcacccttctatgtgttaatatcgctattggtctaattaagtattgggtctcatataatttaatataataccttttaaggagtatcgctagtcaatcgcagcacgatatgtcgagaaggtgttaggcacgatatgctcataagaaatatgtaggctaaaaataaaaaaaaaagaaagacttaactaatcgtcatggaaaggttggagattgaattattgaaattagaatgctaaatgagtaagaatcgaaggagtttgccaaaaaaaaaatatatatagaataacatacttaaaagggagttagaccatttggacgatttctatgaggaagctaagaaatatttctgagtagaagacggacatgagaacttgacaataagcaagcgcaaccaagataaaacgtcaaatcctcgtgcactagaagaatcacggaagaaaagagagttcaatggcagaagaaatgatcgaaacaaaaagagtagaagagaaaatgattccataatatttattaaagaagatgcacgtgaataagttcacttctcccataacgaccctcttgtacttacgtacactgcgtattagtggacaatgggagttcggttgacatcctctactatgggagagcgtcctcgatgtcgtgcttggaagaccatccctcaatcgcttgaaggccattacatcattactaggattaaatagttttgttactttaaaaataattaatgtaatgtttggatactataattgtttgtatttttagttaagataattttgatatttacttaataaaattttatttttcctacgaaaaaaaaaaaaacttatattgacattcaaatgtgacttcatacattttttgtgtagttttgttaaaatgttatggcagaagtctttgatgtatttattcacaatagaattaattaagctaagttactatcacatttaaataaatagaacagtattattagactaagtgaatgaagaccaaaagtaatacaatataattttcagtttgatgtgatatttatatatatatatatatataccttttattataagaaaacagaattattatgtgatcaaattttgtttgatgtattttaattaaaggttaattatgatttttactctctagactttgacatgtactaaatcatatcctttgaactttttttactgttaaaattcatgttaaattattgaggttgttaaattcaaagacttttgtccaatttcatttaattttactaattcggtttttgtttatgtaccaagtcatgctcctcaaactttgatatctaccaattcacgcccctcaaattttgaaatgtaccaaatcatccccttaatattagatttttcttattaaaatttgacaaaaattttaaaatgtaccaagtaactggctcttccaagtattttggttctagatgcaccccataggtctgagtggatgtagtctaatttgttcttcgtggtgtgttgacctgtggtgaatttcactttgtagcttttaccaaacactcactcttcacagaaagtcaagtttctgcccaattttcccttgagtaatccttgtttgtcaagctttgtgattcccctctcacttacatggcctaacctgagatgccacaatcttgtgtcatcattttcttctgcaacagcagctgctgcacttccaatgacagttttcccaattagtgagtacatgccttgcttcaattcacctttcattactgtcattgaacccttggatatcttcaatatcccatctttcaccttgactatgcagccaagtttatcaagcatgccaatggaaatcagatttcgtctgaggtcagggacatacctcacatcttataaagtcctagtggtcccatcaaacattttgatcatgagagagctagtgccaataacattacaggctttattattaccaagcaacactgtccctcttgagatttctttaaaacatctccttcttgggacacatgtggaaagaacatcctgaatccaggatccattcatcactgtctccttcctttgacactaccaagaccctagccatcagaagctatgtcagcttctcatctattcttgcttttctctctgtcaattttggccttcagtgctctgcactcatttctaaagtgtccttccttgttacaatagtaacacttctttccagtcttgaatttggacttggagttggacatgtatccacctttgttcttgctttttttttttactctcttctatttgatcttcctttggagaacaacccttcaccatttgatttaattatgtcctctgatttctgctgaatttctttcaaattcagagcagatttcacttctaacatggttaaagaatttttcccatacaatatagtatcaacaaaatgctcaaaagatttaggtagaaagcttaagaggatgatacattgatcttcatcatctattttgacacctatattgttgagctcgagtatgatcttgttgaattcatccaagtgtttcctgagctcctttgattcatccatcttgattgtgtacaatttttttttcaggtagaatttgttggctagagatttcttcaaatagatctttgccaacttgtccaaaaggctaattgcagtttgctcatcagatacttctcgaagaacttcatctcccaaaaataacagtataacactatgagccttaatatgtatctccttcaccttcttcttgtcttcaatttctgcaattgtagtattgtcaatggcctctaagatgccttgatgtaccagtagggctttcatcttgatcctccaaagctcgaagtcattttctattgaacttgtcaacttcgaatttagccattgccattcttaaaccttgaacctttgatcaaacaattcttgatcttcttgagctacaccagctctgataccatttgttgcagattataacctcatcaagagcaccataacaaaggattcaaggatcaaaaacacaatgaacaaaatgttaacaaatttagcaaacaagaaacataacaagatatcgaaatgaatttaattgaatgactctttattttataacagtataccatgaaatgaggagaggagtagtacacgaattggatcaccaatatacaagttacaagaatacaatctcagcttaccatgagagaaatcatttcaagagtgaacaatctccatttacaacccttcacacatactaaacacaagttgaaaatcatacactttaacaatggtgatccatcttgaatttctctcccactaacctcccctgtaaagctttctctaacacaacctcttctctaactcagtgcttggttgaatgctgttctccaggcgtgttcagtgagccaaaggtgtgcctatttataggcagttataacagttaagaattaaccaacacccaaactgttgagcatgttaagaaaatagttggttgacttcttgaaagtagtcaaaacacaatagtaatgtactataattttattctattttaattgaatgtattgtaaactcgtgatgtgcttttgaaactcaatcttaatttaataattatagcgaccacataaccatttggtaatac

SEQ ID NO: 79338 - DNA, 1296 bp, Cannabis sativa
taggtataggtagggtaagatatatagtaatataacatttatagtatatacaattgtttaaatttaggtggctatggaactttggaagagttattagaagtcatcacgtgggcccagcttggaattcacgacaaacctgtatggaataaattatacacgctatgcttcttcatatgtctccatcaaattgtaataattaattattaatgtaaatatatatataaaggtgggtttgcttaatgtggagggctactatgattacctactcactttcatagaccaagcagtagaagagggctttatttttccttcacaacgtaacatactcatctctgctcctaacgctccagaactagttaaaaaactagaggtgactactatactatactatttatttactaataatttcattatagaaaaccgttaatcaattattataagatgctacatcagtgtaaggtgtcgaatctaatcatatgtttattattttgatttgaaaaaggagtacgttccattgcatgaaggagtggtggcaaaagcgaagtgggaggttgaacaagtggagctgaatttgaatttgcagaagagtattgctcgttgatgccaaaaaaatgaaaagggagggtggtgttactgatgatcaagcaacaactgtaaaatatttcattttattttcttaccttatttaatcttcatttaatttacgtgccaaagtttagtgacggcttctatatatagtactagtcttttttttaatgtaggtgataattataaaaacctgtattaattaacttttggatgataaaagatatataacataatgccaaaccctataaatatatataataattaagtttgtttacttaatttatctagtaatttgaaagtgtaacactatcaattaagtttttttccataaatctctagaagcgattcttattttatctgattatcaaattaaagtatataattaattgtaatgaaacaatatgtagttatagagttaggaattatatttagctacataatcctcattaaagatttcaattaactagaaaaacttacacttctattttaactagactttatacacacatgataagccctttaactattgatcaccagcagcaaaataggataaaacaacaaagaacaaccaaattaacccaagttttaataaaactaataaaagttaatgttagcccaaataaatatctaacatacaatttaaatttaaattcattacaaatatttctattctatataaagtgtgtctatataacagaattcttggtt

SEQ ID NO: 79339 - DNA, 7822 bp, Cannabis sativa
atgcataacggtcttggcttggtccccgtgaaatttcatataggttattgtgtaaatgtttcactttttgtttttctttttgatagctcatttaatgtagttcaatgtccagtttgtatcacacattggggtgggtgctctgttgtaattttcacataggcttttttaatcatatgtgtaaattgatcatcttgacatccacttgtttgattcagaatcaaacactaaacatatatttgtcccatctggtctatgaccaaaattcctgtgataactaactaaaacaaaacttgtgagttgataaattacaagccaaccccgctagagttgcctcaccatcaggataaaatctagtcataagtctctctctactcttgggaagaagcttattccaagaataatatagaatggcttgcttattccaagggcatcacacatcgtataaaaataagtatagttacagaaattaaaataaggcattgaaggtctccgtctgccagtggctctatttgcgatggttgacgttgactcgatggcttgctgggtgctgccgtgaaggtctagatatggacctctagtcatggtggtctggtggatcttgtgttttagagagagttaagtaaaggagcagagagagagagaatgttgttagtctcttagggtttcattttagtagatagagagatagagagaaatgaggaatggatctattatttattagggttacaggttaggaaaatcaaaatgtaaaatatatatatatttattaaaggaggcgggccgggttggattgaacggtccacaaatggtccagcccaattcccttcatcattctccgcaatgttaaacctattcccatgaaacctcataccaaaaaagggcccttaggatgcacagagaccaattttcttcaggtcgggtcgggagccggagctactttgtgagattctttctttggtattaaaaaggagagagtagagattcttaggtttgaaattgaaatgatgtttcttggtaacaagctaatatattattattattgactcatccgtcgttgccgttgtcgttgccgttcagtgacattgacaggtacttactactgactttcttctcttgtcaaaaatagttcagaagaagaagagccacccaccattactctactttactttacttactgacttatttgttttttaattcttgtataggaattcatttcatcatcatatttgactttgattctgttttgttctgttttgtatagagaatagagtttagagttgttctgctctgtcaggtttgtcataagtagtagtagtagttctatgattattattattattaccctttcaaacgttataataatatgaatttatgtaatgtgttaataatcattatgaatatgtcaagtttcaaatgatgaactaatttataatgaaacttggaattccaatcttcatttgggaacagattaaacagacatgccttcttcaaaggggaagaataagaagcaatccaagaccccatcaaggatctcagcccctgatcggaattcatctcctcaaacaccttcctcaactcttgattttgaaaccaatgacgactatctcatcaccattctccaagaagcttctatcaaatatcctaatctcatagcaaaacacgccttcattggtaggatcgctgatattgaacataatgcttctccaggatcccaaatttggctttctcactcctccatacttgcctcttcattcaaagcagactctaaagtatcggtaatcatcatacaattcaatgaaactgatgaagatggaatgatacttaaataattgtctttttgcaggtgtcatgtccttccaatagtaaattttcacgcagctttcctcttagctccttagcaaataaatttggtagtgatttagctgatcaatgtactggtgaagcaggaaactattttgctcttgcaactattcgttcatccagtaaggtttgagcaatgatccccttttactatttcttacataattctgttatttatatcacaatagatactaagggtcacaaaggtttgtaatgtttgcctaggtactcaaattgactgaccttttaataatgttcttcctctttgggattcttgaaaatgttcatttcaggttgcaaagaatgaaatcaagctatcttcaagcctttcaaacacaatggggaatccttcattaggagccattgtatttatatatcctgtacaaagtcatatacccgaatgcaatgaattatttctagagctggtgcaccctaagaatatggtggcaaggaacacaaattctggtgaaacaccttatgatcatatgggaaatggagttgttggatctcctaagacaccaaggaaccagttaaagttgagctcttcgaatattaagcagtcgtcgtcctcatctacatataaggattctacaacaaagttagataacctgaaggctgtgtttgatgattcatatgacattacgaagttcttaggggatgaacatgttagaaggattcttgaaacacgtgctagtacttggttgtcttctagatgtttacttcgaggaaatcttgtgaccatgccaattatttcacagctatgtagcttccgagtagttgctgctagaatgttattagataaggataacttctatataacatataagagtgatggtctccaagatgaagcttctaactctgtcaaatattccaatgatgcctttatagtgaagtgtgagacaaaaatatgcttttctttaccatcagaactggcaccgaaagcccttgaaagacaaattactacaatagaatttgaacctacaattgtcaaaactgatgtgggagataggaagtcacaattgggtggattatcgaacgaatacgcaattttaaaggatatcattgtttcctcatcagcaaacgttctatctaggtatgtttatgctattctaacttgagtctgtgtggtatagttttatagggaatggctacagagctgaactagtattattccatacagtcctgttcgtacacattttcgggaaattctggatagtttaggatgctaaaaataaggtcccaacagagtactgagcacatggtaatactagaagtttggaatcctgggcatatattctaaactattcaattataagcaaaacactgtcatgtaaaacaagtagggtcaaaatttgtcaatctctaagattacatcatcatcaaaatattaaggtggtgtttggttaaaggaatgaaaacataggaataagaataggaatgagaatgagaataacaataagaatggaatggaatcaaatttacaacacatagaaaagttaaataaaaacaataaaagtggttatatttattgaaatgtaatagcttcgcgacagttcttgtacaatcattcaagcattacagagaatgtaacattataaatgtcagatttattgaactttcatgttcaaataaatgtacacttttgtacttcaagtgttttaaatcttcatattttgcattcactacttctgtccttatgaaaactaatcagcagttttttatggtaaatatattatcttttcatcttgaagatatattagctaattctgtcctgtagtatgttatcaatttattgtttttctcttctcctaaatgcatttttgtatttttgtatttgacatttgagtattgatcattgatgtaactactcagttttggtttacgaactacaaaaggagtgcttcttcacggtcccccgggtactggaaagtcttctttggctcaactttgcatccgtgatgctggtgtcaatctcttctctattaatggacctgagattgttggtcagtattatggagaaagcgagcaagctttgcatgaagtttttgagtcagcccgtcaagctgcaccagctgtggttagacttgacaaaaatcgctgaacaaaatttatcatttcttgtttgttaactttcggtaaaatgattactataattggttttgtttacaggtattcattgatgagttggatgccatagcacctgcgagaaaagatggtggagaggaactctcacaaagaatggttgctacgttgttgaatttgatggacggggtcagtagagatgaagggatccttgtaattgctgctaccaataggcctgatagtatcgaagctgcacttagacggcctggaagacttgacagagaaatagagataggtgattcatagtctttattttattagcagtagattttccgtgttacattgctctctctctcccccctcaagaaacaagacgtttattagttgattatcaatctaactaagtcaaggatcatgaaaagtgacacaatcattaattcataataggtggaacattagaagctcataaataaattatttcccaattgagctttctgaatctttgacattacaaaatcatcaaggagttcacaccatgtaaaaaagtattctacatattgttactaaattagacaatctaccatggtcattacttcttgtcttttaccagtgaatatctttactttctccccacctaattgtttctgttttattttcttcttaaaattaatgcaggtgttccatctccaaaacaacggttggatatcttgctttgtcttctaagtgaaatggagcattcactttcagatatccaagttcagaaccttgctatttctactcatggttttgtaggtgctgatctagctaccctttgcaatgaggcagctttggtttgccttagacgctatgccaatgtagtaagcacctgtgataacgtgcatggaacatctattcaccatgatgattctgataatgtagcagaatccgattccttaaaagatacaagggacgtgtctagggattactcatattatgcatcttcatctatttcatcttcaagggatgataacatacatgatgttggtgatggcattaaagaagaatgtatgttaaaagtgggttttgaagattttatgaaggctaaaatgaaagttagacccagtgccatgagagaggtacaattagatcttacactttaaattaacattaagattttttatgttatcatagtttaagaaaagaaaagaaaatcttgttctgaattgttactatcttacttatatttaaagaatacagtattactgtcctcagtgtgtaatttgcaaatcaaatctctctaaaaatgataattgtgtagcctttaaaattgtcataaagccaaaagttttgataatattgcagtttgttgaacttctaggtaatacttgagcttcctaaggttcggtgggaagatgttggaggtcaaagtgaggttaagtctcaattaatggaagctgtagagtggcctcaaaagcacaaggatgcttttatacggatagggattcgtccaccatcaggaatattgatgtttggtcctcctggatgcagtaaaactctcatggcacgtgccgtagcttctgaagcaggattgaactttcttgctgttaaaggtccagaactttttagcaagtgggttggtgaatctgagaaggctgtgaaaactctgtttgcgaaggcgagggccaatgccccatccatcattttctttgatgaaattgatggtcttgctggtgttcggggaaaggataatgatggggtttcggtgtcagatagggttatgagtcaactccttgtagaattggatggttagtagtgaatctctggtttctgatatgtttaatctacactgagtttgctatttagtttacagataaactttgttggcttcaggtttgcaccaaagacttgatgttactgttattgctgctactaataggcctgacaagattgactctgccctcctcagaccaggttatcctctctctcgacactgctgtttttcttgcactatttctatccccacaaagataataaaactagtgatcaataaatgtttgggacaggacgttttgaccggctgctatatgtggggcttccaaatgagattgaccgagaagagatattccgcatccatttaagaagaagtccatgttgttcggatgtgagctttaaggatcttgcttttctcactgaaggctttactggggctgacatatcatttatctgcagggaggctgctttaaaagctatggaggttgtttagatgattatattccattctttcctttgagttatatttgttaagtttttaattttactgtttctttgtaattcatgctgccaggagaatcttgatgcttcagaaattaagatgcaacatttgaaggattctattaaacaagtgcagccaacagcaatccattcttatcaggagttatcagaacagtttcaacggcttgttgtttctcgtggtgaggaagagaaagagaaaaaaccatctcatgaacactcgagtagatcaaattggcttcctgtgcggtaaacttgttttatttcatgtttcgttgcggctttatcataatctgcaaactacctctcacagtcttttttcactacttgataatacaggagtctcatgatagcaatagctttgtttgttcgttgtcggctgcctggaggcttgttcgggtagttgcaatgttggtagcaggttgttgttctatcttcctatgtatagctggaatgtgtgttttaattagggaagttacacacacatccatcatatcaaaggatcaagccaatacaacacaacacaagttagtgatgagaaagaagtattgattactttcatattcttgtaagatgtggtccaatgtctgagatgagcttggttattctgctaatgtagaagaatcataatgtgattagaatagaacagtaggcaggtgaggggagagagtgagttttgcagccattatcagaactacctaatattttttttaagttaagaagtcctttcttttaaagtttattcttaaacccacttgaggattttgcttgactttacttttcatatagcattgggtttcgattgaaacccaatactaaagtagtattagttttcccttgttcatttatttctcttatctaatgcaaaatgtgattttcttattaaaatactattttaaattttatattttataaaaattactaattgtacttttattttttaaaataatacttgaattaatatttttgtaaaataaaagttaataataacctcgtataaaagtgttataataaaattaattatattttttttatatttattcgtattaaaaattgaaaaatatttaaaattaagttcaaaatcttattcgtactgtaattagtaacttttacaaaggacaagatcaaaatagttctaacacaattttgtcattggtgaatattactaatgataagtgttgtatcaattacattgtaaatcatttcaaagtaagaatgttgctccttactttttacatttctttcatgtccatattcgaattaaaattactaaagaatgaagggttttttgaaaagtcaataaaccagacacaaaaattgagaaccaaaactgatcaacaggtacaaaattttgaatacaaaaagctatttaaataatgcactagctctataaatagagtaggactatgaaactaaaccttcatttccattggaaaaagaaaagaataacttgtataaatatatatcacccttcagattcattcaacaaaccaacctagttcctttttcccttaccccgttttggcccgaccactacccattcgtcatcttcgactgcagcgtttgtaagtgagggtgtggctttgggctcatcatctacttgcatatcctc

SEQ ID NO: 79340 - DNA, 3059 bp, Cannabis sativa
tttttttttttttttgaaagatatcaactcttgttcaatttcattaattatgataaaactggataaatattggtacttgcaagaagaaatagtaccaataattttctttatcaattcaaccgaataacaataaatgaaatgaatcaaacctccctgaaatagtagtttttggtggctaaactctctcaaatgctatttcacttacatttaaatctctaagctcaaattttgacagtaaaactctccaaacgtaataaatttaaggtgtcatccagttaagtatcactatatatagattgtttatgtatacactcatgtacacatgatacatttatattggtacacttattttttaaataattatattaggtgtaccaatataaatgtgacacatgtataaaagtgtacacgtaagtaatttatattgacagtttactgtggaaaaatagatgataccttaaatttgctatcagttcagtaatttgtaagattttactgttaaaattttaacttagaaggttaagtgcaagtagaattataaacttatatagttgagagagtttaaccacaaaatactcttatttttataagaaaaataatgatggggatatttttttaaaaaaaataaaattataattacctctgtcttttcattttcttaaaattaatttgatccatgtataatttttcatgatttttcttataactattatattgattaagtgatagtgatagaaattgacttgcatagttgcatttcttccaagtaaactctatttttgatgacctaagaatagatatatagtacaatagggattttgattgtgtaatagtagtttttataacacaaatggagaagagaacttatgggaggtttgacaatatataggtcatgttgtgaatatataaatgacttagatttcggttatcctactattgtctcactctcacacaagttattttatgtcaattttgtagtaatatgatcatcgattgtaaaactcacattttttgtgcataaaatgttatttacttatatttcggttattcgattaacatttcacacaagttctatgcagggcaaattctgaaatttggtgtgtcataagaaaaagtaaatatattcttggacccttgtttagaactaaatgtgatattttttaaaattagtaaaaaataataaattattttattgaaaggggatttttttttaacccttaaattgatgttaagcacatgtctagctcttttatgttcaggatcgggtctggtctatgtcaattttgtagtagtgatgaccttgatgttcaatccttaattaagcatttaatttttgtaataatatttattttaaaatatcacattagtcagcaaagaattagttaattagtagtgcatttttccttaggtagtcactaattaaatctcaactacctaacaaaagtaataagtaaacctaaaatatttgacaataatatatggtactttaaattttcttattggaattttttccacaaattttaaataatttatatttctttgtttgagttttgctgtatatacaaattaatttgtgtctttactataatgtacgtgtcgtattaattaaccaaaatgaaagattcaacccaacacaaaacttcaaaacagaaacttatattacttgtttatttttcgaaaacacattcactcacatacagttgaattgattacataattgaaaactacatgatatatatttattaatatgcagcaagctataaatttatatatattattgtaaattaatcaacgtacaatactaagagcattgctattgggtatcagtaatgtccaacatcttttaaaaatatcgttcgattaatgaatgatattacatatacactaataattctttttatcccaatatactttccgtaatttaggtaaacacttcataactaataattagtatcactacacaaacaattaatgagacaatttgtcatatatatgtatatatatatatgataatgaccttataatgtataggtcgaccttcctctcttaccgaacccatgaaaagtgatcccacaaatgtacaagttttttaacatatgaaactcattattaataaaaaaaaaatgtaggtggggataaatagctatatatatattgatatatatagagaaaataaaatatactcatataataaagagtatatatataaaattattttagatctcctctttaagtttaatttcatggtaaattcttctttttaatatgtactttgcccaaggagattaaaaatagtccatcgaatcccaattcttctttttctttccttttttttttcagtacacgttgaatccgaactcaatcaaaatattttggtcatcatgctctatagtatcgatttctacaggattatatttgataatttgacaaaacacataatagtcaaaaaaaaagtattgtaatgcgaatttttcgcctagaaatacaagtacagtctcgtaaaagttgacatgtggacccaattttcaataaaaaaggatgatgtgtcaataatatagctctcgtaaaattgatatcacatgatttgaacttgcgagaagatacaatcaagacaaagtctagtcgcatatacccaacataatcaaaagataagtaagaccaaaataaattaatattagtcgcacatatcaattttatacgatgagcaagcatctctcatgtgataagtaaaaatcgactctttacataaatttggtccgaatgactagtgtgtttgatgacttgttaagaactcgcaagttctaaattgtcaatgctaggaatattcgaatatgcgaccaagaataattgcattcattcattaattaaaccaaataggcccaaatgcccattatgcaagttcaataccatagaatcttcaaacttgcgtgtttggaatattagagattttattaaaatagaagaaaatcaaaatattacaactctattgcaatataatacaaggactaacaaagagattaaataaatgttacaagacataatatataatatatatacac

SEQ ID NO: 79341 - DNA, 4942 bp, Cannabis sativa
  modified_base (43)..(55): a, c, t, g, unknown or other
agttcatatttaggatgtttataaacatacttgtgagtagatnnnnnnnnnnnnnaaaataatttccaacagtaataaggcatgatttctaatctcattcataaaaaaaaattgcaagtttttttcacataatgacaaagcttctatgattgttattgaatcaaataaaaagtataacaatggtcaatggtgtatgagattatagtgggaagccaagacacaaaggtaacacccagatcataagaaaagtgaccaagggatgaacctacgtagtcactttgggggcaacctcagccatacatggagtagtaagcaataaagcactctcgcttaagtagacgtaaaatttttaaattttttaagtgttaatgaactgctcaatatattaagcatcttatatgtgataaatggttgactataaataaatacctacgcatagcgtggtacataccgaacaaaaattaacatgtaaagatgtatatataatgataaaggccatgcggcctagcaaaaaaatgcataacacataaatgtctcgaaatatagagtcataaatctctacaaagtatcgttgtgcataaaaacagtaaaggtaaaaatacatcaaagagagccatcaagcaaatcatcaaggggactatcatccgatgtctcatccccaatgttgaggtaggatcagcttgaacacaagctggttatgccttctgccttctgccttgtttttgcctcctcgtgattgcaacaataagttgctaagtagggctgaccatgggttgggttggccgggttgagggtattttaatgacccaacccaatgacatcggcctagagatttttaacccattcacatcctaaattttttataacccaacccattttttccagtgcgggttgggttgggttataacccttattccataattaaaaaaaattagatttcgatattatcaaaatcatacataaatttgaagaaaaattaaaagttctaacataaacatatccatccaaagttacaaatcattcaagattaaatattatagtcatttaaagttttgaaaactattaagattgcccataacaaacttagagaaaaaatcaatttcgatatcggcctcactcaacaatctcaacgtcaattgtctttgcttttggtgatgattcattaaccttatattgtttgttctgcaattataaaaaatatagtgactaattagtcaaattattataaataaataaataaaaagataataaaaaaaaaagaaacatattcaatattcatcaagaaaattatatttacctacaagaaaatcataagcttcctcacaaggaaaaaaatcagattataataataatagcaactaccataaattttatttactatatactaaatatcatagtaaaaataacagtataaaaaataaccaaatccatgaaatcacaaataaaaaaatcaatagaaaagaaaagaatataatacatttattttatgctaattgctacatgctcaagatcatagtaaaaaaaataataatacaaaaaataaccaaatcataaataaataaaaaaatattagacaatagcaaaattaaaataaaaaaaatcatatagactgcttttttatcacaaaaaaaaaaaaaacaaacatcacatacctaatcaagattcaaatcatattatattatttatcaaaaattaaaaataaggtcaagtgaagaaagatcaagacctacgtttgtggtgacctgagaacaacgaactccagcaaccgagaacaatgaaatctagtgcatgtccaaccgccaagatacttatgaaatagaaaaaaaaaatgagctcgagttccttcagcaaagaaaaaccatctagcaaaacaatgagaaaaaaattatttccatttcaacagagcagtgagaaaaaaaaagtcttacaagttgaaaataaaaacttagaaggtgcgactggcgtgtagagaactcagttggacggttggtggtagttcttggtgtggagtggatggctggcgcggctggagatttaaatggtgtgttggtgcgagatgagcgtgagaggagcaatggctggtgtgcgagcgtgcgtgagactgagagtggctgagtgagagagaagacaactatggactatggtccaactccatggaggtctaagttttttttttcaaaatcaaaaaaaaaaattgctaagtaaaataagatgatgagagtgacggctgctagggttggttggagagagatgaaggggtttaggttatgttgtattaggtttagccttggtttgcatatatgtatatatatatatttgttagttgggcttgggctggtcggcccagtttgggttgaaaaactattagccggaatatcaacccatttggtgcgggttgggcttttttcaccccatgtgatgctcggcccactaaatctgaccatgcttcggcctatttcgagttgggttggtcgggttggtcggcccatttggaacccatgctcagccctactgctaaggtaccttcctggaagatcctatttgacttgggcttgacccaagttatcgtttttaggcctagtggtgggctttcaatgctgacctgaagtccacctgtcccttgccggaaatacgaataacaactcttaaccaaaatgtttgtaaatgtgacattttctttagcaaaaaagttttctatccaaacataaggcaatccatgaaattgcagtttgtttgagaaaataatagcaaaatatggttgaaattgggtaatgttagaattttagccacttgttagttagtaactaacttaattgttaattaggttgttgctcagttttttcccaactctttggatctccattgcttgtttatacaaggagagattgttctaaattctaggtgatggtctagagagagaaattaagaagaaaagattgagagaagagggttatacaggggttgtgtgtgtttgatcacaattccctcaggtgagtattttgtaggtgcaagacaccattattgttattgatccatagagatcactctctgtaatctgagctactattttgaataaagacaggtcataaggtggttcctctatgggattatattcaagaaaaaaaattgagattgaacctcattaatttttttgtctcttgttattaatgccatgacattctgtcatagcatatgtttattattttagttattttttccaatttctttaattaacattttgtgttagttagcattactactgaaactaatatattcttaaaatgtgttaattcacaaataaggtatcagagcttcaaggttgggatcatatattcaagaactaagtttcaagttttaagaactcggcatcaatggcatcggttagatttgaagttgaaaaattcacaggcacaaatgacttcagtttatagaagattaagaggaaagctctcctagttcattaagaaatttttgaataacttgattttactactatcaaagagcttggagatgacaagaaaaagatccaagaaattggatctaaggcttagtgtgatcttgttgagcctcagagatgaagtactttgagaagttttagatgagactactacagagaggtctcaactacagagattctttggacaaagcttgcagccattaacatgaagaaatatctagccaataaactttacctgaagaagaatctttatacgatgaggatggaagattcgaaagagttgaggaaacacttgtacaagttcaataaaatttttctagctttgaacaatattggcgtgaaggttgatgaagaggatcaggccattatatggctaagttaattgtcgaaggcatatgaacatttttggacaccattcgcaatggcagaggtgaaggttgcatagaaatcgaaggaaatccagaagaaatccgatgatcctcatgacttaagtggagagggtttgtttgtgaaaggaagattagacaagaatggtttcaagaaaaccaaaacagggcacaaacaaaaatcaaaatcaagagttctcacaaacatgaaatgtttctattttaagaaggatggacattttagagatgagtgctatctcctgaagaacaaattaaattgagataagcaaggaaatggggaagttgatgttgtgaaacagagttatgactctacatatgtgcttaatgtatcaataacagattttggtgatgattggattttggactcgagatgctccttccacgtgatagcaaacaaagccatgttcaattctctttaagagaattaggtggtactgtattgtttggaaacaagaaagcatgccaaattcaagggataggctcatttcagatgaaaatccatgatggcattacaaggactctacaacaagcctggtatgttcctaatcttaaaagaaacttactttcaattggtatgttcgattctaatggattttctgtcaagattgataatggtactatgaagatttctagaggttcattatttggagtcaagggaaaacttagtaatggtatgtactacttagttggtaatgcaatattaggtcaagcctcatcaccaatcaatcaagataacatcttaggattggttatgtaagtgaaagagggatgtaacaactagaaaaatggggggttttttaaaggtggattaaaaggtaagttgagcatctgtgaagaatgtgtttatggcaagtcttgcaagataaaattcacacatggtgttcactcaacaaaggtaaaattagactatatacactcttgtctgtggggaccttccacgatacgaactttgggtggagccaactattttttgagcattgtagatgattatacaaggaaggtatgggtgtttctgttaccgaacaaggatcattctttcaacacctttactatatgtaagaagctcattgaaaatcaa

SEQ ID NO: 79342 - DNA, 5308 bp, Cannabis sativa
acacattataatttaatatatattctaatttttagatacaataattttttagcttcaattttttattaaaaaataatgaataatatcaatactacaacataacatctattcaaatttctaaaatgatatttttttctctctaataccacataatatgtctaccttaccaaacatcctaaaatcggagatgctgttaaagtagataagtgtgtcattggtttttctatatataatagagagatatactgctgaacaaaagagtgacaactcacaaaactttatttgttcattcatgtgcctaatgaagaaacccagacatggtatagagttggataatttgtatggtttgaataagttgatacgaaactttcccttgctttagaaatgtataacaaatagagtaaagggtttataattaagccgaaatcaatttatgtgaaaatttgaagctaagcaaagaggtagtgtgtgattctttttctattgttccattaacattttaataaacctaaaaccacaagaagagtataattatttacgtgtaaaaacagatgtaatctttaatggtaatcttaaaattaatattaataaatcggtggtcggtgagaactgagaagtgggcaacagccatttttagttttgaagttatttccaagctttcttagcaagtccaatgttaaatatacctcaaaaaggtacatgggtaggacgaggttccatgttaatgtcccttgtacggaagataacgacatttggaatcgtacccaagtcttcgtctttgagtttagaatcttactgccaagtcaacgacaatgatagggtatattccaagaacagagctattgatagttttatcaaagttggggactttgattctgctctccaagtgttcgatgaaacgccgctttatgatgttgtttcgtataacttgataatttctgggtaccgtcgttgtgggcttttgaaagagtcttttgggttttataatgaaatggtttctcgaggaattcgtgagagtgaatcaacgttttcctctgtattgggtgtgtgtagtgatgctgggttttatgctcaagggattcaagttcactgtagagttgttttgatgggttttggtttgaacttgtttgtgggaagttctcttattaatctttatatgcaaatggggcaagaaaacttggctcttgagatgtttgatgaattgcctgaaagaaatttggagacttggaatttggttctacgtgggttgtgtgaagtgggtcaagttgagaagttgttggaattgtattttaggatgaaatgggatggtgttcagtgcaatggggttactttctcttatttgattcgtggctgttgttgttttactaatggtggatcttttgaggaggaaggaaggcagctacattgtgatgctattaagcttggttgggtagaaatgaatgtgtttgtggccaatgccttggttgatttatactctgcttgtgagaatttaaatgatgcaagaaaagcatttgaagatatacctttaaaagatgtaatttcatggaactcaatggtttgggtctatgccaatagtgggctacttgttgattcagttaaagtattttctgggatgcagttttgggggaacaggccatcgattcgatcacttgtgggattactgaattttgctagtggaaccaggaatattggatttgggaagcagatacactcttatgcaatgaaaatgggatttgatagtggaagtgctcatatccaatctgctttgataaatatgtatggcaaatgtggtgacatagagagatctgttgccatttatgaaaatgttgaaggaagaactcttgagtgttgtaactcgttaatgacatctttgatgcattgtggctgtattggagatgtggttgagatgtttggtttgatggttgatgagggaattggaatcgacgaagtgactctttcgacatcactgaaagcgttatcagtgtctactttgacaagcttagcaagcttgaaaatggtgcattgttatgcagtaaaattaggacttgaatctgatcttgcagtttcctgctctctgattgatgcatattcaaaatgtggtcgtatcgatcactctcgaatggtctttgaacagcttcaaacaccaagcaccatatgttttacatcaatcatcaatggatatgcccagaatggaatgggaagtgaagctcttaaatttttccaagcaatgatccataagggtctgaaacctgataaagttacattcttgtgtgcattagcagggtgcaaccattctgggttggtaaaagaaggaaaaattctgtttgattcaatgaaaacttcatatggaatttgccctgatcgacaacattattcatgtatggttgatctcttaggccgtgcaggcttactagatgaagccgagaagctgctaattaaggcaaagggaaacgaagacacgatgatgtggagctcgtttttgagaagttgcagggttcataagaacgaaaagatgggaagacgagcagccaaagtcttgatggagcttgaacccgagaatcctgcaatttgcttgcaagtttcaaacttttactctgaagtcggggagttttcgacttcaatggaaattagagagttggcaatggcaaggaaggttacaagagagattggtcacagtttaattgagaccagcaatcattgtttgaagttacaatcttgagcatatggtatttttggtgagttttgtgcttttcttttttatcattagtacaaacaattcatagtgctgtaactatcttgtgcataactttacttgagaaacaattctttccacgtttggctgttgaggagtgtggcctgcatgtcttaaaaaaacgtgatccgcattcacattactactaaccaaaatgacactttatttttgttaatacatactttaatttttttagtgaagtttttattattaatttcttgtacaaattcttttttaggactgttcatcaatacttaattaacactataaaaaattgcaacttgcatggtttctcttggtgaaagagaagtacaaataggacccatgaggactattgctggtgcatttttatttcattggatgagaagtaaagcaaggacctcccctctaaaacaaaaaagaagaagatgaaataaagaaagaaaaaatctcttgtactttaagtgtgggcatgttgaaaatgtaacatcttttatgtactttcaagccaagccatatagtggacaaaacacttcatttcctaaaactaatctgtatgtataaattataacccattgtttcattaaattttatgcaaatcaatcaaaaccattctagaaaagcagccaaaaaacagtcccccacttcctaaaataatatggataaattctttaagctttcttttcttggtttcttgatagcgtcttatacggttgcaggaaactttctgcatgatgactttgccatgtttgatgagctagacatagaaagccaggactcagaagatgacattgatatcgacttctttgatatcccttcatggaaaagcgaacgcggtggtaaggttcttgtgaatgtagatagctttggtgctgttggagatggagttgctgatgatactcaggtgaacattatattggttacctgtattttgatattttgttttatttgaatgcattttttcatgatttatctagtttcaaactcgaaactttcctatactaacaatgtgtaaagtatcattattcattcatttacatttatttttccatattgggtgattgaattaggctttccaaaaagcatgggatactgcctgctctacaccgaaagcagttcttttggttcctcaagatcgtcgttatcttgtcaatgcaacaaaattccaagggccatgtgcagaaaagttagttatccaggtaaaacctgcaatgatctcaatacaaactattatgaagtctttgcaactcttctgtttctcacagctgcggtgacaataatttttaatgttgtacagattgatggaacaattgtggcaccagatgaaccgaaaaactggaatccaaagtttgcgcgacaatggcttgaattttcaaaactagagggagctctattccaaggccatggagttattgatggctcaggcagcaaatggtgggcagcatcctgcaaaaaaaacaagacaaatgtatgaagattcaataatgaatgaactcaagccagtttttatttttgtatagtgcttcaattttatgaacaagaaactaacatgtgagctctcctatctttttctacagccatgcaaaggagcaccaacagtaagataatctttccctcggttgtaattgcatattcaggtatgaataagagtgataataaagagtttgatttgggtttttattgcaggcattaactatagattcaagcacagctataaaggtaaaaggcctcaccatacagaacagccaacagatgaattttattatttctcggtcagattctgtgcgaattactggtgtacaagttacatgtcctggagacagtcccaacactgatggaatccatatcactcaatcaactaatgtggttctacaagaaagcagaatttcaacaggtttgtcattataatgttctatgttaaatttcattggtcatatcattaagtatgcagacccaagagtgttttctggtggttcttttggcatttgatttcaggggatgattgtgtctcaattgtcaatgccagctccaacatcaaaatgaaaagaatctattgtggcccaggacatggaataaggtacttgtctatctacaaaatatgaccactcatgattattgatagtgttgattgatcaaacaaatgttctaaaacttcattttatccttgcaaaattctactgtaaagcattggaagtcttggaaaggacaattccattggcatagttactcaagtggtgttggatacagcagtcctcaaagaaactaccaatggtgtcaggatcaagacttggcaggttgtactacaagttatttgaacacaattttctcacgttaacaactcaagtgctcgaagattcgtctcttacacgcgtttctttctttctttctttgtggggtgttgtttttcagggaggttctggttatgttcaaggcgtacggttccaaaatgtgaagatgatagatgtagccaaccccattattattgatcaattctactgtgattctccaaaaagttgcgaaaatcaggtacaaccttcaaattcaatattatatttccatattttgcattcaaattct

SEQ ID NO: 79343 - DNA, 6401 bp, Cannabis sativa
tttaggttttctcataatctgattgtagttttacccctaaataaagctgtgttgtctctgtgtgtgtgtttttctataaagataaagttaactagagaacaataaaataaaatagaaaagaaaaacatcttacaacattgtgcctttcatgctacccttggactatcttggatgtgctgaaaatgatttttattttttagaccttgttcgtgttgcttcctaatatttttcctgtctaaccttgatgctgaatttgaatacatttttcaggacgcgaaagagcatctttctgctctagctgacaagctggggtcatccctgacagatattgacgtatggaactcttaatcaatcctgtgtactagctttttttgagttgaataatcatcctttcaataggatttggaaagtgattttaactttgtgtggtgtattcaagtgaattgtagtgtatgcactcttagttttgatctcctctgatacaattaattttgtgtgattgcagttatccgttaaatcatcacgaacagcagcagacaatgctgatcaaggtttgtctgctaggaaaattatagaatcaaatatgaaatattctttcaatatctttatacttcattgctttttgtctttgaatatttgtaatggcattcgttgatgatacagtaattcatttggtgataatttctatgctaggaagattataatatgtaactttaacattcaaaatttatttgtaggtgaaagtcacatctaccttcctaaatttagatgttttgctgtcaagagtttctgattatgttcattttgtttctctcactcgtagattatgatgagaaggctgaagatgcagttgattacgaagactttgatgagcaatatgaaggaccggaggttcaagcggccactgaggaggactatcttttgtccaaaaaggcatacatttctaactcactggctattttgaagcctacaccgtctgtatttgacgatgaaaattatgatgaagaaattgaagaggaacaagaggtggttgataatgatacaaaggttcagaataccactcttttgggtaggcttggtttcgactttttttttttttttaaaaaaaaactttctgctatatctttcttcatttggttgctatcatgcatgtataattttgttttgtttttgaatgtttttttttttcatacacattccagcttaaattgttttcaaatgactgcattttttcgtgcttaacacatgcaaatatatatatatatatatatatatttatatattaccctgaaagtctggaacagacctgattttggttttaacgaaacaacaacaatgcctggatactatgaatttcagcttataagaaagggaaaaactatgcttaggagccttccaagaataagaaaaacaaaacaccactgctatggatagaagatgttgttttcaacttcttgaaagataaagaaaaacagttatagatgttgcatcaaacacctttcgaaatgtgctataaatgtatagtattttgtgggtatatgttttcaacatgagtctatatatgcatgtttccagcaatatgtattttagcaacgaacatgcctacctagggcacaaacacaccatttattgatcagcttgggcagtttcgatgtctactgctaattggtatgctaattatagcaagtttaggtgtttatgttgagaactgaactagaatttgttgctgaattaaaagtcagtcgtttttgctgactgatgacaatggtaactataatatgtatttgtatttgacaaaggaacttatcatggcttatgtaatattcttaaattctatttctgttttatggctgctctgttgttgagtgtatgccattagatatttattagttgttttttttaataagaaacaagattgtattacaaagagatgatgggaaatcatctgtagtacaatctagacaaccacatagaggttgttaattctaagatacatgggagtagcagatgcatgctatttattagaatggattctcttgaagaataaaaaggtaatattatgcttttaatgatatgtactggcatggtactggggcattatagaaccaaaagtttaatccaccaaacaaagtgccattgtagcatatgccaggatggttcactgtcactatatagctgttgttcatatcaaaacaaaaacattagtttacctcacttgggaaccccatcaatctggtctacatacatggtagttttaaactgttcaaagagtttaatgttggtatttacttttttttcccctccctatagctttgtcttttgacattggacttatcttagcatgccactgtcaggtgaagaggttaaatctcctgaggtggattctatcaaagagaagtcttctgaggatgatcacgagactgactctcatgatacagaaacgttggcctctgacatagaagaatctcaggttgctatattgccttgattatattaatattttaaacagtgatatatacatcttaagaaccagtataaactactccaaaccatagcatcatatagtgctaactaacgtatacactaatcagcctaggccgattcaaagcaatagctgccgatcacatagcagcatcaagaaggagaagtcttaaattcttttatttaagtttagattatttagcttcagagacatcatgttctggctggcttttatgcataactacggtgaaatacgaataatatagtgctaggtgcgatttattttaccctgcaagcgtctaacttataatacattactgagaacttcttatccagaaataaaagctgaatgtgtatttcaagaaaagttttatgtgttgaaggttcattagcattgtttagtgtgtattagttaatttagattcagatttttggatcctatacagaataaataagagttgaaatgactactttgcatttggtgatccctaactgtattaaaggtgacagtacatgcatttttcctctcttaaaaaaaaaaccagccctttgattatgtcatgtgggtactactgggtagttatttgtatcagtttgttcaattacgattttcattgatgattgttttgtgtaattatgcatgagcaagcaggaggagctatcagaaaaagaccccacaccattgccagttttatgtatagaagatggaaaagttattttacagttctctgaaatctttggaattcatgagcccgttaagaaaagggataagagagatcataagtattttgttcctaaaggtatgtggcgtatttaagattttctcgctacaaatatctcagcccgtattcttttttcactagttattgtgttgctattctagaatttatgtttgggtctgtagatgttctcacatgtatagattttaatactattgttgtcatcttcttgtgtgtatagtttactttttctttttttgggtagtttgttgattctcattcatcttttcagataggtttaaatccattgatgtttctaatattgttgaagaagatgaagaagagtttttgagaggttctggtcagagttttatgtctcttaaacaagaggaattttataaggatgaccatgatgacattgagtcagaatcccaaaattccggttctttgcaaggggttgccttagcgggttcacagtatgatgggtcaagaaaagattcctttctctctgcagagccaatgaaggaagagacagtcatatgccctgctggtaggcattcaccgtcaagtgctacattttatcctcttgatcaactagactgggaggttgggattgtctgggataattctcccgttgttagtgaaaattctgttggaagcactgaactccattttgaagctacagtaactgatagtgaaacagaatctgaggctaggctgcaaaatcacaaactaaatacagtagtagtagctgatgagaagactcacaagaatttagtacatagttccccaattatattggagcagtttggcacaagaacatcaggatcttcaagccttccattctcagaaggtagatatcatccacaacttttgagactggaatctcgatctgaagtgaatgactctaatcaggatgatgagggaatggagaaagttgttgagaagcagcctcatcgaactggtgctgcaaaacaatttagcaaacttatatcgttaaacaaagacatgctagaaggatcttggttggacagtataatatgggagcaaggaagacctattagaaagccaaagcttattcttgatcttcaggatgagcagatgctttttgaaattttggatagcaaggatggtaaggatctgaggcttcatgctggggctatgattgttacccgctctgtaaagtcgggccacggtgattctcttgagttgccaggtcatggaggacaatctgtttggcgactagtcgctaatgacaaacactattcaaacaaaaaaacatctcagcaaatgaaatcaaactcaaaaaagcgaacagctcagggtgtcaaactttatcactcacaacctgcagttacactacagacgatgaagctgaagttgagcaagtaagaataaaataattggaatacttgacattctgtttggttatggtgacttatttctgtgaattaagaaaaaaaatcacttctgctgaacatgtttctcaaaaatatttcacttctctaaaaattaaaactaaactacataatttttttttttaaaaaaaggaagaagaaaaattagtgttaccaagctcatccttagctcgtttagggtaccacattttagttgatttagcaagtagagttgtatattttagaaaccaaaactttattataatcagaaaagataattgagaaagacaaagttaccattcctgcatgagaagcaaaagcaagcaaggaatcattaattagaaactaattagatttttaaagccttccgactaatcataatgaaaatttaatcaagaggaatgtctttaaaatgtttgttctttttataattttgccttatacagaagaatgcatttctgtcatcggtcaaaattcatatttgcttctgattgtaatttttgctttgtatacacacccaaaaagacgcatattttgcatcttaaacgctttttatgctggcaatctttgagaaacgcttttattgataactggcgcaccaacataatggaaaatagtgtcaattagtttgaaatttctattagtgataattataacttgggagttctttgcattattgatttggaatgggggtggactgcttggttaggtgcaatatgtgtcgagtatgattgagtatgctgctatatatcctagttcatgccgtgttaaatatttatgaaacatgttttgtaatgtttgaaatcttacttgtgttttgcagtaaggacatagctaattttcatcgacctaaagctttgtggtatccccatgacaatgaagtggctctaaaggaacaagggaagctgcctactcaaggaccaatgaaacttattgtaaagagcttgggtgggaaaggaagtaaactccatgtggacgctgaggaaaccatctcctctgttaaggctaaagcttcaaaaaagctaggttgtcttctttgaatgagttaatccttaatagtgataaaaaatcttgataacctattgctaatttatctatacactacatgccataaacagtttatgtttccaaatatttatgatatgatttcttgaaagattatattattgttattatctaaactgtggaaactaaccaggaactttgattgtagatttcaagtcaactgagacagtgaagctgttttatcgagggaaagagcttgaagacgataaatctcttgttacccaaaatgtgccacctaactctttgcttcatcttgttcgtacaaaaatacatttgttgccaagagcacagaagctgcctggtgaaaataagtctttacgccctcctggagcatttaagaagaaatctgatctttctgtgaaagatggccatattttcctaatggagtaagtggcttggaagaaattatatatacatatgcataatggtaaaactagctatttttctttttttcctttcttagaaaaggcttctcttaatagcaataataatgataacgttgctaacttaaaagccttattcaaaaaatgtcaactcgctccttacacgaggaaaaaaataatacaattttaggctgaatctttcttaacctggattaaatttctattttttaatcttcatttattgaccttttttcgttttttcagtttttctcttccctctctatccagtgttcccttttgtgaagtaaaaaaagcgtctagctggtctaacaatctttggtttttaatcttctcat

SEQ ID NO: 79344 - DNA, 3042 bp, Cannabis sativa
ggtcacaatgaaggtgctatcgtggaattgttggggtctcgctagagacacggcaacccaagctcttttttcttggggaaggaaatacaaccctgattgtattttccttatggagactaaaattaataggagccgtatgcagcgtgttgcacagggaatgggatatacggggttcgattgtattgaagcttgcggaaatgcagggggactgtgtttgttttggaaagctgatcaaaatattcatatttgtagtattgagaagtctattgtggaagctatggtgtgggacgatcggattaacaagtattggcgcctcttcgcggtttatggatcgccctatgagaatgaaaaaatggctttttggaagaagattgaagaaagagttattgactgtggactaccgtgggcagtgttgggtgatctaaacactctcctaggtcctgaagacaagtccagcaggtgtagggtaaagaggagggatgttaaatggttaagtgatttctgttataatgctgggggcgtttatttgggcttcaaagggggaagatacacatggcacaataagagcttcaatggaggacttacccgagaatggttggacagagtcattggctcccacgattggatcattgattttcctaaagtgggggtactcaacctccctatcttagtctctgaccatgcaccacttatactagatactcttatgatcagaccctcaggccatattcctttctggttctatgaagcctggtctggggatgctaagtgtggtgaaacaatcgccctgtcctggaacaacagcattgcggatgctgcttgtagaatcatcagtaacattgacagcacgcgtcgggccttgataaagtgaaggaagaaaaattctgaggattgcgacaacactatacgcttgcttgaggagaaattagcgcatattcagaatatgcctatatccaatacaacgtgtgtggaagagggactgatccacgcaaagcttgaagaaatgtggaagatcaaggaaaatatgtggcgacaaaagtcaagtgagatttagttgaagcttggggataggaattcaaggttctttcacgcatcagccatgatccgaagaaggagaaatcaaatcgtggaactctttgatactgaagggaagaaatgggaggataagacgcacttgacaggtattatcaataactactttggtaacctttttaaatctgactttccctgcattcccgattcctttgatgatttgtttgtcaacaaacttaacaatgaggataacttaagctttgcgaattatcctaccttccaagaaatacgagaagttgtgtttgaactccatcccctaaaagcccctggccctgatggattatcgggatgcttttataggagatattgggatatagtgggaaaggatgtctgtttggcagttcgtgagttttttcaattagggaaactgaacccaaaactgaattattcgtttatttgcctcatccctaaagttgaaaattctacgaaaatggagcagtttagactgatcagcctatgtaactttgtatataagattatagcaaagatcttgtctaatagactgaggcccttgatggagaggttaatttctccttaccaatctgcttttattcttgggagatggattgctgaagcatccatcctaactcaagaaattgtccacacaattaaaaacaagaaagggaagggggggactgatggcggtaaaactcgatatgcacaaagcatatgacaaaatggaatggagtttcctgaaaagagttcttattgcaaatggtttcaacgatttcaacgagagacttttaatggaatgcgttcagagtttatcttactcagtgttgttgaatggaagccctctcaagaagttctatcctcaaagaggactaagacaaggagactcggtatctccttttttattccttctttcccaggaggtcttgtcaaaattgattctcaaatcagacgagttaaagctgattcatgggattaagatatcaagagagactcctccaattacacatctgatgtttgcagatgatacaatcctcttctctcgggccaatgaggcggaagcaaatgagttgctgaggtgtatttcgacctatgaataatggtcgggacagacctgtagcaaagctaaatcaagcatcttattctccaacaacgtcaataatcaagaaggacatccattttaaatcggttggttgttcaccagactgtaggagacgaaagatatttgggaaatccctttgttttcaagagaagaaagaaggaagactacaactttcttaaagagaaattaaaatctcgcttggaaggttggaagatgagattactttcctatgcaggtagagcagtccttatcagaagtgtagctggctcaatacctgtttatgctatgtcaacaaggaaaattcctttggcaacatgtagggaaatggatgctctggtgagaaaatattggtggctaggaaatttggataaaaacagattcttggctattaaatcttgggattacttgtgccaaccaaaaagttctggaggattgggatttaggcgatttgaagacatgaatagagctttgttggcaaaactttgctggtgtattgcaaagggggagcataaaccttgggtaaactgcctcttaaagaaatattgtaacaaagaaagcttttgggctgtcaaacaaagaggaagtgattcatttatgtggaagaacttggtggaaacaaagaatattttatacaatggttcttgcactcttgctagtagtggagagtctattgatatctggtgtcaaccatggatcccgtggcttagtttcagtgatttcaagactctaatggtgagaatcaaagagactaatcaatacctgaagtctgtggctgatatctccaacggtaatgagtgggatgagggagcgattattgttaagctatttttagcctaagttttgggtcacattttatagttatttttcttcttaattattgtttttggaatagaatt

SEQ ID NO: 79345 - DNA, 2731 bp, Cannabis sativa
tcttttgtacttaattttgttatataattaaaataatatttatttcaaaaaaaatatttatttttataattagtttataattgtttcaaaaaaaattcatatatatttaaaacatatgtcatcgcttcaaatgacttcggttgcaaattttaatcaaatttgaagacaaattggcctaaaaactgaagataaatgccctttttctagttgtgaagtgtttactcaatccaaagctacacttagattgaagctcaaagaacaataaccggaggtgtcacaatgatctttcttcgttattcacatatacagttgatttgtatttattattccgcttgggaagagcattgtatatgctttattttttatataataatttctaatatttcatgcttgaataaaaatgaacgaacaggaaaaagaaaccaaatggacgcaaaagagaaaatgattaacacatcacagtggatgaagcaaatcatgtaagggatactagaaaaaactggatccatgccctactagagagttctacagccttttcttgtaactgaattgttgtttttacacaaatttgcaaagtaagaagacgtgccttaaaaaagaaaaagaaaaaaatagtccttctggatagttcctcctgagaagagagtgatctagggttctcgaactttcttgtcccgtcgatgttgctgtcgtcatcgccgtctatcggcgttcaagtctgtccatggttttccccttcaagtgacggttcgatctcccattctctgaagccgtttgctgctaacagacagaaatcaccattaaagtcctttgtcttctcccttaccggtaaacttctaatccgtaataacttctgtgttgatgtcccatctatgattaactgtcccccatatcgttttttcctcttctctaagcttgtatacaagaaacgcccctttactaattccatattaattagcccccaaccccctaaaccgccctggatgatgattagctctacatttgtaaacgctagaatttctctaggagccactgtcaatgttgtaggcatcatcattcgattacctgacatggagaattgatctcttgcggcaatacaatctccaaggacactaactctttgcccagttcattatatagccgattatactttgattttcactgcaccctgtacttctctgtcacatttccttttatatatttgttctgcaactgtttttcctttcttttttactttagagttccctgctatctcttgcaaatggatgacttatcaaacactttcaatgccactctcaatctcactgctttcgaaactcaaattcactctttctctgaaacacctgaccatcctgaggatgatggtcatcatgaaccctctgccttccttgctgtcaagcttttgaccacacgccacaacaactctgaagctttcaagaatcgactcaagcaaatgtggcctaaacgcttctccatcaatgttcttgaaaaggaacccaacttctttactgtagaatttggatgttttggtgatcgatgtcttgtccttattggtcaatcgtggcatttcgattacaaactcattgtaatgacacctctggaagcgggttctgtggtgactgctgatacacttacaactacaccattttgggtccaagtgtctggaattcaattccttaagcgatcccgtgctcttgctcaaaggcttggtaaagtcctagggcattttatcgaagtggatactgcttctctaaaggagacttggggcccttatctctaggtccacattgagatcgatgtaactaaaccactttcgcgtgatacgggctttcatttccatggaacggctgccccggtttggcttgaattccgtttcgaaaatctacctgatttctgtcattactgtggaagacttagccatattgtgaatcattgccatgagtttcttgcaaaatgtgactcctcctcggctccccctttgcttcattatgatcaatctttaagagccaaaattcgaatcacctcaaatcctttttactttgcttgctcaaggactcggctaaggccacatatagctaaccccacttctttagcccctactcctccttatcagtttcaccaacctccaattatctcagaaggcctattcaatgagcccaccttcgcttacggtgtacaatacttaagccagccgcaaactactcttctgggctttatatggctcaatcctcatccaatacgaccactccccccacccataaccttaaccaaccccctctcactactactacatggatctaccctcaaattagtgtgaccgctacacaaaccgctcccaccaaaagtgtttccaatgccctcactcaaaataacaccgttccctctattccattatcctttccacctcttaccactgctgagcaacttgctacacctctcccaaaggctgtctccacttcggcagagattttggtggccaccgctagagcatcccaacatgtggttcccgtctcccaagctttctctaccattttggctgatcttaatccatctcagccactccgattcgctgttggatcatctgctaatcctgctcccactacttctcaggttcccaagttcaaaccacagcaactagactgcctgaacactgctgaattcaggagaatgctcaaatgtgcatgcaatttagccaagtcccttgatgaagagacatttgaagaggcggggg

SEQ ID NO: 79346 - DNA, 2770 bp, Cannabis sativa
tactaaaaattaaaatattcaagtgagagggaaagtgatgccctactgaataattttcatatatttgtaatatatttgtgatgataataataatagagtggtcttacaatagctcgaggacaaacttgcttccaagctctaatggatacccaaatccaccggccactatggctgcatcatccatagtaacgtcgtatgtgtttgtatcagacttactgcaaaccaaaatgtgagacaatttaggaacgaaaaaatgattttattgactgattaaaattacataataatagaagacttacacaaaggtgccaaccatggaaaatttaagtccaagcaagatgtcaaccaaatactttatttgaccgttgttcttcttgataatctaatcacatcaccataagattttctttaggaaggaaaattagtattaacttaactattgacaaagttccaccttttatatatatatatatttatatttatctatatatatatacctgctttcccattagtccattggcagcattctctaaccaactatcagtttctacctgcaacattaaagtgtgaaaattttgtcatatttggcacaagaacttgttaaataatatgaaatgggacgttcattcaaatcttcttgattcttattcaaggactagtagagagtctaactagtagcaagatcactcctataaatttaactgatgatatgctttatacttatttgttgtgattcaatcacgaacagcttcaacaaagttcacacaaacaaacctaacttcaaacagtcttagagtagtgataagaacaatgcaagaaaataagagagataacacaaggaatttaacgagttcgagctatgagcaatgttctacatctcggttgagcaacatccataacagttacagagaattacaggacgctctaactcaagaatactaaaatgagcttcaagactaacttctctcactagtgtttagaacttccattcaatctctctctgttttacaatgtgaattagataagtatacaagggacaaagaaagctatttataggatactaggcatctcgaatcctacctgaaaataaataacccaatcccgagcttaattaaattcaccagctggcaactaacttaactaagagaataataacttgtaaccaattaccacattattgctttatctgttacatagttttacaattattcattatacttctcttcataacttacaacaaagtgaatgccgatagagatttgagggagaagttcttcaatttcttaaccattcagctattaatcctaattagtacatcactgtctcattgatgtatatttgaatcaacattagcttctatgatgaatccaaaatcagcttgaaattacctgtgaactccataacatttgccattctccctcttgaagctcaatttcaccaatacccttttccttatacgtcgagataagctcgtcgattgcctgcacaagcaaatttattactcagattatgatgatgataatttagcaaattaccattctttaccacaactagaaaaaagcttacttagcagcaaaatcacctctaaaactcccttatctgtagatatagcagagagcagcttttgcctgatttctgtcttcttttgtaacacaaatgtggttccctgcactacagagatatgttcatagagtcttagcttctccgaattcgagattcgatcaaattatgagagaaatagcttccatttttaccttgtttcctcttgagatacgaaggttcccagatggtgaaagatatgtggtatctagccatcccttcgcttcatctcctagaagtctaaatgggactggataaggaaacttaaatggcaaaaacttaaaagaaaaagctgctctgtcaaactgaaaaagtattctttttccatctttgatagaagctattgcctgtaaaattagaataaaaatgtcaacagtcttaattaacaagaatcatgaaagattgagaaaaagatttagacatttaaatacctctactttgagctcaccaatgaagtcagagaactttacaatgttggagacacgagggtcattcgatcgaaggtatacctcttgaattacgctaaagaaatcgaccccaacaaatgttctctacaattatgcacaaaacttcatgatcactgtagcataataacattattggggaatttgcaccaaataatcttaagtagttcatttgttacacttaaattcctatgtaatttttttgcagcagaatttcctatgtatttcatcttaattacacatttggttgtaacaacaaagggacaaacattataacaaaacaattacaaaaaatttacatagagatttaagtgcaataaaatgactatataaggatttttaccaccaaaaaatatacataaaaatttaagtgcaacaatgtgaacaatacaaaattcaaaacccacatttttacaaaatactcaaaacaaagctgttaaaatttgccaaacagggctgtatgcttcaacaatttatattgttcatacaaaaatattcaatcgtacttggattggagaggcagtcccaggtcttgtggtgaacatcaattgccagcgtccttcaatcaaatcagagcttgtctgcaattgcatttatcattaaccacataacaatgtatgtattacaaataactacacataaatttattatacacataattgcagagtcgtatatgtatatacatatataaaaagagttaaaaataa

SEQ ID NO: 79347 - DNA, 3824 bp, Cannabis sativa
attacttgtatctaatcaattttggagataagttttaagtttgtggcttatattttttacttcttaattctgtaaaatggcttaggttatctcatgttgtggtttataatccattgaaaactcaacttttgttggttttctccaaactgttgttaactatttttacagttacagttataattgaatctttaaaaggaaattctgttaagttaggtgttagttgattgagctgttagtgtgctggaattgtcagcaactaactctatataaggctccatattcttatcattctacacaagaaaatgagactcagagagagagagagagagagaatgagaggagagcttttcagctcgagtaagagagagagtaagaagatttagacttgaagaattggctgaagttcatggtgtcgtgatgggttgaagagctcatgaattgagtgttgaagagccaaagtgtcttagattgttcttagtgattcagtacatcaattggtgtttgtaacaagttgattcatagtggagaaactccttggggggagagctggagtaggactcaaattgagatccgaaccaggataaatttcttgtgtttttctcttttattctctgtttttgattgagtttaatttctgttcattttagctaacttgattataatgtgtttgatcactgtgtttgtttgagttagtgttgtttaatcacaacacatgtgaatatactaacagaaggagaaaaagtattcaggcaaccatatgagatagtttggataaaaagtaggtcggcggtgtacattttatttgttcatgttgtgcagtgattaggctctctcaagtcaatttagtaaaacaaataaatagtaaagtatctatttgagatgaaccctagatggccatctcatggatttccattgtcagcctttcatttatcaaattgtgggaactagacatctgcacagagatgtcatgtgaaggctaaaacttttaaagcactttgataagattttaggtaatcgaacgcaaacacatatgacaacatataatttggtgttcaggagggtgccaaacttggttggttccattgcaatgtcatatactcatatcctggattggtcctaatttaggctagcgcattagatagaggtcttgtgcaaaatttcagtagaaacttttcacaagattgcaaccataaggatgaaggtactactctaagacaataacttgtctaaagcctacaaagaagtttcatccatatagttttcctaatacatttatcctagagcttgtctgactgatcatgctgaaaaaaatactcaataaagcaggatcatatacttggcctttgttatttccttgtctcattgaccaattttaatagtgattaactaccgttcacttgagcatatgttggggccaaatatattgggacttttccatgtgatgcatatcatcttgtgatgaatttttctgtaggaacattatgcagtaatcaaatactgatattttgtgtaatcctgtgtagtttggtaaacatgtattctaagacaatattattataattgtaattatcgtatcttctgaaatagttgcgcattataattaattccttttactgttccattaagcttttactcaatgtctggaagcacgatccaaatgcattaactattcattgacataggaacgaagatttgctgtcttggtatcatcacttttatcaagccaaaccaaggatcatgtcaatcatggcaagttcttatacttcaaattttactttatttagtaaaagaaggggggctcaagttcttttaaccttagtacttaaaaacaattatttagtcagtgagctaaaagtttattatgatgaatgatggagaatcatttggtgaaaaaacttatgatgaaatacacagcaaaagttgttaagccttgaaaaagttaaggaatgtatatcaatttgtcattgtgaaagtggaactactataaatgaatttgattgatgtttgccaataaattatatgcacttaagaatgttaaagctcacgcagaatttgtacgtaatggtcctaaaatttgcattttccacatgtttctgctctatttcctttatttaatttttctttgccaaaatctcaaaattgatgtctgcggttataattcaaactaatacttaacatatttttttcaaattcaggagcaattcaacgtctcttacaaaatggtctgcttgctgctgataccattgacaaagctgatgaagcaaccatcaaaagcttgatttatcctgtatggtctatactccacttttcttttatttttcctaataaagtccttgtagatttcctcaattacttggctaggttgaaatgaagaacaaacccgcatgaaagttttagaatattttaattatattgtcgtcatgccaaggatattcatctgttggtaatcagaactttttcattttatattcaattactctttataggttggattttattcaaggaaagcaagtaacttgaagaaagttgcaaaaatatgtctcacaaagtatgatggtgatattcctagctcattggaggagctacttttgcttccagggattggacctaagatggcacatctggtgagaaaggagaaacaataattgcaaactttcactaaaaaaaaaaaaaaaataattgcaaacttaaatcaaaatgctgaaaaaatgatttaattttcaaagctgaatgctttttggtgcttcaggttatgaatgttggttggaacaatgttcaaggcatatgtgttgatactcacgtgcatcgcatatgcaatcgacttggatgggtgtcacgactaggcacaaagcaggtatctttaatctttttcatcaaggaataaattttgatgtaagcaatctgttttttctatggattggactttcctatctctagtagcatgtcttatattgggtaaaaagtatgagttatataggatatggtctaaacactaagaatgttcactcattttacttttaagattgaagtggtcaatgacttttgtgcaatcactggttccatttcaccccattcagaggattggggtttcattttgaaggatttaaaagcgtcattttgaacattcatgccaaaagcatccatacaacatcaatcgaaattcataatctaggttcagtaaaagttctaactacaagaaactacttcatgcttaaaaacataaatatatccaaaatacagtccatggaattaggaactttagaaatagaaataaaatacaaaagataaaaggataaagaagaaacaaataatcttttttccttgttcttctctatttcgtcttttttttttttttatttttttttattttcattatcttgggtattattttcaatggctgccaaggaatgtgtctctcagaaaataaggtggcgcatctgatttttttattctagggtttttaattgaataaaccctgataaaggagaagacccatttcttcttgttctttaggtgtccactattcttttggatccttcctttaaacaattaattcagttggttctcttttagtccttcaagtcaattcttgacttttaaacattttggccagctagactgcttcaaaaacgtagttattttgcctctagtttctgcgtcattattccaagcaattaatccacttccagcttttgaattttcagctttcattcttgctccaaaggtttgaaaattggcttggggaactttttacatttaatactaatgatcaagttcccacaagttgatttcacatgtaacaaatatggaattaacttgaaatt

SEQ ID NO: 79348 - DNA, 1482 bp, Cannabis sativa
taacacaataactaacaactaacagatacaagatgaaacagttataactgaaagtaactaactttcaactaacagtggaggtaaaaactggtttagatttgagtggattatttaccacaccgctaataattaaaactgctattaaacggttaggtttttttagtaataaactgatcgaaaaaaccgaatctaacagttatacacatatattaatttattaactatatataatatgtagttattgataatatgtataattcgaacatatacatatatatatttccaaggtgacttggattcagtcctcgtcagctagtattataataccatgacatgaaatttggggtcccacacaatatggccggcttggtatcttattcttactatataataatttagcattaactaaaaatattcaccacactcgtgctaattttcttctatcattttatttttgttttctagttttactaaaatgtctaagcgctttaaacttaaatttcctaatgttaaatctttccaattatgtcgttccaaagacccttcatccttaccagaaaatcctaagccgataatttaccggccatcgccggtaaacccgaaggttttcgacatcggctacccgtccactctaccggcacctccgcattcaacaccggagtactcgttcgtgatgcgacgcgccgccgcttcatcgaggatgaaatcggacggctgtgggccgacgacgtgcgctcagtacttctattctggctgcagcagtaccgaattgccttgttgcaatttcaaaacgacgtcgtcgtctgccgtgacggaaaaatatttcgttaagaagagaaagaatgagaagaagcagaagcgatcaaaagctcggagtgattaccgaagagacttcgtttcgtttagcagcagcaacgattatgatgaagacgaggacagcgtagtccttctcgattcttcaagaagcttctcgaatgaggttgctaatgatgaaccgattataatggagataccgaacgatattccgagagttcgatcaaaggagaaggtcgtggaagattcgagaattcggagagtgaagagccagagtaattgcaacaccggtagtagtagtagtagttctaagaatcggaaaggatcggtcaaaacggtgccgtttcagggaacagccggtgacgtggtggaggtaacaaaggtgagggaaagcgtagcagtagtgaagaaatcggaggatccgtacgaagatttcaagaggtcaatgttggagatgataatggagaagcagatgttcgaggccagtgatttggaggagcttcttcaatgcttcttgacactgaattcgcgccagtaccatggtgttatagtcgaagctttctctgagatttgggacatcttgttctgtgattctcctgtcaaacaacaccgactctccttttaaattcacgcttcatacatacagctacctctcttggtttttttttt

SEQ ID NO: 79349 - DNA, 2805 bp, Cannabis sativa
gttcatggggaatttttaacgaccaaaaaaatttagggggcatgatttggtatatatcaaagttcggggggaaaaattgctaattagccaaataaaaatgatttaaatagaaagtgtaaataattggaatttataaagatgtgtgtaaatattacgtttttgggtctctcttgaaagctctcgttttcaattcaaagggtctctcttctcttctctaaccttgggaaaaaaagaggcaactgttttcttctgtaaaaagatcaaatctttaatggcttccattaatggaggagaatcttacttaaccataggctccgatgtcgaggtcggaaccccagatggcggcttcattccggcaacaatcatcggcaggggatcataccccaccagtttttttgtcaaatacaaaaccctaaagtccttgaggagagagtttgatgtgtctctgataaggccatcgccccccaaagagatcgaatttagggaatttaagttggatcaagaagtcgatgcttactataatggtaagtggtgggagggattgatcaccaatgtctctaaagattgtttgaatttcgctgtttccttgtacgagaacgatgagatcgaggtccaatattgtaatttgagacctcatcgtgattgggttgatgatcattgggttcctcctcttgttaaggtataattatttctgattttcatactatgctgcttgtaaaaattcaatctttaatcttttagggttcgtttggtaggcgagtttagattgtgttcatagttttatataatagaatgtgaaattttaatttgataccaaacgaaacctaagcttttgttgttattcttgttgttgctgatctggtagtgtgtgaaaacatgtctttgcttgtaaattactgttcttttatgattctaatgttactgtttttgttgctctaacttaacttcaaaccccagaaaaggagattagtgtttttgtttctgttggtttattagcttcaaatttctctatagattttaagtttttcatcactaaaaagagaaataaggaaatctcaaatctcttaacacttcttacaaaatgagaaatttgtttgatttatgatgaccttgaattagcctctattgattgattacatcatactatacttactcattcaatcacttgtggtttacatatcagacccctgtgtcagattctaatggtgcaaaaacaatggaggaatttgaggtaggatctctagtcgagatcaggaacgaggaagagggactagaaggttcatggtatacagccagtattatcagaattatggagaatgacaagtactatattcagtacaagactataaagacagagactggtgagaagtatttgtgtgaggaggctgagagaagaaacataagaccagttcctcccgaaattattatggctgattcttttagcctaaatgaagaagttgatgcctattataatgatggttggtgggaaggtgctatatcaaaagtattgtctagaggaaggtacaaggtttactttgagaattcatgtgaagaaattgttttcgagcatgaggatttgagaccgcgtcaaaattggatcaatcgtacttgggtttcggcttctaattaaggtatttgagttttgattatgtttgatctataattggctcaagtttctgtttttgtagaactattcttaatgttatttgattttgtgtgtttaggcaactataaccatctgctaatgatcattactgaatgtatatgacaaatttattcttagtattgatagtgtgatctaatcttgtatagtgctacataccgtaataggtttgaaattatttgaacacgtgtggtaaactagaatatgagaaactcgataacaaaagattgtgttctttgtattgatagtgtgatcttgctgaattctatatacatacatatatgtatatatctttgtaaagtgtgtgacttttgttgaaatttcttatacttaattactttgctaatcaatgatttgttattttttttgcaacagtaaaaatgtgaaagacatgtgaagagctttggcagagtaggaaatagaaaattttcttttgaaattcagaaattgtttatgggagctgtgcagtgaccttcctccattgaattatgattagatatagttatatcaatacttagtttaacagtttcatagatcagtggcattttgcagaagtcaagaccaatttattttgtgaagattgttatgttaggtctgttttagatattaatatatttacctgtaattataatgtttattactattaaacacattacaagcattttcatattaatcaacaccttcaaatgcaccctagagtatctcaaatggtcaggcatatagtttgctcgacaacgtccgctgttcgagtcaaatattttaggtttgggtgacaatcctagtttcgaaaaatgaaaaagaaaaaacaaaatcggctccaagcaacctaatggggatgagggccaaccagtgtgtagcaagccatatgagggtagctaagcaaagacaacttagggtcatgtgctagcaaaaagaaacaccttcactgtgtctaatgcaatccaaacattccttcgaacctctaacatcttattgtttgaacctgataactaaaacgtttgaatatgtgacagctttcgtattctttaagtaactaaagggttaattagtaactttttctaactttgacatgtatcaaatcatgtctctgaatttttttggtcgttaaaaatttttctcgaagtattgagattgttagattt

SEQ ID NO: 79350 - DNA, 2904 bp, Cannabis sativa
atttgtaattgtgttatgcacattgacatgtctacctgtaattactgtaggtaaaaaaatctcaaccctcgtgttaacctatcatgaatgttcacgtacaattgattatttcgcacctaagctaataagttgcaacatgagcaaaaagttaacagatagtataaaaaggacgaacaagaaggtcaattcagccatattcccagctgagacagtgtccttggggaatatatacatgatgaaatcttgattacaagcaataagacttgcataaaatttgtagttttgtaacacttcggaacacaacataaatatcacaaaactgagctcacatccaaaccatgtcaaataaatgaacacttaatttaactatccacactatcgatgttcatattgtaagaacaaagtttgaagattcagcattttggataaactccaagtcatgcttcctcacactgaaaaaaaaaaaaaacagtattatcttaaagtagcactcccatctctacccaaagggttaaaagaaggataagcactgctcctgaaatcagaatcctgaacagcatttgaatctgaatgtgtccatccatcccaaaatgtttgactggatcttttggtagctccatatttctcgaattcaagcctctgccttggggcactctgtgaccgaagtttagcgcgggaggattccgtgttagccatgtagtttggatggcttgagtagccactgaagtaaccccacgagtgctcgctctttgcaggcgaaaagggtccacctctcctagcgctgctgcttccatgtctagacgaggcagaaaaggcttgaggactgttccttgttgtcttaacagttgcttcatctttcactattggatttttcaaattgccaaatgacactgcatcaatggaagattgatttggaaccgaaactggaacttttatcatttgttttgatggggaatccaatggagtaaagctccggttttgatagtctgaggccaaaacatggcgtggcatttgaaagttccgtgtactactacgttgagtatccatgcgaggcttccaagtatctacttctagaatcttgtcgcttttttcgtcgtcagtgtgaccatatctcattgaagagctttgacaactgttccaaatgctttcctccatccaacggtctaaccagtttgatcctgtttgatttttctcaatgttcatcacatccctgaagtttgaatttgaaccacacctctacatatgcgtgttgaaagacaaaattagtaatggcactaagatcaatgtctaagtttaagaatgtcttatttcacataaaaatcaattaaaagaataccttaaggattgaggggccatcatatttgttactataagtacgttgttgaaatccatttctatcagaatttaaagggatctgcaagttatgtgatactacaataagtttgaaggatcacttaaatgcaaccacaagttatttcctaacatatttcaaaaaggtaaagatcatattcaaaccaattataagagaaaagtatttttgtaaataatattcacttactggtggcaataagaacttgctggaagaatttaaagattccgacccattcgtgcgaatcgcacgtacgcgggcttggactcgcacgagtgtctgcatccgattaagcatgtcagctgtttgttttctcactatgtggcctctgaccaatgcttgaagcttcacaagtgctttcagtgccctcaaggctcttcttgcctttaaaatttcataatcaaaagaatttagataatgactttctatctaccaaagccaaattagaattttgttttaaaaaaaccactcaacaaatataactaaaaccacttcaaatactagctactttactttatacctaccacttgaaaattttaaaaactaaaagttataataatgtcatttggttgcactgcaagaaacagctcaggaatttaaacaaattggcatgaactggtattgactttaataaaggctgcaatgtaaaatcacttgttgacgaaatcattacctctcatcactcaaaagaattggaaatatacaaatacaagatgacaataatttaaataatataaaaaatgttgttattcaaaattaaaagatttcaaattgaaacacttttcagaaacataaacaatattgcccgtgtgaacattccttcgaatttcaactcagccccacttaaaagagataaagtaaactaaaaaaggaatttgtaaaataagggttaggtgtaatataatagtaattggatatgggccttaggaataggcactagacatacaacgacgagtcaaaatcttgtgccgtgttatccattcctatataatacataaaatcttcaatagttaccaaagaaaatgtggtgaccaattttttttttttcttttgtggcctatactgcttactgtgctaaagtccaaatacgagacatcttagtcttacagaatgtcagatataccgaacaaaccaatagcatgacgacacgtcattctttattagttttcaagtacgtatatgagaaaattacacaatattgtttacaggtgcaaaatccctcttacctaaaaacttctagaatataaaattctattttaactctctgtttactctgacagtgaatgacatacgtctattagtgtcggcgcatttattattatattaatattcgttttctttccaaaaatcaattaaaatcaatgatcttcaaaattaaatttcactgtgtttgtttctcgagaaaagaaaaacggaaaataatttaaagtttccctcggaaactaccacaaaaatatgaaaattttcaaacgctaaactgaatacccaagttcaaacgagttaaccaataagaaagttccacatcattttcaata

SEQ ID NO: 79351 - DNA, 2767 bp, Cannabis sativa
tattgttgttgttgttgtcattattattatatgggacagaaataatgatccaacatgttagttgcactaaattaaaatatgttaatgtattctcttgcttttttttttttcttttctttgacccttcaaaagatgagctccttgttttaacttaatcatatagtggaagtagactttaagcttgagtttgagtttgagtctgaccatgaggtgcttttgtctcttgagttaggtataatttctaagcattagttgtgtaacaaccttattaaaaaactacaagaaatcaacgaagttatattttaagcaaaatataatacttatactttaaagatttagatttaaacaatttgatagagaatgtttaatcaaagaatactatatttttagacattgaagagctaaagtgaaagcatagtttaacaatcatacaaaatcatgtttcacaaatgggaaatcaacatacaaaataaaaaaatactagcacaaaaaaatgtatacaaaataaattcaaataatccaagaaaacaagttaattaataactaaagtgaagtaaaagttacaaaagatagacacacttgacatgctcttcaaaatataaaaatggtaaagagaaaatggtgaaggaaagaaatggtaaaaaggaataagtgtaaagttgaagagatgtaaatgaagtgaaaaatagtcttccaacactattttgtaggcaaaatgagatgattaaattaatgacaataaaataaataaattgattaatttaattagtgttcggaagtgataaaataattagaataaaattaagagtgttggaaaattaaaatattttgtaaggatagaagagatgtgacaaataatgtaaaaataaataaggaatatttatttaggtaagaaaaattgggaatagtaaatatgtttttatgtgtaaaatatatatatatggaggaaaaatgtgaattttggcttttacggtgtgcaatttttgctaagtctaatattctatttgttcttttctttctcattgtagggaacatatagcgcattgctattggattaggttttgacataatcacacacggcatggcagttggggagtgttggacatctgatgctggaggcgtccaactggaatgcatggcaagctgggggcatacataggattccacgcggtcaagatggcagcatgtggtggtaggtggtacaggatagggttgggcatccgatccaatctaatatttttctcctatccaatcaaattagtagttggatttagaaaatcatcatcccatccaatctagttagacctcaaaatctaatccactaattaatagttggactggatcatttttttttattggatatccaattatacacctaaattttaatattaacttaaaaataggaagaaaaatatgtaaactctaaatattacgatgtatttaagtttaatactccataaacatattatagatacaagtgtaatgcaactaaaagttttaaataactaaaacaacaatattactaaaataaaacaaaacattatgaaaataaatacacaaagcaatcaagtgtttcaaattcaacacaaaaaaatctactaaaaatataattaatataataaatatgtatattattttttaatactttttatattatatagataaatataaattattttttaatatatatacatataattggattggttgattttttattagattttaatcaaattaacatctaataaccgatcaaatccaattataatctaatttttaacatgtaatccaatcattgatatcgcatttttgtaattggattagattatatcgattcatttcaattggattggattggatattgtccgcccctagtagaggaggtactctccttcgtagtttgggctacatgcgcctactaagaactatagatcacattgtgcatagtttggatggaacataagtgtgatccacggctgggctttgttgagttcgaatttgtttaactatatttttttggaaacagatctgtttaactttttaaattatgctttttgtttcatttctcaataatctcatcaatataatcctaactgtcctaactgttaggatttagcctttaaaattctgtaaagatatttctaattattaataaagagttgaacattttgatatatgcatgaatataaattatattaatatttattactgaataatttatatataaatatcaaaaaatttcttattcgtatatgaggttgtgacttgtaactgtacagataactaagatcacttagctatgcgtaaattagtcatcaatatattaaagttatgaaatctttaatcagttacggttcactgctgcctgttcttcagtacaagtaatctaggttcaaattacagatgtagtatgacatcaaagtgaaagtgctgtatataatagagattatatataacatggaccgatatgaataaagttgtctttatctaacatgttgtttacaataaagacctaattcatatcataacgatgaccaatagtagatagacctaaatcttaagcaatcatgagctcatgttcaagttattagtttctttgtttcactcgttaaagtttctcagagaaaaagattcttacaacttctgtttttggaatctaatattgtggatggttgggaacattataattgttgggttttgagccctaaataaaacccctttcaatataatcagatttacttattaaaaaagatcagaaataacattt

SEQ ID NO: 79352 - DNA, 4572 bp, Cannabis sativa
attcgagagaataatatggtgcggaagtgtagcagaggaattgcagagattacgattatggaggttgctcatcaagtcggtgtacggactagagctcgagctttggctatggcggccgccagctcaggttcgcctaagaaaagaaaggtcaatactactacgggaaaattaatgacgctatcaacgacgtcgtttgtgatcacatcgacgacggagaatttagttgttccagctaaggcagcggagagtaatattggaagagcaactactgcgaagacgggaaaggtggaggaggatgatgatggagtggtggagttgtggtattcaaattcaagtccgagttctgatggctttgatgatgatgataatcaggttcaagcctcttgttgttcgagtaacggctctagtgagctaggtgataataatgatcaggacagaaccaaattcatagatctggaggcggtaataaaattaaattcagcaataaattcctttgaatttgtggagctttaattgctttgtgtcgccgttcaattccgttcagtattatgtttcattaattattgaatttaatttcacagaatgatgaatgtgccgaagctgaaacatcgacgtactactcttgcagagaaaggtttttcaaccaaacactactccaactagtactatatatatatatacatacactcaactttttaaattcctcaaaattcaaatttcaaaattagagctcaaattttcagtttctcacacacacacacaattacatatatgtgtaaatatacattttaaatatctatatatacacgcagtcaatttcagttttcatttatttgctcaggagagagatgactccatccagtaataagtttcaagaagaattatctgacgacgtagattcaacgatgaaaccaacgtctgttgtggattctagccgtaaatcactggtgggagatcagaaaatgccgacggagttagagctcgaagaattctttacagtcgccgagaaaaacatccaaaaacgatttcaagacaagtaagttcatataagttatatgtataattttatatacatgatataattcttgaaaagcgttgggaacacgaaacgacgatcaatggatgattttttttttcttttcatttggttgtactttcaattcagctattttgtttgtttcctgagaaaacaacagtactaatactgaaacaactttctttttctgcattaatttcgcaaacatctatatgaatcataagataagaaatccctgaatttcttgcaggtataattacgatgttgttaaggactctccgttggaaggacgttacgagtggattagattaaatccatgaatttaaaagaaaaaagaatagagtaagcaaacagtaagaagaaaaaaccagtagtggtactagctagtactggttgatgatgatcagtgaccaggttctgatattcttattatagtaaatttagatatagtactaattttaagcttaattaattaagctattttctcattaggccacatttttcttctcttttatatgtatagcttttctctttttccttttttccctttcttcctcactagtaatagctagtttttctctttaagaaaaaaaacagtagtatcgtagtaagtatgtatgtagaatgagctaagttgttctctctgtacggattgtacggggaaacctctaattttattttgcaagtaaaattaatccattctgtgaagaaaaatatcgattcaaattgaattattccattctgttcttcacttttgctgtttcgtgtctctttgtgtgggaaaagcctttctttattccccaccaacatcatcatcatcatcatcagcagcctggtacgaacatgatatgatcgttttcttattatatatatatgtgtgtgttaatatctatcatggctttatttttgttgttgatatatatattagtaaaatgtcttgtaattgtatatttttcaatataaattaatatcacggccaaaacagggaatgagagagtcgaaattgaagggagtggggtgaagcaataacactaacatgccgttgaagttacggacacgtgttgagaatccgagacatctaaaaaaaaaaaaccttatctcaatcccatgtgctatagtacaacccatttttaaaaataaataaataaaaaatagtgaaggtaattgactatacatttagtttaatgttgtgtgtacaaatatataggtagatatagctcaaaagagctaagagagcaacaaagataggaatatgaaagtgatagtggtaaaaagcaaggtatcccttttctcatcagaattttcagaatatatgtatttataggactatatatatatctacatatctgaatatgagtggctctgggctggaacggaatgaaatgaagatggaggcaagactttgtatagccagatatatacatatatatcatatatatgctgagagcagcatatatgtagtgtcgctttctgtgttaatatatattatatataaaaataaaaaatatgattccttccttggagaattttgctgcaattactgttgccagcctttgtactgtgagtctgtgagattataaagattataatcatcacaataaaagataatagtaatgaaaatattattatgtattgacagtattcgtactttttttaaccataacgaaaaggctagctctgcttgctacgtacataacaattaatatatctcaattagactaaatggtgttttttttttaatttatttttattctgaatttcatggtttcagtattaattaatatagtttgtgtataattaatggttgtgtaagatactttttagagaggctaattaattaggtttttttaactttaatatgtatcaaattatgatttttgaactttattagggttaaaaattttctgtaaactattaagattgttaaaaatttgtaattgtccatatattaaatcatgttccttaaattttaatatctattaaggtatgtctttcgaactttcatctatattagatttttttttactaaaattagaaaatagtccttaaatgcaacaattttaatagtttaagaaagatttttaacgaccttaaaaaatttcgaaacataatttagtatatatttaaagtaaaaaatcttaattaacattttaaaaattacagttaagagagctagaaatagagtagataaaaaggagtagggaattaggcgtttgactaaaataatagtgatataaatttatatatatattctatacaagaattttgtatgtgtgtatttataatttagtagttgacagtattcatgataatggtatttcactgtttcgttctgttagcttcattccaaaattttccatgaaaagggcccatgaaagaatctataaaacaaataacccatcaaccgaaatagataattataattggaaagttgtccaaccaaaacattcaaatatagtatgtataaagaataatttttaactccattattcatagcttctatactcttatctctataagttatagtattaattagcatttcattcaattagggcagaaaaaaaaattaaaccccatgtcacgtaaatgaagttggtcaaaaaaaattggtacttatataaaaatatatatatatatttatatttcagttgagctgcagatcatgatattttatcattatgaatttgtatatttaaatcagtctttgtcaatacagctataaatggtagtagaaaagaaattgaacattattgtagcttaagatatatacggaatgttcataaaagatgatttaataatacccttttttgaaaggcacgagcaaaaacactgtagactgtagtgtaatagcttacttgacgtaacattattcattagaaaactctgtggttgccatatcaggaacatcacagactccacttaaagttaataatctttctcttcttttgttcttctttttttttttccaaagaatggtcttttttttttcttaccgtttgattatgatttactctattaattaaaatgtctttgcttagcgtctttcaatatgtcatatccttattgatatacttaaatagcgaatcttatataataattttttagactattcgataacaaattgtaaagtataacctctagatgtaaataatactgtagagaaatagagcacgagaaaaaaaagtaaagacggaaagaatcaacttagcaattgctaaccctaatcagtataaacattgttatttatatacaagttttgatatagattacaaaactgaaaataaagaacatgtaataactacctttactaattgaacacaattaactaatcctatgttaacagaaaactatctaagtattaataatgtttacatcctccaaaacgaaaaggggttttaaccattttaagtttagatttaaggtaggtaaatcaatctttgcacaatggtttagtaagcatatcagctacttgatcgacacaaggaacataacgaacagggagcttcttgtccagaatgtggtccatcacaaagtgt

SEQ ID NO: 79353 - DNA, 5586 bp, Cannabis sativa
taactttgacaacaatactagcttaaccaaattatattcgtactacatacaaatggaaattatagagaagagaaagacctgttttgctctagacatgccaattgataacagttcatccataagttcttcccatataagttggcctctgaaaaacagattgttgccagtctgcattacaaaaataaatatataaataaatacagcagtatcaatgactaaacatttatcttcataaaccgaaaacatactttcagctcagtctcggggtggccagcaaaggatgcaccatcacaatatcgtaacttgaccttgttccagttgaagaaatctagaaaatgcacacaaatataaagctacaagaaccaattatagttaagacttaagacacgaagtaggggcttgcgcaaggattttaaatatagtaccaggattctgtgatgggtcactgctcaaaatcccagaaaagggtacacgacgtgtcatataattgagagagcccaactgggtcttcgcgcggaaagaacatgattctctattagcgcaccaacctccaccctacacacgattcgtcaatccaaaattgaaaaatggaaaattcaaacagttaatggcgtgaattgaaatttaaattcggaatgcaaacctcaacgtgaagaagccaattttcagacccagatccaaagcccttcttgaaatgatatccaggtacactcccatctaaacaaactgcaaaacgacaagcaagaaaagattttcagagtccgttccttcgaattacactgaaggaagggagaagaagaagaagaagataggatagggtataggtcaagtacgagcgcctctagacttagcgttgcgcaagaaggtcaagtcaacaacatcatcgtcggcagtggcatcgaccggagatggagagtcgggatcgtcggagaaagagttgatggtgaaagtgaggacgaagatggtgattgtgaaaacagcgattgcgattgcccaatccctcttcgaccatcttctcaaccaaaccagaaatcgaattctgagattggtggccattgatagaagatctttgagcttggaagacttcactccttacattgacttttcaattaccgaacttttctgaatattggcgccagaagcccactaactcatacttggcccaatgggccagtgaaagcccaattacaatatgtagagttatgaaaggagaacacaagctcacctcgatctagagagctcaacaacaaacgacaccgccattgctggcgcgtcctccactgccgaaacctaacaccgccgtcgcgttatgcctctgactgtcgacttttaatactggtcgcgccgagatatgtagtgataatcaatgtctttgacttctcaacattgatttcgaagtctttcaatggtgagatacaaattatttcatcttttaatcgagttatttatttttcaaaattttaatgcatgccctttgaatatagtgtagaagaacattttaaataaagcatgtcatacgaaatgtttgttggaatgattaactgaatagaagattgctttgaatgattctgttgaacttatagttttcttaagctatttgttatagatctttagcatacaaatgttgaattgaatggttttgtacattttgatatattctgtatgactatggtaggtaaccatcttgatgaactgtagttaattcgttgtatttttataaatggttgaagtctcaagaaatctaagagtgaccagttgttatttagttggaattctaatatatgatttgagtgactttgaggagaaacaaattaatgaactgaattaaaagaattcacaattcattatagctatgatatttttgctgatatacgccttatctgtagtttgattgctcctgtttttccttttcatgaattactttgtgtgagaaaagtaagaaaaaaggtaaagttggatgactcataaaaacatattgtaatggtgccaaacataataaattatttcctcagtttccttatacttttcttccctgccataacctaaaatccaagcttgaaacatagccttgggcaatacaattatggcatgagtgtgtaatatttttgtcttgttcattcatcagtgagaccaaaacacagcattttgaaagttctgtttcatcactgcagctgctcaattgacgaaggggacaaccagtgagagaaatcggaaagatgggaagattagcagttgcagtgatggtgagcttgtgggtgattcccatttctatcctcgtcaatcgtattgtgcccgaaccctacatggtagcactaataataattgttcttgaagttaaattttttttttttttgcctgaaaaaacttaaggccccataatttctaatttgtaggacgagatattccacatgcctcaggttcagcagtactgcaaaggaaatttcagaagctgggatccaatgattaccactcctcctggcctgtaagaatcttatcttttcttcctttcccaaatttaattttagttccagtttctgttttatattcttatatactgctctcttcagctagatgcatgagaaaactgattttaagaaacccaagcagtcaacttttaggtttcttataacaaatgctgaaagagaattactagctacaagagacatttggaatcaattcagtcctgtaattgtagaaaggaaaatagctgcatttcgagtgaccatatataacaagcattggtgtcaaaaataggaattttatgctattggaattggaatattataacttcatgtttcccctttactgatcttttgttctagtttacaacttgcttgtacatgtctttgattctcttgcaaagttgagaaactagtttcagtattgaattcaacgccttagtgattcatcgtgccggtagggatttgaattttaaatgtgaatattaatactactgcaggtactatctttcacttgcccatgctacttttctgtttccaggcttgtcatacataaatggagcctcctcaatttttgaagtgtgctcccctgtgatccttcgatctgtaaatggtgttttggcagtaatatgcagtattcttctgtatgagatcataaccctgttgagaccagcccttgatgatagaaaagctacattttatgctgttgtcctgtccatgtatcctctccattggttctttacatttctctattatacagatgtagcgtcacttactgctgtgcttgctatgtatcttgcttgtttgaggaagagttactggttcagcggattggtaaatgagttaaaaaaaactttgtgtcccaaaattctaaatattctatactgttggtaaatttatccgcagccattcacttcatttggtattagtgcactgtccatgacttcttgaagtcaagtgctgacgtattccatttctcactgcagcttggtgccatggcagtggccattcgacaaacaaatattatatggatgctttttgttgcatgcagtgagatcataaatattactttaggccaccaaagagataaaatagacattgatgatgccagtgtctccatcaggaaaaatagtcagcaggctcctgaaaataatgccattttgagctcaaacctgagaaagagaattatcagtagtaaattagatactggtgcacagttaactcgcactagaagttctacgtcaagaataagcacaccaggtttgattttatatatttgtagacctcgcgttaacatactaattcacacaatccgttttctctgtgcaatggaaaatcggaatgcttggtctgtaacttgccaagttagcactaatgttaaatgtcttgaatttatgttttatagtgttcttggcatttttggttactttgactgcaggattggttgatgatattattgctgtatgtttaacaagtttgcatatgaagaagaagctttttgttgctttttccccctttattatcttattggtagcattcgttgcttttgtccgctggaatgggagtgtagttcttggtaaatctcttaccgcatcttttaataacattttcacatgtaaattctattgtttttttactctggctcagtattgcaggtgctaaagaagctcatgctgtttcattacattttgcacaaatcttgtacttcggtatattttctgctcttgttttggctccgctctatttcagttttgaagaaaccataaattttttccagtcattctggaagaataggccccacagtttctttcaagcaattttggcacttattgctggcttcatctctgttcatttcttcaggtcaggcccatttaacgtgcttgatcactttttcagtatttactcatttattttcaaagtccagttgagctcatttttttttttgttcatatagaattcttgcataagatccattgatccttatccctgtagttgtaacttgtgctctcatgttataatattgacctatactatgataatactttcttttgtaatgtaaactatgataataccgtatatgattccaatcaagattatgttgtaactttctcatctgatgtttttacctgctattcatttcaagcacccatgtgatggttatcatactaagtgtgatgcaaaattttgactattgcagcatcgctcatccatatcttcttgctgataatcggcactataccttctatctatggcggaagatcatcaaagcttattggccaatgaaatacctcctggtcccgctatatgtgtattcgtggctttccatctgcactagattgggttagaagaagttttactgaaaatgttgatatggttattgtacaattcgtcgatatagtgtagataaattattgtttctcctatggcagggaaagttcagaggaagatttgggtgttgggatattttttggccactgctgcagttctgattcctgctccactgattgagttcagatactacaccatcccattcattttcttgatacttcattcccataataatgatatccaaagctgggttctgatgggatttttgtatgtggcccttaatattttcacaatgatcatgttcttgtataggccattccactgggaccatgagcttgggacccagaggtttatatggtagaagaaatagaatggtcttgaatgctttttcaataactttcagttagacacatttactaaactctttccatatatataaattgtaatagttcaaatgatgtagtatacataacagttgttatagagtcatgttattcaaatattgtacggtttggtgaatctaattttgaaaagggtacaatatttgaataccatgactctacaacaatatctgaaatcatttttgtattaatctaattttgaaatctttaataaaaaaactgaaaaccgttgattaaattaaagtgtgaaagaggtgtcaaaaaaagtgttatagaggaaaaagaaaatgaatacataataataaccagtgaatatatattggatcaagtcctagcattaagctagctcagtccaagactttcttttttttttttttttttgaatgaaatagcaactt

SEQ ID NO: 79354 - DNA, 956 bp, Cannabis sativa
  modified_base (141)..(148): a, c, t, g, unknown or other
aatcaagggctaaagatcttgaacggaaggagtcattatattccgctgcaattaatgtaaggtttttttaaatccttatgtgtttattttattatttttagagaagtcatatttagaatgttaattcaacatacttgttannnnnnnnagatcctggtaaaatattcctagcagtattatcgttagcgagccattttttatccttgatccaactgagagcctcctggatgccgataattttagcaacgcagattccacatccccaccacaacaaatagtacgggcttcaacaataccgcccaaatgatcacaaacgaccataccaattccaaactgatgagtcgcaacaaataatacaacgccaacatttattttgaggttttacctaaatcttgacatcatattgtgccacattactaagcagtgatgtatagtcatccttcattttgacattcttctattgttcaagatacaattttactgaagtagccacatcattaacactaaaaatttgctccatacaattttaattgtgttcgatcagaagatgatttttcatattcaattattaatattattcgattatattggatgtgcaacttaactagagatgacaatttgtgtcatacacgataatacgactcgaaattcgcacgaattaaataagtaggtgaatcatttttaggttaacacaactaactttgtttacataatcagtcatttttggattaacacgcttaatttaaatttgacattaacttataataaccaagtctcaacacgacccaattgcaaccctatcttaagggtaggaatatttattagatcacattcaatggatttggacataacccaatcgatccaatttaattatttattggatatcgaattttgtcatctgatcaaattcaaacaaattgactcaaccgaaccgatccaataaatttattggattg

SEQ ID NO: 79355 - DNA, 3841 bp, Cannabis sativa
ggggtgtgatagaatatgtatatatttatttagcgtatatgtatatatttagacaatagttaattgtatttattaggtaatatttgattcctcattatcagcctaatatcaagcaagcttgtaaccgttggtaatttttgtcaatatctttattctatcaatatcttcatgtagtttcgcagacgaagttgacttgaagtcttgctctggcgtaggctgttgcaaaacttccatccctgaagaacttgttaactataatttgaagttggggagctacaataatcatagcagcgttttgagttttaacccatgtagctatggttttgttatgcaagaaaaagagtttaatttttcaaggttggaagatttcagcaatgtcacaaatgttccggtggttctggactgggctgttgggttcaattcctgcgaaacagccaagaggaatatggagacttactcttgcaaggagaatagtgtgtgtataaactcggcttcgagatcaggttacctttgccagtgctccgagggctaccaaggaaacccatacctttcaaatggttgcataggtagggaactctctgtaccctgcaatcttttttgttttgaaatataagtcttacaactgtttgcatagctaaagtaacaaaaaacccatgacttaattagtagtcctaattgtaaatttaatgagttgaaaaatgagtgtgtgtatatatatttgattgtaaatatgtttgtgtttttcagatattgatgagtgcaaacagaaaccgaacttgtgcggaaatggaacttgtgtaaatacagatgggagttataagtgctcatgtctaaaggggtacacaccaatacagaatgaaaccttgtgcagtactcaatctcttatgaataatgattctcattcaagaaacctcataattatttactctgttttgggtaagttttatcttctctgttttcactatatacatattgttgtgtttgatcaacaatctcaacatgaaatttataaatctgcaaacaattataagctagaaaataaagaacaaaaatatgcaaaactggttaactaaaagacataaggatttatagcggttaacacttcactctaatttgaagctacacctcttgaggaatccattctttgactatatcaataccaagttgcagagtcattaagacaactagaactcgagtgtacatagttaattttccttgaacataatcttttttcttgaggaagaaacaccttggaagtctctttgaagaatctgttggaactttagtgaaattttacttccgacgcgcattgctgccgttatccaactgtgctgagttgtcaggtgtggtttcattttattttttaatttttcaaatatatttaattaattagtaagtagagacaatttctctccgatcatattatttacagttctatacaattatattacaaatgtattctgagcaatggtacgactatattaggtgtgatatttcgacggttttctattgtacaatagaactccgctacagtgttttgactaggctgttttattcttgagacgacgagactaatagtctgcttgcgcagttttggacagtgttgtcttaaagagaacaacctaatccgtgactcaacccagactttaatttagtaaattcgttctttttctttgctgcagcaactattttcaacatttttcaacagaatcacccttttcccttctactacacactatttttctttctctcaactctgaaactttctctatgctacaagtatttcaattttcaccaattaaagtgattactccaaagctttgtgtactaattaaaatgcaacttgttaatttcagtttaaagaaaagaaagctggcttgtataacaagtaagccaactcaactaactaacaagtttagttacaagtcaaagagccaactgttaatgtcatgtcgtcaaagataaaaaaaccaggttttacttaggactcataaatacatatacatatgctccactcctttgaaaattatgaagcaagttaagatatagatagattaaattcttaaatccatcatgtagtttaaaccaagaatatattatcttatttgttacatgcttaaacaatctttaaaatcgacttctctaaggaatcctattagatgtagcttattacattatcttgtgattattttatgtgtttatatacattattttgatggttttttttattattatatacaggttctacttttggcacattttttttactaattggtttatggcacttaatgaagttcattataaaaagaagtaacattaagcgcaaagagatacattttcaaaggaacggtggtttattattacaacaacaattatctacacatgaatatagtcttgagaaaacaaaattatttagcccagaagaactagagaaggcaacaaacaactttgacatggatagaatccttggccaaggaggtcaaggaactgttcacaaaggtatgctcacagatggaagaattgttgcagttaagaaatcgaaaatagaaggagaagcgaaaatcgcagagttcatcaatgaagttgtcatcctttcacaaatcaatcatagaaatattgtcaaattattgggttgttgtttggagaccgaagttcctcttctagtttatgagttcataccgaatggtactctagctcattatctccatgaccacgacagagagtttcaaatgacatggaacatgcggttgcgaattgcttcagaaattgcaggagcacttttttacttacactcagcaacttcatctccgatttaccatagagatatcaagtccacaaatatattgttagatgaaaaatacagagcaaaagttgcagattttgggacttcgaggacagtttctattgaccaaactcatgtcacaacacttatttatggcacgtttggttatttagatccggagtactttcaatcaagccaatttactgataaaagtgatgtttatagttttggagttgttttagttgagttgttgacaggtgagaaagcaatttctattacaaggtccaaagaaggcaaaagtctagccacatattttctcatttcaatggaagaggatcgactttttgaaattcttgatactcgacttattaaagaatctcaaaaccatgatcgtgatcaaattatcgcagtttctaacttagcgaagaaatgcttgaatttaaatggaaggatgagaccaacgatgaaagaagtttcaggtgagttggagagaattcgaatgatcaacaaccttgatggtgattataatgatcccaaaattgatgaagagatagaatacgtaagaggtgaacaaattgagccttgggatttttctaatgtcacaactagttcagctagtataaattatgcttctccttcaactgagattgaacaatctatattgtcttctagaagtcgttgatggaataaggaaattaataagtttttgtatctttattattaattagctcacaataaatccagtgatttcaatcaagttatggtcaactaattttaatactaggagaagttaacatatgttttgttttttttttttttttttgtaaggtgaagttaacacatatgttgatggtaaacaatgtgaaaatcttgtccatatgctaaaataaatgatgcatctttcctttatgaaaatgagaaatttttaatccatcaagaaaaagaatgagtaatttttgttcatttttttaagggctatttacaaaaatatgggaaaatgaatatatgttttgatatatatggcataaaaacttaattaccctaaatatgacatttttt

SEQ ID NO: 79356 - DNA, 1872 bp, Cannabis sativa
tgtggttctttttccaccctatttgctttccacctatagattctgtgaattggcgcaatcatggtcctttttttttgaaagagcccaatcagtcttagttgtacagattgtgttttttttagtgagaatcaaattttctgagtgggatagtactagaggaggttaattgtgtacatttcaagttttatactggtgttgaatttgatgcagagcatctttagctgtcgttttaagtcattaaacttctctgtttttgttgtttgcaccatattttctttcagttaaaacttattttcgattcttttttttaagtggtgaggacagaagttgttatgttgttatatgaactatgatattgatactaagcttatttcactaatctgtgtgattacagagtacccaacacaacagtcaccttgcttgtagtgtcttaactagctagctatttcgataaatatgtcagagccatatgagaaggtgaaaggaaataggctaactttcaaaggaggagatttagctactcggagcaaacccattagcaagactaagaataagaaaaagaaaaaagttaagctagatgctcaaaatgtggatggctctgagcccaacgatgtagcgacttctgctgctgctgtggatggttcaggtggagcaagcgagtacacaattgatgcagctaagcgcatgaagtatgacgagctgttccctgttgaagccaagaaattcagttacgatcctaaagcgaaggtgaagtccattgaggatgcactagacgaccgtgttaagaagaaggccgatcgttactgcaaatgatgtgatgttctctttgccccttcagacaaattttctgctccatggcatttccttgtgttgaagataattttagtgatgaacatcgagccagtagcataacaaacaagtgttgtatgtaattttaatcacattggagaaggagaataggatcagtatgtgcatgtttttgctacttatatttgctgatttagtcatttgaaaatataattagacaaagtataatgttgtttagattcatgatgtgttgcacttgttgaacctttttctcactctttgactttctccttgttaactgttataattattggacatctactttcaaaaacttgaagtaaatctgtttttttgtagcttaataacaagagaaaattatttaaagaaaaggagaaaaaaatattgataaaggaaatgattttgcattatttcaagtgtggcaatctattattaaaaaagaataattttatgcaagagagaactaagtaaacaccaattcaagaaaccaagaaacaaacaagagtttccaaatcaaatgccacaacgcatagatggaacaacactataccttactaagataacattagatataactacaacaaaaaaatgttattaacaataacataaaaatgttaaattagcaagataactatattcaattttcaacattataatattcttacatttatagttgcaacacaatcataagtctttttatagtagcatagcgtaacttttggtaatttgagtgaccaaataggatattttgctaataaatttttttattgtgattatttttaaaataacattgctacaaggtaccatgtttaatgttagatacatatttaaattatacactttttacccacaataatatgtaattaattttgaccatataattaaaagtaatgtggtccttacttaaaaataggggtataacatctaatctattccaattgaaccgaatcgaaccgattcaattcaattcattacaaaaaaaaaaaaaaaaaatggatatctaattacaattggattggattggatgctaaaagttagattctaatt

SEQ ID NO: 79357 - DNA, 3414 bp, Cannabis sativa
tacaatacaatacaatacaatacattaacaatacattacatacattacaataccattacaatacgacataccaaacgagccctaaaataattaagcaatacatcacacaaaatttcataaacacacatgtattactaattttgaaaaacattaattattgtacgaaaatcaataataaatatatagctttagaaattataatattttactactcaagttcccataacttaagagatccatccacaaagtcgtagtatccacctctaagtgttatttttttctcttcaactcttttaagaacaaatggataagaattaagattctttagagataaattcaccgcttcctgcatatttaattatttaataatagtattagaattgtatatgtatttatttatataattaaaatattaaacacgtattcacattaatgatgcatgtattgaaacattagcaagaacatatatgtttattatttttttacatattttgtatgcatatataataaaaatgtgtcttaattttatgttatgataggagattaatttgctattatttacctcaaccattataaaataaataaataaataaaataaaataattaattttaacctcagtacatattttgcgttgttcctcaggtgacaagttactctattcagctttgactttattcttgacgatttgagcaatgttgacccaatcatcaatgaagtcactgcaaattatatatcaaaatgttagactatgagtcaaaattaataaaaaaaaatacattatatatatagttctaataatgtttctacttttttttttaagaaaaaacttacgagccaacaggatcagacataagtgcttcaattccaccacaactactatgcccaatgaccagtatattctcaacctatgcaatttaaaattttttatttataaataatttaaccataactatactcacaaaacatgatattaaaaataattaagatggtcatatcaatagatgatgcataactttgatgtatgattaattctaccaaaaaaataataaaaaaaaatttaagatttacctcaagatgtgttactgcatattcaatgattgcaccaactccagagtattttaactgtatgaaattaattaaataatataaaagaaaatgtaataattaattaatagtaagaaaagattaaatatttatatatacacatttttttcaaaatttgatttgaataatagttaattataccgtattataaattggaatcaagttgccaatattacgagccatgaaagcttctccaggttgaaaatttaagaaatgagaagggctcactcgggaatcagagcatgagaacaccagaaactgttataatttaattaaatatagatcaacaaaaatatgtaatgataatatttgtataatttcggtaaattagttttaacttttccatatataaacaataaaataaaatgtatgcttatacaaattatttatttttaacacacacatatatacctttggattttgggttttggcaagttcattaaacaagcatggatacttactgcaaaatcatttcatcaaataaggtaattaatttattggaattgtgtttttttgtaattgataaatatatatatatttatatgcttacttgaatttattagagagaaagtgattaaatccatggacaattctttgaagaggatcagagcaacaatcattggtatcatcatgctctttttgaacttcacagatcaccttctcatcatcagatgtttcactttcggccttctcattcctattcaattaatttataatatatagtacttattatatatttagttgtatatatatatttgtataaataaaatgtccactaaatattagctaagtacctgatgctcactagattcttcttgacgccgaattcataattagctaactccgaatactgttcttcagccattaaattttgcgctccctaatttatataatttccttctgcaaatttaaagtaattacgacatatatatataatatatgtatgatacagtcaatagtttgtatacgcatgcaacaattaattacttaaacaaaatctaaataaaaaaaaacacaatattaattaaccatgcattaataattaatatatgtaagagtacgtgtataatatacttatttttttaagaaaaaaataaaaataaaaataaaaatgcccccttctccaaccaaagtagcttttatatatataaatacttagaaaaagtgtatataaagaacacaaagtaaaagtcgcttacagggtattaaataataattaatttgcaattgcagtattataggagagagagatcgatatatgtttgagggcacggaatctgctctatttataagacaaattaattaactatttcattgattatatcatcacacatacgtaggaaatttataattatttgatcaatatgttagactcgtcctcgtccacgtgtttttatttcgtgataaaataaataattactatatgtggtagatttttcattttttgtggtaactatatgtagtagaatatttatttattaattagtgaaacatattacatattgatcatatatatattgaacatcacatcaagtttttgctttttactgatcattattgacgaggtcaccaataattcaacctaagattatagtatacattggtgatcgtggtgggccataaccagaaaagagtcaacaatcgacaacttagagtaattctaattaaataatcactacattttaatatttaaaaatattaagtttaaaattattttaatatttttaatttttattttatatttaattatattaattttaatacttattttatttttttaaattatatattttattatttgctctaataaaatttcacataattttttaattttatatattttaaatataatttattttttaataagtatatttttaagaatataaattaaaagaaaaaattacgataattaaaaatatatattttatataaaataaaaattaataaaataaactacatttataaaattttaagatacaaataaaatttttcggaatttatatatgattgtgacttttaagtccgttgattttatttaggtttaattagttttaggattaagtcaaagagattttttttttgtaagggggaagtcatatgtttttttcttacatgatataatgatacaaattaatactattttataatagtataaaattttaaagtaaagcagcaacaacaaaaagattgattttaatggttatagtactaaatataaattggggagttatatttgcatcccataaaattataaatacacccaattattaaaaaaaatatatatataaacttaatttttttttttaaat

SEQ ID NO: 79358 - DNA, 3329 bp, Cannabis sativa
aatgtacaataaacaacactatatagtaaccaaaacaaagcgggtgttgctgcaagtcagacagttccaaatgcctcaaatatttgagttcataaaaggagtttttatgctccttttcacccatctaattgaatcatcattcttgcaaaagccaaacacaacaaaacaaatcaataataataaatcccaatcccaatagccaaaaacacctatataagaaactagaaaataaactgtggcaaatatggttttggaaatggaaaattttcacatctcaaattacaaaaaaatgcccaaagaatgatatatttaaggtgtgaaaaattggaaggtttcacaaggaaaaccaataaaacttcaccaaattaacatagtgctataacgcagctatgactcgacacgcttccatgcttattgaggaaggcaatcttaagggccacacttaacaaagaccaaaaacaaaaacaccatcccaaataattaaatgatgtaccaacacaaaagttcaactgcacacaagtacaattgacaaacttggaaaaatggaaattgatttaggaaaccaagatgccctctgatgaaatttactagcaaaaaagggttcaacgttttgtttccatttgcaatgagcaattatgctaatatatgatgagcaactaggacttaatctaaaaaaaataaaacataaaaactacaggccaaaatggttcacacaatggaaaaattcagaactagtacacagtatggtgcaaagagacatctctaggagacatatagatataatggaaagaattgaaaagaaaatagaagcaaacatgtacaaggtgtgccatgccattcaagaaatgataacaagcactagaaagttcaaagttgaatagggaacaagtacaatctcttcagaggaaaattagacatgcatttcagagtaaaggtttgtgaccaataaaaagactagatccataacatgtggtgcagctgcaagcaagtcagacagttccaaatgcctcaaatgtttgagttcataaaaggagtttttattctccttttcacacatctaattgaatcatcattcttgccaattccaaacaaaacaaatcaaaattacaaatcatttgaaaaaatctaaaatattggtaggaaaatgtaaccagagagtaatatatgtgatgcagcaccagcaagtcagacagttccaaatgcctcaaatgttttgagttcataaaaggagttgttatcctccttttcacacatctaattgaatcatcattcttgccaaatccaagcccaacaaatcaaatttgacaaatcatttgaaaaacaatctaaaatatcggtacaaatgttaccatttcaaaataaaaggcattccatgaaactaaagtgacctaaaatcccattagccaaaccaaggacacaatagaaaataaactagtggccagtaaagttagacaaatggtaacaaatcagatcaaagtagaaggatatatgcctgatgaagaaatttaaagtgggaaaactgggaaggcctcaaaaggagaacccttaaaagacactcccaaattagaatattgctcttgcacagctatgactcgacacgcttccatggatgaggaaggggatcctaagggccatgcttaacaaatttattacttaagaaaaaacaatgagcaaaaatgaatcagaacttcaccttcacaaattagattgtttcgtcaatcttgtccaatcacaacaatacccacttaccagaaacaggatgattaaaccattatgagttaaaagctcctagagatatagccaacgtatgaatacaaaggaaaaaaggctatcatacaatggaattcatataatagtgaattcacatgcagattcaatacacaaacagaattaaactagtatataatgtaccatccatgaaaatcaactgcaaagaaaaaaaaaacacagctgacaaagttaatagaatggaaagttcaatgttgggaacaagtataacctcatttgcacaatgcagcaaaaaaagctaagattgtcccgttatacaagaagtgaaaaaacactacaaacaggttaaaaggcaatcaaacagctaaagaacatacttcctgcttatcattttctcctgattgtactttcgagccaataatcaattaaaaattaacttactggttggtatttctaagagaaatagctgaacattttagatgttgtaatcggccaatgtacgtatatcctgaaactacttttaacaaaaaaccaaacgttgctagtcaggaggaatactagttcaaagtttcaactcaacgtgttaagcttgatttcagcaaaagaaacataaaatataggcattgagcagaaatatagaatcgacacaagtaccctctttgtcttgaatcttagccttattgttgatggtatcttacgccaacacctaagactaatattccatttcagtaaagctgtgttttttaatgtttcaaaaaacaacagagattttaggtacaaaatgtcaatttcattcttaagatttagcttatcataagccattgagtttggattaatgaaattaaaattaacacagcaaccaaaacaaacagggttcaaagtgagttttgtggcaagcaagtcagacagttccaaatgcctcaaatgttttgagttcaaaaaaggagtttttaagctcattttcacacatctaattgaatcatcattcttgcaaaagccaaacccaaagaaacaaaattaacagaccactagaaatgtatatttaaattggtgttagaaacaaaatgttaccactttaaaataagaggcattaactttaaagacctgaaattcccattagccaaaaacacatataagacactggaaaatacaccagtggcaaatagggtttggaaaatggaaaattttcagatccaaaagtacaaggaaaatgcccaaagaaaatatttaaggtgggaaaattgggaaggtttctcgaggaaaacccttgagagacttgcccaaataaacatattgctattgcgcagctatgactcgacacgcttccatggttattgaggaaggcgatcttaagggccgcgcttaacaaagagcattattaactcaaaataaatgaagaagaaggaataagaagacgtaggatgagaatccatttctgggtaaatgaaaatagatttcaacaacaccaaaggagtgttgggtgaggaagaaagagaaagagcctcactggtctggtctgagacaaaggcggctgagagacctaagagttagggtttcatatagcagctcccacgtttctatatatataatgccccatgaaa

SEQ ID NO: 79359 - DNA, 4531 bp, Cannabis sativa
tctgacttttacttgccaacatggtatgagctcaattaaagtagctctaccacaagtgcagaagcaccacctccgccgttgcaaacgccaccaacaccatatttaccatttttctgcttcaatacctgtaaatgtatacaactgaacttttagaatccgaaaatgaatattagaagaaatgattcaacttaactagatttgaaatgggatggtgtgtgttagagagagttgtgtaactgggaaaaatagtaaaacggagaggattctttacccccaaaagtgtgaccaagatacgagctccgctgcaacctagaggatgtcccaacgctacagccccgccgttaacattaactttttcctgaaagaagaaatgagaaaaagtaattaagaagcagaaactgtctaaattctcggattagtaaaatttgatctaaaggtagatcaaattataataaacttccaaaaggtgttaaagggaagaagtgatttgaacaatacaaaatatatgtaaacagaatgaatgcaagcattcccatgtaactgcatttgattatcttgtatgcgcccaattgtactggtacatacatccatctcaaaaaaaaaaaaaaaaaacaagcagagtgtgagagagagatattgtggaaaagaacttactgtgttgagtccaagcagtttctgatttgcaagagccacaacctgtgtaaggaacatgaaaatatcacttgacatatctcattgacaaggaaattgtacatttaagtgattcgcatagaatcttacagcaaaagcttcattaatttcatagaaatcaatttgattagcattcaagccagcatttgaaatagctttggggattgcaagggctggagctgtagtaaatagttctggtgcctgtacattcaagtcgatttgagcatcaaattgtcaaacatataaataaaatatattacatgttatataaagaaaaattagaaaagcgaatgatatgaaagcttcaacgtatttctcagactgacatcaacagttgctttgcaaatatttatatttgtggaaaatacctgagcagcatcagcatatccagagatctttgcaataacttgcaacccaagctttattgctgtttctccactcaccaagactaatgcagcagcaccatcacttcaaccagaaagatttatttttcagtaaacacttggatggctggatcatctttttgtaagacttgcaaataatattatactagaaatggattcataataaattatttgcaagaaatgtatatgcgaccagtccataatcatcattcaacactaagggaaccgttcaaagtagaacacttttgaataattttgaggaaatataagacaggaaaattgctgaaactgggctttttcaattatattatatagtatacatgtttccactccatcaaaaaggtctactaggaaagtggcctggcaacaaggactctacattggtactgaagaacaatgtacgtacttcagtaattaatgtttaaagcacaatttatttacttcatctttcgtatcaaccattttggaaaggaaaatataaattaacatataacacagttgaataaatggtcaagaaggctgttcttcatatatattaatagcatggaaagaaaaggtaaatttaacgaattttattagaagtataatgatatatatattaatatatttacacatatacacaccttatgctggaagcatttccagcagtcaccgagccaccattcgccttgaaacttggacggagctttcttagtttcccagcatcaaactgatagcataagaaaggagcaaatattgctgttagaagcagagatagtctaggataaaagaaactgcactgaaaatattatttacaaagttaaatgatccatctgatacaagcaaaagttatttttaccttccctagaccttcatccttgtcaacaattattgctggttttccccttccaccagaaacttcaacctgtgtaatatcttaataaggcacaaaagattgaaaaaacacaagggtgcatactattgaactcataaataggttaccaaccggtacaatttcccacacaaaggccccactgtcttgggcagcaataccacgctcaaagctctgaatagcataatcgtcctgctcctcccttgttactttatggttttctgcacatgtttcagcacatactcccataccaacatcattataaacatcccacaaaccatctttcaacattccatcaacaagagaatcatgtccaagtcgagatccctttctgcattttaagaccaaatcaatcaaatctgaaatttatttgcaccagggaaccatgaaaaagaaggcaatactagctaaccttgcttcagcaatatatttaggcacattagacatgctttccatgccaccagccacaacaacatcattaattcccaactgaatgctttgtgctgcaagcattgtagctgtatcaaccaaaaaaaatgcatattatgacattatatcttcacaaataaataaccaataattaagagagatgaaagaccaatatgattaatgatgatgatgagtgcacctttcattcctgatgcacagactttgttaacagtggtacagattactgtatcagatattcctgcacctaatgcagcttgtctagctggagcctgacctaaatttgcactaagaacattgccgaagataacttcttgtacaagtgaaggatcaacaccagcccttttaagtgcagctacaaaagagaattaaaaaaatatttaaaagcataatcttttttttttctcttgtcttaaaaacataaccttaaaaataaatagataatgaaaattcattccaataactggggaataaatattcacaaattaccttcaatagctattgatccaagttttgttgcaggtaaagaggataaagtaccaagaaagccacccattggtgtacgggcgacaccaacaatgcaaacatctgaaaagaaaacgaaaggatttaagaatacaagtagccagattaaagatggtaaatttctgttatcttcgaaattcaaatgatcaaaactcacttaaattatcacatttgagtgaacaaaaagggtataattatgtatactattagaagcaggacataaatagctaaaaatttcaactatctctaaaaaaattatacaaagaagctgagaacttaagtgaaaattttcacaataaaaatatataaattgtataaataaacattactactgatcaacacatgtgctacaatttaaacacagaaatcttgaatctacagcgatggatgaaaatagacaaagaaaagaaacctcttgactttactgactctgaagaagctgctgctggagccatggatatgtgttatcaaaaatctgcacagatcacgtaaaatcacatcactcagcggaaccattccaacagggtcatatcaattatatattatcgagaaaggagcaataaaattaaaaagaataacatataacctctgccatttttctaaaaatctgaactattgaaactaacctccaccccattatttgaaggggaaaaaaatcatttttaaaagtaagaacgaaatttaaaaagaaaatgaaagattagtgatagttttctccaacgagggggaaaaataaacatgaatgaatcaagaaaactaaccaccatctatcagagaacaacaactaaataataataacgaaagcatgagaaagcagacagttttttggggaattcctttccatgaaagagagatccttgttactagttaaatggttaatcagtaacagatccacatggtgttcaatgcagagttgagggaaatgaaaacaagatgatgggaaaaggagattaaattacctcgtcgtggatggagatggaggtagttggtaagtgtaacaagatcacaagcgttgaatggtgcctgagctaagcttgtcgagtggaaattgaactcgcttgtgtctcgtatatatagaactgactgagtgcacgaggccaaccaatacttataaatacttattattttactcaaatacccttttcaacttaatttaattactatcatctttgacttttattgtagtttggcaatttgggttgttatataataataataattaggggtgtgaaataaatctagctaacaacaatccacccctaaatgatatttaattgtaatttaaattgaattggatgttgttttttaatatttaattttattgaattggatattgaatagagttttcaaaaattcaatacattcaacatctaatcgaactaattagtattttaatttagcttggatgagtaattaaattttatgtgtatatatcaaaattaaaattaaaatcttactctttttgtattggatagatctaatccattctaatacatactaagtttaaaatattagatggatctcatcttaattaaactaatagatttacatgaaatgcatagaactggtctaatccaacatctaataaatatta

SEQ ID NO: 79360 - DNA, 3723 bp, Cannabis sativa
ttgtttttgttgttaaggtgttatggaaaaagattatgattggtcagctattatattgttgaattgttacccagggctataatgatttatgaaatttacaaaacatttggaaatttatgtttttttttttgttgatcttttgaaaaagaaaaagaggccactcgtctgagactggtccccgattatgtattaagaacctcacttgtggcagaggaataccttggtaaacaaaagttgagtacagaataggaataaataagatcagaaaacaaaaaaaaaaaaaacaccaaaacatcgggtcttttaacatcagcacactccactccctacaaaagtctagaaagaaaaaaattctcaaagtgttttgttctaaagatttggcttaataaaagtaagtatccggtttcctactctcaatattctgtcgagtccatgccctggcgtgtctttcctccggaatgatcaccatggttaaactattatttctaagaatagataacttgatgaacacccctttgctattttggaagctccccagaaaacaactgttcgagctatttcaaaaagatcttttgaaattcaccctctgtgtcccttctcttttctgcaattcctcaatgacgtcgattagccatactgttgcatccactattacagctgttttgtatcccaaaagacgagttctttcgcatattctaatagagcctccatcattgtataacgtgagcacgaacaccttatgagtggttctaaaactccttacatatgattccccttttcaccattggatccagtttgtttatttaggccaaaaccattgggttattgaccctttttcttcccaaaaccattggggttttggtgtcccctaacgtgcatggtaattctctctgaagcaggagagagaagagagcataattagaggaaagagaaaagtgatcattaatttattatgtcgttgattgtaattttaaatttgtatctttctgcttctctcttgatttcagtctgtagttccgaatgaaaagttaattgttgaatgaagtaggattttagaacataatgctcaacatatactctattgtgttgatacaggattttgggcaatgtgattcaaaaaaatgcacaggacgcaagctttcaagatttggcttaataaaagtaagtatccagtttaccatgggctgatattgtttctttaaaacttcaagtccaaattagaattatccttttttttttttttggaaaatatccttgtgttgttttatgagctgattattttttcttaaaaaaaaactaaatgggtcttactaaaagatatctctgatttaaggtacgtttaggaatgaaaacaatagaatataattgagaatgagaataagaatatgaatacaatttaatatgcataaaaaaattaatacttttttttttttcttcttacattggtataggatgcgtttggtaacacttttaattagttttaattagaaaaataaaaatatttttcaaaaacatgttctataaaactgcttttacttttcaatgaagagataatatgaaggtttgatggaagaaaggtactgcgagtgaattgagagcattaagatggagttttcttttattcttactgaacaaatgtaactgctgctgatagaacaaccatggaacctggaagccattgatgcggggagaaaaaggagttgttcttgcataaatgggtgacagaactcatttatttttagaaataacattgagttatgtggcagcaccacgtggatgagctatatgagttgaagtgaattaggtagaagatatttattgggttgtatagagctctcaagctctagtattctgctaaaaaattattaatttggaatataattatttaagcatcattggtctgtctgagttcattctgtcataagactcaaaactagagttatacttaataaatggagtcaaatattgagaatgagacagttgtggtgctcttacgttctaggtttgtgaggaccaagtggatttttattttaccgattttggtctgatttgatcacctacctattgctttattgagatctattaaaaaatttcattagtgggattgggatatgcattttctcagacatttgtactgattgtgcaggagttacgtgtgaatagtggatttggaggcattgttttaaggtatatatgaaactaattgtccagtttctccatacaaactgttacacatgcttttttctttggttattgtctcattttttttttctattaattgaacactatactctttaaatattgtatgaaattctttgcatattagattaaagaactttgatgaattccttgcattagttgatgcctaataataaaatcataaatatcatgttacaacacctcttatgactcattttgttgtttatggttatatgaatctgcacatgctggtatccttaatattatttttttcttcaattattttggttttttccttttgcagtccagttggaacacagtgtgtctcaagagaagattatagtttaatccatagaaaaggactagctgttgtggattgctcatgggcacgcttggatgatgtaccatttgtgaagctgcgttgcagtgcacctcgcctatgtaggagctttgattttgttagtacttgcagattttttttgtactcgcctataatagttatccatcattgaaaagattaatatcttcagttataaaaaaatgatagaaaaagcatttggtgttagagactaatagaattttcttcactcattatagactaaagttgtagtttgcttgctcctactaacatttcacttatactacaatcatagtacatgtcataaattgtcagtatgttcacttgtccatctcatctagttatcaacgtttatacattgttctgactacattatttctactgttgtttaatgttgtgaaatgaaaaaaactgctttgctatacacattgttattgtaaagtatattgtgcatgctaataatgtcggcagttaaaattttatactttctatctcaaaaagtggtgaatatatttatattttctttttttaactaaaaaagtattgaccaataatgctatttgaaacacccaagtacacgtctgctttacatacttattcttactgccttgaaaattgtcactgctcactgttgcatctatgccatgatcttttttttttttttcaccaattgtagatgatgggtattgaatgttgtaatgtattatcaaattattatctcttagccagttctttgatatgcaagatctcaatctattgcagtgccatggctagtagcagcaaatcctataaattatgggcgaccatgtcagctgtcttgtgtggaggcattatcagcagctttaatcatatggtatcaatacatatatgtttttgttgtcctgctgattgataagtgtatctttggttgctacatgtgaaatttagactcactatattttacatggtgcagatgcatgctttagtaatagtatctagctaatcaattaatcattgaatataggtcgtaaagcattgccttagctctcatttggtccatctttcctaatctatatggaaactgttacaaacctctttcaggtttggaaaagctttatatggtagggtgtagttaatgggcgtaactagtgatgcgcacaaggcgaggaataggcggggagggctcc

SEQ ID NO: 79361 - DNA, 2070 bp, Cannabis sativa
caacagcagcagcaacaacaacaacagctgcagcagcagcaacaacagctacagcaacagcaacaacaacagctgcagcagcagcagcatcaacaacagctgcagcagcagcagttagagagaatgcgaagacggcaaccatcaactcctcgcccaggtgtggatgcggataaggataggcccatggtacaggtcaagattgaagctgcatcagatttgcctattgatagtaattccttcaacaatttcaacaatagaaatcaacaaatgcagttcaggcagcagcaaatggctgcaatgtcaaatttcgcaatgtcaaatgtccatggtcaatccagtactcaatttagaccgatgggttcattgcagattccccaaatgcagacacagtatgaagccctaaagtacatttaatgtcatttctggctactacattaggtgataaatttgtcttatttcaaaatactgtttatttgcaggaacatgggtgtgccgagggctccgccagtgaaggttgaaggttttcaggaattgatgggtggcgattctaccccaaagcatgaatcagaagaaaataggctgacttctcccccaagtaaatagttttgtccctagtcttttagttgccactgtaacctcactttgtcctgcagttattatcgtcattttagattgtttttgcatactaacaggccaccaaagatgcatgtatagtttaggatcaacgttattggcttcgatctagttaaaatcatcaccttatttattgtatggaataaatttagtcatgaattgttaacataagctatccaaatcattccgtccatgaaccccaagtggtggtctagtgctggaaagtggaaagtgccaagtgatggtaggcaatttgttccaaggttggaatcccccgagacaaaaaatagaaaaaaaaaaaaaaacttggggccaatgggaggtcttatggtcgaactggtagggctttttcttttaaattttttttttaaaaaaactctatcgatcttatgattttttgcagaacataaataatgggagataacaagagaatgaactagccactacaattactgtactaggatttccttaaagcttggagaaaataatttggatccttgatcggataaaagattctgatggttttcaatggatattgaaactataccccttcgtgtattccttacctatccctcatctaccgatctaagtgacaaccactgagttcattgttcataagaccccttgttctttttttttactagtaaacaaccctagcatattttctcttcatttattaagttactaggggttcgtttggtataccatgttgtattgtattgtatttgatttaattgtattgtattaatattatttaatacaatactatatttgatattaatttgattaatatattatataaaattatatcatctttacaataaattgacctcgatcttagcccaagactcgaatctcggccttagaatacaaaccctgctcgaaccccatccctagacccagaccttggacctgaaccttagagtttggttttgagtccaggttcacgtccgacttcgggtttgggtccaagtttgggttcaggtttggggttgggttcgagtccgtggtccagggtttggggtttaggtgttggtttttattgtccaaatcagaatagaaagcataagctgtttttatagaaataattttagaatatcataatttgactcataaatatcaagaccttaacatttacagacattagatatattgagttaagaacaatgctaaaatattaaaaataaaaaaatttctgagataaatagttaagttgtttgatttgttatgtaaaaatttggtggcaataatgcctcttgttacttatttggtgcatcagttagttggctgttaaaatcttagcagagacctacatggcaaattggtttatttttttttttaatttattaaatattataaaatcattaaaatttattttttaaattaacttatttaaaatataaaaaatcaatcaaattagaaaataagttctgaatt

SEQ ID NO: 79362 - DNA, 1662 bp, Cannabis sativa
ttttcatgaaaacaaacaccatgaaaggatttaacaatgagtttcttaaaaaagtaatttcacctcaacagatttgacgaacggcaatggagctttatgtccgtgtacacttgatactcgaagggtccaattcacatattttttatctgcaaatacaaggaaatgaaccatttgagaagtgaaaataaaaagaaagctacactaagttgcaaatgaattcggaaaattttataaatttgttcgttcgttcccaatgtagaatattgaacaatcaactaatcgaagaggggtagctcaaatggttagacatgtggtttactatcatcaggcctgatgtacgagtcgagttttcgagagcatatgtgtctatacaaagctgagagtttacctagactcaaggcttgtgttataatggtttgaaaaagatcaaccctgacaaacggaggaatctgccgattgagtgaaatcatggcacccgaaactacctgtcatttaaattttaaaaacaagaatgattcaaagcatgtcaaagaagaattcggaacaaactaaacagttcaaattaagaattttaattttcccaccttatctacgagtccatgaatcaccaaacttgctttcttgtctttaggagttttctgtaaaaagaaacaaagactaaagatatttccttttactcgaatggactaaagaaagacataagagtatgcacctgaagattaacaattacgatctttcccccaccacgaagcgattttaaaggtaggttgcacgctggagtgatctgcaggctgtatataatattatcgatcagccatccaagttaccaaatgtcgggacaggtgtaacaaagacttcattagctaaacgggtaactctgcaattacctcgtccccaaacataagacaacatcagccatcctacagtgcttctcggaaagattcatctcttttgtgggcaatgcatcctgcacattacagagttagaacaaagaatttcttgtcaaaatgcccgaaaacttagtgagtaataatcaatcaaaattttaaattagctaaatatttatacctcccagtcaagcactgtatccttaagttttgcaccacattgtttaacagcacagcgtctggaagtctccttcaatccaatagtttccacctcgaaatcccgcaaatacctttaatggtttatacacgattatcttagcgttttgaaaataactaaaaacattctaaatacactttatcaaagaaaaggtttcgagttagacttactcggctccacaagaaggacaggtttccatgaaagagttaccatgtagctcagcaagtttctctcttggtattcccgatcgaaggtggaggccatcgacattctaacaatgaccacataaaaaggaataagaacatagttaggcagaattcttttctaagcctataaactattagaagcaagcttacttggctgatgacgaattttagaattcccgctctttccaattccaccaatgccatgtgtgtcaaactaggcattgctcgatgaaatgggagtgatgcttcgggcaaggcttttccttcacgctataaatcagcaattattcaaagaaatagtagaatacattgaattcagaatttttaggattatgttgactattagacatca

SEQ ID NO: 79363 - DNA, 2377 bp, Cannabis sativa
  modified_base (1510)..(1516): a, c, t, g, unknown or other
aactttaattgatttatatgttatggttaagttgttttctagttgtttttgtgttgttgtttagttgttttgcgctgagaaaagaagtcctacacgttgaaattctgctgcgttctgacgctacaatctgtgagcgtcaggcaactctgaaggctttgtccttcactcgcgtgtaagtctcactcgcccacatagccacacatgggtgtcacacttctccttgtgcatttgggagagtttttctaccatatttttgtaaataagaaactttaaaaatagtatatttgaaattaataaacaatataaatatttaattttacttgtagtagcataaatgcttatttaaaataatattaatacaaaataaaaaaaataataaaaaaaaaactcctaattaaaaaccatttgaaaattgtaataggcacaatgttggatcatgtgttatttgtgggaggaatagtaaatagaatctattatacttagcattatttaaaagaattatatgattattagtataatttaatatcaaattattacttattttattttaatgataactataaaaatttattaaaatttatatagtatgatttggtggacgctgggcaaataatacctaatagcatgttatatgtttagcataagtaacatcagggtcgatcgtacacatatttatacgtagttgtgtacttttttatttttttgaccgcattataataagctaataaattttcttgctagaaaataaaaggaaaataaatgagaatttaataagagaataagaagtacggtccaattacacgacgtcgattttcgccattttgtttaataagattaaaactttggtagccactcgataaagacatagtgaatggagccaaacaagcccacagtttttatataaataacaataaaatatatggtttttctttttatttttaacaaatgaaataaaatatatatcgttgcttttaaaaacaatatatacatagagaatatattgcatgtatacggtgtcaaaatacgacttactacataccgacacttgtcaattagaatgggataaaaattgagtgacgaagatataaaaccaaacttcacttccatctctcttttgtattggtgaaactatttgacatataataattcagtataagaagctattaggcattttatggggcccaacaagggccggtcatgggatgaaactgtctaggcccgcatctaaggtttaaataaaaaaaaaaaagggcaataaaagaaaatggcccccaaaggtttttagcaattagataaatgtttctattttgaaaatattaagtaaatggctaaatatcacattttcaccattttagattaggattatttcataaatacaaaaaaataacaaaaaaaaattacaaaatacggttgtatgaaattttaaatatttttacgatttttataattttatttacaaaaaatacggactttttatattatactcttgttaatttgttattgatttttnnnnnnntatatgtcattttttgttgttattttgacgttatttagatgttattttttttgttacttttatattatacggacttttttttgttgtttctatagaaaattataaaaatatataaaaaaaaatctttaaacgtgaaaatgtaatttttttttttataaaaaatggtgtttcatgtaattatttcttttagattctgtgttttgtaaaagttactgactctctgttttattaaatgacaaaatggatcttatatttttcaaaattgtaaaattaggaccctcagttcaatttttaaccaatttaatttttaatttaactaactttaagataatttctgaatagatacagaaaatgtaatgagttttgtcataacatctttagattggattataattaagttttattttgacaaaaaaattagttcaggtcctatttatacaattttgaaaaatacaatgtccattttgtcatttaacaaaacaaatggtcattttggtaacttttacaaaacacagagtctaaaatggtatttacccttaaaattacatgtgtatcattttgcttgttattattattatttttttttttgtctctttttattctttattaaatttttttccagatttctttttccaataattctatctttctttataattgagtaaaatatattatatgtttattgtctatctgataaaatatgtctatttaataaaaatggtaaaaaaatttaaaattacatgtgtgccattttacttgttattatttattttttttttgtctctctttattctttattaattttttttccaaatttcgttttccaataactctatctttctttttaattgagtaaaatat

SEQ ID NO: 79364 - DNA, 2169 bp, Cannabis sativa
tgctatggataaggaagaatatgggattctgtgagaatgtctttatgcaaagtaaaatgaaagaattatcactgtcccttaacagatattagttattgttcacaactcttttttctttttctttttacacatactttggtataaactaaaattttgtgttattctcgtgtgttgttaggctttttgcggttgtggatgacattttttgcatgtttaacggtcacataaacaatgttgctgctcttaagcaacaatatggtttaaacaaaacagcaaacgagtcaagcattgtcatagaagcctacaggactttgagggaccgaggtccttatcccgcagatcaggttgtcagagacatccaagggaagtatacgtttattgtctatgacagttcttcaaaaaccaccttcattgctgttgtgagtaaaatttccatggttctccaatttctactcattctgttagatctaatttcctttttccatttattttcagcttccattttttactgattgcctaatcttggttttttatcaatctaggatgctgatggaagtgttccattcttctggggaacggactccgaaggccatcttgttgcttcagatgatccagaaatcgtgaagacaggctgtggcaaatcttttgcaccatttcctaagggtaaaaacaactatgccttcgaatcatctgtacaattctgttacctttaaagctaactctgtttacatttgttttatattaggctgtttcttcacaacttctggaggcttgaagagttatgagcacccacttcaccagttgaaggcagtgccaagggtggacagttcgggtgatgtgtgcggtgcaaatttcaaggtggatgaagggtctcgcaaggagtccagtggcatgccaagagttggaagtgctgccaattggtcttccaacttttgagctggtaccttaattgcttatagcaaggtttttgttatttttggggccttgcttcgtttttcagcaatctttctcttcgcttggctttccttgttgatgactatgctgcttctttagagagtagttttactttttactcttttatttttcttttttcgttttagtattaaaaccaagacttggttccatatatgttctacttactgtcaaaatcatagccagaaccagaggaggaccttctggcgtgtaatttcaaataatatcaccttgcttaaaggattgatgctgatttagtcttagactcggcttgttttgcatgtaaatttcactatctggaagttgattatatatcttttaaaaaatatggcagacacttgaaaacctattttaaatgcagagcgcacacaagtgactagtgttgatatttgctatacataggatatgaggtacttaagccagaacagctgaagcccttctacacttaacaatattcaaacccaaaagagatatggcatacttgatctaaactgcagtaaacattggaataaaacatgtgctaactagcagcctctccttattaatgtgcataagaaacaaaggagcttgctgcttcaatcctttgcatctgcaataccacctggtgtaatctgaaatacgtatttttttgtcaagaagaaactgtaaccagtgaaatgtgagttttctagaagttttggatgattctaagaaatgatcaagtgaaataatcataattaagcataaaaaaggatattgcttcagcctcaggtaggtttggggcgtcaaaaaccttgcagacacgctgttctccttttcctttcctgaacatcagtcttattgtggcggcatgagcaagaacgtgaccacctgctggcttctttggatctgatatgaatactcctccccctgggtcagctataactgcaaccagacataccataataatgacattaagctataaggttctaaagcccgtgcatccaagttgcacgaactataaggaaaaatcaagaacattaattgctgatcagtgagtgagtgaatgcctcgattcaagcagtttcattttcttatgcttagtaaagctgaaacttatacaaaccttggttggtcatgtatactgcaacattgtactcctcagctatctttgttaatcgggagagcatttgcgccagtttttgctgtaaacaaagccgattcacgtgttataatgat

SEQ ID NO: 79365 - DNA, 3651 bp, Cannabis sativa
  modified_base (1333)..(1336): a, c, t, g, unknown or other
  modified_base (1405)..(1412): a, c, t, g, unknown or other
aaaataaaaaatttgtaataatattataaaatagagcaaccccattacagaactctcaaaatatgtaaactagtttcgaacaataatttagaaaaaagcacgaacaaaaataataaaaaacaacacataaaatctcgaagtgatatcacattctgtgttctgatgcttcatctcatgattaatgaccgctgatgcctctctttgattgcctgtaacccattccatttctgtcaatgcaagtgaactcatatgagattgtaagttctccaatccagtggccataagaagatcgacccctgcagatagaaagaaggggaatatacataatagagcatagtgacaatccaagaaatagacaagataagaaatgattcccacctacaactttcacaattaaggatctcttaaagaaacagcaatagaacagtactaaaactttcattgagccaattcaacagagttaggcaaacattaccctgcgaaatggccttgcttgcttctgaaaactggatctttttctgaccaccatcaatattgtaatgagagtccacatgcgacagtgaccttgggttccttaacaaccagtcacagacttgacttgatctcatatggatttaagttgtcatcaaaggctctggtaatagtccctgaattggaaggtggtgtagttaattcatcttcctgactatctttggcaatggcggtagttctcttcatctgcattactgaatctctatgatcttcactaacagaaactacttctctagacttcctgctctcatcaagattacctgaacttggtgctgattttgcaaacactggtcgttgaggaaccaaaattcgcctaggccctatgctattcgactgcattacaccttgaacttgcccaacaaaaccaataaaaaggttagcacaattataataaagttggcaaggaatactaattctgcatgcaaatttccttctacttatataatggtccaaataaatgttaaaatatcagtttctagatcctccatagataccaagctgcagctatgttcagtaagaaaaaaattttcaacccatttcaacttcggcccacattttaatgggttattcggcccaattttgtgtgggttggtctgcccgccgggttgcatgctcagccttacctatgatttgggtcatttattataattgcccttaataatagaagttaaaatattttttttttttttaaaaaaatagagtaaataccattttagaccatgtgttttgcaaaagttaataattaggctaactgttttgttaaatgataaaatgaaccttgtattttctaaaattgtacaannnngaccctgaactgattttttgttaaaataaaacttaataataatcttctagagatgttatgacaaaactnnnnnnnntttctgtatctgttcgtgttaaaaattgtcttaaaattggtcatattaaaaaataaaacagttgagaattgagctcaaggtcctattttaatgtttttgaaaatataaggtctattttgtcatttaaaaaatagaggtgcaattggtaacttttaccaaacataaagtccaaaaaaatggtattttaaaaaaaaaaaaaaaaaaaagacatagcataggccaccgaaatgggacaggtaagcggttgtaaaatatatatataagatgatttcaaagttgataacattacttctttcgataccactcaaaatattctaatcgttatctagggttttaattaagctgaagagaaagaaattaagggaagaagtagcaagaaagcaagaaagaaaatggtgatgaaagcaacaggaacatcttcagcatttggtcataatcatgatcatgatcatgatcgtgggaggaatcaaatggtacgaagacgttttttcagatgcccacgttgtgagaagatactaaaatgtgctctaggtcttagggttcacatcgaaaaccacaacaagccagcatcatcttcttcatcaactggttataattgtcaattctgtggacgaagtttcttgaaaccacaagctgttaatggacacttaaggattcacaaaggcagagccaaagccagcaggactaacaacaatcataatattcttatgaaaaagtctctacttcttgttgatcatgatggagctcatgccaaagtattacaagaagatcaatatcaagattcggaaaagaatcatgatgatcacaataagatcacgaccaactctgttcttgtaattgatcattatcaagacactgccaaagatcataataatgatgatgatgatcataatactgatcaagataataaggtacgtactacccctatatatatataaatatctacttaatgtatactttgatcatataagtttatttatttattttcatctacctgttaatataattaatcatgtagctagctatggtatttttttcccatgaaataaaaccctagtcttttggcacatgtatatatttcatcaattaattaatcaatagtttcttggtatatatatatatatatgtactggtactactataaattaatggccaatttatttataaatgtacattaatcctagtcgaaaaatgatctttgttaaagcagggcctgatgatgacgaccaagaagataaattagcctgcacagcttaattgcatgaatatgaaatggagatatggagcatgatacgatggtgagggttaaagttactgttaatgtcagagattattacaacaaagattccaattagaagggtttatatatatagtcataaagacaataaaaaatagtagacactattgtttgtttccaatatgcatatatctgatttaaatattgtatatgtgtcaatctaatatacaaatttgacagacacagaattaaataggttattttgtttggagacgacatttttaaaagtgttagattatatggtttgagtgttattaatgaaagcttattcttcttcttcttcttcttctctctctcttcattttttttctgttacacgtacgtacttagtgatgaaataataagttcaagaagaaacatgcatgtaatattacggtatgcttaattgtatattctatattctaactttagtgaattcctttgattaggatgtaaaattgcatatttttttaagtgttaattggtaaataattataatttatttcatggttttgtgtaaaattttaattccaaattatttaatttaatctaatatggtgttaaaaaaattagattaagaaaaaatataacaaaaatgaaaggtagaaaggaataagcatcaaattgggcccagttctaatgtatttcaaccttggtctttccaatcactaactagttagtaggggtacaccgtacacgggtgagttttaacgagtttcgggttttgggtttggattttcgggtttgagtgtgcgaatactataaaccgaacccgcccgattgcgtggccgggtttttgggttcgggttttcgagttcgggggtgtgcggatactatcaacacaattgtcatttgcgattgagctcacaaaactcacggtccaacttataattctaagctcatggaagccttcactaaatttcagcaagctttcacttcacttacaggaaatgtttaaaaata

SEQ ID NO: 79366 - DNA, 2333 bp, Cannabis sativa
ccgactgaaattttatatttttacgaacttctttctgtcctcaagaaggtgacaaatttaaagacagttttttatcacttacaagcacatccagccaacaaaaccctggtaccttttaattttttaaaaaatgttaaggaataccatcacaggttattcttttcttctgggtttaaggcccttgagcatccagacttgttgatggactcggtctgggtccctccaatgcatcgcgcagctcccacttaactcttcatgaccacgcccaggtgtttgctagctataagaaggaaaatttgaatgtgggagatttggtgatgactcccaattaccagagggccaaactaattttggagagccaatcagtcgaggacttaacatgtccaaggtgatttgccccaacgctcacaattcggggaatgaaagggggctcaaggctgacattattgcgactgctacagacaaatacaataggtatagatacaagaaaaacaggagctcaatacactcgcctccaaaatgcatttgagaggtccaaccaggagaaggcaagaaaggaaaagatgccagccaggcctaagttcccctttctggttcctaactctgggacccctggtgccagtacctttggagctcgtaagtcccctctaaaccttcatttcgttccttccgcccaagattactcttacttaaggccaatggattttgacatgaagcagtataagttttggaagccccatacttggtggggcaatcatgcaaaaggtttttgggtcggtctcaaatgggctccggtcctcccattcccatccttttaaatcatacctcctacatgacctcgagttggttccttcattcagatagttttctaggggatgacaacaccaactctttcatttatgaatttgctagggaaaaattagagcgttagggtaggactagccttccttgttgtattgtacttgcatctgtgatctttatgtgctttctttttaaatttttgtttattttgaatggcgaaacccatggacaacctgttggtcatgctaaccactactcatagtcttgagccgaaggtgcctaatcctccccaaatgatggtgactcctagaggtctgactgaggagatgctcgggaatgaggaggtggtgctaattgaggaagaggaagaagaagtatccccgcttgactggaaacagaaaggtgtggttttccttccggagccttccaaaaagcctaaacgctctgccacccccagtcctagcactgactctgggatcccagtcaaagttgaaaactttcctgctccactaaccattctcttgacccccacccatcctgatgaagaacgaatccaactcttcattgccaaacataactacacagtggatcagctgtaaaaaggaaatgttgaggctgaggctcaaaataagtggctaagggaggtccatgatgggcccttttgaggtgagtatactggggaggtttgggacctaaatctttattccattagcgattggttcaaacgctacctgggctcatccctggcacctttttcttctgagatggtaagtcatttcgctgctgacctgactcaacttctgacaaaaaggtacgcagcctgcacctcctccaatcccgtctaccagatctaggacatgagcgtagcccttccctccgtaagtatacacttattaagtttcttttttcttttttgtttctcttgaagatctaacccattattattgattacctctagattgttgtggaggctgatcgtctttctaagacattgatcgaccaagggtttgtcgtttcatagctggatggcatggatagagttttgaggaagctcagggagacagagagctagatggagactctttgcaatgacactttggcagagaaggctcttagggaataggattaggaggctcaaaggccaaggacgagaccatcgcctctggccagaaggaccttctaaatgcctaagaggagattcagggactcactacgaaactcaaggctcttgaagagctacataagactgacatggaaactgcatcaaatatgtcggttgagcttaagaagttgctgagtttcgggaatgaacccagaaggaggtcgcaaaggctgcgagggatgcattattaactcttgttgtattctatatcatttaccataaactcaatcgtgggagcttccccttgcaagatgttagtgaataaggaggattgatttaacatgatgagatcattattggaacctagaacaccaaaaaaatgcatgccaaatcaaaagatcttgtgtaacgtccccgcttcaagcctcca

SEQ ID NO: 79367 - DNA, 3403 bp, Cannabis sativa
tcatgctgattatacttttttttttactatacacattatgtcacttaagtttattattttaccaagtttttatgattattttttttaattttttttaagacatcatttttaaaaaaaaaatatatatttaatgggtatccgatgggatcattccctcgtcgggtaatacccgtcccgatccgctttaatttaaacgggtattagggcgaatatgaagtgaatttaagaagcgagtatggaagtgggagagcaatccccgcacccgcccaaccccgtttacatccctattcaatccttggtccgctggagttattttcatggtgtttttctgaagctattctgtcaaaataaatttacactcattaatggtcttaagattctccctaggcatcaggaaagggcatttttaacaaataataaatgtttaaatattatctaataataattattgcttttaatactaatataattttttgtggtcatgtggttcgatacaaaggttggcataaaaaaacacaaaaattgcttcattcccaaaaaaaataataataaaaataaaagtaaaatagcgtgtttattagtgatataaattagaagagagtgataacatttattattatatttaattaacatacaaaaataaatgctcttctcttctctcctcatttcataactgtacaaaattaaatcgtgtatatacatatacacatgtaatgtatatcatcatctttatcttccactattttcgcttttaaagcgtttcattggatctcaaacttttcaaaacggtttctacactacacaccattattattattattattattatttacattacagtgagcagtacatgtatatatatatatatataaacttacagagagagagaaagagagccccatattcaatattgtgagagtaacccttttctcagaatcctaaaacagataatgggtcgagcttgttttccaacgattctccttgtttctttcttaattctcctctttttctctcaaggtactattctcttctattttcatttttctctctctctctctattttttttatatatatttctgacattttttttttgttgttgaaggatttgggaggagtctgaaaaatgaagaattttctgtagaagtagttgtaaaggtgggcccaaactcaattctgtgttttttgttatgtataaattttttctatatcccaatttcccattatataaaaattaagtcccttgattttatgttaaacttgtttggtgtttggttatgtgttttttttttttttttttgggttttgtttaggaggaaaggtatggtggtgatgaaagtgttaaagggaggaaaatgattgaaacaatggattatgatgagccagagccaaataccaacccaagaggtgggtttttctacagcccaccacccaactgatcatccttctcaccaattttcataacaaaattctcataaaattaaataaataataattatgtatttgcttctctctatatacatatctttattagtgttttgatatattatgcaatttacagagttttttttttttttcttgtggaagtgtaaaatatatattttatgaataatgatgatgagtcttatgtgttgttctattttgtttgagcattgatgaggtgatgtttaagtaagactcaatattaaaaatattacacctaataagagtattagttaccataagtgctctttactaacatttctcatttgttttttttttccctatcacatacctttagttgaatttaagcttaattcatgtaattatttaatttagagggatatagctaatgaaataaaataaaaaataaataatttttaattaggtagcaatggaatagaatgaaatttaagcttatttgaagtaattatttaatttgtttgatctcaaaatcacaatttgagaccaatacaaacttgaattctattaatcattttctccaccaaacactcacaatcggttttggagattttttttaataatgccaaggtatttaaaaggaagattactcttctaaaaacgatataaatccacaattctatctaaagttaaagagtacatacactgtaaatttatgttggagaaaagcttgaagccccttaaaattagagttgcaaatttataattctccttacagaataagaagagattatcagcaaagcaaagttgagtaaaatgggtctaagcttttgcaccttggatgaaaatgaaagtcagtctctttggtaactttgatcatgaaatactccattccaataataaaaagaagcagagacattggatcgccttttcttaggccatgttttgacctgagataaccatggatgctagtgccaccattgatatatgtagaaagaaaatctttggagtcgtgacacaatccatgataagataacaaaattagctaggaaatttaagacagtgagcatctcatgaagaaactcacaatcaagagtataagtctttttgaaggtctattttaaacatacaagctgactttgcacttcttctatcataatctcaaaccatgcatgtcttggcaattcatgaagttgtgggcaattcactttcttttcacaaagccactctagttttcagaaataattcccaaaaaaatttctctcaatctcttacaaagtattttagttgcaattttatagaccacattgcaacaaacaatgtgtccataataactaacccgagttcaaaaaatacagaatcgcttcagaaacctcagtgatctcccaagtattacttttaaaaaagacattactatatccatttggacgtagcatttttatcggaaattgaataaagagcctcttttacatgagagagggcatattaaagaagccttaattggctataaatatatatattttggagaaattcatgcatgcatcaaaattaataaaagacttttttctttcctttttttcataacatctctcttctttttatgatacgtatatgtattgtattttattacatttttttttttgtgcagcattgctagtgcctggcatttgttattggtgaaagccttacgattagttagtaatatttctttaaaattattttttttaagttatatgagatttaatatttaattacactaataactgtatgacattgagaagagtactcacgtaatcccttttaataattctctcttattttttttttacgaatttctatttctaacacaaataaactgagctctttctccctttccaaaatttggaagataagctggccttaaattctcccacactatcctaggcgttagtatttatataagtaagaaaaattttaaaagttttttaattaatgtagttagaaaataaagtatttttgggcctt

SEQ ID NO: 79368 - DNA, 2268 bp, Cannabis sativa
tatgtaagacttatgaagagtttgctaatattcatgtttgttttataatgttcagttaaacttcttgattggggggaagagggacataggtcagaggctgaaatagcttcactaagagctgcttttactcaagaagttgctgtatggcataaacttgaccaccctaatgttaccaaggtaaaagatgatatatgtatatatatatatatgtttagtttgttatgttcacttaactcaagctagtataaagtgttagtggaaagttctgcatttgagactattcagctgcttcaaaatgacattgtgacaatataatcacatgctaaatgtttctttcttttatgttgtcatcattgttggtgctttggtttggtggatatctcttttttgggtatataatcatgttctttttcctttctttggcagttcataggggcgacaattggttcgtcggacttacagatacaaactgataatggtcaaattggaatgcctagtaatatttgttgtgtagttgtcgaatactgtcctggaggtgctctgaaatcttacctcataaagaatcgaagaaagaagctggctttcaaagttgttgcgcagcttgcactagatcttgcaagagggttggatttgctttcttcatctgcatttattaatttcttcagttttttttatttttattttattaaattcacttattgaatgttaaaagaattaagctaccccactttttgtgcaggttgagctatctacattcaaagaagattgtacaccgagatgttaaaacggaaaacatgcttctggacaagagccgtacacttaaaatagctgattttggtgttgctcgtatcgaggcttctaatcccaacgacatgactggcgagacaggaactcttggttacatggctcccgaggtattagctctaactgaactctttccgatcgacctctttatttgctgtaattattaatgtttatgattttatcgaatttatggaaagattaggctattttttatcatagcacttgaagggtatataatccttttgttaagaagattgtgctatatttctttatcttgaaatatttccaacactgccaacgaacgaaggtagactaagcatattcaataattgacagcaaccttctaactacagtgatttggtttaatgttccaagtttccatcacttggtttggtgaatagacttgtatataattgatttgaattggaatggagcaggttcttaatggtaacccatacaacagaaaatgtgacgtgtacagttttggaatctgcttgtgggagatatactgctgtgacatgccgtatcccgaccttagtttctcggaagtgacttctgccgttgtccgccaggtatgtagagttcatcagaatcatgttaaagttgcaaaatttatccagaaagacaactcatgtcaatatgaaactacagaatctaaggcccgaaataccaagatgttgcccgagctcccttgcgaacgtgatgaagcggtgctgggatgcgaatcctgacaagcggccggagatggatgaagtggtgtcactgatggaagcgatcgatacgactaagggaggaggaatgattcctcatgatcagcctcagggttgtctgtgtttccgcaggtacagagggccctaatgaaagtagtagtgtttgatgaaaatgtgtgtgagagagagtgaaggtgaggagaataggtaacaacacagtgaaccaagaaatgaaattcaatttgtactttattcaattcaaacagattggtaattgttataattattaagtcaaggaaatacaaaaaatctatggaggccataattgtctcactcagtttgtgattttgattttgtaaagcttctttttctttcttttagtgttaaaatatgtatacaagctcacaagctggacaatatcattgaattgaccccaaggcttgttagttgttacatctatcaattcaacaaactttgcagccaaaaacataagatatgaagcaaatgtgtgatttgttctgctacaaattttgaagcaaccaagttcattttaatgtttttattaatatctctttgtatgtttgataaaattttgttcgtttgcatatttctttaaaaaagaaatcaagagactacaagtgtttttcctcctatcagtaagtaaaattcgagtaacttattatgcatgttgcgaatgctaaatctctcccctttctcaacttctaaaattttatctcgagtaaattagtttttg

SEQ ID NO: 79369 - DNA, 2446 bp, Cannabis sativa
ccgagttgtgataaaaaataccacaaatcaagttcatcttttttcgatgagaagtactccggtggaagaaaactgattttgtcacccagtttcatccaataagttttagcacgtgatgcataatacttcttatctatatacataagcacatgaagctctttctctttttattgataaggaggccaagagacattatcaaaatcagtatctaaacacgccaaatcatctttcttttttatttttatagcaccacactttcgcttatacacatccctattctaacccttaagagcagaaatgacctggcaaatattgtcttgaacaccaaccaatatgtgaccactaccagagtttcaagtaccacccactagttcccgacaatccaactcatccacccatgtcatttcaaaatgaaaacgtgacttagccttaggtaatcaacgacccttgcaaaatacgagttaataaaggacgatgattagaaccctaaagattcaagtgagaaataaaagattttgaaaacatactttaccaatccgaattacacaccatgcggtccagacgctcttgtagcaaagagtcatctgaatgcttattacaccatgtaaagcgggcaccctcaaatcccaagtcaacaagaccagttttagaaagagctcgccgaaaattgtcaatacacctttgagccttgagtcggcccaccactcttctcatattaatgaagaatttcattcaagttcccacccccaaccaaggtcccgagaacccatctacaagccgttccatcaaagaccaaaattgaggacgtagactcgcatccgactgcccatagaactccgtaaatctccaccacaatacattatgagaccgcaccaacgcatcaatatggctacaagattagcctttttaaataacctccacactattagcccaaaataaatataaactaccactaccactgatcttctcaataaccaatttgccaacaaaacccaactaaacacgcatgagttctagaaccgaatgagaaaccaagatttctgacagaaatacgagagcaggagagtgttccttgataagggaatttaaaacttaaaacatctggtcattccccaaaccttgaacgttccacgccagacaattcataatgctcagtggccttgaagatcaaggtccgccgtactggaaccacccatgtccactttcccaaccccatcaagtaaatgaagagaagatgcctcacaatttgcacttcatagcctagcttcgaagctagatctgtcgataagactgaaagagaagcttcatcgccaaccgaaatcggtaaagaatccgaaacataaacaaaattggaactcacctctaaaacattgggaaccactagtagagaaattgagtgatccttagtcttacgcttcactatacgaatattatgttgcacaacaagagtactatccttacgacctgacaaagaccctttaggacgtccccgtcatcctttagaagaagagcctgcgaacatatcactcgagaaagaaacaggcaataatcgttgtttgatactaaagacaggcgagtccgtcataaaagcctgaatatgagtgccaaaaatcaaacctagttgcgacaacgaagaaaaacaccttcaatcacgtgatcgagattctcatgctagaaaaatctattttgattttgatttaaacattttctcttaccttttttcctttttttgttcttaatatctcttaccttttattttcactctaccaaacatttccatttggtttggtggtcctctatataatatctcttaccttttactattttcactctaccaaacatttctatatagtttggtggtcctctatataatagacctattaattagcaaaataaagaatacaaaaaaaaccgctgttattttttcatccttaaaattcgttaatattacaactaaactagattaagtaaatcccggtggcagaaaaatatagtataataataataaataataacattattattatcattagaccttagaataaatacattattattagaattgcatttaacaaaattaccattattggacattgttacacgccataccataaatgcctttttattctggatagcttacaataccaaaatagataaagaacaaaaacaaaaagaaggaagaaatacattgtagagctaagttattaccacactctacaatgttggaggaatccatatatagccgtgggtttgtacataacccactttcgcctgcagctcatctgctgcctcggggcctcgacttcccggtttgtatgggagcggcttgagcttaccgtcatcgattttatgcagaagaggagtgaagatcttccatgcagcctgatcatgtcaaaaccataaaaacagttataaactaagaaactgacaatggcttttcacaata

SEQ ID NO: 79370 - DNA, 2478 bp, Cannabis sativa
ataaaaggaaaattactaattaataattattatgttgtaataaactcagctcactctttttcgacccattcttctttttcttctcagacagtagaagaaagaattgtgaaaggcaatggctactctagatactgacgttcccatggttcccgccggcgaaccttcaagcagtgctggtccttccagcaggaaacccaagcgattcgagatcaaaaaatggaacgccgttgctctatgggcttggggtaatttctctaaaccctaaccctactttcttctccgatttcattttctttgaattgttattttaggtttttgaattattttatgtgatcttttttattcggtgcagatatcgttgtcgataactgtgcgatctgcaggaaccatatcatggatctttgtgagttttctgttttctgattagtttgggtgatctctcctttctctttaaatacgtatattttaactttgttatttctcgggtttattaggtatcgagtgccaagccaaccaggctagcgccaccagcgaggagtgtacggttgcttggggtatgtaaatgtctaattcatttgtttgttatttcatctgaatacaattatatgttttggattgaacttttgagctaattttgaattggggtttatgtttatggtaattgagaggaagtaaaggggaaacttttatcccgtacagtttcaatttagaagtattctatataattttaaattttgtaaggaatgccattcttctgtgtcatttgacattgctctatccgtatgtttatatttcaccaatttagagttaaatttaatttggaagttgtgaaattggtaatgtgttttgtcattttttgtaaacggcatggaatgttgtattttattgaacacctgtttttaaccttttgtgagtgtgttactatgtaattcttcattgtaagtttgttattctttcatcaagttgctgttttagatgataccaggcacaagtaagtaaattaagtttaacttttgcttgtaaatttgatagtttctctttagttacatcactcgcagttgaaagataagttacaattttgtatgaaagatttagtagcttgtattctcatacattaaaaatattaatgctcaatggttgattaagttctcactgatcattcattgacttacatcctgaagctccaggcctgcctttttgtataatgtttgtgtggatttattctggtttaaaatgtccagattataatttttaagtggtatttggttgggtattctaggtagcagttggggtcaattgaactgaatccatttgcactattctgtactattttgtttgtgaatcaagatcaagattctgtttgaactgttcgaaattgcatatatttatcttatgcagtgtatcttttgcttgaaaccagtcaataaatacgtatttaacccctcttattccttatgtttatccacattttggtgaaatttatatatattttaattatagtaatgtggagtgccacatgaggctaaagggtctaaggatggactgacgtagggctatctgtttctatcctttctataataaatatatatgaaattgtttacattgtgtgtagttgcacatacaagtccttcaatctaatctcacggttctatctctataggggtttgcaaccatgcttttcactttcactgcattagccgttggctcaagacccgtcaagtttgtccactgggtatgttttatgccccgttccatttttactctaatgtttttttcttcttcatcatgtagcacagacttatttttgtttttcatgtcttgttgaacacagataacagtgaatgggagtttcagaagtatggtcactagaagcttcacgtggttgtgtagttgtattctcattttcaagctactactggtgtgaaggaggattataattcactgtgctctacttctacaagatttgtatttttggctggattaatttcattagtagcctttttctctgttaattcggctggatttattttaattttgaaagctttagctgtgtttgaaaatcagtgttgtgtataacagactatcttgttttgttgtgaccattaaactaaaaacctattttcttgaaatggtgcctcctttccaacttttaagagctttcctgttcttttctttttctttcagattttttacaaatacacaaaaaattgaaaaaaaaattcaaaaatacgttttttttattgacaattagatatattttttaattattttatagcttatttatagttgttatggagttgattatttttttgaaagtatatttttataattttgaaaaattaaatttttatagctgtaaaaaaaaaaaaaaactgtaggtgacaatgtaaataaaatacatgtgtatatatatgaaaaccatatttatgaaaaattctctttttctttttaagctcaaggtatcagtatcagtggttt

SEQ ID NO: 79371 - DNA, 2004 bp, Cannabis sativa
atacaaaattttaaaaaaaattaccaaaataaaattaaaataatataaaataatgtaagaaaaaagtttttaaaaaatattaagaataatttttaaaaatgattttaaatttaaacttttatatattttaaaatatatttattattttatagtgtaaataaatttctcctaattaagaccacaaaagaaaaaaagttaattaattcatttactagtttgatacgaagaaaagaaaagtaattttaataggtccaattctagcgactaaaacttgtcccggcctctccacgtggtacgttgtggcctaataccatcccaagcaaaacaaattacactattatttactagtattgctattagttattagttattagggtagcattatttatttatttaattaattaattaaaataatataaacagcacatggtttatcccaaaccattggtttctacttttctacctctaattcctgtggtttttcactcacaccatttcaaaagctgacagacaccaccttacatatataaaccaaaacccacctcattagtctaccaaacacatcaattttagcacctccatcagaaattattatcatctctcaacaaaagaaatcccttttttgctgttgtttttgaatcaaagaagaagaaagttattgaaaaatgagtgcagcttgcagagcttggattgtggcgacgagtattggagctgttgaggcattgaaagaccaaggagtatgcaggtggaaccatgcattgagatctttgcaacaacatgttcataacaatgttaggtcctattctcaagccaagaggctctcttctaattctgtctctctggtttcaaaccaaatcaaacgctcaagagaggagaagataaccaaagtcatggagttaagctcatggggtcctagcactataaggttttaatattagtttgttatcatttcattattagtagtattagacccttatttttatgcagctttccttgagataatgcaagatctaattagtgcgatctggtgtaacattttgtttatttttatatatacgattgagagataatttgattctgacttagttatgttctttcttcaatttccaataccatttcaagtgccataagttcttcgtagattcacacagcaaagggtgatttctttccattgttactcatgggatttaaaagtgtaaactttttttttttactgaaagaactgcatgttcattaaactaaaagagaaagataggaatcacgagaggatttccctcccttgaaaaataacagcttcttggctagaaagtctagtactccgagctaatccgcaaaagagttaaaactacccttaataaagaaaaaactacaagaataaaaaagtttaactaattaactaattctaagattgaaagataaacatgaaagaaccccactcaggaaggcatttgttttgagacaaggcttaaaccactactaaataatctgagtagataactacaccatcacaagaaatttgatgtgcccaagggagagctaaaagaatagctcgagcttcagcttccagtgccgaagtagcagcattttgttgtatgttatatgcccaatattcatcttcattgttgatcataagtaaagagggaaaatttggcaactgagctgcggggctgatctgaaggagctgccagagcctcaaaatccttgaacaaagcagagattttggcagagcagagtggcaagtggggcttgaaaccataaattctgacttgatttctctgctgtcagacttccatatcacaaccaatgtacagaagcacacaatgcttttcggtctccttagagtataacgaaaatagagaaaaaaagagaaaagaaagttagaaaactttattacttattcgatattttaaatggtaaagagtgcacaatatatagacaatgaaggagctgacttagttatggaaataactaacttggctaacacacttaactaactcgagtaac

SEQ ID NO: 79372 - DNA, 1355 bp, Cannabis sativa
ttttacaattttgaaaaatacaggatctattttgtcatttaacaaaatagaaggtccaatctataatttttacaaaatacaggattcaaaatggtatttaccctgttttttatcctatatatagtcctatagtaggggtctttattagtagaagtattttccgtttttggtataactacaaaaattataattcataaatgttaaaagtattatttattagcgtaattaagtattaaggtctatcactgatcattgataatgtttttattttacaattagtataattaaatattaaattctatcactaattatttataacacgaaacatatagatcttatgagaataggttcaagatatagtgtattggtattgaaaattatttgaatattataaaaacttagtttagtatgaaaggactagaaatagtgttgaaaaaaggggtagtgtagtagtgtaagagaggagtgtgagcgtgggttgatgatagcgttgaaatgtgaggagtgagtgagtgagtccaaaagtgtacgtgatttgcggagagcaccgaaagctgcaccctttaaccttttgttttccaattaactcattaatttattttttggacccacaaattacatgtccactccacactactctcctacactctcatcacttactactcactgtacatttttgttttcatacaaattttggtctcaaaacacagccaaccaatgtacactctcacaaaacaggtcacaaaatacaaaaataatattagatgttgaacttaccacgtgctgtctagtgtagcattagtttttggtttgggttaagggttcgaatttcactcataatttcttatgggaaagatgatgtttggccttttggaagattagcttgttgtgactgtatctttcttaataaaataaaaactcttaggtgtatacataccgatgacccaaataaaagagaatgagattaatgccctataacttacacgtggttcttgaaattgtttgcaaaaaagtaaagaaagaatcggcatgttggatttagaagaagtataaccaaaatatgaacaacagttctagtcttttagaacaatagaaaaaataaaatatgtcaatagagtcatgattacacaacaatgacatccctaataataattccaaataataagaatcaaaagaaacctttccaataagagagttatatgagagaatctaagaccaattaagttagagaaactaagagccttgtattgcctcatccgcacaattcaagagatagattgaaagaacaagaaagtctaggcttggcttgagcaaggggagcagtatgtacaatacggccgacggtgtaaccaatt

SEQ ID NO: 79373 - DNA, 3848 bp, Cannabis sativa
ttataaacgggtcgtgttcgggtcaagcatgttcctgttatacatgagtctcaacacgacacgaacacgactcacgaacacaaattgccacccctacctatgaccacgagatactggattcaatacaaatataaatcctaacattctaagttacgtggcttcacgggttgattgagtgtttgaaaaaatattagcgtttagttaaaagtaatgaaatagaatagaatgaaattaaaataattttcattctattcgtttatttggttgcatattaaagtattagaatgtcattttattaaaatgacatttacactattttaatagaataactattccattttaaaatgaaaatgaagatcatttcaatgcataaaaaataaataaataaataaattttttatcaattttttttatacattttaacttttattccattcttattcttattttcattcctattcttattcatatatttcattctttccaacccaactccacctaatactctttcacaaataatgaagcttttgttcaagattgagtctaacatcctaagtcacttagctgcataggttcgttggccaactccatggctcgtgatagtgggttcaattgggccagtagtattttttctactaaaggagaaaataaaattttgtcagagacaagatcttctcttaatagatatgcaaatacaaatgtgaaacaaaaagaatttgctctttagatttcatcaacaaaaatcatgatatcaagattcggaaccacacttttaggtattatgaaaaaacaaaagatataaagtaaatgaattatgtattaatatgtggatctagtatggcagagattcattaagttatgctaagcacaaaataattattaaaaaataaccctttatttaagcattatattaataaaacagtcggcaaagagcattattacaaacttgataacacgttgaagtaagtccccacatttttctaagggggtgagaaagattttgtcccctgaaaaccccaaagaaaattgtggaaaaaaaaaagattatacacatcccttaagaaaaaagattatacatgatgattcattccatttatatgatctcacatagcagcttcttctcattagagccattttctcttatacaacatcaaaggtagattagataaccaaaacccctcttcatttcagctccagttgttgaaaaatcaagtgcatgcggtcataaatctcttctggtgcaccctcctcaaaaacccaatggaaataaatcccatttcaggtaaaaaaagatgaagaagagagtaccaacccattagagataataaaaccgcagaaaaagacttgcttttcaccacacacacaccaatatgtgatatgtggttaaaataattactaaccggatcagcataatcagcagacgattatccccaaacagagaagagaagtaaaccttagatattatatgagtaaaaaagagagaagaaaagagatgactttttagtgtttgctaatatatatatagaccatagttaatatatgaattaacataactagtcatctccttgaatataccagcaaagaagcatggtagcacagcggcgtagaatgtaaattctggctctctgttctttgaccagagaagcacattttctagaaaagccatgaccctttttagaatgaccattcttgttggttttggttctattgcagtgttgaatcacaacatccatgattggatatgaaatatatttgtatgaagagtttgataaaaaggctctgataaaaaaaagctcggtagagagctttgaataggcctgaaagttagaagaggctaaagggtgtttatatatggagcagaatcttgaagcttgattaaaaaatagaaaagggttgactgagttttgaagggagaaggtgaacatggtcaggttcggaaactgagggatttgcattgtagccttggttttagcatggatttcaatgtagttaagggggagtgaacgtggggttttggagaagtaattatgattattatttagttaatggcgtttgtttcttttaccaaagataataactttatttatttgtttgagagtaatgaattagaaaagtggcaaaggtgttcatgaaaagagggaagttgcttaatcgatacacggcaatggatttaagcttatgggaaacagactcccggcaatcttacctcaattctgagttgggtcgttcgtttggttggattctactaggtcttacacaattccccatgtaaagaaactagacacaaaaaataagaataatactttttatacattggcttatataatatatgtttttgttattatattttcactctcatttttggctcatttccagtgaagcaaaaataatactgtaaaatcttcctcacactagaccagtgctgctgtcagttgtatctatctttttaacaacattatcatcactagaatctgtagtacatctttttctatgttgaagcaaccccaaagtggttttcattagtgagaaagagaaaaatagtatattaattaaacagatcagccagctaatttggattttgtaacacacaatttcctgatagtgattataatcttttataaccttgttctaaggttttagcccctaaaaagaacactgttcaattaaataaataaaaactcaagtgggtttatgggggaaaagttaatataagtaattgctaggggaccaaaatataatccttatctactgtcccttttctttatgtgagcattaaaacatggtttgcttcaagttaaagaccagtcttgttgtccaagatttttctttagattggattcagtttcaactataccattttgtagaagttgatgattttttttacttaaacaaaaagatttttgtgatttgacatatgtacatatcatatgcttggacaaggtagataatttaattaagttttcacattcaaagtacttaaaaagaagtttcaaatccaaatgatatctttaaagataattttggtaggcaaaatttttataaatttcaccatggtgctctcagatttgatatcagaatctatatcatcagcaaatattatcacgtttgtgagttagctagctagtcaatgcagacataacccaatctctatagatatgcttgttcttcaactactttgtatacacacaaattaatgaaatgatcattataaccaaactaagaaaaaacattaatatatctcatactacctactaattatatatatgaacatattccagctataatcaaggaactacaacagcttttattaattagtattgttttttaaataattttattcgatgcttatatggggataaactcaaagcctagttatggtatcgaataattaatgaggtttatagtttatactacttgactttgtttatctaatctcttgggctggtttggttggattagtataactagaattggctagattgattagtttagctttatgtgttacctaataaacaaccaaataatataatctcgaacaccaaagctaatcaagacaaaacgagccttagaatacgcgcagtgtagaagataatataaatcaaacttcataactaatataatatgtatatatattttgaaaaaaatggaattttttcaatattaccaaatttattaaatttcttaaatatatttttttaacccactattttattaaataataatttagctttgtatttttaaaattagaacgtgaactaaattttagtttgtgttaaaatttgactagaggttgattatattttcgttttgtaaaaaaaaaaaaaatcgaactcagatattattatgta

SEQ ID NO: 79374 - DNA, 1362 bp, Cannabis sativa
  modified_base (1287)..(1319): a, c, t, g, unknown or other
actgtagcgtgccttagcattagggtgctacagatgtggttgctacggtgattcaattttttgagacgggggagtttgttaaagagatcaatcagcctttcttagttctcattccgaaaaaacctggggctaatacctttgatgaattccgcccatttagcctatgcaacttcacctaaaagatcatttcgaagattctggctaatcggatgagacccctccttcatgaaatcatatctccttatcagtctacttttgtcccggggagatggattgcggagaatagtattatggtgcatgaggttatggattcccttaaaaagctcaagggccgagatggttttttcggtctcaaattggatatgtctaaggcctatgataggattgagtggtgctttttggaaaagatcatggcatcttttggttttgtaagcaagttcatccaactggtcggtgtccttttcaatcttgctgaatggtggtccctgaaacagttttgccctggtagaggcctccgtcaaggtgatcctatctcgccatacctttttattttgtgcaatgaggtgctttctcgattacttttgcaaaaggaagcggagggtttgatctccgggtttaaggtcagtcgtcttagcccgtccatttcgcatcttatgtttgctgatgatctgttcatttgctgcaaagccaaccgggctgaagtaggagctgttatggattgtgttaatttgtatggttcttggtctggccaacgtctgaacatacagaaatctgcctacatctgttctactaatgtcccgtctaacacccagcttgatttggctcactacctgggattccgaaagttaaataaggaggatcgtttccttggaaacccgatcatttggtctaatagtaaaatcaatgatttgaagttcattaaggagaaggtttgctctaagattgaggggtggcggtgcaaactactctcccaagcgggacggtcgactttgatccgtgcggtggcccaaagctctccgatctattcaatggctactttcctcattcctaaaactctttgcactgaaatggatcaagcggttcgcaagttttggtggacggggaatgcggataagaagaggttcctggcgctcattgattggaattctctatgcttgcctcttgataggggtgggctaaacttcaagaagtttgaggacattaaccttgctctcatatccaaacttgggtggaaactctcatcggaagaggactctttgtggtgtaagtgttggaaattattttacnnnnnnnnnnnnnnnnnnnnnnnnnnnnnnnnntaacaccctaaatatgaacttttctaaaatgatgaaataaaca

SEQ ID NO: 79375 - DNA, 4305 bp, Cannabis sativa
aaatgaaaggattcctccaaaaaactataagcaattagttttatttggactaattattaattttaataaaatatgattgattggatagtattttgctgtgttaaccatattattagtgatcaatagttaatagactcacggctaattttttaaattaaaaatttatttgaataaaattgaacttttttaaaattggtttttttttttcagaaacaattgccatgttttaattgtctgtactgtacatcagaaagattaaaataacgtaacgtaagtgccaaacgtaacgtaattatcttagcaaaaacaaaacgtaattaaactttccaaacaatcaactgcttagtgcttataccacgcgacaaggtggcacgtgacaacacccaccatatcaaaagaaaaaaactgcaccgtggtaaaaaaaaaaaaatataactaaatcgaaaaaaaaaaaaaaaagtaatctacacttttttttacagttttacgcccttgggaaaaaataaaatctgttcttccatttctcaaaaaaaatatcaggcacgcaagcctagtgccacgtgggatttcccatctgaaagctgacgtggcgagatgagtcaacacaatcaacccaaaagcaaggtgggatgtatgtctttgagcgaacccaagacttgttgcatcgtgggccttttcccaggtgactccgccgtacacaagtacccaactcgtaggctctccaccatttcacgctcccactcatcttcccgcccacttatggatccgggtcggagtctcgggtcaagtgcattcacaccaacgccttccctcaccaacctccttacccacactacagtctccgctgttccgggccgacccgtcagtagctccatcaaaaccacaccgaaacagtacacgtcactttcggggctgcagttattaccatctcgtgctccgaagctcctgaacccgaaatcagctatccgtggctcgaaattctccgccaacagtacgtttgaactcaccaagtggccgtgtacgacgggcttagaacccgcgtggtggagatacgcgagcccacgcgctataccgacggcgatgcggtggcgcgtcagccaacccatgtggagcccgtttccattaggattctcccacgtgtcactactccaatcttccacgttaggctgcccggtaggaagctcgtgcaaccatctttgtaaatcgccgttggccatgaactcgtatagaaccagcttctctttccctaaaaatttaattcaggaaataaaaatcaaaactttgaaattatcacgggtatcgatggaagtaatcatggcctagtctgcacttaaattcaaacagtctttaattgaagtaagacaaatgaagagcatttaataaaagcccgtgagttcaatttaagagggtaggtcaaaacactgccattcataaaaaaatttgaaatggagtattaagaattgtacagtacctgcaatgcagtaaccggagagaggtaaaaggttggggtgtttcaaaccggacaattcttcgaacatgaaaacagcatcatcttgatcgacgtctctggcgttttccaagaccttgattgccacgtgtatgtctccaggaagaacggcagtgtagacgggtccacatctgccttcagctagctgagactctttcccgaaatgtgaagtggcggcaatcagatccttgaaagtcaaattcatcaacggcttctcaaacatcaccaccggagctgaagatggttctctgatatctgcggtccaggacgaacctgattcggtctcaaacgcaaagggaccagatttctccatcttgaagggaagttggactggtttagagatggcccatttgttctttctcgttatttgtcgttttcttctgtacatccggacgaaaagacaaaccaccattgaaaacaggacaaatgtggaagcagaggccgtggccaagatcaatgtctttcgggattttttcatgactggtttttggttttggtgtattgttttgtgtctgtgaacaagtttgtgggctcctttttgatgggtaatgttaaacaaggttgagtttatacggtttggtgccggtgccggagccggtaaaggtgaaagatggaaacttttaggggttttagcagcgttgagggtgaaatttccagcggcaatgaatgctgctttgccaaatttctggtacttttcgtggctaatcaatccagagaaattattatgagaaatgttcaaaaacttgagcttttcaagaggaggaaaatccgagggaaatataccgttcatcttattattcgaaacatccaagtacttcaatgaacggagagatgaaaagggttttgagttaccggaaatattgcagctggagatatcgaggtattgcaactctgtgaggtttcgaaaaccagaaggcagagttctcagattgttatgtgaaaggtaaagcactttaagatggcgaaaaccagagagcctaaccatattcgtaaaccgatttgaagagagattgagcacttgaatagacgaagctgaaccattactcgatgtgggttcgaacccaacagaccccccgaactgattcttggatagattgacctgaagtaagctcggtagggaccagagccaaccagggaccgaacccttcaaggaatttcccgaaagatcgagactttgtaactgagacatatttctgaggaacttccaggttacgatccctcttagattcatggatgataagttgagttctctgataaatggccgtgaacagttggaatcataatgtttgaacagagatatgttgaagccggagactgatctaaaagccttcgaaaccagcacttggtccgtactgttacatgaagaagaagtagctgattccgcttctgctagattcagtgcaaagataataaaagctataaacaagatcttcattttgagtgttctctgttttcaagtctcaataatattgtttctctctctctctctctctctacccatctatgagtgagttagagagagaaagacagaacctttgttaatttatattgaagaatagtttccataaagttacgaggagaggttgatggtggagcaagtagtgtatatattggaatagatagctggggttgacttggactgataatattcaacagagagactctgagtactcaatagtgaaattattttaattatttatagtagttggtggtattgatgccgttgattgtgaagatatttgtttttatttgtttgtttccggttttattctaaagtttaaataatgtctagtgattttgttcctttatttattattttaatataaataaaatatgaagaaatttcctgaaagaagacaaaggaaactccactctaaaaatttagaagagaaaaaaacatgagagacagaggatttaaccagggattcattgattgtctgtttgattataattgtcacacatgtgaagcaataacttgcttgttccacagtatattcacctgctctttgatctgcaatttgggttaatttagtttaatttaatttatttgtttggttcttttgttcttgttcttgctggataaagcattttaatttacaaaattattttgagtttctttggtggggaggaagtgaacctaggctcacctaatccacaaaattccaaaacccagatttgattcttccatggaatgacaactaataatattaatacataaaataatactgaaactaagattaactacgctaaagtaaccaaatcctcagctttaatttaatgtgaagttgttccaacaatacaaaacaaaccgttatgtatttggtctattatttaatcagcataagaaagatgcttcattaaaaaacttgagtctatttagaactcgcggaattaacaaatatagatatctagggggtatgtattgtgtctttctttaggggtattaatgtaaatatcctcttttagaaggtcatatgtgttgtatatataatacaatatggcagctaaacaagactgagaatcaatttaataagtttgtgttttgagttgagatattatgggtttttgttttgagcaccaaaagtgtctgattatatatcccatttgattgttaattgttatgttaccacttgaatgtagaggattatatgcatagagtgtacacaaatatagtacaagatatattacaacttgtggtgaaaaactactcaccaagatcatcaaaaacttctaacagaaaccaattaaggaaacaaacaaccaagttgaacttataaatctgaaaaacataaagaaca

SEQ ID NO: 79376 - DNA, 1532 bp, Cannabis sativa
ttctcatttcactatctttatgtgtttaccccaaattctctgttgcgttgtagggttacaccgaaccatatgctgagaagcttcttcctgacttgcatcccatggagcaacatgtctttacactagttctggatcttcaagaaacactactttactcttattggacggtaaggctaggaatgaaaaatagtgacaacgctagtttcttaaaatatcaagttttgtacttaccagaccggcaagattggctaatatctcttacaagctcttttttattaatatgttatttttgcatctctcttggcaagtcttctttaatttttggccgtagtttcattcttatactcatattttttcctattttatcttcaaattgcggactaactttgtttttgactttgcttgtgaagagagaaaagggctggcagacaataaaaagacctggagttgatgccttcttggaacatctagctcaatattttgaaattgttgtgttttccgactattcaaatatggtaattaaaaatatttacgccctttgcctgattcgtattatcttaaatgttaatactcaccaacattatatgaattgtcttggcaagtgcagtatgtagatcctgttatggagagattggataccaagcattgtgtgcgatataggctaggaaaggctgctactaagtatcagaacggaacacattacagggtatgttgtggttgctgctaacttgtattgttcgctttattaaaaatctttcagcatgcacggaattttctttctaaattatatgtctgggaaggtgaatggcatgttgctaatgttcgatatacaaagcaagaaaagtgttcggtttccaaaattaaattaaaattatctatttcaatttaaaggaaaagtgcggttataaatactagtgttcttttacaggatctttcaaaactaaacagggatcctggaaaggttatttatctgagtgcccatgcccgagaaaacagccttcagcctgagaatggtgctgtaataaagccatttaagcttgaaaatgatgacacagcccttctggacttcataccatttcttgaatgtgagtatatacaattttcgttatatggtagaacaacggcttattatccaaattgctatgttcgagtacagttaatgatgcatcctcataatgggtttctatacagttgttgcccgtaatcctccagctgatataagaaaagtcttagcatcttacgaaggccatgatattccagaggaattcattcgacgatcgaaagagcatcggaggtaattattatgacgtgtctaaaactaagaaattaaagaagccaacactgcttaatctttcttttgaaaaagatattgaacttgtcattactaacacttctgctattattttaccaattcatatttaccaatttcgtaacaaaagaaggtatagattaaagcaattgtatgaattcctctgcttatttttgtcgacaccgaactttttcttattacaggcggatgcaagaacagaagc

SEQ ID NO: 79377 - DNA, 1125 bp, Cannabis sativa
gattgtttcagtagatcatttatttgtttcggtatttaagatagcttttaggtcctatatatttttatgattgcttgcgttgcaactatataggatagcctgtaaatttttaatttttttaaatagtttacagagtgctaaaaataatgttcaaatattttattgcacgcacgaatattttccttatagtggcaagcaattatttgaacttattcattttcaataaagtaaagtactcaaaattttctaaaatttcatatgtggtcctaaataaatatgtaatcttgaaaactaaaactaattttagattttagatgaaaaaaataaataggaggtctagttaaaacccgtgcactacaaaaattctctattacatataatatgtggttatatattttattggtacaaatataatgctccttatacatatagctatttatataggttgttttaaatttttccttcatattaatattttgttacgatgcatacatgcacatatgcatatgcttttataagaatataattgttacttaattggttatattagatttctaacacattaatattcgtttatcatttagtattatataacgacaagaagagagaaaaatgagaagaaaaaaataaaataggatgacgttgtatttaattaattactttctttaattaatttcataattaatttactatatattatgtgctagcaattaatgtagatatcaattcgattgcgttaattaacacactttacttcacttattttgtctgttgtgtgccagctaataatactattgggatagtaattgaattgcttttctctaaagcaatgaataaatactagtattatttctcaaaaaaaaaaaaaaaaagaaaaatatgaataataagtatatgaaatcaaagtaaaattacaataaatccaaactagagattcatgggttgagaattagtagggagtgcttacatgtactcatttttgttaaggattttttggtctgcatcccggcttgttctctatttgagacggagcagaaattttgaatataaaaataaatttatgttaaaaatttaaatatgtaaaagtgttctattatataaaaattaaaatagtatatattattt

SEQ ID NO: 79378 - DNA, 4710 bp, Cannabis sativa
ctgacaaaaaacagttttctgtttttaaaaacaaaagacagttttttagttatgatgccaaacatgcacttagtgtttatagtaagtggaacattattattagaatatatagaataaatctcctcttatatatttatatatgttatatgataataaatacaaatgtatgattgtgggacttgaaaaatatcatcatatatattacataaaaacaagtaccctcaaatccctcatcctcacgtaagcatgagactcttctaccacttaatacttataacacatatataaatataaatggtttgatgtaatagtaggaattgcattatttcttacttgatcaagggtttcaaatttactacgactcttagggattaaaaagacttagctctttaaaggttagctggtataactacccttaaaagtgattaccgatgattcaattaaaataaattaaggtataaaacttttatagctgacacataatattcaagattgttaaaacaactcaagtagtagagaaaaaatctgaaccactttatcacttttccttctttagcaacaaaaaaaaaaacaatttacatatatcttttgtttttgtttttgtgttcttctccgaaatgtattatttaattttcctctctattcatatatttcgtgctctattctaatagagccaacaataaacgacacaacattctcagtcagctaaggaaggaggttctgaaataatgtaaaagaataaataatgttaaaaaaggaaaaaaaaaataaaaaaaaaaagctaaaaagtattttctaacactttcctacgatcaatattattattggtccaattaaatattgagtttcatataatttaatataataacttttagagagtatcactaaccgacacgtttagaaggtactagacactactggtgcccaatagcaatgctcaaaagaaaaagggagtacattgaatctctattatgaaactatttatcagctgaagaagggtagtattacatgtatgttacaaaaagaatgttgcctaaatttccatgaaaaattcacatttctcattttctcaaattgcttttgcattttccactttaaaaaaaaaaaagatatgaataagagaaggtgagcagcagacacagacaaatgatataactaaaccttcaccatgtgtgcctcagcaattgatgagctaaggtcttctcgagactgcgatcgtctactctgtagacgcatctgacttctgtgaggagaccagaaggaacccgtgctaccattgtcgaattgcatctgccccagattagtcgacgaataactatgtgcaacactgctagttgacgacgggtatagagaagattccattagctggatttcaccattgctgccaattcctgtaccgaaaccaaacgctctctgctgagtactaccgattgttggactcagaggcgtctttgctcttccgtcccctgaaacagatagtgtcatatcatgttgagtttttactgtgttctcatgatgaaatcaagggcgccaagagagcattcatcaagggtgcatgaacattcaacagatttaaacatatgaacagtttgttgaggttcctttctacaataatctattttcattttatgtcatgcatatagaatagtacaattcatataaggtattccttacacacaaaaccagctatcacagctaatacaataccaattaggaaactaataactcagctttcctaatattactcataatacataccttatataagagattatattgaacactacgtttcccaaagataatcctaataaagtttgacattcaatgctaaggaatcttcaaaaatgacgatatatatatagatcaaagtactattcttgaaacatggatacaaatattaaataaaaaccttgagggattgcttaccagaactaattggactccatcgctggagccgaaatggagatgtcatcccaagaacagatacagatgatgcattgttatgtctgaagagtggaagatatgaccttctcaaaaatttcggcctccaattgccagcacacgataacacacaaagaaggagaaacaatgatataaataaaactataagaagaagaaacggatttatctccatctgaaatatataatagttgcgaatccccattctactcgaaaacgcattcccagcttccaacagagccactccaagagtccatgtaatgctaccagaaccaatggtgattttactatccttaatgtgcaagccttctctcagcagtgatacaatatagggcgccctaaagcagtactgttcaataaatggctgtggagcaacgctattctttgcggtctcccatgtcctctcacaaaattcccgacccttttccactacgttgtcaagtgctgcatccgaagataggttgaaaaaccgataaacaacatagaagccagacaatgcataaaattgtccagaaggacgaggaaatccatcaccaagggcacaaggttgtaaatcacagttaatacccgaactaacattggaccactcagacaaattgacagcaaatttcgcaagtgcactgcattcgtcccaattaggagcaccgataagagtcacacgagatcctaattttcctcccacatccaaactctttccttgttgatacttagaacactgagaacaggtgtattgttccttatatccagtctgcaagcaagggtgcttgatttgtaccttcccactcaataactctgcttttatgttctctggaagcctcttaaaaagatgaaccacagacttatcaaatgcatcattcaaaccatacccgggaagagaataagcagtgaggtgatgattcacattcccaattctaagattcaagttagtttcactctgatcatgaggttcactctcaaaagtaacttgcaatgaagaaccccccaaatctaaagcaccaaaagtgggagttcttggtttagccccaagcataccctttaaatggttaagagctatccaaccaaagtaagcttcttccatgccactaatgattttaacccactctcttctacacaaaaaaggtgaagaattgagaatggaccaggcattgtcaagaagccatttggaatctgcactaggcagccttcgaacacccgcggtagcataaagaaacaccgaggtagtctcatgagcgtgtcgcggaatttgcttggctgcccaacgaacaaggggtttaatagcagatttcaaaccagaaatattgtgaaccaatttgtgtaatcctggttcagtctccattctatgataagcacgaccactttgagaggaaggctttctatgcaaacttttttctgggttcaaagatttgataacaatggggatagtacgttgtgaatgttgattcaaagaagcttgatatacataaactctagtaccagtactaccacaatcaagaacaacatagaatttagaggaaccttgagaccaataagaagagataaaaagtacaaagagataaacaataaaagctaagagaagaagacaaaggaataggaagagaacacgaagacatttctttcgagcggagtaaggggatccaggtggtaaaggcgaaaccttttcctttgagaaactttgttgatgagaagtgtataaagagttatgaaactggtttagcttttggtaagtagagagatcctgaagagaggaagagagacgcaaattgttgttcttgttggggaaaccaaggccgagatcgtaatctcgcggcggcaataatccagagtctcgagtaggtaacaattcggaagttgaagaagaagaagatgatgatgatgatggtgatgaagaagaagaagaccagatcaaatccctaatgcgagtgagaaccatttttgtttttgttttggggggtttaacccattccagagtttgaatgtgattaattgaataaatgtgagattgaagaaagtaatggtagtgatagtgatggagttagggtttgttacgttacctgaaagataaccagatcggaaagccgaagacgatgacgatgaggagcaccaccaccaacaaccaccaacaactcacacaactcacaccttttttttagtttttatttttgtttaaaaataaataaataaataaattctaaaaactaaactaaaatttgttataattaatttgggctttttctttttgggctttgttaagcttgcggaggcttacttatgtagataccaaccattgttttgttttgaggaaattatggtatatccactttactttatttattttcatttttacctctattttcatattctttaagatatacctacttttgaagatgatatcctcattaaaccccttaagttaatgcaaattatatggtacgcttaagtagagagtgagggtatattggccaacccactcaaaaaagtgagtatattttaaaaaaaatataatatgaaggtatttttgattaatggaaacaaaaaagaggtatttttcaactcatcccttttgttttgggaaatttacatcatttactaactttttcaataatcttacaactatactgtgacacgctaaatataacattttacctgtttttttttttaatttggcagtatactgccttgattcaaaaatatggacattagttataagtttttatatattatgtggcttataggtgtctttatgaggtttaa

SEQ ID NO: 79379 - DNA, 2544 bp, Cannabis sativa
  modified_base (571)..(572): a, c, t, g, unknown or other
tgctatctggtgttcctcctccaaccacacttgtcaatgatgcttcaaatcctgagtatcttcaatggcgtcgcaaggatcggatgctcctttcttggctgtgctcttccatgtctgaaagcattcttgcatcgggggcgaactacaccacgtcttcctctgtttggcatgctcttgaacagaagtttgcttctcagaccaaggcacgaagacttcaactcaaaggccaattttctcatgttcacaaaggcggtttgtccatctcagaattcattgagaaaattcaaaacatagcatgatttcctacaaaaaccattgcttgtggcggaggaaaaccgtggttacatagcaaaaactaaactccaaaacttgtaactcaaggtgccctaaaaacaaaccactgcctcataaaattgattgaaacaatcaaccccctaggacgcacataaacaaccagaaccctcacagtggaagaaaacacgaggcagttgtaaaaatcttacagtaatgttctccatactctaattaagtctaaaaatgaaacactttcaaaatgcttagtcttgtacanncaagtagctgtccagaatttaattttatcccataggacctctactgagcattccaaactttcaaaaattctattatttctttctaaccagaccacccatagaactgccaaacatgtacttcgtttactgccacaagtgagggtattaatttctataacggggggaggttggtctaagacaaacgacctctttctctctgtcaaaaaaaaaaatggaacaactgttttatggttcctatggcttgaaaggataaaaagaactttcacggagtgaaaaagtgagattaacagaatatgggatagtagagttaaaagttgctttatagctgcataatgataataattttgtagatgttcctttcttgttttggttgcgagattagggtattctgtagtaattttctctgatttgattagggaaaggatttatatttgtattttgtaatgttttgctctaagtatcacagatattgcactctatatttccaagtattgtaaaaccatattcacaatacaggtagcattgttttgtttcaaagaaaaaaaagaagaaagaaagaaacagaggattaccttagaggcatcattacttgcgagcaaacaggtaagagtttgaaaaacattcaaaaccaacttttctccacccactttatcaaggttcccatttagtaaagacacaacatgcaaaaagcactctccatcacgaaacaaagcctgatagtactgaaaaaaaaaaaaattcatagcacatcagaataataaactctagttaagcagatttcctaaattttttttttcaaaaaaaaattgaaaaggcagtgtacgaatgaaattattggtaagatctgaactagaaagttaattaccacaggatcagttaagagtatatctcgcattccaaccagtaaatcaatagacagttcttcaaaactcttctcacgttcctttatttgtgtaaacatttctaaatatttagaacataactgcaatttggctgtttgatcttcctcagatgcaggtacaatctgaaaatatgtataaatttgaaacaaaacaatcaaccatcagttcaattcttaatagcacaataacaattaaaaagaaagaagcaaaaatacctttaagagctcgagtatatacttaagcacattatttctcaaacgttcttcccaaaacaaatcaaacaaacaatcaatacatgcagaactatgaagaatcaaactccttgcatcatctgctgctgagaaaattgccgtaaagagctccatggatatatccaggcatttgagccaacattgacctattgcctgctcattaggtttctgttgggtgtaagacgaaaccacatcaatagcattaccctcaacacttgaacctatactttggaacctcttggattcttgggcttgaagacaagcaactttaagcacccgagcagcagcattaagtgacttacaagaagcaatagttttctcagttgaaagctgtaatatacgaagcagactctttgcaagaacattagaaacttcaggattacaagcagattgctcaaaggcatctagcagagcagacaattcaggctgccacaaaatgaggggataagatataaaaaggtaagatatcattctgaaaatttggcagcatacatacttggaatgcagacgaacagcatatcttcacttacacaaatatatcaagtatgcaaagagatattatatttacacagaatgtcatgcaactaccaaatctaacttgaaaagctatagtttaacatgtcgctggacaaaattaacagatctttttgaagatagcaccaacagtcctacatcacctttatctcttagatgccttgttcccaaacaaaacacagaatgtccaaatgcaacacaatcaatcatacataaacatatatgttagagtattagctgtatattaggtgtaaaagaattagggtaacttgtatttagtagttt

SEQ ID NO: 79380 - DNA, 2401 bp, Cannabis sativa
  modified_base (718)..(738): a, c, t, g, unknown or other
ctctttgatgaagtggaagctcctgtgtttttaccacacaattagtttaaccccaacattttcaaacatataataaactcacacttgtaagacaagttaaacctagctagtttgaaaaataaagaaaaagttatacacaacaaacaaattaaacaacactatatatatacctgcaacattttgctaacattgctagcaccaaaaactttgtgaacaatggcaaacttgtgaggatcatcagaaggaaagtaaggggcaaagatgcaatctttggcgcaacggcgcctcaagagtttgcaagaagcacaaggagatgacccacccattaattattaatatgtaataagtagtaagaatttgaaaacaaattaaagatggctggaaggatagagagagattgtttattttgatgaagttattttggtatacgtatatatataggtagggtctgtgggaatataagtagttgttgtatatatatagtagttgaagaagagaagaagctttgttttgaagagaattaggagctaaatgtttatatatttatattagtcataatattgtatatagctattgtctagagggcgtggaatgcttccacatgcctcactaatggaatggtcgcacatgcatcactattaaaataaacatatccaaactcataataaataataattatattagaaaaccactaatactaataatatatatatatatnnnnnnnnnnnnnnnnnnnnngagagagagagagagagacttattgaaagaccaaatattctccaatagtgtagaaagccaacattaattatttagtattcattaatacaaagtggtataataagtcgaatatatgtatatatgtatatttacggatgtagacaatagacatatgttattgaatgatgatttgaaaggatggtattatagattaagtattaaaagggtaattaggtcactttaaagactaatgaagttgatctcttttgtgagtgattaagtgaagagttgaccaccgcttggcgcgtataggttggcaaccatgcagttgtgtagtttccacgttctagttttgactacccctttttattaatgtgtacatttctatatatttatacatatatacgccggcccacacattatttataattttatatatgtgatcatgtgtacaaataaatatgagatgagagagagatttaaatgtaataaaaataattaacttgcatttctatatatgaccgtttgaaaatgagatgaatgtatacaaatatagcatccatttaataattaattatatatttgtatgggaaaatagaatgttaaatatattagagaaataacaatggagaaggggccacaattattattaattgtggtgaaaattaaagaattgggttttgggttttagggtttttataattataacacaaaaggaaaagaatgatatatatgtgaaaccctagccgagagaaatggggctctacaacgtgaatgtttgttggcgaacatccacattgaaacgaacatctctctctctcttaattctcaattttgacgcacaaacaccaatatctagagtagtagtactatactatactatactgtgttaattaattagcattgatcagcgctacatatgctacgtgtttaagaaatcagcttataatataaatatttttaaaaagaaaaaacaaaagtaattgaatagtttttaaggaaacataatctagaataatatatatgccaattaacttccccaagggtaacagctgtatgtatcgatcacaaaaattccttcatcatcatttaaatttaaccccaatattgttgttgttcaatttgcagagtacaatatatatatatagatatatatatcatcatgatcggttttcacaaaaactcatagctcagaaatatactaaacatatacacataacaaaacttaatcttacacggaacatacatatttttgttttatttatctatctattagtactccactttttctaactacttatttcaccacgctagaaataagtcttttaataaaagtccgataccaacaaaaaaacatgttttttctttcttctcttctcttaataatgcaacgaaaatataacgtggcattgacaaataaaaacaaaaaaaaaaaaagaacatttcccctcctatatataatggtaatcaaatatataattggaaaattctataaatccttaaaaaggttaaaaaggttacctttatttctttcggcatttgagatactttttagttcaatttcttttcatatttataagttataattattgggtgattctacgatgcaccccttaaagggatgtactgatgcacccttgacttgtttcggcatccagaagaattttttttcatattcatgtac

SEQ ID NO: 79381 - DNA, 2248 bp, Cannabis sativa
aattggcttggctttacacataatgaggaagacaaaaatctctttccagagaagaaacagtaacagactttgaatttttagttttctccatatgaagtaattctaacacagaactaatcctactgaaatctgggtgtgaacaatctcctgaaagaaaaacatggctactgttgtttacctcgacccaactgcacccgggttgcttcttgactccggtatctttcattctcatccaaaatgctttggcctcttttcttcttccacaactcaagtacatttcagataaaattaagtacacaccagaatttgctggctctatctcgagaatcttttcaccagcgagcttgccaatctcaatgttgttgtggattctacaagctccgagcaatgctccccaaacgcttgcgggaactttgattccttctgctctcatttgattcacaaaacccattgactcatcaatcagtccaaatctccccagtaaatcaactaagcaagtataatgctcacttgttggctgaatggaatgctcatttctcattatttcgaagtaatgcttaccaagatccaccattccagcatggctacaagcagatagaacaccaacaaaagtaatatggttaggttcaatatgttctgatctcatcttttggaacatctccaatgcattttctccgttcccgtggagagctaatccgcagattatggaattccaagtgatgacatcacggcttcgcatggaattgaattccatcaaagcaaaaatcacatttccacacctagcatacatggtaacaatggcgttaccaacagctatgaaattattgaatcccgtttttgtcaacatggcatgagtttccatgccgagttgtaatgccggcaagtctgaacagattgtcaaaacgctagtgtatgtagcttcatctggaaacattcccaaatctttcattctaatgaaaagcttcagtccttcttcaccgtgatcattttctcctaatccaaatatggttacattgtatgcagttacatctcgaaacggcatcagattaaatacactaacagcagtaccaacatctccaatttggaaataacctacaatgatatttgttcttgtcacaacatcactgtaaggtcttttctccaacaatgcatgagcttctctaatgagcccatttctaatgaactccaacaagattgaattccatgttttctgacatttttctggcatttgcacaaaaagttccatagcatctttaaatcttccacctctcaccagcccattaactaattcattccaagaatcaaaatttctctgtggcattctctgaaaaaaaatctcagccatttcaatttgcccattttctaaatacccaaccatcattgcattccaagcttgagtatctctcaaaggcattttatcaaagagctcacgggcttcaacaatccgtcctaaactcgctaaacccgaaatcattatagtccaagacacaacatcccgagtactcattcttctaaaatattcttcagccaactcaaactctccaccattaacaagcccaccaacaaccaagttccaagaaacaacatctttcacaggcatttcatcaaacactttaacagcttcacaaacaaacccattacggaaatacccagaaaccatcgaattccaagtgataacatctctacaatatcccatcccatcaaagactctcttagcaccatcaacattcccacattgcatcaaccctgtgataaccgtgttatacgagataacatctctcacgggcatttgatcaaacaagttgacagcattctcaacatgaccattcaagaagtaaccgcggatcatggcattccaagtgacagtgtttcgttgaggcattttgtcaaacaagttctgggcttggtcaacggaaccacgacgcatgtaggtagagatcttggagttgagaggctttaagttgggaagagttttggtgggagtggcatggttttgtggaatgaagagtgtagtgagcgtagaaaatggcttgaggaggcgtagagaaagaatttggaggagcttgcagccatgatcgagaccagaagtgaagaccattcccccatttgactaatagacgtaagcgaaggaaatggctgttaaatatgtcaacaagaacgacaagtagtgctttctttcgagaaacttacaaaaaaatactgaaatttagtttaacttttataaaaatactgtcacacggaaattttt

SEQ ID NO: 79382 - DNA, 2844 bp, Cannabis sativa
  modified_base (2027)..(2037): a, c, t, g, unknown or other
gcagcatgtaatgcaacagaaatttgttttgttataatgtatgcctctcttgaaacaacaaataaatccagaacaaattgagaatactattaagtgaggataaacatgttttctgctaaactacaacacagaagaagagatctgcacatgaacatgctcctagtgtcctatactataactaagcaataatgttattatttaacaaatgcaatgcaggggaacacattacctcaataatagtatggaaccttgttgaaagttttggactaatgaagttgggccatacttcagttaccattctattcaaccactcacaatgctctaatggggttacaggctatatacagaaatagaaaaattagctcattgaatttcaaatttgattaagaaaaataaaaaagtaaaaagactagattaagttaggtaccgaggtatttagtacgattcgtttccatttcttggtcaagtcttcaacaagtattcgacgttgataacttccatactgaagaaacaacaaatggtaactcacattaatacattgtatagtctcaaatctgtcacagatttatcctttagagatagaaaaaaaacacaaattaaaattgtagtgaaatgtacaaatactaagccctcatcaggaaaatactttatgtaacagttatcttcctcaggacttgctaagggaagagaaaaaaaaaatccaaattaatgtaatcgaaggaaaaactaaatcacagtgaggtgaagaaagaaatcaaagttttcatccaaatcagtagaaacaaagaaagcaggcattagtttaagacttgacaattaagatttagagtgatgataaaacaaaagcaaaaacgttcagtatggaactgatgagatgcctaaaactcaaaatccatcagaccaggagagagagagagagagagagagaagtattcagggaaaaagtgatggggaagcaaaatctattcaacataaagaagaaaataacaaacagatcacattcacagagagctcaacctgaatagttgcccaaacggcaataacaataggaacccaattagagaaagagaatatccatctttcaatacaccaagcaaaaaaaatcaaagcaaccagaaatggaagataaggcttttcctccattaaatggttaaaaaactccagagcctcttcaacattcgagcctctcctctttctcctactcattttatcaaaaacccaaaagcaaaaactatctctaaattcactttcctgtctcaaactcttaatttctcatccatatttaactcagaatccaaaaagaatcagtacccggaaaagtaaaaaaggataaaattcgggagaattgtaatagaaggaaacccagaatttaaatcccaacaaagtgggcaatcttggagaccataatcagaataatttttttttactttatcgtcttaaataactaaaaataaaaatggaggaaggagtcgaaaggaaagagtaataggggaagaacataagtcgagaaaagtcaatgcaaaagtacgacaaaatttagttaagtacaatgactaatgagggagacgaaccggtttgtgaaacggttggttttacttgtcctataactagaagtctttttttcacaaaaaataactagaagcttttaaagaaaaaaataaaaattgagaacaaaaaacattaggtgtttgaaggggtgtttataaaatagtccattcatgtacgattcaatctaatttgcaaagtgcatatattcgcatttgtgccaaaggtaatcgatctaatctaatctacggatattataaaaaaaattaaagaattatatatacaaataacattttaatataaagaaaatagtaatttaaaactctaatacatataatagaattatatttcaaaacttaataaattaagtgtatattctattcttatatacatatttcttttctacatgtcatgtaatttaaaataaaattaaatatttctttgtacatacaatttttttttctttctttgaatttgttatnnnnnnnnnnntaatttgttgttggagacataaaataactataatttattttattttattactagttatgtgaaaaaaaaaaatcataaatattaaataatttaatattaaaaagtaaccgatctaaaataaccgatccaatccgcacttttgcggattagattggatttgagctattgtgtggatgggcttggatccaaaaaataaaatttgcacttagtgcggatatgatgcactgtgagtaaaatagtacagattaaattggatgaacacccctagctatttggcaaattcacatttattgcaaacgttttagttttgagaaatgctaaaagacttagtacattttatgtgtcaatattgctattagtccaactaagtatcgttattggtccaactaagtatcgggtctcatatactttaatgtaataacttttaaagagcatctctagctaattacaagataacacatctagaatagcaatacactttaatcttacaccttgcagtgcctaattcgttaaaatttttgtctattaatacaaaagtctttcattattgtggtctttttttttattattattaaaagaaaacatttacctattcatgatacttcttaaatttgatttatttaggaattaaaccagattttataaattaaaaacttatttatactgtaggtctattgcaagttattctccaaactttattttttagcatattgatctcaaaactatataaattttggcaagttaatcctcaaattttatgttttaacaaatcggtctccaaacttttattttcttacaaatataaag

SEQ ID NO: 79383 - DNA, 2758 bp, Cannabis sativa
ggtgccttattcatccttccttcgacttcgagcttcctctaacttgataaatccgccagctttatcgaggaactcctttatgttgttggttaagatcctccggatatctttccagaagtaactcagtggaaggatgcccccagtatgctgtatatcgaccttcttctgtaaggcctttgacctcggtggcctcggccttaaaccttttgatataatcctttaggtttttcttgtctttgtttgcctttgacaaggtcttctagctacgatggtataagccttgaggatgagaattgtgtgtagaattcttaggaaaactcattccaagaattgaatctttctggggccagcttgaagtaccattgctgagctatttcagacaaagttgcaaggaatatgcggcaccgcctatcaccagttttttttttctaatgatcaagttgcatcttctgtactggcatcttgatcttgggtaagggcaaggcagttatgtatgccgagaatgacgatccccttgacctatcaatttcaagatctgaaggctttgcacatgctaggcccttgatcatgtcacgcattggtccaactctgcttacataaaaggatctgttgttgcaagaaatcggctaactggccctccttggacgagctgggaacccaaatgtgccaagatctagctggccatactctgggagactatatggtggaggttcgctagccttgagctttgttgctggctttgtctggccagtcctatgtagggagattggacctagctagccaagcctatgatgcgtagatgttcatggccgaacaaccctgtaatgggtagggcctggttgcccgtgattcctctgttggctagtgcggccgatgtattaagaggggtagatcgcaccaattgctggagttaggttaatctagatatttgaagtaattttcaagacaaaaagtaagttgtgtatattttgatacgactgtataaataattaaaaagtaattggtaatttgcagccgaacccaatgaattacaaaattttgcacgatcaaccccctcacttaaattttcggggcatgattcctcaatctacagaatcgttttgctctatactcattctgttagtttttggctgttaaatgccaaatagacatgccacgttgtacatatggcatgatttcattagtccacattattatatttatttaaattttaaaaaataattattttatttacttttcttttcttcattctccttcttaccctaatctctctctctctctctatatatatatatatcagtcacaaaagccctaggccgaaaaacccaacctcagatgtgaagctgcaatctcaaacatacagagttggggtttctccactttaaacgacactgcgatgttgactcatgggtgctaggttcaacacgggtggagattcgaagacctgggctttgtaaggcccttcaagtgagttgggtgcggtatggtatggaaagaacctcgcggtgttagggttgattccggcactgactgagcttcttagcacaacagcaatgcccatgactccgagctcattcttattattattagttttcttttgttatttggttttgaaaaactaagttgatacagtgttgttggtcgacagtggtggttttagtgggtggttgtggtgatagtggtggtcatgataatggtggttggttatgatgacggtgttgtgggatgaggaacacagggaagaagaagaagaagaaaagaaaaaaaaaagtaaaataataattattatttaaaattatttttttctcatttttaattatctttataataattaaataaataaaatgatgtgaactaatgaaatcatgtcacgtgtagaacgtggcaggcatatctggtatttaatagccaaaattaatggaatgagtagagagcaaaacgattcggtagttggggaagttctacccccaaaattttagtaagggggattgatcgtgccaaactctgtagtcaagggagtttgactgcaaattaaccaaaaataaattataaatatataaatgtaaacattccctgttttatccctactagttagtttataatttcattgttatactcacatattttttatttttatcgacacacaatattcttttgacaaatataaataaataaatcaaatggaagtcaccccatttagaaataccactagctctgccactaaccctaacttgttattaattatatagaaaaatttcgcactccgtgcttaatattctcctttacaaaactttctctaaatacacctcaatttcacttaacccccaaaatacccctcccattcagtaacctaactctcacactctcccccgcttctctcactcacctcaccatcaaactaccaccatcgaccaccataaaccaccacacccaccacaatccagaacatccttcttcctcaaactacccctgattgccctcgtctccccctctttcttttttcttcatttgaatcccacgaactgcccgaatcctactcacccaccaaaatttgagaagggcttggtgttttagcaagggagttgacgtaccttgaaagactcgtgaatccaacacagattaaatcccattaaggtttgatgtttttgtgatttttcttggattagattttgtaaatagaataatgtgtttggattattttttatcgttgagtttaagataacttttttgattttatgtgttatagtgagatttctct

SEQ ID NO: 79384 - DNA, 2352 bp, Cannabis sativa
  modified_base (2303)..(2316): a, c, t, g, unknown or other
tatatatatatatatatagaaagctcatctccaaagtccaaacgacgtcgtctataatatatttcttctgtatttcttttcaggcgctcaacatcccaaccaagatcagcaaagcctcagtggaaatcataacccctgttgagctcatcaagaagggcaacaaggtgggttcctccgaggctgctctcctctccaagcttggcatacgacccttctcttactccttgatagttgtctctgtctatgaaaatggatcagtcttcagcccggatgtgcttgatattacagaagacgacctcgttatcaagtttgcaggttccttggccattgttgcttctttatcgctgggtatatcttacccaactctagccgctgcgccccacatgttcatgaatgcgtataagaatgttctgggtgtggcagtgagtacagattattcattccctcaggcagagaatgtgaaggagtacttaaaggtttgtacgtagtccttattaataagaatttatttgtgaattatttttcaacttttagctaattcctttgtggagctgattgaaggagtaaattaatatgcaggatccgagcaagtttgttgtgctgattcctcctcctgtggcagcatctgctgatcttggtagtggtccaacagcttccaaggatgaaaaacccgccgaggaaagcagtgacgacgatgaaccaatgttaggtttgtttgactgaaatgggacagtgatgacatagcatggatggaatgttttctctatttcgaaatcagaagcttttctttccttttctttcttggggattatgctttaattagagtttttattttcaattggcagtaatgtagtatgttcatgcatgttgaatcataatatcaacaactatatggttttagtgtggattatctagtatatgtagttgctactagctgaacgtttatccgagttattatatatacgttgcttttgctgtttcaattatgtgattcaatgtttttatcaaaatatatatatgtgatttaatgtattattatattatcatataaaattaatatcatttgataattaaaaactttgtgagattagagctcaacttttagttaataaaaaaatgtaacgtatattagaggttagatttgtaactccaaaatattcaaagcatgatgtgtaagaagaattatatatacaccggaaagcatgtagcgcaatgcacttgtatatattttgtcagtaaattgttaaaacttaaaaaatgttcaaaaattaaaaaatgaccaaaagttctatagtgtcttaattataacacacataataaaaaaaattgcattattattattattcttttctatttatctttgtattatatttacttttatattattttttaatattttattattattagtaataatactatacttttatatttatttttaataatttattattaaattttaattattacatttttttgcattgaattttagttaatacaaacataaaaaagcgtattaattaaaatttaataataaaatattaaaaatagtataatggtaaatataaaaatataatatttattgtgatctaaatttagattaatttttattatatgtgttataattaagacactatagaacttttagtcattgccacatcaccaactaacctaactaactaagctatttgcaactgtattaactatcatgtaccaaaaacaaagtgtgagagctgttctaggaaggatgttaaaaggattgcctattcatgaaatagcttcccatgtgagttgaattgtaattcctgcctaggtagtctttttgtactcaattttctaattgtctctcctaaattgtaatcaatgatcatcaataaaacttctcggtttatagggtgatatcattctttttcttctttatttattgatttggtttcttgactcttgtttagttttacattctctatgtttgatcttgttgaggctttattcttgcactacaacgtgatatatttacattataatttggtttgttgttggagtaaacttttaataaaatgcactacattttaaatttgtatcacttatttatatttccattgggaatgcttttattagtttatatagttcaattaatattatcgtctatatgaaattgatgtatacatttaaatatttagacacttgttctcactacaaatctgttcaaacaaacaacaaaattatattcaaatggttcatcatcttcttccttagaatctaatataatgagttcaaagcatataaatataaatatatatatnnnnnnnnnnnnnntaaaagtgtctatctaacggcatttcttggtttaac

SEQ ID NO: 79385 - DNA, 2207 bp, Cannabis sativa
tgctataattacgtttatttacaatatttatattaagttataattatttattacgcattatattataagccctgacttatttatttattatatatttataattaaatgattagctagaaccctaaataaagttgtctaacactaaataggttattaatagtgcagttacgtaccttatacaatagttgacggttcaaattacgaggttgaatgaatatgatgcaatagttctactgttctgtcttctcaatggtagatgaaaataaatataggtattcttaaagttaattgtaatgttgcaatctttttcatttgattttattttttagttttttgtcaaacgatctaggattatgtgactaattataaaatagtgatctaagagagttactcagagatcaattgtaagaactttcagagaggaaaaatactttgttctttctcttaagttaatacaatacaagaggagtaggctattaccacgctcacggggccaaatctctttaaaattcggtgttctttttactttatcgtttttgttctcttttaattatattatttcaaaaaaattaatcgcttattatttgactcactgtcgttggctaaaagcgaggtcaagaattgttattaataaaattgcataatttattcaaaagaaacaatggattatttaataaatatactaataacatattaaaaaaatactgggaaaaattagagtttcttgttcctaaatttataagtgctagaggttgtcctttttctcttgctaggcctgatggtcttccttgggtttaggtgcagtttggttggggtcatgttttgctagttgtctttgtgacatagttttgagagttttagtattgtctctatgacatagttttgagtgttttagtcttgtttgtgtgacatggttttattttattttattttgttgtaggttcttttttgttcttcgatggcttgccatcaaatcactgctagtggttaggaataacaagctctctgggattgaaggggttgctagtagtgcagttacgtaccttacacaatagttgagtactcaagctacgagggtgaatgaacctactgtaataatttttactgttgtgtcttctgagcaatggatgaaactgaatataggtgttcttaaagttaattgtgatgctgcaatcttttttatctcattttattttagtttctttgtctaacgatctaaaaattaggaaactaattatttaactcgtttatctaattctaatcctggtcgtatctccaaccgaggagatgtcctgattaaattgtaggctattattttagctgattgttattaataaaattgcataatttattttaaaaaataataataataataataataaacgatgagttgataccattttagaccctgtgttttgtaaaaattaccgattgaattctctattttgttaaatgataaaataggccatgtattttctaaaatagtataaataagaccctatgctcgatttttgacaatttttttattaaaccaacttgaagacaaagctagcataaatagatgtagaaaatgtaactagttttatcataacacatttatattgaattattattaagttttattttacagaaaaaattagttgattgtttggttactattgtcattaatcttaattaagttttctattttattgtcttctccgttaatttaaactcaaaactttttgattatttggttagtgagaaagtgattcttgatgatcttagtctataacttatattattgcatagattgttttgtgaaaaaaaaagtaggtttatgtacatgcattgttactctacatgttaaattaaaaagttcattggcatactaattttcttttatgattattttgtctataagttttatgaattttgtttagatcgagtcaaactaaaaaataaaataaaatttcacataatggttatttgtttaaaaaatagatatttttttcctttagaaatcatttttttgtttttttttttttttggattcttgaactattctacctgaccacaagaactatatagataattaagctattatattatttggtagtattatttgtttgtgtgacaaaccaaattataatagatttgttataaaataatataaaataatataaagtaaatgagaagaaagaagaagaagatgaagagagaaagag

SEQ ID NO: 79386 - DNA, 3655 bp, Cannabis sativa
gttatataaaagatcagagtaaaccatccacttgagaaattaagataacatctctctacgagctcattaaacctctcccaagcagaataaaatggctcattgtattgttagacataactcgcaaggtactcttgatgtagcatttggatttaccttgcagatcaaacacattcagcaaaatattaataaaattaaataaaaaaaccaaattagaataaaattgaactatcttgagattaactagaatagtccccggcaatagtgccaaaatcttgttgcgaaacgtatcatttactagtaataataataaaagtagagtatcgttcccacgagaactgtagctaagtaccaatcaattgaattcttgtttctattttaaaatcgaatagatagatttttaaaactaaataaactaagaaaaaattaaataaaacaaataaataaaaagaggtttaacaatgtatgtgaaattagggatataatttcacttactttgattatccaattattaatactaattaactatttttctttctcttatgtgatgatagcttataaatttacttaaactctttttagatcataaattaatgtcctatattgcatgccaattactgcatctctaagatagatcaacatacaatttgcattaagcaataatcaaaaagtaacatatataagttatgtaaatactttcgtttcacatcaaaatctatgtttattcatttagagcattcccaacattcacttttcagtgttcacattaaaatcataaatcatgctcaaggtgatcaagctcaaacatgtattaaccacaaaagatgaataagccgcataaacaagaaagaagaaagaacaataaactaatattaactcatgaaataatcacagacaatagccattaaatttctaaattgggagtttagctcatagtcaaatctataatcaaactagacatagataacaacataaaatcaagagaagataaagaaactagatggaggattgtcatgaatcgcccatgttcacttcaagattctttttcttttatttttaggtttccattctatatattcttttaaacttcatgatccccttttattaaaatagagttttttagcctaaaattgagaaaagacgaagttgtccatgtcctgtacggaggcggtgccatggcggcaaagtgcctcatcgcgatgacagtagaaagataaaaaaaattaggtttctgtagtctatcaccgcgaccaccattagcctcgccacgatgagaagatatttttctactttgaatctcgctcaataaaatgtgcataattttcatatacaaattccaaatgagctgattcaggatgcgttataaagctaaaaaagaaatcttaaacttctatgctttgactttttcttaaatatgattagaacatagtcaaatttaagcataagttttcagctttattttcttgcacaattttctctattttatagatcaccgtattttcaaaatttgagcaatttatacattccaagtgtgaaatttgaaacaaaaaaaaaaaaaaaacaaaagtaattctattttaaaaaatgacaataaataaaaaattaactttaaaaatgactcgaacaattgactaaaaatagcctaacagtatattaatagaatatgattatcacctcacactagaaatttgataaggttagttgagattgcaagtacgaatacccatatactataagaaatgtcacttttgttagtacatttttgtgttggcaaacgtttagtattacgctaataaaatagaatttacttctgatgtgttggcaaaaggagttggcaaatcaactttgctattagaaattttgccagcacaaaatgaaaagtgctgactttccccagcgtgtaaatgtactgtgtgcgccggtaaaactttgacctttttatcaacgcaatttgcgaaatatactggtaaaaaatgacatttcttgtatatatatagttttgctagctttttagttcaaataatatgtatagtatatacgtaccattccaaatccaaattgagatatatgttattaatttggacaatcaaataacccactatatatataaggtgtttaacaaccatagaagaagatccacaactcgatgctattagatacgcactcatatgctcataaacatatttaattttacgtgctttaatttgccacaatatatatttatatcatttgctttcactttgtaattgaggagttgaaatatcatcaattaagtaatattgaaaaaaaaaatataagtaatgaatcagtactaaaaaatattaggtactatattataatgtcagtgcccaccacaatataatgttttctttttctttcattatttatttagtgagaaaatttatcacataaaaatcttcgtacttagcaacaatcatgcaaaattaaactatactatatttatattaataatgttctcatcagaatcttataaagtgatcaatcggtcaattatacttatttcaagcttttcatcagttcagaatgtccaaagtagaacttgttaaaaattaaaaagcaaataatgtcaagtaccaagtaccaactagagtattaattaaaacaaattaatatatagtttagggatcgatatcaaaataaaaaattagaaccataagccgtacacaacgcatgcttcaagttgcaatttttataattgaacccacgataggctttgtgttgtagtaattaattaattgaaatacaaaaattaacaaacatttcaggaaacctatcaaagtagcttttcaagtggaccaaactctcatgaatatctttgtcgttaatattataattaactaagttaatttcttttttcttaatttagtgtcctaatggaagcatatgatcactagctctcatcattgggtcaaacttattattttttgctgatcttttatactttaatctaataaataaattatgaagaacattagttattacctgcaatcagctgagaaattaacaatatgaataaatgcacgtgcatggggccaaccggcaattacttaaaaaaaaaacagtgaaaaattactttgtgaatacttgccaattatagcaaataccaacccccttaatctctcttcttctctcaatttctcctccttattttgattggattgatggtagcgtaggggttttcctgcaaaaaataaaaactcttcgatgcttaaggacgagctagtttgacataattgtgttgtgaagaaaaacaaatatagttgtgctatgagaaaaaacaactgtagcagaactgtaaaaaaaaataagcttagtgtatagtaatttataaattttaaagtgttgtgagttgtcaaaattatattattataataatgataatgatgtaatctaattcattttaattacaagtatatataaaaaattatgttatataaaattttaattttttttatttatttttaattatttttcccaatagtagaaatttatattcatttgacaaaaataatttataatatttttaaattatatttatatctatgtaaaagaaaattgtagtttataagaaactctaggatgtgatttgcagggtcgtattaaatattttagaggtcctgttctaattttaaaaatt

SEQ ID NO: 79387 - DNA, 2621 bp, Cannabis sativa
  modified_base (37)..(46): a, c, t, g, unknown or other
tgtttattttattgttttagggaattcatatttaggnnnnnnnnnnaacatacttgttagtaactctagatcctcgtaaaatattcctaacaattttgtatgtttaacaaatgttaacttcaaattacacaagttaaaccaaccactagaataaaaaaaatcatagatagtaatagtcttacctcccattgaaagggtaaaatttggaagagtacaaaaacaaaagaggatgaaagttggttgaaaaaaaaaacgaaataaatgcagcaaaatgtggggagctggaacacaacaagagaacatataggataaggcaccaaaaacgaaaaagaagcagaacaactaaaaacaacagtggaacaacacgaaggaaaactgaacatatattggagcataggatactgaagaaaataaattacatacaaatttcgttattttcctattataaataaaaatagagcagtacaataatatttgaaaaagagtgataaagaaattaaagaaacagtagtaaaacaacattaaaacaataataaacaataacaaaataaatcggtaacaaaaaaagataagttggagaaagagggtggacttcgatatacgatagagatggagccaacactttgagaccaaagagactaaagaacatgaacttagtgagaatttctaaaagatttctacaagaagctcatcacagagcaacctctccaactctctcacacacacaaccacattcttatctttcccaaatcctattctttttcctctttcacatactttttttttgttacctactacaaaaggagatgattaaattttatttgggtaatattctagacttgggaaaaaaaaaagaaaaaagaaagaagaagataaacaagggagatagagctcaaaaacaatgaaaaacaaaataaggtatgtatttaattatttgcgaaagagcaatatataaaaatacatatataaactattgggaatagggatcacgtgggttgtgcctaaattttaaatttaagtaaaaaaaaaaaataatcacaaaagtgacataagccatcaatcaacttttataaacacatttaaagagcaatattatatataaacacatatataaacttttatgaatggtatcacctgggccgcgggcttaaattttaaatttaagtaaaaaaaagaaaatggacatcaattaacttttacaaacttttatatatatatatatatataaacacatatatattattataaattaagtaagcttgctcaaaactcaaaaaaaaaaaaaaaaatagatacacagtaaaaatgtaataattgtcgtgcaacagtaaaaaaaataaaatggaaaaaatcaatatgaggtgtaaattttacataaaaaaaaaaagtgacagcaaaagtatcttaacttaatgttttgttgcaattgtgctcttctagttgttaaatgccaagttagcatgctaaatgccacctagaaaacatgtagtgttatatcattggaccacatgataaattattaatttagaattaaaatatttatttaaaaaaattataaattttagcttttttataaataaaaaacacatgatttattaaaaaaattatttaaaagaaaaaagatttggaaatggggaaagatgaacgtgaacatagaccctcattctccaagaaaaattctaaaacctcctttatattgtttattgaaattttcaaaaactaattaaataagaactttagaaatagtgacttacgtaataaagaagataaagatttttacgtggttcaggcgttaatgagccctagtctagaagtcagtatgttgcccttaagaggctaaaatgtattttacagtggtgtttatagaaaaactcgaagaaaaagaaagcgtggagcagttttaacggagtttcagctattaattttttgatttccccctttgtatgaaaatcaagaggtatttataggcttaggtgtaggtatgaatatacccatgacatgtctagggtttcattgtaattagcccactattggggtaaaatacatgtaatcatttgactgttgggcttccaagaaggtttatgatcgtgcgtagaagcagctgggcaataggggaccataattggtacaagatatgtgtcgccaaaatgtttgaccttgaaaagaagacgtctagacaaatcatcaggcaaaaaggcgtgtatatgttagtttttatggttcatatcagagtcataaaagcggatgcagaatttgataaaaacaatttttatctaatatgaatcataaatccgaggatctcaacataatatatatacatatagattaaatttaaactactgaaaaaaaaagattatacctcttgaagcctatacacgtatccttgtttcctttcatataattatcgaacatccaatccaagaactttgttgaagaatctccaccttgatcttccaagccagcctcaacactcaagaatagagtcgtctattagatcttattcagatgaacaaatttaggtattacagttgtactcaactcatgagatattgtaatagagttagggttttgatcccacacacacctacaatggtgtatacatatgagagagagagagagag

SEQ ID NO: 79388 - DNA, 2241 bp, Cannabis sativa
aagatagcattgttacttccaagccaagcaatcacagcataaattcctttcaagaaacactaatactcattggatcagtacttctaagtagctctggttttcttaatatcgtactgctaataacctcattggttctcttttttcgcctaagacgcaaaacatcaatcaccaaaccatgtcagaacatgccaaatatgaacttgcggagtttcactttttcagaactagaaaaagctaccaatggattcaaggaactgttgggagttggtgcctttggagctgttttcaaaggggttgtgcaattgggcaacaacaacactacttcaacaattgttgtgaaaaagttggacaacaaaaaattggtgaaagatggtgatcaagaatttaaagcagaagtaatgtccattggtcgtacaaaccataagaatttggttaagctaatcgggttttgcaatgaaggacaacaccgacttcttgtttatgattacatgagcaatggatccttagcaaccattctttttgaaacatcaaataagccaaattggcaccaaagaatgagaattgctttcgggattgcaagaggactattttacttacatgaagagtgcagcacccaaatcatacactgtgatataaagcctcaaaacatcctcttagatgactcatacacagcaaggatttctgattttggactagccaagattttgaagaatgatcagactcgaaccacaactcgaataagaggaaccaaaggatacgttgctcctgaatggtttaaaaacatggctgtaacagtgaaggtggatgtatacagctatggaattctgttgttggaattgatttgctgcaggaagaattttgaagaagatgtagaggatgatgcctcaatgatattgtctgattgggcatgtgattgctatgaatctgggaaagttaagtgtctagttgagaatgatgatgaggccatgatggagataaaaatggttgagaagtatgtgatggttgctttatggtgcattcaagaggacccttcactaagaccaactatgaagaaagttatgcttatgcttgaaggaagtgttaaggtttcagctcctccactcccaaactcattcatcagttcattgtagtttctatatataaagttctctactttatttctttctgaatcaatgacattatcttgtcctaaataattgttttgatttgatttgagcatttgttgggcactaggattagtatggtgtgctacataattaataaaaagggcatctgagtctttgattgggagagtagttttgagtgagaaattactataaatagatggggtatgcaatgtattgagtaaaactctttgcattaaaggggcctaagggcttccatcattgtaattggttttctcatacattcaatataataccctactgttttgcttactaaaacaagttgatattgtatattgccttttaaaagtccacttagttaacttcttgagaaaaaattaaatgacttgttaatttggtttatatctaagtaagttagatatctctgtcattacttgttctgtttattcctttgttatgtattgctttgtattttctttttctatttggatttcagctaatccaaaaagatggtttccttcttgccaaatggttgaacagaatacctgaaaatcattgtttggtgaggcaacagagataatctgttgaagtaaccaaacatggcttattagttctcacagaagagatgaatggtctgctgatgtctcctatgcagccatgctcgacattcggaatgggaatttggccaaactaacaacttgaaattgtaaaatttgaaaaataaccacacttaatctatatcccggccaaaccattagtcgttttatggtcacacagtgtaattttttgtcacacgaattatccaacagacacactgttgtctacacaatatcttgttagaggtaaacaacctgtttgtagatactctgagtcaaattactcaagtgggaatatgagtatcaaaaaaacaagcggctctattaaataataataataattttggtataagtactattatatcatctccttactaaaaaaaccaggtacaacgattacttattgactttaaattaaatagtgccaccattaagatgataagtatttgtgatagttgcattgaacaaaaaaattattatagaccaagtcaatttttacccaacccaacccccctccaata

SEQ ID NO: 79389 - DNA, 3359 bp, Cannabis sativa
acaccactagagttcagtaccttatttatagctataactattggtactccagcagctctggcatgagctattgcttcagttgtctgagggcgaattccatcatccgcagccactacaatgatagcaatgtctgtcacccttgcaccacgagctctcattgctccaaaagcctacatgagttggcattatattgttatatcacattatattattctttgtatatatacatcatatcaggcaagaaaaatccatagatgtcgctgttcataacaatctttttcagcaaaatgaaactggttgcaaaaattagactgcaaatacagtatttgttgtctgtcaagttttaagtgattgttaacaagcatacctcatgcccaggagtatcaagaaaaacgcatggttgcaactttccatcaacaggaacaagcaccttatatgctccaattccttgcgtaattccacctgcttctgaggaggctacctgtaaatgttaatcaatcagcctttagttatattatgaagaggagtgctagcataaattctacatagaattttgttttctccctgtctaaccatacaatattttcagacctaaaaattacagcagtagctgcctagaatagagtccaacatcagaccttaactacatgtctgaccatttcagctaaccctctcgggtaattctacataggtctattgaatacaaaccaactacatgagaactaacaggttataaataagatttcactataactaaacttcaaatatccaatcaaataacatttctccaaaatcgcatgaaagaaccgccttgcatactaaaacatcttaaacaagagaatgatagcaaaacagctgggaaaaaaaatcaaaataagataaacaacaatatgtgaacatgtaccttgctttttcggatgcaatccaaaagggttgtctgccaagcaagaatacgataagcatatcagcattactgggataccaaagtctacaagtacataaagaaacaagaaactgactaaagaaaattgccaaacccaagggacaagactgaatatcacttaccttgccgtgatccacatgtcccataatagttagaactggaggcctctcttctagtttgtctaagtcttcttcatcaagaaatgccttctttcttgccatttcttccacttttaccggatcagcatcaatgacttccacatcatacattttgcaaaccatttttactatatctctgtccaaagtttgaacaccatcaggcttgattcccttcgagtacaaatacccaagaatttcaccatcactggtggccagatcgtaagccaactcctcaactgtcataccttcttcatcaacctctaggatttctactttgacaggggcagcatctctggcagcctgaagtcgagctgccttcctgctcgctttactccatttcctacctttcctggctgctccaggaatggaaacgttaagttctgatgaatcatccatatcaacatcattgtcagctttcattcgcctacgtgagcctccagcagcattttttttccgataatcatctttgaattttcctgggggaggattctttactggtttcgtaggagctaaaactgcttgagcaattacaggatcaaccactggtttcttgcttgcaaatttgtcaatcaaaattggcttcctttcttttggtttcacagtcgaatcagcttcatttgttgcttgggaacttttagcagctcccacatccttcaatataacaggtttcttgaccgttggagttggagctacagaaggtttcgtctgtaattttggctgtggtctcaagggtggctgcggccttaaaggagcagcaggggttcgagactctaccttcactccactcccagatttaggttcttctctatcaaccttgccatcaagcttaggtgagtccttcacaacttttttaacagatgcaacagtatcacctttcctccacacactcttcattgttttagatttcctattcgccaccgagttcacaggtggagcggcatttctagaaacagtacttctattagagagtgctggtttatttacagacacactacctgtgttattactggagtcacctgatgttgaagtttcaagcttttcagccttctccaaaacctctccaagtgactcaatcaccttacttctttcttgctcactacctaacccttcatcatcagaacccttactatttcttgaagggtcccaatctgttgagttcccacctaaaagggtttccacattggaccccgaggacttcaatactggcttcggggaaggcttaagtacaaagtcagcttggccatcagtactattacttcctttatatgtgttagaatcaagagaaacggcattgccttgctcagcaattaaatctgtcgttgtgactgaatatttacagacagaaactgacaaacaatgccatcttttgttacctctaaaatttcttttagacaaagaaactctcctaacaaatgaacgggacctttcagacgaacccactatcataacactccctaaactgaccagggaagccatggaagccattgttccttgcatgcttccagtaaaaactaatgaattctatgataaactcatttcatttgtctacaattccacaagtatatagtcaattatatggggggaaatattattaccagaaacaaaattcaggggatacaaaagccaaattcagcaaaaacagcagaattagaagtacccaacaaaaagtctgattggaaaaacagaaacccaagtccaaaaactaatagttcgacacaaaaagataaactttcttacctctctcaaagagacaacaataatagaattgaaacacttggcgttggagttgagagagggagaaagagtgagtgaaaaggaaatgagaaaagagaaaagagggtgtgtggctataaaaagtggggataatataatggtaacgagagaaatggagagcgagagagacaagccaaaccagttctccacaggctaatggaaatttcgaaacgggtatgtgtggctgcttctctgcctgacaaaatacaatggcgataaggattttggtgggttttttggattttcatccgccataaaaaaaaatttcttttaaaagtaaaataaaataatactaaaaataaatattaaaaaataaataaacaaatattctatttaattttttatagaaaacgtaagaggaaaactatggctttcatttcaattcgtctatcgccaaaggcttatgcccacttttctctttatagcatgtttactaataagtaatgaaaattaatgataaggcattaaaattaaaaaaaaaaaaa

SEQ ID NO: 79390 - DNA, 1875 bp, Cannabis sativa
ataaaatcataaaaactgtaaaaaatatttaaaattctgtacaaccgtatttttgtattttttttattatttttgtgtatttgtgaaataacccctaaaaataattaattatgttggtggtcattgaatattttattgagaatatataatttttttattgtttaaataatactaatattgtaaataaagaaagtaaaattttgtaaaattcaatgaattataataattagtagtattatagtaaataaaaaattaatatttagtgtgggctaaatttaacacaacgttaattcttgcataaaatgtggtaccatgccttctccttttggtttattagtttatgagtgcaagatcctcttgacctctttgaaatctgttgaggttcattttgtcaaacgttctgtaaataaagttgatgcttgtcttgctcgtagctcttgtttttatccaaattgtattttcactgagagtaatgctccgactgaagttttatctattgtaatagttgatgctttatgttaataaagttgccatttcttttcaaaaaaatactatatcttgtatcaaatttaatataacttttagcaagtgtttaatttagtacatattttagaacattattaaagtagtatttttctttatgtgtgctctactagaattgctcttaggcaatcactatataaaaaagaccacttttagtggcaatttttatttttgtgactaaatttgacttttagtcacaataaaaaagttacttgtaactaaacataatatttagatataaattttcactaatttatttttagtcacaacaaatattataatttttttaattaatatttttaggcataaactttttaatcataatatatgaatagtaatttatatttaatcataattttttttatttttaattatatattttattatgattaaaaataagatatttgttgtggatatgtaaaattataggatgacacacaataatgtaagactattttttggaaatgtaaatctcatataaataaatatgattggtttaaagatattatcatgttattttgtgtaatatttaagtaaatattataaataaaaatatcattacttatatacatatatatcttctgcaaaagcatctctttagggatgggctccttatctctaaggaaccacaccacatacttactacttacatatggtccccatctcaattctttttcccaatttaaattagaaaactaaataaataaataaaaaagggaaagggaaggtttatcttttcaatcttgttttatctttttaccaattctatatattttttttgcctactctactatacatattaatgaataattattttatttgttatttctatttttgaagacattattggtatgaaaaaaaataattaaaaataaaaaaagaggttcatgtacggacttaggtgtattccatctgtcataagaaagaaaaccccacaacttttgtctttgttgattgaaactattgactattgaaacctttattgagtttcttcacatgtgatttttcttttcttccacttcttcttctctcttattaagtttaagtttattacctcacactttttcccaatcatttcatcaataatataaatatacaaatatataaaatgaaaaggtcattgggaaaaaagatatttttatttgttattttgcaattttttatagtaattttatctctagtttctatttagggagtcaagtaaatttttatttatttattttttgacaaagtgtgttggaaatgctatttttgtaaagaattatgaaaataaaaagaggaaattacacttagtatgggattttaaaagttcttatgataaatatagcacat

SEQ ID NO: 79391 - DNA, 2489 bp, Cannabis sativa
  modified_base (350)..(350): a, c, t, g, unknown or other
gggcataaaacccaacagttcttatgctggtaaagtggatttgtgtttaatggggtttttttttatcttatttagctattaatttaatttaattttaattttcagttacaatcccaggttttaaatggataatgccacgtaatatggatttcggtgacttggcacttgggctacccatccacataagaaaaaaacggggtcagttagacgggggagtgtatttgctaacggaatagtggtttaggtggttttaccaccaaaattctagatttgggggttagttgcaacaacttggccacttacggtggttatgccgcaaattacccttatttaagatatcttgtaaaatnttaagaaattcaaaaaaaaaaattaatatgccgaaaataatgtacctctttaaaaatggtatactgatgtgctctcacctatttcagcattcgaaaaacttttttagtcacttttttctatgatcgtgtacattatagttatttaagacatcctgcaaaattttgaaaaattcgaaaaaatttaacacgtcaaaaataaagttcaaattgtcttttgcacgtgtggctcttttatttagatataacaatcatagtgattttattttagttaattaatataatattaaataaaaaaattaatataataataaaaaaaatagtataatctttaatattttagttggagtgaaaataatttttaacaccgaatttgataatagtctgatactaaatttcggttagagatgctctaaataaaatatgtaattcttttttattttttttttatttttttcaaaaaaatctcattaaaatgaaaaagcgaaaatgatcatctgtcaaagctaacattagtcgacccatgactggaaagcaaaagacttgacacccatctcaaaaccgtatcatgtcaattaccaacatcttttaagagttgtgaatccccatatgttatgctttggtctatcacaaaccacaattcacaaatatagggcacttctcctgcatataaaggtatgcataaaaataataactaaatattaggatttatttgtaaattactatttgttttatcctttattttgtcctttactaaagcaactaaattatgagacattaacttttggtagtggtagtggaagatttgttaataaatcatatttgacctacttttggtccctcttggtctaactgtctaactggcaattggtttgatttcaataactaatcaacttttattttattttatatatgtttagattttataaaatgtcgtagaaagagtccattttcaagtaaattgtgttcacacaaatacacaatcagaataccttgcatgtgaaattatatcacaatcattgatttttatatttctagcttttcgatacacatttctctatatcacaattttcagtatatattcgaactaaatgataattgcataaagaattaagataggagttcatactttaataaatctgtttcccgcattttgaaagtaatagttatatatgcgtggataattaagtataaaaacacgaacacttcagttatattgtctttccaattaatatcgacacaactagttatacttgtgaagttgtctcaaagtttctaaaaaattttaaagttgtgttgttattagtattgatttggatatatctttattttcttttctttaagagacaaatatattagatcgataaatcgtatataagttaacactacgaagcttctcaactatacttgtcccaaaaaagtcatcacagaatcaatccaattcaaaaagtataaaaacacgataggtataatataattagtatataatataggcagactagatttttcctaaacgttagaattagtatttttttttctacaatttttatttaacacctagaatgacaaatgacgcttttgtaatgatcacaagtccgacattgatagaatattacagaacatgactagatctgtatattcttataattacttttatttatttttcaagcaggaaactggatctatgtttaagacctccaacaaatttattaaaagaggttttattaaacttttactatctttatgtattttaattttagaaaaaccttcaaattttaaagatttatcgaattcatatattattcagaacaatatgataagaagtgtaaggacctcaatacaggccctaaagtaattaagtaacaaagttaatattatttttgattaaaagaacacacgatatcagtcatttgtgaaactaagaaatgaagttgatagtggaaacatcaattggcccccctccgaaaagaaaacacatcaattattaaagaacaatgacattcaagctcactttagtaagtaacactaattcaatttggaaggttgagaatattatatatatttatatatattttaccctccagtccagaagtagatatattgaatacaatttttacattcaatattcaccaagattgtcga

SEQ ID NO: 79392 - DNA, 1727 bp, Cannabis sativa
tgttcttggtgttcttgagtagtaaaaagtgtgtttctatgtgatctattgttgtttatttatttgctttgatctctagaaactagaattgttgtataatttgtgtttatgggctttgatgtttggcttgaatgatgaggttatatatggtaaaaaatgactaagtaggttgacaaggcttttgattcgcaaagactggtatgatataatgtaggatggaattttttaggttagatattttaacttgaacttgtaatctaaggtgtagattgaaatcatatagggtgggaatgttagatgagcacaatgtgacgattgttggttctcattcgtgtgatgaataagaagaaggtgttattcatattccatcttcacgtgggtctccaatccctactggtgtacgggttgctgagtcttatgtatccagacaagaggtttattccgctcaggaggatgaaatataggtagaccacaatgtaccttgagtttgaacccttgttccatccttagggagtgtgacttaaataaaataaagtcttcttgccaaatttttgagtctactagtttgagattactgggcccatacgaaggaataattgattagtggatgggagactggattttttttttatgagataataatcttagaagggcttaggctcctaatccctgatttggtaattgatgtgtcagattggtatgagattggtacgagtcagcttatgcccaactcgtggagattgcttctagcacttcaacgtttggctgaattgcgtagttcggaggttgggttgcatgagattcattattcttattttctcaaagatcgtgatatagataaagtttgttaccagcttatgatttgcaagtttcaaagtcatttgattactggttttacttccaatgttcacgggaggtggaaagagagatacttctttgctaaaggaagtttgatctttagtgataggagtcctggtgacatcccattttgttggaagattttcagtacattgtcaaaacactttgttgttcattatgttgcaattgttttttgaacttattattatgtatttttcgtagatcgagagttcaataatgccagaacccttaacactgcagttaagaagcgaactaaaagtatccttgatatacagtcggaagagcgctagtggagagccattttgaaggattgcataattgacaagtgtgagaaaactatagactaaagtctcaaaggtattgctcctccttcaagagagtatgtgatcaccattcgatctattgagaaattgggattttaattttcatttatctcaccattaactgaggaggaacgactttttgcagacatagttgtaatggagggaaattttaaggttccatcttctagggatgctaaagaaaagctcttggagtctcaaggtgcccaaatggctactaggcgtaggtacccggacagggctgcttcgaagaaaagatgccccgagcagcagtcgactagtgagagatcttggtcttagtctactggttagggttccattgcttttttgttcctgatagacacttgtgtctactcgagccctgggtccattttgggagaagtgggaaaatgtttgtttcctccagacaaggctcgtctgaatgagatgggtttgggtgcgccaaactacatgattgagaaccagtttaaggtacattcttgagctgataaatttttgttgatttgt

SEQ ID NO: 79393 - DNA, 4874 bp, Cannabis sativa
aaaaaaaatagtatatagggtaatattgaataatgtatcatattgttaaattttaatttacactaaaatattatacatttatatgcccataaaattcaatatctcatgtaattttacataaaataacattcaatataataatatacaatacaaatacagtacgacataccaaatgaatccaaaattattttgcaaattatttaaaattttataaatatttgtaaaaattcctaaaaaaaaaaaaaaatctatatctatatataataagaacaaatatcatatagaccaatatttgaaaattttacttctatattttattaaatgaaaaataataaaattaggttgattttggtcaaatattttcaggattagaattacattacagatcggatcataactattaagggttaaaataagattaaattttagagttgaacaaaattttgaccaaaatcatggctgattagtatttagaatttagcatattaaataaaataatttataaaattttgtggagtgaacgtgtccctatttatattagtatggacatttatgatgaaagaaggatcctgtgacacaaaggcatatgtggtccttacccaattttattttacttttctatatattactttgattttcattacatgcaaaaaaaaaaaaaaatgtatctattcattttgttggcatctgggaaattagtattctaattctaatgatcctttgacatggattctggttggttctttttgctagattaaattttgttatgctacaccaccaatcaatcaatcaatcccacaacttcatttttatttgttcaataaaaatataaaattaattattcagtacaaatagaagaatacaaattgaattttagaatcacaagctacaatttgatcccagctttttattttttttggtgtcaaaaaattattgtatatatatggatatgtatcgaatcgatgaaaggaagagtatggttgatggtgataagtatatgcagggttgcaggggaagcataatatggatccgcatggtgatggtattggtaatggtaatggtgatgatgatgataattgtgaggtggtggagactcgagaactgtgggatgcgaatgggaaggagatccgacaatattggtcggagatatctgtgtctgtcgatgccgatgataagagcttctctactactcagcctcttttgctgaagaggagaaacactacttcccaaattgccatagttggttccaatctctattcaatcgagagtcttgattatgagtaagtcgatcaacccacttcttcttctaggaaaataccttgaaattattgttgcaaatttagtgatttgttgatggatttaacgatatattttatataatgaatttgggtttgtattacattttgatttgtgtttgagaatgaattgttatttgagtggcaaatatctttctgacggtgacatttgttggaattattaactggaattgtttgctaagctcttttcgaagttaatttttctttttctgattcgagaattcaattgttttttttttttttcaatgtttcttctttcttttcattgaggctaataataaaatgatttcaggattgctgaaaatgaactctttaagcaggattggagatcaaagaagaaggtgcacatatttcagtatgtactactcaagtgggcatttgctcttctcattggactcggaacaggactagttggcttcttaaataatattgcagtcgagaatattgcagattttaagctccttttgactactgatcttatgtctaagcataggtgagatttgactccactatttcatttatctattaaagtttttcctgtgtttttagcctgatttgttttgatgatcattgaagagttttcatatcatagattattactttgattctacaatgactcatcttactcttctgagctaaatgctaaagaaacctcccatgtaactaagacaatagaagtggttcgagtgcagatactacacggcttttgctgcatttgctggttgcaacattggtttggcagttgcagcaggtgctttatgtgcttatattgctccagctgcagcaggttctggtattccagaggttaaagcctatctcaatggtattgatgctcattcaatactcgctccaagcaccctccttgtcaaggtatacaagaaaagtctcttctcttagtcttagcatatcccttatctgttttgaattctccttcccacttcttacttggttttactcggatttggaagatttttggatccattttgggagtctctgcaggctttgtggtgggtaaagaagggcctatggtacacacaggggcttgcatagcttctctgcttggacaaggaggttcacgcaagtatcatttgacatggtcgtggctgagatacttcaagaatgatagggatcgacgagacttgatcacttgtggtgctgctgctggagtagctgcagcatttcgtgcccccgttggtggtgttctgtttgcccttgaggaggctgcttcttggtacatagcttccataccttgcttctcaaataaaaaatattaatagcaataaataaatggaatatttattggtttgtgtttggtgtctggacaatggtggtttaggtggcgaggagcacttctttggagggcatttttcacaacagcagtagttgctatagtaatgagagcttttatacaattttgctctacgggaaaatgtggtctattcgggctaggaggtctgatcatgtacgatgtaagctcagctgaagcaatatttagtgcctctgatattttagctgtgatattccttggtgttattggaggcttacttggaagtctctacaactaccttgtggacaaggtagttcgaacttatagcattattaatgagtatgtatccccatctcttatttcaatagaaaagaaacaatactataatatcagtcaatcctaagcattctttgatttacctgcagaaaaggtcctgttgcaaaaatcttactggttatgaccatagccattttgacttcatgttgctctttcttcttgccttggtctgccaagtgcatcccttgccctgaaggcctcacagttagctgccctactgtttattctggtaactataaggccttccagtgtccaccaggccactacaatgatcttgcctcccttttcttaaacaccaacgatgatgctattcgcaacctcgtcagtacaggcacaataaaggagttccagatatcctcactcttcatcttctttgcagctgtttacttccttggaattgtaacttatggaatagctattccttctggactttttatcccagtcatacttgctggagcttgttatggcagacttgttggaagactctttgaaacagcctctcacttggacactggtctctttgccttacttggtgcagcctctttcctcggcggcacaatgagaatgacagtttccttgtgtatcatactgcttgaacttacaaatgatctgttgttgctccctcttgtgatgcttgttcttctaatatctaaaactgtgggtgattgcttcaacaagggagtgtatgaccaaatcttgaaaataaagggattgccttatatggaggctcattctgagcctttcatgaggcatttggttgcaggtgatgttgtttcctgtccgttgataaccttttctggcatcgaaaaggtgggaactatactacatgcgctaaggataacagggcataatgggtttccggtgattgatgaacctcctttttcagactctccagagttgtgtggtctagtgttgaggtctcatttgcttgttttgctaaaggggaaaaactttacaaaggagaaagttatgtgtggtagggagatactaggaaggttctctgcgtctgattttgcaaaagcaggatcagggaaaggaatcaaattggaggatattgatattgaagaggaggagatggagatgtacgtggatcttcatcctattacaaacacatctccatacacagtggttgattccatgtcacttgccaaagctgccattctctttcgccaacttggtctcaggcacatgtgcgtggtgccaaggagccaaaaggtattatatgcttttcacattcttctctctctatatataattatataaattagtgttaaatgttgtgtactttgaaaacgaatgacagacagatccaattgtgggaattttgacgaggcacgacttcatggaggagcacattttgggactataccctcatatggatcctcacaagcaaaaatgaagccccatatcatgtcatcaaaggtgttgtacatttgggaggaaatattcaagattcaaccgatttgaagtatgaacattgacatttctacaatctgatgcacagttgcattgggtactattgattgcatcaatatgatttccaccggccaatgtggcaactctcatactatgatttagctttttcttcctatcatgtttagttcatccattgtcacatgtaaagtcagttttagttattttattattttaaggatagtttcttttgttacttatttttttctcatcatataaacaataatggataaaagtgaccaccatatggtgctcaataatataccacctcgaatagtattgggcaccatatgtgccttttaacaataaagggacatgctatgtctactgtttttatctctcttttttatatcataatttattttaattaaaaaaaatgatatgttgcattttttgtgagagaaagaaatctgtcattcgacctccaatataaatatagaacatgattgtaataggtgtaggtgtatggataataattaatc

SEQ ID NO: 79394 - DNA, 2169 bp, Cannabis sativa
catccaatccgatccgatcacaattggatatctaatgtttggcggtcggttgtgattggatcggtcggttgtcattggattggatcgatttatagacacctctaattgagaatatgtaaaatattaggcagccacaattatttaatgattttggccataactttgaaaaaaaaaaaagtattgtacaatatatacaaagttctccaccaaacttatggttgatgaggtaataatattatattatattatatatatattaaaatcaaattattttttggcttgtgattttagataatttgaaattgggatcttgtttaaatatgagaagaaaaaaaatgtccaatatgtgagctgaacaaaaaaataggagaacatctatttttcaaatgttacttgaataattaggcattggctagtatcaagatttagataaagtaaattattggtcccaatagtattcatgatgtgatgagatagatcttaaatactaaaacaaataagttcatatgccaagtatttatagctaaactatatatcatatttggtggactaagaataaagctctatagaacatgaagtatgaagatatacccaataaattttattgtaaaaaaaattaaacttgttgtaaagagtaaagagcattatgtatgataatgtagccaaaaaagatatagaatagttgaaaaatttgtaaagaaagtgataggcataggcccactacaattggtgatgctagagttgtaaaacttgttgtggaatcaatacacttatttgattgaccaaaaacaaaaaaaaaaaacaaaacttaacaacaacaataataaaaaaatttgtggaaaaagttttcaacaagtttacttttacgtagattagtctttaatttcaagaaataacagtaatagtccttaaagtcatattttttgtgtcattcgatacctaatttaacagcttcgttaagtgcaggcaagaatatcatgttcaagcattattagtccaaattataattttacttaaaaataattttaaataaaaaaaattaattaaaaaataaacaactaaaaacatcaatattatttttatttttattttctattcttatttgttttctctccactttttgtctctctccttctttttcttcatggggcacatatccaactcatctatggctatggcaaacccaacaattgagaggcccaaaaacaagctgttcactgcccatcccaatctcctcaattaactgccttttttattgttattattttcaatccctatgctcatcatttctctctttctccccctttcaccatcattgatcgaaaatggaggttggctcgtcgggcttcaaaaatgtctagatcgaaatcgtggaattttttttttaatttttcctgtactaaatgaagtattttcacgataacaatcattgagaataagatattagagttttgttgattaatttttggcacaattagttaaagtttcgataacctacatttttatacaacttttttttttttttttttaaattttcaatttgagcaatatttaaaaataaagttgaacaagaaattcagaaaactgaaaaaatcgtttagacctatctaccgaacaccgctaaaattgaaaccattaaaacaaaaaatcgaaaaaaccactaatagtgcaaaccatccttgaacgatcgatttaattttagtgccgcaccaaccgaaaataccaaaaccgaccgattaaacacttaagattatatatatactttcttttttaaaaaaaatcatatataatgtttattaagtttatacatatagtatataactagaaaaaaaattacgtgcgcgaagcacgtatacttagttttatgttaggtgttaactatttcattaaaagtaatacaataaataattgaagaaaaattattattagttattgtttgagattatttttagaggtacatttatattgagtagtcaacctctgattaaatgaaatgaacgatgcaaagatgtatactaaataatgcccaaaaacaatgttaaagtgcttcctttatcacattcacacaagtagtttcactttctttgttgactttgttaataatatatctatacatatttagaacaataactatttagattttccaagacaaaatgagttctccaaagc

SEQ ID NO: 79395 - DNA, 3176 bp, Cannabis sativa
aaaaaaaaaaaaacctacaaaatttcaaactaaaaagaataatatattatctaaatattaaatcaagtttaactcgactaaattattttatttctgagcaactaaaacaaacaatgagcttaccaatgacaaaataaaaagaataaatcaaagggatagaatacaaaaaaaaaaaaaaatagacacaatctaagaaaaactaaactagaaagttaaattttaggaaacaaaattccaatctcttagccaatagtgaatagggtcaatttgaacataaccaaatcccataatccaataaagaagagagaaaaaaaaacacataaaccatagtaacaatcaaaaattttttttaaaaaaaaaaacagaacttacttgtaaaatcttgttgctcaatcactatgataagagaacatagatggagttctttttttttctagtatagaatttgggaagaagaattagatgagaaaggctagatttatctataatacttcacaaaatttaaaaaggttgtgttaaagttaaatatatgtatggaagtaagagatttgtatcttaatttcccttataaagtttcattctaattattagtatgtaatttattgatacttttattttctatctgtatttgttgatttggccaaatcccacagatttcattcttttcttcttcttctatatatgtttataagttataataataaacttctttaattttgaaatataaacatagattataatagatacacaaaaattttatacataatttataatttgagatgcagtttttttgaaaaaaaattatataaaataatgttgtaaattatataggacagggtgcaaatttataatgaatatacctgtaaattaaattgtgcaaatcatgtaatttattttccaaaatactgaaaacccagttctcatcattctatataaggtgtgaataataaatttttgctaatttattctataaaaactagttattaatattaattacacctaattattacacacaaatttatgatggtgcataattttccacattctttcttgatattttcttattttataaatattttttatgtgaataaatctagatctttttatattctgcattcacacacacatcaataggtcacacatcaaattttgattctattctttgtttttcactaatgtagtaaaaaaaaatatcaaataatgattcccatgatttttgttattagcagtaatataaaaatattcattactttatttaaagtcaaattaattagataaatataataaacatactaattacactctattttaaaatacaaaaaatacatttagatataagataaaataattagtaattattaaaaaaaaaaaaaaatcgtacttaatatttaaaacaaatttttttttagtaattatataatataattacacataattcttatgagagtatacaaatttgagagtgtagtttgaacctctcaattatctccaattacacaaatacaatctaattacgtaatcagacaaatttataaaactgtataattacttttaattacactcaattctaattctcttttagctttccaaacaggccttcatacgaactcaaaacatttattcctcatttataaatcttttttctccagtttatgattattatgggaaaagctgtaataagagattcatctattcatattattttctgtttttcttttcatggccattcatctcagaaaaactaaaccaacaccaatgactaaagaaattaattgtaactacaaaaatacaacaacacaagaattattaggtccaactacacttagctttcacaatacctatgccaaaattaaaatattgttggaacttcaagcagtcataatccaacaccagaaataagcttttcattgaaaaaagaaaatggtggcatcaatttatctttgttttcttagacttgactggcggcttctcaagcgcatcatcgttttccgatgaactcccgtcaagcggttcgtcagggacatcattgggaacattatgtttggtgatgtattctttcaatatgctcatgcttgcctctttcaatgaaaccagttgctcagaaagggttccattatttgcattggcagaataaatttccgagccaagtgagaatgaaaccttaaccagaggtgcaggtgttagaactgtatctttgacttgaacctccattatatgctgcacaataatcaatccaacaatcccacttcaattacctccattatcattaaaatattttatgtacattataaattcatttcactccatgaggcattttatcaaatacctaatgtccaatgttcatgacaagacccaagccaagaacaattcaatatacaaaaccacaaccttgcaaaacaaaaggctgattaaaattttgccctttaaactttgacatgtactaaattatgttttctaaacttttctagccgttaaaaattcttcaatttaaggatttttgtctaatttcattcaattttactaattcggtgattgtttatgtaataaattatgctgcccaaattttagaattttcttatcaaaattagacaaaattctttaaatccaacaatgtcaatagtttaagggaaatttttaacagccttaaaaattcaggaggtataatttagtacatgttaagatccgggcaaaaattctaattaacaaagcaacataattgaaaatatgcaaatgaatctcaagtcctttaagagaaacagagtacaaatactttaatgtgttgtgataaacatgatataattaattttttttacttaatcttaaggcataaataaaaacaaaaaacctggcataagaaagaacatgatatctatttgcataattaactcattgaggtgttttatcaaacatatggtagccattcttaaatagaacaaaaacattgaataattttgatatttttagttcataatactagaaatctaacattaaagaggcttagttacacatacagagtcggaaaccaccctatgctttaaatttagctcttagaacaaagtttcattgataataccttaaggttgatggaaagaagacaagatgagaggtgagtaggtcagcagttacagtatcgagattagagcatccacaacggcggcggcggcgaggacagggaa

SEQ ID NO: 79396 - DNA, 9879 bp, Cannabis sativa
ttttataaaagttactaattggactttttactttgttaaattataaaatggactatgtatttttcaaaattgtaaaagtagtaagcttaatttttgatatttttttttactataactaactaaaaaacaattcctaacagaaacagatataaaaaatgtaactagttttatcataatacatttagatcggattattattaagttttattttgataggagtaatttgcggctaaaccctctcagctatgattttacaaactgctaaaatgttagcaaatttaatgtgtcctccacttatctcagttaactgctcacatggactgcctagtgtaccattatgtacatgtggcacatttatgttggtccacctaatataattatttaaaaattataaaaaagtttatttaattaaaaaaaataatttaaatttataaaattattaataaataaataaataatttttttatctaaatttttttctctagctttttctttctctctttctcatcgatctctctttttcactctctctccccgaatcgtcttacactaaaaaattcaaatgtaagaacaagctaggtcattttaagacaatcatatcatttatgataaagagaataagcttcaacacaatgtttcagggccggctctagacataagcggattaagcctgcgcctaggaccactcattttagggtcctaagtaaaaaaaatatttttttaaaaaatatacatatttttttttaataatttttaaaaatactatttatctctatagtaaagtcccatttcaactcaagaccgaccctgattataagaataaaattattaattcaatataaataaatttattatatattttttgttataatatattaattattcttagaggtataatttaaatttaaatattattaaaaaagtttaaatttaaatattgttaaaaaaagcttaaatttaaatcaatgtaaaaaaagcttaaattataattatccactttttcaattggataattataaatatttataatataagctatctatcaaaatgttcattatcaataaaataacctaattaataagaacttgtctaatttaaaaaagctaactcctttcactacacaaactgtttcccaaattctcaaaactcaattttgggacactgattcacctgagaaaatggcttccatgcccgttgttgaagatcgactcgaacccgaatcaaaggtatcatctttttcctcttctgaacttttccctttcatttctcaattttggggttttgttatttttctatataccaatactaagaacactctcttttactttcaggagaagaattcggcaactgataaagctgtggatgataaatacaatgttgaagctgctgagcttagagctaatgaggccatggtttgttcaaatttctcttcttttttatgtttcacttatcttttttggttattgggttcaattgaaaattttaacttgttatgctttttgtttgttttttgtagcgtttgcctattttggaggctattccaatttatgaacagctccttactctctttcctactgctgtaagcttcttttttagctttctttggcctaattccttttgcatatttttgtaaattttatttaactgtaagtgttttggtatgagctttgatggagttgttataccttagattgttttttcatgggttgcttcaaagtttatttcttttgggggtcttagctacactatgaccgaatgtagagttatgttacaaccacttcgctagaactcactccaaaagctagctagcttaagaggggagggtgctgaaatagttatataccaccaaccaattccgtgttttgactatactcttatgttttgtttatcacggttttcctctgccatgagtgagagtattaatacatgattggggatgatcagtctaagacaagtggtctctttttgttttttttccttcttagaaaaaatcctgttcttagtcaaaattaccactccttggatttgacgtctacagtggcctactctgcggtggcccactctgggcttttccaatttccacagagtgccccttctataggtcgcccttttcgtggtcagtcccagttgatagtgtatggccttgataccatttgttttaaccacttggatagaactcactcccaaaagttagcttaagagagcagggagagagttagttagagtgtggttaggttaatgctacacctttgggagagagttcatttgtgggtgtggagaataaatttgtattgagaagtagctcttgggggatctcttgaatacccaaattggtcttgttcacttctattgtcaatcaatagagaaaattcctataaaaaacacaatggcgggttttcatttccaatagtattatgcggaattatattcggttgatgaagatgtataccattcttttcaggcgaagtattggaaacagtatgtagaggcacacatggctgttaataatgatgatgctactaaacagatttttagccgttgtttattgaattgtctccaagttcctctttggtatgtttttttaatagcgttggtcagtaaactatggtttctttcatgttatggagataaagtatatatgttgtgcttataaaccgagctgcattttgttttcatttttcacttgtgccttatttgtaggcgatgctacattaagttcataagaaagagcaatgacaagaaagggctagaaggtcaagaagaaactaagaaggcatacgatttcatgctcaactatgttggtgtgtcttcttatcactccagcctttttgatgttattgatgctgttttgtcagggatatatatatatatatatatacataaatgatttgtggagtgcatgaaaatatgagcattaatcatttgttacgaaacttcgtatttaatcaatagaataaaattcaaagaaataggaagaaatattaactatttgttcttatgttgcgaaatagctttaaaattgcggatgtgattggtatttacattttgtgggctaccattttttttttgctccaccgacttagtttggtcaaaatatgtttagggtttaatattggcaaagattttcaggagtggacatagcatctggacctgtgtggatggaatacatcactttcttaaagtcattgccggttcgttcttctctctctgatttctgactttaattatggacctcacaagattgaacatgatacatatcttgcttctattaatcaattttgatgttcgaatgagacgattgcaggcatcacatccacaggaagagtcattacgaatgattgctgtacggaaagtatatcaaaaggccattgttactcctgtgcatcacattgaacaaatttggagggactatgagaattttgaaaattctgttagccgacaactggtaatttgttggtttctatagcatatatgtattcgtgtgtttttctattgcccgaagaaacaattagtacttaagtatgtattcatgttgtctgaattctatatattttagatgacaaatttgatttttatgtgtggagcaggcaaaaggattgatatctgaatatcaaccgaaatttaacagtgctagggctgtctatcgagaacgaaagaaatatatcgatgaaattgattggaatatgcttgctgtaccaccaactggctcttacaaggtagttttccacttttctctattgtattgtcatttcttttagcactggtcatttgtgattttgatagaactctcgaaatctcagccacgaacacttgcacacaccagaaatcttcctcttatttctcgaagtctggtctcgattagagactaagtcgaacacaataaaaagaatcataacagtagctaattcaagctagccaatctcccaagaatctaaactgattagtttcaaacaatcaactaacattgaaactattaagacaaccgagctaagtacaacaaccaagcttattattcctctcgttgtgcctcacataagtgaaccttatgggaggttttttcagatttatcttctttctcattgtccaaacatgcatcattcacttgggtttgtaagaagctttttacttaaatgtttaataaatttaatttgatgttttcttctcttttttattgtgttattgtaggaagaaatgcaatggatggcatggaaaaagttgttagaatttgaaaagtaagaatctatactatatttttggtaaaacttcattaataattttcgattatcttgaacgatgaaggattcaaaattgttaaaaataataataaaaaaattgaacaaaacattgtggaaggaagattgaataacaataatcttcaatacaatcaacagatttactcaaaataccgttatttcttctcttgaaattgaaattatgtggtgttattgatgcatggttcttatggtttcatagattctaatccaaatatagtttctttttatttttcattcagaggaaacccacaaaggatagacaatgtatcatccaacaaaagaattactttcacatatgaacaggtatgatgatattgtaacgcacgtgcttcttgttctttcttcaaagtttcacagatttctcattttcgtattgttggtatccagtgcctcatgtatctatatcactgtcctgatatatggtatgagtatgctacctggcatgcaaaatgtggtgcgcttgattccgctgttaaagtttttcagagagctttgaaggctcttccgggtaatatgatatttcgcatctcatcttcagcttagtatgattctatgataaaagtaaatcaattcccacttcactactcccatagatgttgaaaaagacactcacttcatttctctctctctacaatcagattcggaaatgctaaggtatgcgtatgcagaactggaggaatcccgtggagcaattccggtaatgaaactttggtgatcttatttataagtatcattagtctgtgttttgttctttctgagggttctttttcttgcagtcggcaaaaaaaatatacgagatctttctgggggatgaggctaatgcaactgctcttgcacatatacaagtaagatttactaccccatacttttttgtaaaatgatagaacgagcgagagtgtggaaagccctgagagagagagaagcttaagttatggaaacgatattcgatccaactattgtatgaaagtgaaataagtttggaaggagggctcctattacttctacaaaactacttgtattattgataggaaaaccgaaaacccaggtttggaaagctcccaaatatttgaagatttaggatttccaatgagctagtctttggtttaggtttccatggtcaaaaactacgattttttcttccattaatgtccattttcattgtggattatttatttatgttgagcttgtattgtttgtatttgtgtttctctttgctcacctaatgaaaactgtttattatcagtaatgaatatctacttttatatggcagtttattcgctttcttaggaggaccgagggagttgaagcagcccgtaaatattttctagatgctcggaaatccccaaactgtacataccatgtctacgtggcatatgcaatgacggccttttgcctagacaaagatccaaaggttcttatctaactttttaaattaaatctataattttcttttttaaagtttccaaagaaaatcgatgcaaactgtttagtcgaggctatcttaaatattctggtcatattcttttaaaaatcccttgcagatggcacacaatgtttttgaagctggattgaaacggtttatgcaggagccagtctacattcttgagtgggtttttgactaaataaccatttcattgtgttctattgataagcaaaaacagttaattttataaacaaaaattcccaaaacattgtcactatttgattttatttgtcatttgtaaacttatacaatatttgttggaaaatggaacatgtgttaaccgaacttgatatttagcgattttacttgtagttcaacaagtgtgtaaatgaattactttgttgtttggattcatgctatgtttggtgaacatgaagcctcttatagcatctaaccatgtcgaatgatttgtgtatttttcgatatggtaggtatgcagacttcttaactcgtttgaatgatgatagaaatatcagggctttatttgagcgtgcactaagctcacttcgccctgaggattctgttgaggtagctgttaatcctttatcaaagaaatttccatgtcttttgtgttatgcttttctctgtacttcttgacatgatcttgttaagccaaagaaatatcacattcaatttcacattttctctttgtgtttcccttttcaggtttggaaaaggtttgtccgtttcgaacaaacttatggagatttggctagcatgttaaaagtaggaacaatgattctgttgtttcagcatgattttcttttatcatttcttcttgtaaaccatttaactttatcaataagattgacatttgaccgctcgttcttataggttgaacaaagaaggaaagaagcgctatcgggaataagtgaagagaattcatcggtatttgagggttcgttacaggatgttgtatcgagatacagttttatggatctttggccctgctcaacaagggacttggatcatttggctagacaagaggtatttattttctgttttggtaaattataatactcaattatcattaattatagtactcaattatctttgcaaacttttcagtggcttgttaacaacatcaacaagaaatcagataaatctactattctcggtggctcggggttcataggtacttgtccttatgtaaatgcagcttggtcataactcactacttgtgttgttttcgactcaattctttatgttgcagataaaagtactgcagggctaattagcaatgcaaacgtgacatcgaatgttgtatatccggatgttactcaaatgatgacctacgatccacgacaaaagctcggtgtgtaattgtcataattgctattaaatttttaaatagtttttgacttttaagcattatgttatagctaaagcaagttcttcgatagggactggagttcctttgaatactacagtacccggagttcctcctaacaatttgtcaaatcccgtcgttacaattgtgagtggtcaagctcaagcaacggatcccttcgatgaaatactgaaatcaacaccgcctgctttgttagcctttttaacaaatttgcctgctatcgagggtaataattaagttttcccttttcattttcggttgataattgtagttagtgtatttctagtcatttcgctttaaattcttagttagcttaggagaattttcatttttataggttttttttagcgaagttcacaaaaatatgagaaaaatgagtaatcagttacctccttaggataatcagttactttatactatttttctcatatttttcaactttttattcttgaacaaattgtataaaaaatccataaaatgtgtacttttcatggacttaaactccttaagttgtgcttataatttttcaggtccaactccaaatgtggatgttgtattatccatttgtttacagagtgacataccgagaagccaaaccgagaatgtgaggccagggacagccacaaagcagttatcttccggtgttggtggtcctactacaagtgatctctccggttcaaccaaatcccaccctgctccgagtgtttcctcatacaaaccaactaggggaaaaaggaaagaacccgacaacagtatgtgtttccttccttttcctttaagttaagcaaataatttcatacttcggttttgttcaaaacatctttattgacaggacaagacgacgatgacactagaacagttcagagccagccattaccgagagacgctttcaggatacgacagttccagaaagctcggagaacagcttcacaaacgggttcagcatcatatggaagtgctatttctggagatttatctggaagcactagttgatttaaccattgttgaacattcttatttgatttagaaaatgtagctctatttgtattaaccaagcaatttctttaccatatttgtaactatatgttacaatatctctgtgcaataataagtccttttttctggttttgattatgaaaaatggtttaaatattgaattttgcttgaatttttttctatttatgtaaaaatgagttgggagtaagtttgaagattcaaccaaggaatgtgcttagttttgttccccttaaaatgtggtagctactgcttctatttttgttcttcgaagagtaaataaaaattatattcaaaatttaaaattattcacattaactaaaagcatacacgcatatgttgtagatttatttattatcatctagttaaacaagtagttcatccgtttaaaaaaaacatatatatatctaatccattttcagctgatcgtttgatatacataaattatgaacacttgaaaatttaaataacatacttagtgtattatctaacaataatcctaaattattaaaaaaaattctcaaaagcagacacaactactaagagtcagaatcaacatgtacattttttacctaaattattttacctttggtgtcatcaatggttattggttagttagtagttagttaagttaggtaaaaattgtagtaaatatatatacacatacaagtatttttaattttattttcgtaaatatttttatttctctcttttatcatggagagatttgatactctttcttataaacattttaatgaagttatttaataaaatttataattaaaatttaaaattattaacattaactacaaacatatataaaatcatctactcattttttttttttatttatttatgtacatttatttattttagctttggtggtaggtagattaacttgttagttaagtcagttaagttaggtaaaaaagtcaacacatttgactcaccaaacccattttacataacaacaactcaaaatcttcagatcttcaatccaatccaatccatggcgatttactcaatcgtaatggaagagatcacacaccacacaggtctttcacccaccgccttcttcaccatcgcagctctagtcctcgtcgtcttcagaaccgtctccgccatgttcgtctctcccgaagatttcaacaaacctccagttgccgccgccgtttccctaaaccctaaccctaacaacaactccagttttctcaatggggttttggatcaaaccccaactaagccttctgttcaattgggagagattactcatcaagaacttagcgcttataatggttctgaccctaataagcctcttcttatatctatcaagggtcagatctatgatgtctcttcttctaggtaagtatttgattttattgtttactgagaaatttgaagtatggattgaatttgagtttgggtcttgctcagactaaaagtttaatctttccaagtattttggtttgtgcactttaagtgtttgataaaatgttatttaactttttttttaaaaaaaactttgctttcttctgttaaataattaggctcatgatttttttgtctgattagaatgtgtttgccgtgaaatttgaaggttgcccagatgtattaaggttatgatttctcttatgattagagttttgctcttgcccagatcaaaagtttgttccttttaagtattttgttttgtgctgatgaaatattacctaaacaatcttttgaacttagtcccaaaacctcttaaatgtcttttt

SEQ ID NO: 79397 - DNA, 2875 bp, Cannabis sativa
  modified_base (27)..(31): a, c, t, g, unknown or other
aaaatagattacattgaaatggagttnnnnntagggcataaaacctaacatgttgcaagggtgcgatatcaaaaagtcggcgtagcaaaatccaagaatccaatctattttgcacagtaggtgctccatagaaagctgtgaaatgaaacttatgatcactagcatcagttatccatgtgtcgaaataacaagaaccaaaggtgttaagttgaataacaatgtcatctttccaaagcagcataagacctccactaagtcatatccgaggtgcttccaatccatgagaaaattttaaaagttgtcgaaaacgatcgaaagagttgttgttgagcctagtctccataagaaagagaacacggggagattgctggcgcactagcaatcagagatgtcttaacgctctcgggttccccaatccccgtgcgttccaacttaggattttcgtaatcccttgcgggattgcaaagcaatctccgctgaattgtctgaaccaccatcagaatccttggaagtcgaggaaacatttaggtgtgagcagtcccctctcgacgagaatgaggagacgacattgttattttggttgcgacatctcttgagcatttgtctcatggtaggagcatcagtttgccttttaaacatatagttggggtggaagttttctttgctgtaatgtgagttgttaccggtggttgaagtatgtgactgtggagtggaaatgagagatggtgttatgttagaaatcacatgcatcaaagtatgattcataggagtgttaggcagtgtagtaggtgggtaagttgcatagggaatatgaggagtgtgagtagaaccaatgttaggggtgaatatgtggcttaggttagcagttgtagtagaattggaagataatgggagggatcttctagtgtgagaaggcatggtgggttgtgtagattgttcagagatgttagtatgtgttgcagcagaagtgatggtagataaatggttagatgggggtgtagtaaatgaaggtagtggcaaagtaagagatgttgtggtgcgaatatttggtgatgatattggagcagtagatgtgatggaagataagggagtatgtgaaggtgcagtagttgaaggtagaggcaaagaatgggaaggccgtgggtactggtgtacataggtagatgagttatgagcatgtgaaggaaaagtttgggatggagtagaagattcaccatgaaaaagtatgtttggttggggttgtggtctggtattgagagttggtattgtggaggacaaggatttacgagctaggcgagtcaaaagtggccaagcattgcccttggcaaaatcagtctgatacttatcataactagaagttggtaacttagccccttgcatccaaggaccgtactctagatcatcatcattgccattgtccattctttccataaaagccacacatttttcaaagggatgtccaagccgaccacattcaaagcaaaattctagcaatctctcatatctaaaatcaacccaaaagtcatccctaatccttggtaaacttatcattctgcctctaagaagaggtttgtccacagaaagtttaactcagatccttaagaaaggaccccaccgctcgtcaagagagtcctcatgtacatcgatagattcccctatgatgtttccaagtgtagtagcaagagtcttcgatttgttgagaaatggtaaccggtatacctgaacccaaaagggagtgctcaataggttgttcattgtgacattatgcagagtacttggtgagcagaaaataactaagtggttttggaagtgccatggttccttgttcaaaacccagaatttgtctcatgcacatcaaaaagaaattttgaataatgcatctccatattcaaagattatcataggaaacctccccttccaatggccacccatttgatcatagaaggtaggtttatgaacataattctcaattagtatccttgctataagaatgtgactggtattaatattagaggcattatcaactacagtgggtaagaaagcaacagagctttcttcctctgtgagagttaaagtggaatcatggctatgaagcaaaggattcatcgcaatcaaggagaaaaggaatacagaaaaccagatgaagataacagttattcaccgaaagtatgaagggaagaaggaaaccgaaagctgggaggagaagggagaaacaaaaacatttgaaaaaacagttaaagtctgaaaaaagtggttaagaaactacaactgcaacaaacccaaacaggacacctaatgtaatgaaatgctcgataataaataatagtttaatatgagtaaggaaaaattaaaatcctaaggctataagagcatccccatcagctgcttcaaaacacttatatctttaaaataaaataaagaatgagtaaaaatagtcttccatcagatgagtcattttattcattttacatatagctacagtattgtcgctacatgtgaagattactgttcatgcttcaaactatattttattaatttatcacacttcttctctttcctctctctattttcttcactttttctctttgtttccctcgctttctcagaggattggcgccaaacatagaaagaaacatactctttgtacctggagagaatttttttagggcttttattttggtaagatcatttttgttcttttctcttaatctataaatttattatgtatttcttgtttctgatttgggtttctaatgagtgggtatttcttttttgttctttctttattatgtattttcttgttccaagtttgggtttctcgtgaggtgggtatattctttttcttttttttttgttgatttaatgttgttccaaa

SEQ ID NO: 79398 - DNA, 3980 bp, Cannabis sativa
aatgacacacaattacataaaaaacatgcttaaagtgatatcaaataactctttactcaagagttatcagccttgttcatctccagtttgttcaaattctccaccattttttccagaacggagaatttcagtggtattcgtcctatgagaagtctgatgcttctttccaagacattaagttatctctcctggttgattatgttcattttgaggagtattgtctgtcatgaacgaacgatttgaatttgtttttaaggagggtgtacttctgagtttatattacaaggctctcaatgaaagcaccaaattattaacgcaaatttttgttaactaataaataagcctttttataataaatgatctctagaattaattaagtaataattaataatagtagcaataaatggcaagagggttttttacgtggttttgaagttaattcttcatagtccacgagtccatgttattctgggttgataaattatatacagaatacaataaaatattttatagaatgaataatatatatttctctttcttttcccaaaatggtcctcccttgtttactggattctgtccctatttataagagtctaggatgatagtttttaccttggaatcttatcacttgtaatcgttcgtgaaacgtgaataatccccacatttcatatttatgcacctgagataattataaataaccgctatatccactctttgcctttatctatagacaattatgctgactacacttcatacttctcgcagtttatcaatacttttctagagactttatcgcaagccaacgtctaagtgtaggttgtagtattccttgctttcttctattaatgttgagtgaggtatatgcaagacacttattacaacgtgacggaagcgagatgaatcatgctgaagttatactcacgtgtatgtgggtcaatgagttccaaactcattatctaccctttccaaacaattttgtaatgtattctgtttatcccgagatggactttctttatccgtctcgctagtctcatcaattagtagttattacttgtatctcgtcattatctatggtgagttcaagtatttttatcaattatatttctcaaggcaagtcgtctgaatgcatttattgatgcataatttgagatggttcgtattccagttgtattacatgtgttagcatcatattactgcttgaaatataggtataacaggaaccaatataaaatctattaagaaggattagattcctttttgttaatttatgttcctaaccatccatataattaaatctctgaaacaaaagtcattagcctcattctatgaaaagactttaacaaatgaattacaaaaaattcaattaacatgatcatgaattcataaacactcaagatttaaattgatctataaataattatctattatgatatgattattaatctttattattaaatggtttttgtataaagattttgatttatatctacacatgtcatatataattatattatataaaatgcctttactactgagatgtctaactacatcaataatttgaatctagattatttgtactaacatgatacttagtaaactacacttataatacaaccccaattaaagaatttcaaaacttttaattatttgttgattattttattcatgtgatcttaattctctcatattaatacaagatcatgtcaacccaaatacgacaaactgaaacccaaacacgacccgtttataaacgaattgacacgacacaacccgtgcaacctgtttataaataaattttgtttaaacatatcaacacattaatatattaatgacatttgatacatttatgacatattaaacacttttatgatgttaaactattaaaataactttaaataagcaattaaagagacaatttcaaacacgactcgcttattaaataggttagatgagttaacccgaactcatttaagataaaaccaaactcgctaactttcatacaagtttcgagtcgtgtcatcgtatctaatttttagaagtgttgtttgccctcaaccttcctaataatttaagtcacaaggatcatatttcaaagtctgaaaattggaagaagcattttaatccaaatacaagctatatttttcagataattattacaggtacattagaaagcatagaagctcgaatttcccaaaacaataagaatcgtcgagtaatttgttgacatttatagttcgaataaaacaataaacgggcatatagttctttgtcacaatacaattactagtgtacagaatatcatagaacaagttgtatgaactaaatccattgtcagtttgtcatgttacattacatctgtatattgtatagagaaaacacacatatgaaaagagatgaacgggtgatgacaccctccaaaccatcctccaccttcagagattgttttcaattttcatggaggagattgtttaagagagatgttagaagggcatccctcctctcagctcggctctcttctcttattcttctctgttcttccctttccctccaagactgctcaaccattaatctttctctctcaagcttctccattgactgtcgccattcctgttcaaacaactgctgctcatatgcgcgcctatccatcatgtccatccactgtttctctatcatctgttgttgctcaaaaaattgcttaagcatttccctgatatcagtctcaccgctcatagacgctgcagcagcagcattggtagcctttaaagacttgtccaaagcaattttttcaccctttcttttacgacgagtgcttgtagtagtagtaggggtctcttcatcaataccctctttgtcattctcctcattttctgaaaattcatcagaggattggccagcatttgatggtcccttcatctttttcctagacctgggagaacccatttcagtttccagaagcaagcgctgcatgttcttctccctttcagaaaagagtgcatgtaattcctcaaagaatggacattgccgaccattttctgggtcagatgtttcctgtccctgagttcatcttccaatttaatttaagtacttctaagaagaaaatagaacaaacaaagtttcatagtgactcgaacgaccatatttacattgagaaccatgaaacaatccttatgatcgattgctgtaattgtcatttagtgagatttttcagtcatcagagaattaacacagacagaaattactagtatgataatattttctgttaataataacagaaagtcaaaaactataggtttaagcttcaaacaaaattaatttaaagggaaatttggaatattcgatgagagagccaatggtcaaggcttacaagttatgctgaaagtgatattttcgctgccaatcccaaatgataagaaaggtaaacgtaaaagaatgaaaaaaaagggaatattggaaagtagaaaaaatcaataccttatagcgattgagaaggttcttccacttgcacttacactgatcagatgttcgaatgaaacctctttctaacatcttggagctgacagcgtcccataggaccttgctgcgcttcgttagagcagagtccctctccagttcggtacggattttgatgaattccttggtctcctcctgaccccactgcccctgtccctgagcagaacgccccatcatcaccatcatcgttctcgtcgacgtcgtcgttcttctgccctcatcatctccccattcgtacatctctcttctacgccatcctcagaaatgcctgattatcttttcaataaatatcattttacctcatgaattttaaacactatctaattttgccattacttgttaaaaaattttactaaaatataactgttacataattattccttcatgttatgttaatttctgttatctttactgttaaaatttatcatttttattcgtgaacttttattaatacaaaattttctctttta

SEQ ID NO: 79399 - DNA, 2149 bp, Cannabis sativa
gttaaaacaagcaagaaagcatggtcatcaacgatcaatttcaatgcttggtgttccatctgaagcagttcgagtcttcattcgatttttatacagttcctggtatgtaattagtttcttccttctcatctaaagacttataattcatatcatagttagtaggcataacccagtttttagtgatatttttcatctaatatatggcttgtgatgtagacataactttagaactaagccttggaagagttagcctacaaaactacagaaaataacttagtttttttggtaataagattatgttatgtactccaaaaggatgaaaactgaatgtttgagaaaacttaaatttgtgtagttatgcaaaagaagaaatggatgaatttgctttacacttgctggtgctatctcatgtgtacgtaattccccagctaaaacgagagtgtgaaaggaagatagagcatggtttgatgatgatcaacacagaaaatgtggttgacatatttcaactagcattgctctgcgatgcgcctcgccttagcttcgtctgtcaccgtatgatctgcaacaacttcaagtcagtttcagctacagaagggtggacagcaatgaagcaaagccatccggtgttagaaaaaatactcttagaattcatcactgatgaagatcatgtaagtaacaactagctagttctttgttctttgttctttgctctttgagattagaattggtagtaaagatcataaaggtttttatttatttactcatattctttcttatctttatgtttttctcagaggcaaaaggagagagtaagaaacacaaaagagagacaagtctacttgcaactatgtgaggctatggaggctcttgtacatatatgtaaagatggttgtagaacaattggtccacatgataaggactttaaagtgaaccaaaatccttgcaattttgcagcctgtaaggggcttgaatcacttgttagacatttttcgagttgtaagttgagagttcctggtggttgtatccactgcaagagaatgtggcaacttttggagttacattctcgtctttgtgctgattctgatgtttgtagagtccctttgtgcaggttagttttgttagtttgttctctcttttgtcttgtaattcagtttcttccttataatacttatatttgtacattgcccactgttttgtttttaagagaaaaccttttcatagttgaaactaactcttttaagtataacatttcaggacttttaaggagagaagtaggaaacaaagtaagaaagaagagataaagtggaatattttagtggagaaacttttaagaacaaaatgcttctcaggaaggccatttttttcatgggcaattactgtcaaatcttcatgacagcaagatgtctactttgttcttatgtgaaatatctccattgtcagtgctattgtttgtagtatgtagtccaatcataatcagattaataataaaattaaaattttatcacaaaacaatgttgctatgcttgtagtatgtagtatgatgctatgtgtatgtgttttattgtttttttggatttttttaggtgtcttaggctagtggtagaaaaattggtcagacacgataatatgactcgaaattcacataaattaaacaaaattgagttatttttgtgtaacacgactaacccgtttattaaacctaaaaataatacggcaacaacttattaaacatatacactcttatgtttaatatatttattatacctaaacaatattaaggtagataaataggacctaaacatgttaattgctcataaatgtaaatgtatcataaaaagattgtaaacatgtaaaactagttataaataagttaatgagctgaaagttaacgaaaactaagtatgattctcatataaacggattagacgagtcgactaaggtcaacttgtttataaaagagttgagttttgatattagtttttaactcgattactaaatgggttgggtttagaccatctccaatgggtgatgtaatatttctgttaaatttggctcaaaaaataaattaaagttatatttggctcaaattttataattatacttcaatacattagaggtaatctagctttatttttttttttttaaaaaa

SEQ ID NO: 79400 - DNA, 1230 bp, Cannabis sativa
tatttagcctaatgattaataatttatctaattaaattattatttagttttaaatattaaggtttggtggggttatatataagctgtcttctcatgattggaaaggccgcttggtgtattaatttaagcaaaatactaattattaaagagagattatgtttgctgactacctacacaacatatatatctgaagtaggtatggataattgattaaatattgggttaatgggttattagcggagctaattccaagtagttggaacttggaagtgttatattgcaaaagccatgcatgtttttcaattatggtgatgcttttttattcttcattaatttaatacaccagaaatacatgaacaaatccaaaattatatagtgtgacacataatttaaagaaatagagagctaagctagcatggaacaatactatattattgtcacttcaagttagcaataattagcttgttgctttagtacttgctaatatatatatacctaattgggaattaagatttattttcttattttgatgtttcaatcaatccatgtcaaattaataaatacacgacacatcatatttaaaatatttaaacaaaaatgaaaagaaaaaaaaattgtccaaaacaaaaataagttagaaaattaatttactaacaattaaacatgatatgaattgtgacatcaaaattggacaaagaatttcatccagtggatgcatatatacatcttagttttttgtttttctgtgaagattaccatatttttacttcattaacatatataattaacaaggtcgatatagctttacaattagtccaccttcactactagctaggtttaattggttcatgatatgatctagcatatatttgctgagtcatttcctagatcctaagtaaattaaaagcttgagtctcaataacattaagctctcttttatctagcggagtgttctgtgcttgcttcggaagcaattcatactctcaacaagattcgaagtaatcggggtttcatggcggtcaaaacggacatgcacaaagcgtatgatagaattgaatggagttttctgcagcgagtcctcaaagcaaacagatttaatgaacagttctgcaatataatttcccagtgtgtgacgatagtgactttctcgatcctgctgaacagagctccatagaagcctttcgctcccggaaggggtctacgacagggtgaccctttatcaccgtacct

SEQ ID NO: 79401 - DNA, 826 bp, Cannabis sativa
ataaattaaagtatagttttaattttatattttctaacaattctaattataaaattataatattcattattatatttaaattttattattattctaacttgtttataattgaaaaatacatatttaattatttattattattattattattaaattgtagcattttttaatgggttgtgatgtgctttagggtttgtctcgtgtcgtactttaatttgtttttcgagtttgttttgtgtcgtaccttcggctagtctatccatgtcattcgtgtcgtatcatgctcaaatatatattttttatgtcaactcgtgaccatacttatattttttccagtctagtcgtgtttgtaacatgtgagaaaatcatgcccatgcccctaagtagttagacattttctatcctaacatatatagactccttaacgaaaaaaaaaaaaacatatatagactaggccaaaggttgtgtatatatatacacaacacatatacactagctaagttatattataaagaaataacattaattgagaattataataaattttttgtacatatgatccatcaatacgtgttagtgaaagtggaagctactgcactttggtgaaggtgtgatagccattagcaacattaatggagcaatacaaatctataaatatatagcattggtacaagatattagtagtcccaacaccacttaaaaatcacgttttaaaattggttagcgatatttgataaaaattatatagaaatggataatttctttctcacaccattaaataatttctaataaatatatataggactatggaatgttctagctcctt

SEQ ID NO: 79402 - DNA, 2150 bp, Cannabis sativa
tactgaaatcgttgtttcaaggtatttatatgtgattgaaatgaagtttttggctaatttttaaggatatataattattaattaaatcatgttcttcaaaaaagaaaaattattgttgataatcttgtgtacattatttgaagagctagctatagggaatatatgttttgagggaacgtgtgagattgggtgggatataagggtgttctgaataatattttttatgtaagatgagaatgagaatattataactacgtactttatatatatatccaccctagattttattattagttatatatatagcataattaatatatgtgtattatatgtataatatattttcctttttttccaactgctatacaacttggaattgtgtgcggtgtgccattgctttcgctcccagaattaaagacatcaccatcaatagcaaaaacacgtgagtgtctatcttgtttataatttagtttcgtatatgtatatataatatatgtgtatatacacatatagaatataggtatatatgacttaatatgagtggccttaacttaacattatgttaagaactaattgaatgagactatgaaagtaaacgttcataatataaacacacacatgtacacatatatatagtgagttatataatatatggtcaaacatgccttttattacttagcttataattatctaacatatactatagtttctttgcttattatttactttaatgctaataggttattatatgatcattatatatctatatctagtgcaataataagtctattcattaatattcccatacatataaagttcagtatatatcttgtaaagtaactggtttattcaaactaagattccaatatgtaaatttgagtgccacccagataataatcacaagcgtagaagaaaccccaataagggcatccaattatttggataaaagaaaaaaaaaatctctctttaactagaattatttatcaatccatctctctctctaattccaaatgtaaatttgtcatagaacagcataagaatatgtgctctttttaatcataaataatgggaggcgcccatctgtaaatatatatatatatatcctcatttattagttttcctacagcataccaaccatgccataggttgaaaaagatcatgcatgcaaatcctatacatatacatgtttatatatatgtatgtatgtatgtatatatataaaaatttatatatactagaagacccaattgtgtatggaatccacacatgtaattagctgtattaatttcttttgtagtgggggtatttgtcttccttttccaatttttcccactttgattattaaaacaaaattgggaaaatgtatgcattctatgtactctttttttctttaatttgcaatttagtcaaaaaagcagattcctcatgtaaaacgcataatttgatgaattgcgtgccatatttcacttatttttactttatatatatatattatcaataataagacaattaaatctatacccttcgaaaaaaaagtattaaaaattgacaagaccttatacaaattattagtgagagagatatatacgattatatatatgtatagatcgatgtaactaaagttatttcgtaaagttttccatgcatgcgcctccatacgaggaatgcaatagtcaaaatatacattttagtttctactggggcctcaatataatatataaaggcctttctaatctgggcttgttatccaaatgtaagcccagcccagtatatgcaatctcttttaattttacaaattatattttgattgtcttcaaacaaaactaattagttaactttttaaaatataattttaatttttatattataacaattttcaaaaacttgaccaacttaatagttagtaatgctatgttttatctaaagttatcatcttatcctaaaagactaaaataaaatgacatcatttggattatagaataggcttttataggttttttccttttctttttataagtcggtaacaaattagttgtgagtgtatggtaaggtgtatgaagttttttcacaaaactaagtgcacgtttggtattataactaaaaaactgttttttgtttttaaaaacaaaaaattattttttgaaaacaat

SEQ ID NO: 79403 - DNA, 3220 bp, Cannabis sativa
aaaaaaaaaaattggagtcggcgagttggaggaaaagaaaatttaaataaaaatattgaaagtacaaatatatatatgtctatattcgtttaaaaccagctaaaattgaagctgaagttaataaagcagtgaacaagggaaccactttgctccaatactgggagcgaaactgttgaaagcttctcagttctcaattaaggttcaaaacaaacatataagaaaaggagtgagtactgtaatgtcatcatattgataatccacatacctgtaattcgaaaagcaataagcttgacagctagggtttacgcaaatcaaaagagagaagacgaagacgaagacagtcacagccggcgccaatgaacttccacagtccagttcagtaataaggtctcatcattagttaatactgttcgaaaaacaaaacattgaaactgttgaaattaccaaattacccctccgcagataaacgcagcgttgcattactatacttttttctttcccaatacaatttttttttaaaattattaaatattaattttatttttcataactgaggtttcagtctgagaaacaagagttgattagtgaagcaatgtggtggatcaaaacggtgcgtttttgagttgttcttctgaagaacatggaagaccaatatcccaagaccaatcgctcgtacggaccgcatatgaaaatgacgattccgccctcgcagcactccgataacgaccggagcagcgccgagcttcgtgccctggattgtaatctcacctcactctgcgaccacatccaaatcgaaggcttcaattccggcgccttctctgatgtcatcgttaatgccatgggtgccacctaccatcttcaccgtctcattctctctcgcagcccttatttcaggtattaattttcatatgttgaatttgatgagaatttgtaattaattggataccgggtttggttttgatcgattatattgaatttaggattgaaatttatgagaatgagagtgtgtattctgaaatggattggattgttcaattttttctgtggaaaattcttaatctagttctgcactgtgtttgatttaagtaattataatgtttgagtgaaattattttgggtttctaaagtgggttatatttgattgatgatcacgatagttttcaatgttcaatttggatttttctttttgggtttgattctttattgatttaatgtggtatttgtcgtattgtattgaaatttctttgtcgttatggaatgtggctgtattgtacgatggattctgagacttggtaagaagttatggttcattttttggcctcttgctgcttcattagagatctaatattcctggtactattaggaacatgcttcatggtccttggaaagaagccaatgctcctgttgtaaacttacatgtagatgataaaaatgttaatggagaggcaattgcaacagctttggcatatttgtatggacaccaccctaagcttaatgacaataatgcatttcgtgttcttgctgctgcttcttttcttgaccttcaggttattgctttttcacttaagtttggtcaatgctagttgtttttttcatatgttcatctgtcttacattacttgtcataatttcattttcaggatttatgtgcaatatgcacggatttcattatctctgagttgtggacttcaaacttcttagcctaccaggttttaaaggcttgtccacactctttatatgatgccaacatggtatccatttgcttagttattgagatgactacctgtgtttcaggtgtttgcagagagtcaagattacggtatacatggagaacgtgtgcggaatgcttgctggggatatctttgtcaaagtggtgccatggaattgaaagaggtacaagtagcattattgtatgcagtttaggttgcaggtttgtttagttgattatgttatcttattattttttgtcttttatgatacgattcgataaaattagaattttttctttgtttgaagcaattaacttatgatatataagatttcactcatttatattgtaataatttatgcatatttattctctccactgcttaaggtgcttccaagactatctgctcaaaccttgcatgctttattaacatcgaatgaactgtgggtgcctagtgaagagaaaaggtaagggtatgaaaatctttttctcattttcagttgtggatgatttgggcttctatgagatggataagactgtgttttcttcttttcgtaaggtttgaattggcactattcacatatctcacaaaatgtgctcatgcaaaacaagaaaattctgagcaggaaagtaactctgaggcaggaatggattctcattctgattcttccagtacaaaggaaaagaatttgacagattgtttcactgacaaaagtttggaatctgaactaggaaatgtgtccctgaaagatggtatggagggccataatacatctcaaagccttctcgtcgaacttgctgactgtgtagctgacttccaggtgggagcttccaattctaggaaacaggtcagggaaatcgcatatcctcagtcaaagctggagtcagggtacccttgcaacgcaaaggggtcttcttcgagcaactcattttcagatagaaatgcaatacaaacctcatgctcatatgctgaaatgcaagttagtgtgggagcaagtggattgggggccactagggaaggtccatctgatgaaggatcatgctttcatttgaataacaatgggtggctttccagggatgactactcgagtaactgcacatcaatgaacacttcctctagtgatttaatgccaaatgactggggaagatgtggcatgccttctgtttcttggggtggcagaactgttggcagaagacagcttaaagatcatgctaacgggaacattggggttcatggagaaatgtacgactccttcatcaatgtattcgaagggggatccctcttatattgcaacatgtcttttgaggcacttttgaatgtgaggaagcggcttgaagaattgggattcccttgcaaagctgtaaatgatggtctttggctgcaggtctgttactgatttgtgttaaaatctttacgtgtgctcctttactgatttgtcattgctacatattagatgcttgaacttgcttctcatcctaatcaattaataatttttaaaaatggtgtctttgc

SEQ ID NO: 79404 - DNA, 1890 bp, Cannabis sativa
acagataaatgctcttgaggaactggaggtactcaatctttcaggttgcagctccttgacagtaataaaagatgattcatttgagaaattgtctcgccttgagaaacttgatctttcaaagactcgtgtacaacatctaccaaccctttgcaacccctccaatctcagtcacctcttgcttagaagttgcacagacttgacaatgcttttacctatggtggatctttcacttgaggagatcattgtatctggtgcaagtcccacgtgtaaaattagatctcatttcttggagggtatgactcgccttgaaattcttgatctgtctggaacccaacttgaagaattgccatccatgtcacaattcagtgagcttaggcagcttaaactaagagaatgttcattcttgaaagatgttgaatctctggattctctgacaggccttgagattcttgatatttctggaactgcagtgtgtttgccatccttagccacttgtagcaacctccgacaactgttgttaaaagattgctcacaaatagaagatgtccaaggtcttggatcattaagccatctagaagttcttgatctattaggaactaagttaaaaaggtttccctatgagatcacagaattgactagcttaaaacatgtagatctgccaggcttaaaggatgtagagaaaattgactggggaaagataaaacatctgccagaggaggtaaactaggatgggtgtggcatcttgaagcatgacgaaaattttggggagagcaacatcatttccatgtctctgagtggaaccagctttttaaatttttggagaaaaaccaaaagttattggagataattactaggaagtttcatttctttgttggtcctcccgagaagcaaagcaaagatagaaataccaattcactcgaaggtgaaagtttcttcaaagacgtctatttccatatgagacatatacctgcagacacaaagcgatttttggagatctgtggatcatattctttacttgatggtttcgaaatcatcctcaagcattgtcatcatctgtctttgattgataatagccttataaaatgcttatcagagcttggtgaggctaatgtgcggtcaatgagaggctgttggatagaaaaatgctcacaaatgaaaaacattttttcagtaaaagaggaaggcagcagaatgtggagaaatttggagattctttggatctcaaatgttccaagcttgaccaatgtatactacgggagtcaccaaactacgagccttgagaacctaaagcacttgtatattgactgttgtccaatgatacaacatgttttcaacacttcccagctgccaaaaaatcttgaaaccattcatgtaaaattttgtgacaatttgaaaacattgtttgaatgcaaaacagaagcagggccatgtacattgaagaagtctctcagcgtgcggctgttcgaactgccggaatgtacaagccttgggatacagtttcagccacttgataaactgattgtactcaatgagaagtgtcctaaattcaagctggaatcatccatttctgccaatggtgatctgagttaagctattattatcattgttgtttcttaatttattaaaaaatttactatgtcatatttattttttcaataaaagtatttctttagctattcacatctgcataagcagagagtcgtttctagtgaaaatgtatctcacacgaacaaagtatttgttatgttcatacaaaaaaatacaaaaaagaaagtatttgtttggtaggaaagatggagagtaagatgcaaaaagaggatagagagtaggagagatggagagggataattgctattaattgtgttgtttgttattagatgtaaagttgga

SEQ ID NO: 79405 - DNA, 2032 bp, Cannabis sativa
tactctatttttcaggaattcatgtggggttttcccaccatgcaggaagtaccactactagacagtcctcttcattagatgaaacaatatcattcctcaaagaaagtaatgtgtctccatctcagattcggattttcttgacagattacaagcttttaccaactttttccaacaatggtgtctctgttgatctctacttcagtcacaaccagcttcagaatctaatcaatgtctcttggctaaaaacccatgtagtatctcttctccctaatgtaaacattaaaagcattgtagcaattacaagaagacaaaatgaactttctacagttctgtctgatctcaaattggtacactcaatccttaaaagctttaatcttgacaatagagttaaggtctctgctgcattccctttctcattcttcaagaatctgagtaatgaacaagaaaaagagctgagtagaatcatcagttacataaaggaaaagaggtcttatatcattgttgaagcaaccatggatgaagaagagttgtttattgaatcattaattcaaaaggctaactctgttacttcttcaacttcaaatcttcttaatgatgttccaatggttttaaccataaagagcactgttcttctcagttcaaaagaagtaactgaattcagtgacaaagtctccaaatgcttattacaaaacaatactcgaattagagataatgttattgggttatatacagagttactaactaaagcagaagattttgaagtgaaagaactcagaagagaaaaagaacagatttttcatactttttcccggagacaactcctcactactccgatcaaactcgacccacaaacacctttacacgacacaatctttcccaatactccgaccatagtaactgttccttcttcaaacccagtaaccataaccccagtaagtccattagatacgcctgtaccgttccctttaaccactccggtcaatgttccggtcacatacccatcaaacactccggcacctatcacagttcccggagcacaacccgttactaatccagtcacaacctatccggcaccggcgggagcagttccaacgacgactccaccttcagcgccaacaggaaactctccggcaggatcgggtcaggcctggtgtatagcaaaaagtgggtcgtcggagacggcacttcaatcggcattggactacgcttgcggcagtggagccgattgttctcagatccagcaaagtggggcttgttataaccctaatacgcttcagaaccacgcctcgttcgccttcaatagttattatcagaagaatccggcgccgacaagctgcgattttggaggcactgcaacattagttaacgcaaacccaagtgagatttaatttcatatgatcgatttgtagttttttcaaatttgtagagttcgaaatctgatctgggttttttcaggtactggctcgtgtgtctacccaacatcttcttcatcatcatcgtcatcatcttcaacaccagcttcaccgtcccctgtaactccggcaactccaactcaaacgccaccaaccctaactccctcttctccaatgcaaggaactacaaccccatcaactccaacaactccaacggtgacgaatccagcggctggaacaccatcgccatcatggggagtcgcacctgggtaagtacaaaaactaaagtagagacctttttctaaagtgtcatcttttttgggtcaatgagaattaacccttttcattttctttagctctggttctactccgccgacagtgttgaatagcagcaccggaactaccccagatttcgggttggatagcccacctgggttcaacacttctacatccaaagctggtgatttgagaagaccctttattgggttcatatttctattactaggaacattgttatggtaatatagaaaacaaatgataaagcttctccttattcaatcaacggtcaggatctcatcaaagaaaatcaagagctttttgtatagatcaagatcatatca

SEQ ID NO: 79406 - DNA, 2892 bp, Cannabis sativa
aaaaaataagtagcaataataatattgataataataataataattctgtaacggatttattaagaaaaaaaaagcaatgttctctgttccaacttatcatgccttcagtgtttatgtcttgcattctttgttctttttaatccttccctttcctgtgctattataaactggagttataagtttctccaaggtcttatactctggcatgtggtatgtgagcaatttgcaatcgagtcgtccacgaaaagaagcagcttatttattctaatgcatgcaatgaaattggtccaaagaatacatcacatgaaggttcagcttattcaattacaaatacattgagcagggtacttcaagtcggcttgatcaattactggtcattaattaaaatattaagttatctttaccaatgattctaataaagaacgatagagcatgcaactagagtgagcataattgactggtaaatcactgagttgggcagtctacccttatcctttcttaaaaagatggcttcgtaaattggcaggttgacgaaaaccagcagaccagaaagaacgacctgcagtgcaaatgggttcatatacaaactctgttgagtgaagattaacttcttcaatccccagataaaacccaaggcattaagcaatgcaagtgttgtcaagatggtaaacattggtgaagtaataccgaactccattagctcttgcttgtatctctcagaaacatcgtcatcagctacctttgcagttatgatgaaggcttcatcagtgaaccccaataactttagcatgtggtccaagacagtaaagaaataggaagttgtcctgttaaacagccacattctttgattgttcaaccattcccggtatgttcctccacacatcagaaattctccaaggctgtaccctcggttgcctaagaagacatagagaaatggtgcaacccatatgctggagatctgccatgacaaggtactatttattttgatgcattattctacttaagaaatcataagataacaatttacctgaggaaataaggagattcctttgagtagacagagtgatggcacagtgacataatagagtgaagcaaaggagtttagggaccatagcaagtagactaagtatgaaactcgaagtcctaggggaatctttttgtagccataggtcatgggacaatactttgagagaaagatttgaagacatccttcagcccatctcttgtgctgcacaagtgtttgcagcagtgttgtaggagcagctcctagaaaggcctttttctctggattataataaactgatctccatcctctacactgtatcacaagtcctgttaaaacgtcttccaccaaacacccatacatcacacccatctgcatatcagtataatgtaagcacaaatattaatagcagaatataattaccactcatactgattttgccaccgtacgttattttcaactaatcagaaattgttaaagaaaaacttattattcgactcttgaagaggagaatataagtgcaacctcttttccccactgagtgttctcttcgaaagtacaactggcaagaactttggttgtttcttcaagagcttctgcactaattccctcatcttcattctttcttttccagtctagtattactttactcgcttcgttgtatttcttaccagaaagagattcccttctgtgaaagcacccagtgccaatatagcaaggacctccactagtgtcgaatcctcgaagctcaacctagggatcatcatgcatggtcttatcaaatcaagagtactaacttggaaccaaaaatagaaagggtttgtttgtactaatatagtaagtacaaacaagactaacctccattataactctcaaggaactactgtaaatatcatgctgggtgaggttctcaaatgcctgcggaaactgaacgaaggcaatctcgtggcccttctctttatccagaaagaagcacattgcatctttcactgatttagagtggtttgaatacatgtcgcagtctaagttgaggattatgggagcattgctaatgtttgccgatactcttatctagaaaagaaaattcagctcttagctagctattacattgattaaaagaaggaactgattaattatagcttaagtattattatataaccagtgagttcatcgcccctgctttgaagttatggtggtattggggtctcttttcacgtgccaaatatactaaagttggcaaaggatgtccatcaatgtccatagcctcggggtctcttccatcgataagaatctgtacgatgcatgtatgattaagatcctgattctctactattgacaagtatagcattaatatcatgattggaattataacggtagtaggatagtaatacttgaataatggtctgatgatcacgtttgcttaagacatagtcccactcacgaaatcccttgtgtcccctacgtatcgattctgaaatttgaccagcttttgtggcactttcaatccttgtcttcatgtcctcatatagtctctataaaatgaggaaaatataggaggaaattaattttcaaatataatcatgcatactcaatgagggagctaggggccggagattaaatgggtcattatttgtgtatactctgtttttattaaaaatttgaaatctctctcttttatttatttatttttttatgctaaaaatctttcttacttagattgttatatatatgaaagtaagccactaaggctagtttagtggtgaaggagggatgggaaaaagggagaggtcatgggttcgaacctaggaccttgaagctattaagctattaaatgattgtaaaataccattacgctacaccccctatttatatgaaagtgaaaatataac

SEQ ID NO: 79407 - DNA, 4387 bp, Cannabis sativa
taaactactcacaaactcacatgccaatgacaataagttttgacaaaatgtgtgtagttgagttttatttctcttgggatgctcgttgcatgaaacttgtcttcaaccttggggtgggtagagctcgaaatgcaatcaaaatttacagttgtgcaacttttactaacatgtagtgtagagcgatgacagctcatcgatggcttaacagtacatgtagagaaagagagaaaaataaaagaaagaaaagttaactttcgatcatgaaacaacgatgaattactttaaaatgtgataaagcttcgatataaagattgggtatatcatttttgtatatagtctagctatagtttcatataaaaagattaataaatgtgttatatattgtttttctttctttcttttgtatgtataccttaacaagttatttaatgacttgggcctataggggtcctacatattggggattggcctatagagccatctttgtttagtttgactagatgacccacttatacccaatgacattcatgtttaaatcataaggaacatgtgtccatgttcttgctttatgcagagctcccaactctgtgttccttgcaccgttccagtggggattggctaatgcagccttgagtgactttagttcagtgggtagcatagattctggcaaaggatgcttggtggcaatgtatgacttaggttttgagatgttcctttgtgatctggtgctcatgttgtgttttttagttcttgatatgacaaatcttggtttattttcaagagttggatgatgttatggctgatttggaggtgttgtactgctgttgttgagattttcagtgtgagtaatggtttgtgtttgactagagggttgatgtacttggtttttagttgtaagtaatgaaggtcatggtaatggtggatatgtagtaggaggtgttggttgcacaacagtacaagagtgagtttgggtgggtatgctagaggaagtggggtctaagattgtgtttgaaactagattgggaggaaaagcaggttgtgtttgctcattgacagttgaaccaaaagcaccagtgaaattaacacaagtattaattggaggttgagtaaatggggaagtggaaaacacaacaaatggaaaatagtgggattacttgtgtgtatctgaggaatagatgaagttgtggatgctggaaatgtgttctcatcaaacaccacattttgagcaataaacaacctcccttatgagttttcacaaagataacctcccttatgcattgttgagttttgaactccattttgtgcctgttgtagggccttaagtgagggtaacatgcacatccaaatggcttgagtatggtgtaatctgggatttatccaagcaaacactcaatttgagatttctattttaaaattagagttggtaacctgtttatcaggaacactatagtgtgaaattcatgccaccaataggtaaaatctaaacaagattgagcaagaataatgaggcccatttttgttatgtgtctatatttacgttcttctcttccattttgctcacttgttttggggcaagaatgttgaaaatgtatgccttggtcagtcaagatcttagcaaaggtacaagactcaccaccccaattagcttggactctcttgataggtaagttgaactatttcttcagccatgcttttgaacttaatgaacatttcaaaagcttgggatttggtaaccaaagggtaaatgcaggtaaatcgactataatcatcaagaaagtgaacataataactatatctatatttggatttaatgtgagagggtctccacatgtctgtgtgtatgagttccaatgattggctggctagtggagttcatcggattcaagggagtagtggtagcctgaggaaggaccgattgagttgttggagctttgggattggggatcgaaccgatggaaatagactccattgataacacttgtcaaagacgactgctacatgtcaatgtttcagagtatgaaaatagagtaaggaagagaaagagagtattcaatcaacaaagctcacttttattattatagtaaactaactttactaatagtatttacaaaagtgccacttagtattctaatcttgaaagtaggttctacattgggcacaaaacctgcacaatagctctcacacagtttaatttaatgttggtcgtcttatttttctttctttcttagattcttattataggtcaccttggtggaacttgacttctaaattaactaaactactcacaaactcacatgcgaatgacaataagttttagcaaaatgtgtgtggttatgttttatttctcttgggatgctcgtcgcatggtacttgtcttcgacctcggggtgggtgatcactagaaaatgcagtcaaaatttacagttgtgcgacttttactaacgtgtgtagagcgatgacaagctcatcgatggctgaacagtacatgaagagaaaaataaaagaaagaaaagttgactttcgatcatgaaacaaggataaattactttaaatatgataaaacttcgatataaagattgagtatatcatttttgtacatagtctagctatagtttcatataaaaagcttaataaatgtgttatatattgtttttctttcttttgtatgtataccttaacaagttatttaatgacttgggcctataggggtcctacatattgggggcaaggttacttgaataaaaccacacatacacattatacgtatgtttatatatatattgtaaagcacacatgtgaatgcttgcatcatacatgactcaatcctcccctaagcagccacccataaaaaattgttccttgacattgtgacaaatacaactaccaaatgtcatcaattcttctatcaaagaaagaaaacaaaagctaaaaaggttatacatttcttttgggtgtgtgctatgctcaattgcacagagctgcatacttacattacagtgctcactgggctccacattttatctatccaattctctcaactcaattatccttgcacgtgatcaacctttatatatctctatcaaacgagataaagacaaaaagctatatataaataaatatgtactaagcacaccacaccataatactacatatattacagcattatattaatcattttatttcaagtgcgcgcttaatatactacattagattaatattgttacgggttgtaattagttaacaatttctcacataaaattgtaccaaaattccatgcaactattgaagtcaaccatttccacattatgttttttcttcttcacaaactttgaggtgatgagtacactttgcaactttcctcggtctattttgttgcgtgtatctcattttagaatatcaagttgagacacttggctaataacattggtacccacaagtgtttaattttctttttgtattttcttttccttttcctttttataatctttctcatcaaaagctcaaaggtacattatacataatgtccacccacttaaggtgctcataaagctatagctagttacaacacatcttactagctatgacaaaaacaataatgccattctacatataggttttataaaactaaacttttttgttggtagacccttcattttggatcttcattcgtgcttaattaattaaacatttttttctttcttacttaatcctcacattgctaaactacctaatttggtaagcttatttcatcaagatcatctagtgataagaaaacttcgtctaaacacgaaagctctgttccgtcatcatcttcatcacgttcataaactcgacaaagtacccatttgctataatcctgcaaaaaaaaataaaaaattcacaccaagaaattaatgttataatttaaacttaattataaaaaatgtgcacataaaaattattagttagtgggttttttattacttactattttgttagatgatcttcttttggaggatgatctagtggaagaagtagaagcagaagcagaatctgagagatgaaactcgtgcattatccaattagttttaatggctggactactagaattattattattattattaggaagatctccaacgtagaagacaaagtacttttttgtaccaactttcttgtaagtagtgttattgttcactgattcttctatccctaaagccttccaatacccatttctcgtaaccctattttgagtctttctgctatagaagtaccacttgttgtcctcacccaaagctttacctgcatatatacatatactatattaaacctataaatatatggtatatagagtttttattcaattactaaaattaaccgatatatatattcatattcttaccatcga

SEQ ID NO: 79408 - DNA, 2475 bp, Cannabis sativa
gtatattatgcaagtatattcatagagtaatataaatatgtacctgaatttgctcttgaataagcttgatataaagggaagcctcttgaagaactgaggcagtgtcagtctacaatattaattcaatttagattattaaatttattcatcttctcataaatatatattatgattttcaacaacatactgagattcaaattagtaaacatgaaaaaaaatggtacaaataccttgccatagggggaaaccagcttttgaagggcagtgattttgtcactgagcttttggctcctctttgtaggcatccccaactgtaaattaaatattgcaaaatcccatttagtgctctgtttcaaatggccatatgtataaataattgttttttttttatgtctcattctccaagcttattaagcttgataaaggattatcacataaatcatattattattaatattaactcaccttgtgctcttgcattgcttcttggtcatttcttgtcactttgtttcttttatttcttttgtcactatgcaactcccatctgttacttctgggaaagtgtatggcattatcttcagttggacgtttccttctcctttcaatagtatgaaaatccttcaaaaaaaaattagggatgccattcattcattggctaggttataaaaagaaaaactaagtggaggaatagagattaacatataccacttcaatttgtggagccaaaatcttcttgccatgatcagagctattatcaatgacatcacagctcaaaatgttggatggaaaagctatagaagaacagtatgttggtcaaaatagtatgtattagattgaattttaagttttctgaaaagggtggttaacaaagacagaaaagataagaaataaaaaaaaaatgtttaaaccttgttgaggataggtgagcagagatgatggttgaaagggaaaggaatagtcttcaagtcttgtgtgattgtaattgtctaagcttggaatagtatccatgcaaaacccaaaactgttttgaggattaatgtcactaaacatctggagatcataattaaagttacctgaaacatatcaaaaacaaacaaaaaaaaaaaaaatcattatcgaagctataactaaacactaaaaagaatgaaaaatgctccaatactcccaaatgggtcattaccaaaatcataatgtgtggttacagatggaagaattgcgtttttcatttttgtaaaaattttccaaatctctgcctccaaacccctgacagtggcctaatataatagtcttgcacaaagagaagaagtcttcaccagaaaatcaaagcagaagctttggtctttcctcaagctaagttcaagatgtaatcaaacaagttatggattaatactactattatttttgtgtctgtaaataggggtttgcctttttttccaaagtaacattgagtataataaactgatgttttccttttaagagagttctcaagtcacagaccatttaatattattacattaaaggaatatataaaacctctgaggtgactcacaagtcagaagaaggcttataattaatattgataggacaaggacggctaattagcccaaccaaaccttattccaatccaatacttttgtatttgttcaattaatactatgatataatctgtttcatttcactttcactctaatttgacttgctttgctgatgcatattattattattattattattatacattggaaaaggatttatttatttttgttatgaggacttaattacgaattaaaatactagtatttgttcagatgagtccatttattgaaagtcattgttgtagctggtatgctagattagatatattcattttgtttataggttgtgtactaaatagctacaaacaaactataatcacaaaaagggtaacatacacctcatatttcattactaggctaagcctaattataagttgattaaattaagatataattaaaactgatgtaggtgtgttgtttaaatgaataatgatcacatttattcacatttggcattgatttaatcgtatagtctttctaaattaagagtggtacacccttcttagtaatatgaagggaaagaaaagaaaaggtaatgaagttttaataatcaaaaatagaaatttagtaaggcaaaatacatatgtatgggaagggatatccaggattgctatttgtgtttgtgggtcatatccgtgtcgtatcaaaacttattataaatttataaatatacgattgacttacatattacccgtttaataactatgccaaaaaaataaaaccttaacacaaccacactaaaagaaaagtgatggtcaagaaaagtagtacgtagtaaaaaaggtaaatactattttggatcatgtgttttacaaaagttaccaattagaccctctattttgttaaatgataaaatattggaccctatattttccaaaat

SEQ ID NO: 79409 - DNA, 1620 bp, Cannabis sativa
aaaaaaaaaaaaccccaccaaaagttggttggtttcaccgaaaaggaaatccaaccagggtttaagaaaaaccccatgaaaatcaatcgaaaacctaaacccagattcaaaaccatacaaaaagaaagaaactttggtcttccaatccaatccattgataactatcatcatcattttcattacccatcatcaaaaatcttacctttccattttcttcaacaacaacaagacaaaaggatatgtttatcttaaaaccccagaacaccaagtcaaacacagagaatatttgtctggcttttagctcagctcagctttggttttatttatgaatatatttgtgttgagcacactctctactctcactgtttccgtttctcctcttgattaagttaaacccaagtgaagtgacaacgtatgtactatatgtgtgtgtgtgtgtaagcgggaaaattaggcttaggaggccgtttgataggcttggaaacctaacctaagcttcggataaaagaatcttcaaagaaacgaggacattaacaagtgacaacattagtccaaaccgttgaccaaacctgactccgaaccttaaatttttgttcagagaaacttcggaaacagagtggcataatggtaaattaatggtggggacattacaccctcttcaatcttgccctccaagctatatatggaacttgttgtggagactacttgaattaccatttttgtccttgtttgatgttgttaattacgttcgtgcacagctgacgtggcagtggatatctctgtcggctcaaaagtgacatttagttattcaaattgtcgtttacgtgttcttttttgtttggattatttagttaaaatgtttgtttaaagacaacaatgtcgttgtagtatagtggtaagtattcccgcctgtcacgcgggtgacccgggttcgatccccggcaacggcgaatttttgttttaagacctttttgtagcaaattcaaagattgaactagggccaagtgtaaagagtttcttttttaagcacaaatataaagaattcagttcagtatatcaaatttgttttgattttgatttaattttttgtttgagagaaatttattaaaatgaattgctataggatgatattgatggaggcatattccaaagcgaaatgccatggtccaagaaaattcatatgcccattgcccctttatgggtacattaatcaaattttaagaaaaaataataaataatataacaatatattattaattaattgaagaataaaaatataaatacaaattattagatgtaaaatgagatttccctctacttaaaagatgtttgaagattagttagcaactacttcttctcaggatataatgattatcgagtaaataaatatattacttttattactatagtaattttgaatcaatagtttctatcaccttaagacttacaaaaagacaaagaataagaagataagagagctttttaatgagtctctatttgttggtgtattttgaaacctacttttataggattttgtatggggtagaatactatgagtcgtttagttgggaggaatgaaaatatagtaataggaatgggaatgcgaatatgaataggaat

SEQ ID NO: 79410 - DNA, 1881 bp, Cannabis sativa
taaatggtatatgtattttttgttatatggtatatcatgttttttaaataatatttaagttctattttctattatacttttgttgacatgatatataattttattaatatcttatatatatattattgtgtagtatatgctttttgttatatggtatataaattttattgggtagtatattattttattttagatcatgtttaatttttattttatatataaaggtaatatataattttgtaagtatgatataattgttttatggttgtatataatatggtatatacaattttttttaataatactatattattttgttttattttttattgtaagtatatatgtactttttgttgtatggtatatggcttttgttgtttattgtatatcatttatctaagatgatatttagtttttattttattatatatataaattttttggtatgtatacatattttaatagcggtatatataatttttttaacatgatatatatttttttgagtattttaatttagtattattataattttattattacggcatattaatttttagtgatacgatatatcaaatattgttatatttgtttaatgatttaatatatttattcatttttgttacaatataataatatataatactaaaaaaattatataacttaatataattattatatatatttttttaaaaaaataatatgtagtaaatgtaattttataatttttattagctaatttattatatttggcaattttctttatttttttaaaaaaatgaaatatttactaacttagttttcaaatttaggatcattctacagcttagtccaattttatatattaatattgggtacttgctaaagtaattattgaatttatgagcagtgaaaattttattatagtacttatacctcaaatatccattcttattatttaggatgaatagaatttattttattttatataaaaaaagaaattttatttgtaccctttataagtattaaaaaataattaatttttataaattaattttaatatgttttttggaatttttttatcgcattattttcttttaatatcaatagttactactactttatgttcacattttttttaaatcatctattatttctttgtttttaataaaattttatataattttttatttaaatttttttgtcttaatatttaaaaatattttatttttattttatcagtatatttttcaaaaaaataaaattattaaaataaaacttccaaaaaaattagaatttctaatggattttaattaagaaagtctcaaagattcagagtagtataatttccttattttaatataattttttactatcttattctactcagtaattaaagagaatccgtacagtattttaacatgattattatttgtttatatgtatcttcctttctttgaataactgatctaagcagtgctagcaagtttaaaattttattattatcggataattcttttccattaaaaaagatggaacatttggagtggttacaaggactaggaatctagaactttttttttttttttttgaacataaggaatctagaactttatagcctttattcttcttcttctttttttttttttttttgataattcttttatagcctttattcaaagtaaggtccgaggtactacccattttgtagcgttaattaattgcattaaagttcaagttgctagcaaagttgattttgagaaatgttcaaagatattctctcgattaaataattattagcgtaattaaatattaaattttagaaatttttacatgaaaaatccattttacacaatttattacaaaattactcacacacgcctatgactacatttttactta

SEQ ID NO: 79411 - DNA, 1864 bp, Cannabis sativa
tgtttgaataaaaaatgaaaagtccttttggattggaagaaggtaggatttgtaacttctcccaaaattacttttgagaatctatttgtaaaattaaaataatttacataatttttaatttactgacaaaaaatatttttttcaatgatatccaaatgctttaaaaaattctttttattagttatttttttttttcatactatagctattcaaacggtaaaaataagtcaacaattatacttatttattataagcataagtagaaacttagtcaatctgaatatttcatatcccatcatagataataatagcaatagcagcggtgctgacttggtaattttttctgaggaaaatatgtatatcattgatttatttgacaaaagaatgaagttatatattccactgttgcaaagtttcaattctaatgtttccttcttttaaaacagtcgctttctaatggagtgcatgaaagagttctatatgacatatgacgatactcgcttgagatggaatggggcggaacttttgactagagttgcaactaaattcttagaaagggagagaagtcccattaaagagctagagttgagagtgcatcattctccaattttcttccctattggctctcagaatataacaaggtaatttattttactttatttcttcaaaattacatttttttaatgatgaatgaattgaatgcgtaattaaacagtggttattgatcaatttttttttgcgtgtagtgtaatggtattttacaatcagttaatagcttaatagcttcaaggttttaggttcaaacccatgacctctctctttttcccatccctccctcaccactaagctagccttagttattgatcaattttagtggtgaaactattcaagtacctaacagtgctcgatattagtccagaataattactttcaactgcttgatatgcttgatgattatgccgtttaaaataggtcaccatttgtgactgactattaaggtagctgacaaatatttgtataatttaacttttacataactatttatttcctttttcctttaaattatctttttctttgatttccaatcatctctggtttaaggaatgtaacacgtttgtgcatgggtatatgtgtgttgtggtgccttttttctctcctttcccttttacttctctatttcttttttctctcctttccttaattctctatttcagcagctcattgtgtctgtttcttgtattcatttttaatcttctatgatttaatcattttgagctgataacagatacttcactgcaccgacaacagagactgaaaaatttgaacagaattctctgtttaaaaagtttttggaagagtcaatgacatttcacttatggaatagcttaacatctgctctcattccagaacctgatagccttgtggcaaggcttattgatcactactgtatccggtgctctgatgtgttgtaaattcactttatagttgaccatttttctcctctccaggtcttaacagaaggtattaaactgccaaaattaccaaataagaatttctctaacatataaagaaaagaaaaagttcaggcattactctgttttgatgagccaaacaccagagttggcgacacatttaggtcttgtactgttgtagttctgtatctgtgtatgttcacccccataaagtagagctttcgtctgtacgttgcttaaaattgtctatacgtaggaagatgtctcttagcccaaattgttggaggttagtgttgccattggacatgtctaactggttgagggatgggaaatatcccaagtcctcatcccaaaaaacagttgcagaagtgggtcttgggatatttcccatc

SEQ ID NO: 79412 - DNA, 5042 bp, Cannabis sativa
acagtaagtggcaactacttcacattatgtatgaggaggaagatagaatttcgaaactacctgattcagtcatcgtacatattctgtcctttcttccaactgaggatgtcgtttcgacttgcctaatttcagaaagttggaggttcatgtggtattgtgtccccaaaatctctttttccgattctaatcttgcaaatgatccaataaagttttacacttatgtcgataactatttggaacaccgcaagagaggcatgaattttatccgcgattcagccataactagttttaggcttcagatgcattatacttatgaaagaatatttgattgtattgaacttgaattcggtggaattggattctagttactcgtttagctttccatctttgaaagcattgtcattggcttatgttaggcttggagataatgtaatagagaagatattgatgggttcctcttcccttgagagcttagacttgcatttatgttgtttgactagtgattctcagctccgcatcaacatacaacatagtttaagcctcaagtttttgtatattagactcactaaggatttggtggagcaaatcgaactcataaatcttgaatatttgatcctagtggatgtttcctttcacaagttaaaagtctctgcatgcaaggcaattagaattctccacttaacttattgttgggatatgaatgagtcatcatcattagaatatttcatttctagccttcctcttcttgaagaattcactctgtccaggcggcgtaactgtaagttaaagcacattgaaatctcgaatcaacacttggaaaagctcaatgtacataacccttatgatggggaattgaatgttatatttaaatcaactccgaaattaacgacagttttttatggtggttgcatcaaattgagtgtgtcaatggagtcttccaatttgttgtttggaacatttgtgattcttgagaggcaacagaactatgacaccgattggtttgtcaatttcatgaattttcttttgaatctcaagtgttcttggagaagcatagacattcatgtgaaatcagatgaggtatgcatgattttttcagtgttatttaaagtttacattattactgtatatatgacactaatacattacattcctttaattctatatatgaaggctcttctctttccagaaaaattgaagagggtatgtcgttcacctttggttgactggaaaaatcttacattttttcctaaatgtgaaccggagagggaatcaaacttgaaagaggctctgcaatggatttctcctactttatctttgaagaaaccgtgtcatttttaccaaattacttttgattcttttgaaaacttgaaagatgtgtaatattttcaatgccttgttacttggctggttagaaattcaatattatattcagtggcttcattaggaaaggaaaggtgatgaaaaattggtttgtattctaaagtgactttctgttattaaatgaagttagttaattctttttttgttgatattattagtaattgagcaacttttttccgcccctggcaattgaaaataggttctattggagaaagagagagtggggacttaatagtgaataccatagaatttccttagtaagaagaaagtatgtggaggattaatgcaaatgcgtttggcttttgaaaatgagtttatttatttattttttaatggtaaatatttaagattaatttttgattacaaataaatatttacttttattttttatgataataatagttaagttataaccaatcaaaaatttgacagataatttattaatttagaaattattacagtgaaaactcaaacttaaaaagagaaaaaacaatcctaaactatcagagagagacacaccacaatggcccgaccctctcctcccaacatttttctttctcggctcctaggttgacgaccgacctggcttccctccacaatggtagtgtaaattaagctgcaaattagttaggtgtctataaaaaattaatatcatatatataattcaatattatattatacaatacagtgtaccaaacaaacacttaaataataataataattcgagttggtggagggtggtctaatgcagaatacaaaccaaacccccgatgatgttgttcgggttggacctatgagttctttttcacatggtctggttgagcgggtcgggtcaaggcagattaacctaatccaagttaaacccggacaaaatattcaattctcttctagtttgtgaattaaagtgcaaaatcaagtatctgtttatttaagttttgccgccaaacataaatccatttgtattatttctaattgtctaattctttctcactgtttcgcttcacagaagaaaatcttctactccacctaacaataacaagtaagtatcacccattgtcacctttttctttcttaattatgattcttttggttacaattacaaatgcatttctttaatccattcattcatcaataccggtaatgtaaaattttcttttaatgtggattacaaaaaagaaacatttttcttgatttcttcaataattactaattctattttgtcttaattttatagattttgtttcctgtaatcgtattcaaatgatttcacaagaaatttgcacattctttgccttctttcactcttcaatgcatattttatgagtgattctttcactcttctctctttcctgttagttgttatggctgaaaaaagagttaagacgacattgatggtggatgaggaagaagacagactttcgaaactacctgattcactcatcattcatattctctcatttctttcaactatggatgccgtttcgacttgcctagtttcagatcgttggaagctcatgtggtattctgtccccaaactctctttttctgattttgattggccaaataatccgaaaaagctttacagttatgttaataattatttggaacaccgcaagagaggcatgaattttatccgcgattcagccataactagttttaggcttcacattcattatttggaacaccgcaagagaggcatgaatttatccaaggtttcccacttggataaatggttagctttcatagctgagatgaatgtcaaggaaatagatctttgcgtgaacagaacagtgattaacaatattggttttcactactattccttgcctaaaacactagcagtcaactcaagtcatttgactatattgaacttgacttcggtggagttggattctagttactcgtttagctttccatctttgaaaacattgtcattgacttatgttaggcttggagataatgtagtagagaagatattgatgggttcctcttcccttgagaggttgcggttgcatttttgttatttgtctagtgatcctcagctccgcatcaaaatacaacatagtttaagcctcaagtttttggatattatactccgtaaggatttggtggagcaaatcgatctcataaatcttgaatctttgttcctaacaggtgtttcctttgaaaagataaaagtctctgcatgcaaggcaattagaattctcaagttagtaataaatcttgaatcatcatttgaacatctcatttctaatcttcctcttcttgaagaattcacttttaccaagaggcgtaaatgtaagttaaagcacattaaaatctcgaatcaacacttggaaaagctctttgtacataacccttataatgaagaattgaatgttatacttaaatcaactccgaaattaacgacagttgtttatactggttgcatcaaattgagtgtgtcaatggagtcttccaatttgttgtttggaacatttgtgattcttgtggcgcaagagaactatgacaccgattggtttgtcaatttcatgaattttcttttgaatctcaagtgttcttggagaagcatagatattcatgttaaatcagataaggtacgtttattacttgtcttatttaatttatttagtattatttaaagtttatattattaatgtatacttgacactaatacattacatttctttaattctatacatgaaggctcttttctttccagagaagttgaaaagggtatgtcgttcacctttggttgactggaaaaatcttacattttttactgaattggaaccggagagggaatcaaacttaaaagatgctctgcaatggatttctcctacattatctttgaagaaagggcgtcattattaccaacatgcttttaaagtttttgaaaagtataaagatgagttcttgtgattatattatattttcaatgtcttgttacttggctgactaaaaattcaatattatattcagtcgcctcattaggaaaggtgatgaaaaattagtttgtcaaatgctggacatttcttagctgtataatataagattctaaagtgactttctgctattaattgaagttagataattcttttattgttgatattattagtaactcaaaaggggcatccattaaaaacttttgaatgtccttttgtgattgtatttacttcatagctagttgaataagtacatataaggactaataaatttgctggttacaaaacttgatctcacaccaatatttctgtcgaggattgcttcaatgcccaatctctcattgtaacaagttatctatggtttcatgatgttttattgtgtgtattccaagttcaatggcaactataattcacctgttctgttcatgttgttttataatatgttcaaaactcaaaacaggaccataccagaccaaccaaccaaccaaccaagactcataattaccatgtgaatttatgttttcttatttcatctgaatttgaagttccttaattctaacagcacaatcaactagtaacatgaaaagctagaaaaaaaatcacaaacacaaccaattgcaaagaagataccagagaagtctttgaaccaaaggacaacatattagaatattttatatatggaagttattttctaattaaggaaatgattttctattt

SEQ ID NO: 79413 - DNA, 1298 bp, Cannabis sativa
aagagattttatatagcattgaatcaggtgcggatgggttgtttaagagaaagaagaaaatgggtcccactcccaccccaaaaaacttagtgtatattagagagagagagagagagagagcacatgtgatcacatgattttcttgaacctaacaacacccatgtgcctctccacaaaccccacccccacttccaattccatctccttcctacgatctacatcaacacccttcgcatgcttgccacctgtcacatctcttgaccccacctagagccccacaaaacatcaaataaataatctccctctttatattttcagcttttaatatacaacaacaacaacaacaactattgacccccaaccccatgctatgtatctatatagttaactatttatctaattatatgcacttgtgatttactacttctactaccttgtaatttagaaagaaaaaaactagatgtgtacaagtaaatttaaagcacttcattaattaagtagggagatgattttggtctgtgattgtactttcacgaaatatgtattccgtgatatacgataatcgttaggtgagatagttatttgatctgagggctgaaattgatctagaggtaattaagattaaaaaatagtaacatactctgacactcatctaatgtaccctgagactcatttaatgtattacgaaatacatttcgtgaaagtacatcacgagacaaaatctccctaattaagtattatcattatgaatattctaataacacaatttgactagaatatcaccaccattcatggtatttagcatttgaaagaagaagaaaagattatggatggatctcatgacaataggctccaccatgtggactcaactcaacccaataaaatatcaaacacatttattagattgatacattagatatagcttgtgattagattagtttagttgtttaaaaagggatattatgttgattattatcttcacctagtcactaatttgattgtattaaataaataaagcaaattattaagcacatgtgaccccacaccattactataatgttttatttcacaagtagttataaacaattttttataataattattagatgaaatgtatagaattattaaattttactatgatacaacaatcctgataatttttatgataataaaattgctaagtttattgaaaaatatatatattattaaattttactatgatacaacaattctgataatttcttgagtattattaatgtcctttgatcaaatctcaattccatttaaaattataattt

SEQ ID NO: 79414 - DNA, 2016 bp, Cannabis sativa
aaactccaaagtccaaagcatcaaaggaatcagatcaaatccacacccaacaccaactttgttccattctcagccaaactctccttctcgcgctgtcaatggcgacgccctcaatgctctcatcgttcaaatacggagatagtctgagagtggtgggcatctcaatatgcacagccgtagtctgcgaagccatctcttggatcctaatatacagaaccaactcctacaagtccctccgatcctccattgacaaagcctcgaagaagctcgaaaccatgaagactgacactgccaacaagatcaccaccaaaaagtctaaaaccaagaagattgatcgggttgagaccagtctcaaggaatcgagccgcgatctctcgctttttaagttcaaatccggcgccgtcgttgccctcgtcctctttgtcgtctttggcctcctcaattcgttattcgaaggtaaggtcgttgccaaattaccctttaaaccctttggacttgtgatgaagatgagtcatagaggtcttcaaggggacgatcccaccgattgttccatggcgtttttgtatttcctttgttctattagtattcgaaccaatttgcagaagttcttaggatttgcgccaccgagaggcgctggtgctgggttgttccccatgcccgatcccaagaccaattgattacacttcaattattaagcttttaaattattgaatcttaggttttgggatcgtaaacggaacttagtttggtctaattatgggtttttatcatatgaagccaaatttgtttttttttttttctttggcttaagaaactaaaacaactttaatttgatgtggatttatttgattaatgattatttagtctctaaattgcgatgaatcctcagcaatttttttttctaataaatattatttgtttatgtataatatgattagatgaatggatgagctattatctgttctgatttactattatgactatctatgatgtttatggtttggggtttgatgagtggattcagtggaagggcttccattatcttgctttatggtataaagtaacatcattaactgtttctttggtcatcataggagtttcttattaatgatctatattgtattatgtttaacttgggttcttatgcctctaatggtattttggcctttatgtacaaaggcttaaattaattagacttggtgttcattattattactatttcgtgcatgttaagttcgacccaagaagaagtatcgtgggttttacttcttactgtatatcataactttatgattaaattcaacgattacattaagtttgcaatattagaatcttaactattctgtatttgagcattttagctcctactgctgcactgtgtatcttcattcatatcttccatgacatgttagtttgctataaccaatcatatttattttagatgtgatcaacttctgtaaaaaacagtgaagtacagcattcattgacttaagattttggtgcatattttggttgtgcatatcatgctcatgtattgccatgaatgattgaaacgaacaaaatgtgttaaattctatatcaagaagttttgtataccattttaaaaagtaaaaaagctacctaaatttgtgttgctgtgaggattgtctctgttctttcttgtttttcttcttgaagttgtcttgcatttacttcttgaagctacattaaaaaaaaaaaaaagctatttcatgttgtaaccacaaaagttaaaaagtttacttatattctttagtgcttcacctattttccgtttcttagtgtgaatcctgatgatcttagcccttatattttaattacatacaatacactaatttgggcaattattcttttattgtattatttacaattaaggttttttctagccaataagcaatggattaggtcaatttttttttcttttttgacgtggtaatcaaaattacacatgattaacaatgtggcaatccacaaagggcggcggtacttcctcgaatc

SEQ ID NO: 79415 - DNA, 3682 bp, Cannabis sativa
ttgttttcttcccagttgacttgcagattagataatatgttattagtgttagcttcttaaaaatcttctgatacttataacctctaatgaagatttcaatttaaaatatttccactcaaatgttgcatattcaacttcaatccagaacgatcaaactttaaggcaatgtacttcaatgtaacgttcttgattttactgtacacacagactgtgcgaaagatgacccagagctaaatgaggaattaagaaaggatataataactttgacccttgaagagctagaattgcataaatctgtagccaatgaaaccttggaacacaccaaggtactggtttcggatgctagaagagcctcttcacactaccagaaagaagcagaaaagtgcaacgcaggagtagaaatttgtgaggaagcaagggagagggctgaatcacaacttatagtagagcgtaacctttcaacattgtgggaggaacgatctcgtaagcttgggtggaaagatagcagaagattatagttaatgttttccttgcaaataccaacttcagctgcaattgtagcttatataatgaatgatttttgtttaccaaattttctatctcagtttgacattctcaaattgatctagaagaagcttggttgttgaatttggtttagtagttatattttttagtataagggcaacatattcgagaagaaacttgatttttcagagtttggtttcttgattcaatcttagaaatcaagggaccactcgcataggtatggtttcttgactttatctttagaagtcaagggaccaccctgaataaagaaacatttgaagatataacttgttaatagaaaccgaagcaaaatgatcttctatagacacaagcaaagaatatttaaatttctctgttgaggcaatctgaacttggggtttcccaacaagcaatttaaaaatgaatcactataaacatttgaagttactatgcacaacaatcaaatacagatcacaattgaaaagaatatcaatctaaagttcataccagaaacaaagaattctattgggtttcaaactgttctaatcagatttttcaatgtcttcatcgtctgcactgtcatcggtgtcagctaaactattgaagaaaccatcaaggtaccaagaacacttttcattccaatcacctctattggcagtagctcgccatttttggtcagctatcatttcaggagagagaccccattcttggagctcttcctctgtatggtggattgctaggctgtattctccaccacttcccaattgcattactcggaaatcacaatttccaaaattgttcagttgctcaaattgctccactgtccatttgaaccacttcatgaagaagactcgtgatgttaagccatgagacacgattataaggttcagctcatgtgaagggtcaaggtgaagcctattcatgtctatgtccctccacagagattcaagaaaacctgaaaatttacgttcaaatggttagtagacacatacaaaacttcaaaaaatcagcacttgggatttcattcatcttcttagactttgctttcacagcagtaattctatagcataatctcaaataacagatgaagcaacgcattatctaacagaccaaaattttaatgcttatgccagatctatgtttctttctctcatatgtctagcctctaattctctatgcattaatgctttcaatgaatatctccaattgggtaccccaaaatgacaaacccaaaatagaaaacaggcaacatataaactcaaaaccaaagaaaaacaacccaaaacagaaaaagagaaagaaagagtaccggcaacgcggtcgaagacgtcagcagcagattcgccttcaggaaatcgatagaagaatctaccgaacttttccctagtctgcttaatggccttcattcgctcctccacctgaaagttcccgaaatcctgttctcttatccgacactcttcgcgaacacctatgatccgtttcttcgagaacgaccggccaacctctcggagcgtggagcgagtgcgctcataaggggagacgtagaagtagacgcgccagttggggcagtcgaggctggtttgggacacaacatctttgaggtgggctccagcggttcgggcctgagccactccctgttgggttaggtggattttgtaatcaggggtggtggtgtatgcagcatcgtcaaggttgccttgagattcgccatggcgcatcaagattatccgttttggtagaatggtcttttggtgaggcgacatttagtttcctttcttctgggtttcctcagtaagacatagatctctctttcaatgaaaaatgtaaagaaatggacaatctttgtttacctcaatatataggcttactttagttacctactttttttttagtgtcttcaactgtttgtttataccatactaatttgaaaatgatatccatgatttgactttttaattattatatatatatatataaaccagtgcatggataacttcagatttatgaggtatatttttagggaaatgctaaaagatataagtatgtttttatgtattaataatgttatttgtacaattaaattatcagttttatataaattaatataataattctaaaacaataattttaatagtattaaaatctttatatttttaatatgtataatattagtctttgcgtgagcgtaaggtgtactcaactcaattcctttgacagtggataacagatcaatgtagcaattgttgttgtggatgcttagctagctttggttttttttttttttttcacttttttagatctttatcgttgtagaagaagtaattgtacggtgacagtggtagtaatcattataagataaaagaattggctgaaattttttgcccacaaagcaagaaaagttttattattttagaggttgaccaattacaattatatgggtgtaatgggcacatcatatagaatcatagataatcattttaataaaagaaatgaagttttctcttttcccattaaatgggtcggcctaacatggtttacgttaaacaaatgcttaattaacatgatataattacaaaaaagacggaatttttaaaagaagaaaaaacagaaagatggtggcttaataattgtcgtttggattctggaatacatccagatgtatctggaatgagatgctatttttgctttcaattatatggattagccattactcctttacacgtctacttttaactaatgaattgaaaggagcgcttgattgagttgagaaccttccaacccttcaaagatgtaatctttctaattaagaaagggcttgattgatttgaaccttcctttccttcaaagatgtgatttttctggcgtatttgacagaaagttggattagaaaaataaaattaacaagatggagatgcggggaatcgaaccccgtgcctctcgcatgcgaagcgagcgctctaccatatgagctacatccccttgctgttaaagcaattaatcaagtactttatatttggatgatgaaatgccacgtcagtcaggatcttgtgggtcccatcttcaggacattttttttttttgacaataagagaacaaatagacatttgttataaatattattaattatgtggatgtccaaatcttttatttattacca

SEQ ID NO: 79416 - DNA, 3763 bp, Cannabis sativa
gtcattcacttcaagataaggataacaattaggcattaacgatttggtaaactaacaacatgattctcctccctattctctcatcttgattaatattcatttgtttattttaagtttccagaattattttattcttttgaaatcgtaaaaagtattaatttgtcaaatagaatcataagtataatttagtagtaattaatcaaattctctgtggttcgaactcacttgcgtgagtttactacttgattgcgtatacttgcgtactatttttaattttcgtaacaactatactatgtagcttgatgaaaatacaaatcgcaattgcactgtaaaaaaatctcaaatcgtattttttgtgcggtgtaatgcggctcgggcgatttgtcaccctagaccctatatggccacactaccaaaagaaagacttcacattctctaaaaacattttcttcttgcgtttcgttttgccaccaaaacgtttcgtataaaaactcaaacacatatatatactactctctctctctctctcctctatccccgtactcggcgacagacacttcggtttaagaactctctccgaacgacgccgttttcgatcctcaactcaggttcgtctcttctcttattcacatttccattcccttcttcttcgtttcagcatttttttttgctcttctagggtttattgttcccaactcctaggttttaactctttcctagggttttggtggattgttttcttgtgcttccgcttaaggtatgtttggatctgaatgctttggtatttcaactgctaatcgtttctttgctgtcgttgcttggcaactttgttaagcaacggttttggaatagatattcatacatatgttcccctgtttcgtttagattcttgttattgacagtatgttagtatctacaatgatatgttagtttgtttcagttgttgtttctgaaaagatttattctttttttgaattaattagggtttagtgtacttggttgtaatttgaagatgatatctattactgaatgaatattgttgctatttgtgaatattgggcttgcttattggatgaatatgatgagctaaagatgtattggagtggttattttgctggggatttatctaaagatatttttttgtgttcttgcagtttgtgcactattcaaaataaagaaattgtacgttaattatgggtgatagtgaaactgttgttgctcatacaacttccatgtcgggatttgtagcagcaggctataatagctccaccggctatgccgatgagagctcaaatgttgcttctgccgatgaaatatctacttccacagcttccaccattgcagctttttctgctgatgatggttctaatgctagcgaaaagaatgattataattctctaatgcaagcatctgaagccactacaggtgttgaagccatggattcatcccaagctactggctatgatacttctgtgaatggaactgctgaaaatggaactgtgacggataacttgggtggagctatggatgctcaacagtacgtggacggtactggtatgtctttttgggaatgttacattataattttgcttcataagtgggattgctgtggttttttatttatttactttttccagctaattgacatctttgagcaagtttgctcttgagcacgtagtactgatatgtaacaatttgttacgatggatatttgttccttttaaggtctctcactatctctgtttgtttgttttttttagttaccttgttttattttgtatttttgtgacccttttaaactggctagattggatattacttttcaagtttaccttcaataattctatgtatgtttaatttcagctatgtcttctgaagaagaaaggttgtggaacattgtgaaggcaaattctttagattttaatgcctggactgctttgattgaagagacagagaaagtaacagaggttaagtccatttcttcttgttgcagctatttaactgaaacaaaataacttagcatttcagaatggaatccacatttaagtaaattgttggtactcgtgttagctttaatcaacttcatacacttgatagcacaattttatattattacctcaatatacaactttgtcagaattatttatgtatttaatctttctagccttagaactttagggttgaagcatggccattttttcttcttcttggactcttctgctagccagaaatataagtaaagttcaatttcttctcttaaaccctcgatatgtacatgatgctcttgtattgcaattggatgatctagtttagtgtttgtatcattcttatgcacataaatttatcattaagatataaatttttcacaaaattcattaatatatataaatatatgataaaatcttcgactcccatgtacttttgatcaaagagctgtctatttaatacaacttcaatcctttcttcgctgttaatagtttctgttattatatatatcttatatccataggtctttggattgaaactgacttattcactcatatctcttgtgcagaacaacatattgaaaatcagaaaagtttatgatgcatttttagcagagtttccattgtgttatggttattggaagaagtatgctgatcatgaggctcacttgggttctattgataaagttgttgaggtttatgagcgagctgttcagggagttacctattcagtcgacatctggctgcattactgcatatttgcaataagcacttatggagacccagaaactgttagaaggtattagaagtctatttactacttattagtactggtcttgcattgggaattcatgagcacatgatgttttcagttgcaagggtctggttcctttctttgttttgtttttgctattctctcctctctttaacaaaacttgtgctgcctttctaacatatttgggtacccctgcaacagtggttcctcacttataaggcgaaaagatttcatgggaatgtgctttttgaattattttttttctaatatgcaaccccttatctacagtgtggtcatcaactttttaggattaagacatttgtttcaattaaattttgttagaccctaatttacatctcttgtctccccttccctgtggttgcttgagtcattagtaattagtcatcaatgcgttatggctgtttttaacattgactccgaagtgcatcttaatgcaatctgctgctgagaagatctcgtccagttagggctaagatggcctctatcactgctccatttctcggacatagtatggttttttttcaggaaggtaatgcagcatttggaagtgtcgtgtgctgttaagagtgaattgttccttcaacattactgccactctctcccttctatggatgtgtttgtatgaactgattgatacttgtttcataattgtgcttcatgttcatatggcttttcaggttttttgagcgagcacttgcttatgttggaacagattacctttccttccctctctgggataagtatattgagtatgaatatatgcagcaggattggagtcaacttgcgatgatttatactagaattttggagaatccaaatcaacaactggaccgctattttaacaggtagcctcttttatttgttcggctctgttctgttactatttattttctccattttcatggatcttgtcattttttttttaatattagtactcatgatttttttgtgttacacttggtaatgatgacagctttaaaga

SEQ ID NO: 79417 - DNA, 3169 bp, Cannabis sativa
aatcagaaaaatttataccattataacatatgattcatttaaaagaattatttttctaatagcttttaattattataaataactttattcgaaatgtgcttttatttttattgtgttatgattaatatttgtgctaatcacaaataaaagaaattttacataaatatattatataatttaatattattcttaaataaatataaaatagtattagactgaattgagattttattcgtaactaaaaattaatttttttaatgtaaaatttaaaaaaaaaaattattaaaaccgcgcgaagcgtgaatctattccctagttatatataatataataaatatttttttataacacatgtatagtatacataataaatatttataaaaataaatacacacataaaaaaactcctaataaaatattgtgattccaatatatgattctaaaattattgtctattatagaatttatgaagggttttttaaaaaaaaattgaatttatgaagtattgattgatattttattttaataaaaaaacttaattttaactttttgcccaaggctctcaaaccgcttgggttggttctgtcttgcggtgtcgtgctaatagtttaaagggcaacctcagcatgaactgcaagcttatttttgtgtcgtgctttcactgaactaatctattttttacaaatgggtcggcctgttttttcatacgagtcgaactcagacttcacttttttatttttatttttacaattaataagttaatcactaaattatatgtattttttttttataattttagttattttaatataattttcaataatactttatatataattaatcattcaaaaaattcattgaatatttattagtatatacataagtattattattattataagaatgtttgtcgatgttccacgggtaaagttactaatgagttagctaggcaatcattaaattcaatatatactttaaataattattaattcactattacacaaaaaaaaaaatgtattcttgtcagtgaaaatgttgaatatttttaggataacgctaatgaaaatgagcgttttttttaaaaatcgacgctataaatcgaccctaagcattagcatcggtaataaaccgacgctaaagggcaaaaacataaacctagttaaaaccctaattaacctaaatatgtaatttatatataacattaattttgcattaaattttgtttgatgatctttactttcactgcaagaaaagtgagtattaggggtgacttttgtcgctcttaaaaacccaaaatatcgtccatatagtctattaggagtgacatgtcgtcccaaatatatcacccctaatacttcgacactaatactccttttaagggcgacaatttttgtcgcctctaaaattagcattaggagcgatatttgtcgcccctaataatatattaaatctgacaaaagcaacaattttttaaaataaaataaataatataatggactattagggacaacttttgcaataaatgtcgcccctaatagtgtctttcaaataaataaaaaatgattaattaaaaacaataaaactacattactaaaattaataattttacaattgactctaaagaagatcactaaaacagtagtaatatatttattctctaaaaaaaatttacatgtagcaatatacaaaactaacaaccccaaatgtcaaattagtaaattgtacaattaaatcacaactcaagaaaaaaaaaatgaagattaagaactctcattactggtctttgacaaattcatcaactcttctctgttcattgacagttttttgtccagatcatgaagcctttgtctatgagcattgtgtagcttatacagaacatacccatttcctaaaagccaagctgaaacaaaagcattcctcaaagccttcttcaaaagtccctattttcacagtggtcaaccatattcaatgggcagacattaacaatagaatccagaagaaaaaaaaatataaaacagtacaaaccccatcaagaagtgaagcttagaaaattaatccattaagttatcaattataaagagtcttatgaaaagctaccaattattaaccagacacacatatatatatcactatataatattgctttctctctttgaggagaatgacatgatagttctaaagtcattatgatttaatttctttgtaataaaaattgaagcacatgtaacaaattcaccatcaaatatctcatgtatgtatacatatttatacagtagtatatataagtgcagtcaaatttatttgttgcttaatcagtaacatatacctctagcgtatttttcttgcttgacaaaaattcctctaattttgagattctctcctttaagtattcactttcattgatgaactttttcctgtgcaaataattaatgttattagtttaaagttctagcaaacaatgattaaaggatttaagaatctaagcagagaacgatccactctgtaacaagttgtagcaatattagatttatatctaatattgatacaacttgtttatcaaaaagataatagtactctgtagtaaaaattaatatataagattatttcaatagcataaagttttaaaacaactagtagtcgtaataactggataatacacaggacactgaaacataataaacaatgtttcgacagtggttagaatttttcctttcatgatttgcttaatcaacaatgtctttgtatttgaccataaattaaatagtttcaacagtatgaaataacatgtgattgaaacattttgttttattcatgattcaccatgtcttattaaaatctaagcaaaaaatttagtccgaatgcaatagattgatactaaaagatgtgttatgaatgatttttatacattatggcaccaaaaattaggatatttctcaattgatagaattaaaaagttagtaaaacacgggatactcaatgccttaattttaccgattttgatacttgtgtggattgcattaagggaaagcgaacctccaagtctatcaaaattggtgtgcataagagttctgaaatattaaaaatcatacatacttatatatgtagtccatacatagactcacatagttagaaatacttcatctccttcatagatgattactcacgctac

SEQ ID NO: 79418 - DNA, 6316 bp, Cannabis sativa
accaattcagcctccagtggctgatttgcctcataacacacagccatagcctccgacaaattgtcactaaaagtagcagttttttgtagtgttattattttattagaagtagtatattagtattgctgttatatttatttaaaggattgaagaagtgtattgttgagtcatctctagcaattttaataaaattgtgttgggagaataattttctatataatggagagggatgagaatattgatgaaattttggcaaaacttgaaaaaattgaagatccagttggtgatatctattgttacaattattaaggattttgggttcaagaatttgcattaaagggtataatgtcctttcaaacacaatttgaagcaagagatgatgatattatattagcttcttgtccaaaatcaggtactacttggttaaaatcacttattttttctattgtcaaccgtaataatattaatcctttgtttactaccaatccacatgaccttattctcatgcttgaattatcattacctatggaaaccatgattaagccaagacttttgaatacacatgttcatccttcattaccaccatccataaagtactctcattgtaaaattgtatatacatttgtagaaatccattagatgtgtttgtttctcattggcactttgctcatagaatttttggagaggatgacaatgaaccatgtcatttggaagagtgctttgatatatgttttgtaaaggaatccatgcatttgggccattttgggaccatattttagggttttggaaagcaagtttagagatgccttacaagatcttatttttgaaatacgaagagcttaagaaagacgatgtctttttcattaaaaagatagctgattctttaggatttccattttcgaaagaggaagaacattgcggagttccacaacgaatagtgcaactatgtagctttgagaatttgaaaaatatggatgtaaataagactgggaaacgtcctacctattgggatgtctaatagttcattctttaggaaaggtgagataggaggttgggtaaactatttgacaccttgttaaagtttctagacatgaagaactgagctaaagaaagaaaggaagcaaaggaaagtaaagaggaagaaacagaggacaaaggttgaagaaagagttctattgaaagggcttaacacagccattatatacagtatgaaccagtagcaatctctaataagaaacgaaaatacagctgtaaaaacagataacagaatgctaacaaaacaactaatcaataacaaacaataacagaatgctaaccaacttccaactgattacttgctttaacatcctccctcaatcttagaattgaagcatcttcaatggtaagattggttctgaagttggcaaatctgttgcttgagattgctttagtgagaccatctgctagttgatccactgctggaacatgattgactgaaatcagaccttgttgaaccttttctcttacaaagtaaaggtccaattcaatgtgcttagtcctagcatgagggacagggttctgtgtgagcagaatggtgcttaaattgtcacaccaaacaactggttttcgaggcaaatgaatttttaactcagagaagagtgactgcagccatgtgatttcagcaacaacactagcaagactcatatactctgcctctgtactcgatcgagagatggtgtgttgtttctttgattgccaagtgattagatttggaccgagaaacacagcaaagcctgaagttgatctgcgatcatcggggtcagttgcccagtctgcatcacagtaggcctgaagctcaagaaagttggaccttttgagatgcaaaccatgattcaatgagccactgacatatcggagaatccttttaacagcgagccaatggacctgaagaggattgtgcataaattggcacactttgttgacactgaaagcaatttcaggtcttgtaatggtaagatactgcaaagctcccacaatagatctataaagttgaatatcttcaactggatcacttccaaaagcagacagccgcaagccacttgtcatgggggtcgagtttggcttggctccttgcatttttgctttgcacagtaggtcctttttgtacttagtttgagtgagaataatgccttctggtgtgtcattcacttcaattccttggaaatagctcaatttgccgagatctttgagtgaaaattcttgattgagcttggaaacaattgaagtgatgacattaggatcgctaccagtgatcaaaatatcatcaacatacacaagaattatggttgagtgatgagatgtatgttgaaagaacatagatgatctgccttggaagaggagaaaccaagatcgagaagacattgttggagcttctcaaaccaagctcgaggagcctgcttaagaccataaattgctttatgcaatttgcaaaccatattgcttccaaggttgatctcaaacccagggggttgttgcatgtacacttcctcatgcaacaagccatttaaaaaggcattgttcacatccaattgcttaacacaccatccattagacaaagctaatgtaagaacaacacggattgttacaggtttcacaacaggactaaaagtctctgtgaaatcaaatccaggttgttgatgaaagcctttggcaacaagcctggctttgagtctactaacagagccatcaggattctccttaattcgatatacccatttgcaccctatagctttcttccctggaggaagaggaataacagtccatgtagcatttctagctagagcaagaacttcttctgccatggcttgattccatttgatattctgcaaagcttttgcaagagtatcaggaatactagaaatagagtaagtctttggtttgtgaataccagaccttgaccttgtctgcattttgtgagtggattgagttggtggtgcagcagttgatgtaggtgtagatcgagcaatggcagaagagtcaactggagctgatggtgcagcagctgttatagactcagttccagcaagagcagaggggttaagttcagaatgttgcaggctcgaggatggtatgttctcactggtgccaggtaaagaaccatgtgtttgagcctgagaaacagcaaggtgctcttgctcaatgtgtctgcttgggccatgattagaaacctgcagattgtgagatctgttacaaaaattttcaaaacctggaggagggccaggtgtgggagcctgcactgaaacagatctgttagaaacactttcaaaaccagggggagggcctatagttgaaggaccagtgctattggtgctggaacatggttgagtaataggtgaaacagtgggaatgtgacaactaggatagtaaacagactcagaaattaaaggagagacttgaggttggttggatgaggagtaagggaaggagtgttcatcaaagatgacatcccttgagatgtagagtctccctgtggcatcaagacatttgtaccctttgtggtttaagctatagccaaggaaagtacaaggtgcagacctaaactatagcttatgtctattgtaaggtcttatatttgggtaacaagtgcacccaaaagtcctaaagtaagtgtaatcaggtttggtgttgaataggacttctagaggagacttgtgaccaagaagtggggtagggagcctattgtgtagataaacagtggttctaaaagcctcatcccaaaactttagaggtaaattggcttgagacagaagagcaagaccatgttcaacaatgtgtctgtgttttctttttgcaagaccattttgttcatgggtggtaggacaagaattcctatgaataactcccatttgttctaaatgtggtgtgaatgacctgtattcacctccccagtcagtttggaggcattttaatttgactcctaattgcaactctgcttcggctttaaagtttagaaaaactttgacagcatcaaacttgttctttaacatgtaaatccaagtaaacctagagtaaacgtcaatgaaatgcacataatatttgtatccattgaaagataaattgtgtgcaggaccccataaatctgagacaactaactgaagtggtgctgtgtaaatggttagagatgcttttggaaaaggcaacttacgaattttgccaagacaacaagcagcacaaacagtatgagaagttttattaatggacagattacaggcattgagaacctgttttacaacttgttcagatgggtgtcctaatctattgtgctagatatcaaagtcagatagcttggcattattacagttggtacagtaggtattatttggatctacatgtgtagaagactgtgaagacactaaattggtagacttttgatgctgaaatgaagtggaatgagatgactggtttaattgttgaggtgatgacagtagctggagatcattggagtcaaatgaatataggccattcttgtatctccccataagcaaagttgctcgactcacctggtccttaacaaaacaaaggtcagggtgaaattcaaaaaacacacagttatctctagcaaactttgaaacactgaccaaatttttggttagttcaggaacatgaagtaagtttttgagcagtaatggtttagaagggaaagtgtttgatgaaatgtaagtatgaccaatgtgtgcaataggcaaacctgttccatcaccaatatacatgcggtctgacccctcataatcactgctgttgagaacattctgagcttctggtgtgcaatgattagtggcacccgaatctggagaccagtttgggtcatgtgcacgatctgaggcagtgagagggtttgagcattgggaatagaagtggaggttgatgcagacccagtttgttgtggggaaaaggttttatcaaacctgtaatagcaatcctgagctatatggccaatgcgaaagcatatttggcattgaggtttgtttgaggaagcaggaaattttccacctcaaactgagttggaatttgaacctcctctaaagttggtattgcctcggccataagaaggtacttgattttgagattgtcctctgttgaagacactattggatccaccactgaagttgcttctcgagccaaaattaccataactattaccaggattgttatagtaattttggttagagtttccctgcattggttgcctaaaatttctgttgttgttggcatagtgagcttcaagtacaggatcagattcgttcattgagacataagctgagagatcaagatctgatttctcgattcgtgattcagaagcaagaaacaaagattcaatctctgcaactgagtaaccttcaagatgagtgttagtagagatcacaaatgtgtcatattcacttggaaggcctttgaatatggcagctatgtgatctcgatcagttaatacttcaccaactgaagctaacagatcaactgtttgtttcactctgagaaggtactcattcaaagaaagatggcctttcttgagattttgaagtttagttatgaattcaagaattttagcagataccttaagtgtgaagtacttttcgagtgttttccagatctgccttgaggtttcacatccaaccattcttgttagaagactttcggacatggatgatagaagccaggagacaagaagctggtcttgaacatcccactcgacaaaggcagggttcagatttttcgaagcttgatccagatcagagaggaacttaagtggtggagtagtgtcttgaatgaattgcaggagtcgatttccacgaattgctacaaggacttgctgcttccaaagtagatagttgtgatcatttagtctgacagagaggttgttgctgaacattattggtgaagagtcactcgagtctctgtttttggcctttaacgcagctccattgccggagtttggatttccagtgacaacgttcgccattaacggcggaaaatactctgataccatgttaaagtttctagacatgaagaactgagctaaagaaagaaaggaagcaaaggaaagtaaagaggaagaaacagaggacaaaggttgaaaaaagagttgtattgaaagggctgaacacagccattatatacagtatgaaccagtagcaatctctaataagaaacgaaaatacagctgtaaaaacgataacagaatgctaactgaaacaactaatcaataacaaacaataacagaatgctaaccaacttccagctgattacttgctttaacacacctcaaatggcagaacgtgga

SEQ ID NO: 79419 - DNA, 2641 bp, Cannabis sativa
aaataaacatataaatgatcacatgaaccaaatgacatactaaataagtaatgaaaattatttctgtttctttattgataattgaaagacaaagattacgttgaaatagaattttatttagggcacaaagcccaacactcggtaaccgctaccgtactagtgttggtaacatatgaatcatataaatagcatgcatataatatacatacacatatacatatatatatattctatgctaaccttacctcatttctgaattcaagtgtgtcggtcgacctgaattgaaaattacgcgttgaacggaggccctatgtcacaatcatgtaaaatgggtaaataactttttaagacctttccggggtcctaaacttaaaactagaacttctcctatcgataaataccatggaaacaccctaaatatcgaggaaacacgagaaaaacaactatacgagaaaactacctgaaaaacggcaggtcatttctataaaaatggcaaactattttcttgggttctctgcaagaaaaaacagtagactagttccacaaaaacgacgtactattttctgcacagaaaacaacaaagccctaaatcatgctcaaaacaacccaaaactcaaatttaagctcccgaacatctaataacatcacaataaaccaactccaagcaacagagccacaaaatatacaaaaattcacaaaccaccattgttgagccaagtttaagttcttgaactcaaacttgctcaatcacaaccaacccttaaaatcaactctaggaagcataaaacctcaataacaaacttcaaaaatcaactcaataaaacctagggtcggacagttgctaatctccaactttgcatgttcaaaactaaaaaaaagtttatcaaaagttaaggaaatgggttctagggctttacctttgattctttgctaaaaatcactttaattccctttaattctttgctaaaaatcattagaattagatgagcaatttaaaaatgaaggaaagatagagagaatgagatactggtttatttgtcttaattttcctaagtttatcttaatgaataaatgataaacttaactaataatcagaattaaaccaacactaaagaaaacttaaatctcttggaaaaaattctagttttgccccttgcttctcacctaagtaacctttaggcttaatggtaaaatgatccaatacaacaactctgcctaacctcgatattccaaatatcacttatgaataccccgctaaaacaaaggttctaacttcacccgtgtgactgtaacggccattcgtcacattttccatcgttatcgagcaacaatcataaaaattgtaaatttcacatttagcataaataatatacatagagtttaataaaatcttcaaaattgagaaattataactctaatgcccttattcctaaaaatgggacccacaataaatataatcatgtataattataaaatatcaataattaatggtaatcgcccaactaatccataatataatcatgcagtcattacacaagccctcaaatccccaccccaagatattcaccttggacgaggcttgcatccataatagacggaccacttttctcccaatctttctctctttctaatctctttaattttgttttttttaggcggttcgttcagtggttctcagtgggagcttctttttaattttgttaatttcatttcatatttgtgtttggatgtattgtttttaatatattattgggatgtattgtatttgatgtattgtttggatgtattatatttgatgagattcaatatatcaattttagataaacatttttatcttgggtttgtttatattttttttttaattttcagttgttagatctagctctatatggtgcggtaatggttctgattttattttttattttttttacttcgattcataaccgaagaaagaatctttttccgtcggtgcactactatatgcttccactacaacaaaattgggctttagaggcagtttttaaagcttttcagcgccagttttgataaaatttgctatcgatgctgtttcaggtgacgctataggggttaaaaaaagttgatggtgtagggaccctatggagtcggttattatgaaaaaacggcctctgtagggtccctatggcgtcggttattatgaaataatcgacttcgtagggaccctacggtgtcggttactacggagtcggttatttcataataactgaaataaccgactccataggggtttcctatgattttttttcagctttaagattttgtattttaatattattttttttatttttgtaaaaaaatctaattttttttcatatatatttattattttattattaatataattaaattaagtataaattatatataataagcataactaaaaattaaatagaaaagttaaataaatacacatttacattactctaagtgtttgtatacatgctatcttttaataaaattttataattattaatatgtgtttgtatttttttagtatattttttttaattttttgattatattttgtataataattagtatattgaataataaataatatattttaatttttatgtaatttaatatttttatacatttaaat

SEQ ID NO: 79420 - DNA, 1539 bp, Cannabis sativa
tgctattgcggtaacccttcatattaaactaagccaatgctcctgctcattgaaagaccattcaaatttagggatttttacttggaagtgtcatttttggcataattttaacatttgtatggtcgaaataactttttttacatttttacaattttacggtttaattacaacatgaaaacaacgaaacaatgtgaaacaatagtccatatcggtaaaaatgtttaaaattttgtgtaaccgtatttctgtctttttggttaattatgaaaataaccctaaaatttaatgtgctctcagtactgaattataacatttaccttatttatacattaaatttatatctatgcttattattcttaaagttatacaagctccatattattgttggctatggccttaccttacatattacagtagaattatactgtggtattatgaaaacaatatggaggttttgatggctacagttttttacaagaatatagactagccttccttatattttgtctcccgaacccacagttttttcaaaccctacctttaagttccatgaattttcttttaaattttcctatatttgtgagaagcgtttactcctcatgggtctgcaccaactcacggcttcaaaatctcccatgtgaaattgagatttagatcaagttcgctccgttttaccacctttttattaccagcttacgtaacatattaagaattgggagtttgactggtgtcgctgtctaatagtatatactcatgtaagcttgagttttatgtgacatggcgattgtttgtgggagatgcttgatgttctaatgaaggatgtggtttgaagaattgataatatctgggtgctgagcacagtgggtattctttgttatcagatggattacatgctaatttttttttttatttgctggatttggtgttttatgttatgaaggtgtttcctgttgggaagggaaagtaaggggtttggtttactcatggatgtgatcttgggtgtgctgttgtaatgtggatgtagttgtaatttgggcagggaggagactgctgcagtgcggtgttggtggtggtggtggtggtgtttttgcatatcagtggtggtaggtattgataagggtaaatttgaccatgagttcagacagcagaagccgaagcaggagcaggagcaggagccctatggatcgtaaaatccgttctgatcgcttttcatatcgtaattccccttacagaagagattcacgtcggggtttcaggttttctgacttttgattattcatctctatcatttatttatttatgttccatttggttttcaaagaggactaacatattttgatattactcatttatgctaatttgggttatcaaaatggaagtatacatactttgatcttccaaagtttgacattttctgaacttggaacattcacactgtggaatgtgctatgtttaaatatatattatttgaggatcctctcaagcccctttttcatttatgttgttacactcagatgtgctctgtagtaaaaaaggatg

SEQ ID NO: 79421 - DNA, 1657 bp, Cannabis sativa
aaaaaaaaaaaatcaaacaaaaaagatcaacaatattattctcatcaacccaaaattttcaaaacaaaatacccaatcctaattataattattattattcaaaaaaaaatgaacaatattctaatcaacccaaaatttcaaaacaaaatacccagacctaattattattattcaaaaaaaaaaaaactccctaaaaatcatcacatatattttgtggcttctcatcttcttcttgatcatcatcatcaaatttgttgtggttgataggaacaatactcataacgagtcgtccctcaaccctatcaactctcaagtaatagttattatcgtcgtttttctcaacctcttcaacgacaagtcgttttccgtcgtttgtgcatctccgaacgaaatggcatcgtttggtcaacaagatttgcagataaccggtctgcctgatcagtgaggttgttaatggtggtggaaaatccttggtcgccatcgtcatcatcatttttctcctctcaccactcggaattggataagcaagggttttaaggtttgttattagattttttttttttttcaaagaaatgttgtatttaggttacatatatatctaaaataactttccaaaaaaaaaaaacaaggtgattttcgatgtcataaatgaaaaatatattttttttaagaaataaatgaaaatcttttttttttttggaaacggaatgaaaatcttctaagatatatatttatgtattttcatttatagcaattttattgaaataaacaaagttttggtgtcaattgtggactgtgtttttactacgggtttaattataagagaattttcatgtatacttattttttatttatttcttttatttttagaattttttagaattttttttttaatttttatgtttcgagattatattatttttatttttataaataactagaaagatcatttataaaggtacaagagaaaaaacctcttaattatattttcaattaaaaaaaataaaattatattataattttaaaattttttttatcatttaaaagaagaatatagaagtgcaaatttatgagtttgaccttcctataacaactaattatacctttgcatgttaaataaatatcatataaatagaatatatatgtttcggttgaatttttttttttttttttttgaaagaaggttgaatttttttattgaaagttactgttattgatgtttctagaataactaattcaattaataaactaataagtaaaataattgaattagattggatgaattcaatctattttagttatctaatgataattatatggttaatgggaaaccaattggatagttacccaaaaacatttttatagaaataatgaattttggacaactatatttatttacttttagaatatatttgtttttttttttattcgatcaggttacttttaggatatttgttacaaatccgttcggtttttttagaaaatctattattttgtaaaaaatgtttttaaagtgagtttttggataaaattgttatataaaggaaggaggtgggtaactaacaatattaacatgctaaattacatagcaacttttggtaatatattccttaattagtaggttttttttaaaatgttttgttttgttttttttttt

SEQ ID NO: 79422 - DNA, 2242 bp, Cannabis sativa
ttttgggaaaattgtaactaaagtagtagactggaaatcctctttactataattatttgaggatatcttttgatttggtacaggaagatggtgtggttggttaggagcagtcttgatgacaatgtcccggatccttctccttctccttctagtggcagaaatggcagaacacggctaattagggccattcaaggttttcaaaccaggttagaagcaagaattcaggaaataaggagaggttttccacttaaattgcttttcttcttggggggattttactgcgcaactgcatttgctactgttattgggcaaacaggtgactgggacattctatctgctgccttggctgtgtttgttgtagaggggattggggcactcatgtatagagcttcttcccctttcttaaaaaagattaagagccttataacagtctttaacttttggaagactgggcttgcccttggtctcttcttggactcgttcaaatactgagtaaacctgtcaactttaaatttgatctgttttcgtttagctccatcagatggtgttgactgatgagttttcaatgcaagcatcaagcaaaattgattgggcagcacaggtatctgtacccaactggtgacaacccaagttcaaagtttcaaaactagtttgaagcaagcgaagacagcgaggaggtcaaagtatgagggtggaggcaacaaggaatagcctccccttgcttggtatgggagcccaaaagtctgatcttttgatgttatgagttttacatgatgggatgaggctgctctgctccaatggtcatgcttggtctgtaatctcttcaaactacaagagcttttgtaccataatggggctttggaagtttagaatctaaacatggtttgtgacctattggctagtccagtgggactggagcttttaccctgccattggtcgaaattgagtgcctactgtgggttttaattccgttggaatcagtacaatagatttcggttagtaggagagtagagatatcagcttcaattctgtattcatagctttgttttgttcttctttgatataccattgtacatttttgttctgcttgatatatcaaattcaaattaataaaggaaactgacccttgaaaacttaatgaagattaacaatgtagttgccgttgccaagtcaagcaaaatagctttgtaatataacaaaaagctagtttttatcaataaaagaattcctttacccacaaaataataatctcaccttttgttctcataatatatacatctcaagaaacagcctctgtaacaaagggtataagtgaagttaagtaaaaggaatgagctccacttcatatattttttttttatatatttacaatgggattatgtatattacatatcaaggtctcaaaaaatagtgttgccattttagtgtaatttcaaccaatagctactataactttttctgatttctctgcatcccccattttggtgaactttatggcatcttggcacaagtaacatagtttttctgatcccatagaacatactccatcaagcgtctattccggggcctggatatgccggtagactcatgattcgttcgtccagaacaggacctcccacggtgaagtgatagagactctgaaaatttgatcctttaatcccaagcacttcatgcactggatagcaacaacaacaatagcatttggattttaacatgcgaggcggaatattgtttattgtaatgaaaattgaaccatcactttcaaacttagattttcatgcagcagtaaagaaacagttgattattcaccagatactgccaattttgagtcatatcaaaccaataaccatgtaacgatttttcacagtgaaatgtcatgcaacgaagaattgctaggggaaaggaatctgtaccaggatcgtcgaagtagcagccgattcctgttgcagatatgccaacagcatgtgcttcgaggtacaaaacttgtcctagaactccagtctcccaaaacaatcgaggatacatccacactttctcgcgcaaaacaggctcaaaatgagctaccataccaagactgaagcagccatcacttgctatttcctgcatcaatatggatgcatgcaatatcttagcaagactgggatatttattcttttacaaacaatcatttcaaatgctcatttcctatgaaacaacacaaatccttcatacagtgtaaaaatgggggtttgaatcaagaaac

SEQ ID NO: 79423 - DNA, 2874 bp, Cannabis sativa
gattgtacaaattgactattttctgaaaccttacttcagtatcactttctataacaaaaagttgaatatcacaactaagaagctaatggaagcttaaactaaaagctaatgttttcacgtctcttaaaacaagaagccctccactcacttagcaggaaacatgatacctatccaaatctcacacaattgcaccaacacccattaagcatgtaaagtaaatctaaggcaacgcccctattctgaacaaattgggtggtgaatctaagtctcgggtctcttattagatatcgaacacaaatggcatatccgtaaccattcagataaataacaagaggaccagtccacgataactcgaggatgtcctgaaaagaagccctgtttaactttgtttaacagaacaatttgatgacaaagctgcaggaagaacagagaatatttaacatccgcccacatatcagcattgctcaacttcaaagtacagccctgaaagtagcacaagaacaaggcagcaaaaaatcctcatagtcattactacaaagggcacaagttgttggacaagaaacatgataattatgtagtgttgctgcagtgggaataatgtgctctaaatgaaacgtttaatctttctaggaaactgcagagaccacaagatttccaccaaaaagtaagaaaagcaatagtcgaagaagggggcttctcatgacttgagaaaactaatgatatcccaatttgactgaattgccttacctagagagaaacgccaacacaagcagtcgtgatacacgattggtctcaacacattggaaagtggacagacatcagtctgtaggaagcaagaagcaagatattctatgtacgggttggcatataattcacctgtttcactcattactgcggttgaaaattgttaaaagtataaagtgtacgttcaaaacaagacaccaagaaaatactaatgttactcagatagacttgctctctggagtagcgagtatttgtaatctgaaagacacgtgggagatgtaaaaaagtcgtgggaaacacactgaaatagacaaggtgataattatttttctcattatcgtgaacctggaatgtcccaatcccaaaagtgctcacatgtattcaagaattcgtgaatgattaaaagaaaacatgtcgttcattcatctcgtgctcttggacgaacaccaagtccactccttatatttccaccaactttgatcatgtcttccacctatgagatatacgacttgattaagaatttactactatcaagcatacttttaagttttaacaacaaatatctaatagtaacataattcaccaactcagcacgaatattggttgaaaaataaatttaaaacaatcacaaaaagatgggccgaaagagtgcttgatagttgatagaagaagagccccctatgttcttttgtaactgaaaatatgaaagaaccttcattttgggagcaagtaacaacaaaatcaccataattataaaacattaaacccacgttggaacacaggttttatgggtaaaaatctgtaatttgtttttttttttttttttgttctattttacttagtaaaaaagaaattagaaaaattatgggataaacataattcgaagaagattttcagtgaaaaaaaaaaatatttcttgtaatctcatcagtaaaatcttattgagaactaggaacagcaacaccgagatccaaagtgataatatttagaaaactgaccttgtgaattcctgcggcgcgaaggccagcaaaagaggcggaggcgagggcaccaacaaagagggatgcgacggcaaaagccttcaagggcatgagggttgaatgttcggcgcagccctttctgacggaaactataccccaacccaattggcccacgctcgccgcagcccaccaccagtgacttccaattttggcactgccaccagattcggcttcgtactcctttcccgcaatctccgccgccgtctcattcatttagcttctgctttagtcttctcggtgctggccttctcttttcaatgcttatgggagggattatttcacaaatacacaataacaatacaaaaataataaaactaaatttttacggaattaaatatttttacagaaaatgtaatattttcatatatttttatattgtaattgttaatttttttgttgttgttatgatgttattttcttgatacttttatgtaattttcttattattttagtgttgttttatagaacaccttaaaaatataaaaagaaaatctttgaacataaaatataaaaaatttacagaaaaaatagtgtattatataatgggaaacaatagtaaatggtcacaaatcataatagtatgttagtaaatgtctttatttcaaaacttgtagtaaaatggcttttttaaattatttattatttatatattttttaccagataattttttttttttttagaattagaagtaaattagttaaagattatgatatatctctattagttttgttaaaatcttttttatttgaaagttatgtcaatttttttaatttttaatgagttgttatcggttgttaatatataaagggaaatttacacccattactgttttttcctttttttttttttcgtttgtactgtgacacgaaggattttacttttatactgtttttcattttcaattttttttggcagtatactgcatttggaaagtttaatatatattggttttttttgctttacacgtgtcacgatagggttttgccacgtttcttttaaaaaaaagaaatcattttaaattttttgatttgacggttttctatacttaccaaaaagcaagtgtacttttatatttttttttattttttt

SEQ ID NO: 79424 - DNA, 1420 bp, Cannabis sativa
taaatagtagaaactgctgtgtaaagtagttgcaattttggcagtaatgcatcgcaagaatactgagaatatgtaacctgagggagggcatctcgtctactgccagcagcattcataactcgagcaatttcagcgcggtcaaaacagttcctgtcgcaaggtctggcagcagaataccacaaaaagtcagcaatcggaacttctccctctcttcttatttgctgtctttcagggtcaagtaatacaaccacttggtttttctttggtatcctttttgaaattcttgcaggcaccccagtacctctggacccgtatgcaacatggctcgcccctgtaaccactactataatacctgtggttcctccatccaccatggcttgcaagatattttgggacatggcataatcgtccaccactcgagcttgaacagatagataggagcttgggccgaaaggaatagattgatttggatagtttaaatcaaccagtgacccacgtgagatagaagtaaagcctgcaatgaagcctgaaccagctggaggagtgtatttcttgcgatcagcctttgaaagtccagtaataccttctgcttgtacagtccgcaaaacctacttaatttataataatgagtattttgtcaatctctaccctaaataacaaaaggatcaacagacataataaaatcataatacatgaatgcaaagcagaaagatggcgagcccctaaacaattaagataacagataacaatttatcccaccatagcacatgcaaagtaatttaataatttctagtgtctattccttatatggattccttatatgggaaatgtaaaagaccttgagaggagtaccacaagcaacaagtctaactccattatcacgacagtaacttagaagaggttcatactcctgccagcgctcaggtgcccaatgtgttgtgtaagacttcaaggtttcaccatctatgctgcaatgattttcaagaaacgtgatagaggaaaaagtatacaattttttgttcatatattggtgtatttaacaaatactgttgacatgagatcgttaataatcctatttatacagaacttaactataaatggaaggtttctgcaataattaacagcatataaacaaaataatcgtgaatatttaaatttcattccgagttagaggtcttaaaggtgacatcattggttcaagtatagaggtcttaaggttgagcaacaatccaactaatagtccaagctgaggtgcatctattctattaagagaaggcaagaacgaatatattaaatagagtaaaatcacaagctgggcattcttagcaaattgatgatatgaaaattgtcatcaattagccatttcgaaaaggtcaacccaaccagtgctgtattatatagctcatatacttcatggctt

SEQ ID NO: 79425 - DNA, 1133 bp, Cannabis sativa
tttttttttttgaaagattttattcttgtttttgtagagacatatatttcggtttctattttagcgaaaaataggataaaatactcttaaaaattgagataaaatgcttctatttgttttttgtttatatatgtcattcaaatccaacataattaatggattaattgcatctgcgataaacaaacacacaattttatgtatttataactgtaattggcccatcaattgtgttaacttttttgtagccttagcttgtatcttacttaagatggctacctacattattttcacttaaatcatttatctcttcaaattctttcgtgagcatatcatttaatttgtttgataaatcaatacagctaataataacatataatttttaataagctggccagtctattagttgaaagtagactcagttagaaaagtcaatgtcaaacgtaataaattaaactaaaacaacgaaaatcatgatagacgttctaatgtgataattatagaacattacgaaaacatatcatattatatacattcggagtgtaataatactattaaaaattgaattaacaacattaatcattacatatataatatgtattgtttgaccagtcaatgaaaccctcttagaatgagcttattataaaaagacaaagcactatgatcatcaattaacccttttcttcgatcgttcaaaccatggatatatctccatttaatctcctctcactcctcctccttttaatctcctcagcgaattcactccatttcaaaatctctccttcagaccaaaactcacaagacacaattatagctctccaaggagacgccttacgtatcagtagtagtagtagtagcagtagtagtctcactcctacatctggaatcgttgaaatgatcaacaaattcaccttcctatgccgagttggttgggccacttacccagctagtgtccctctttgggactccacaacaggaaagttggccgatttcacaaccaacttctctttcacaatcgacacgggaaacatgtccacttacggccacggcctcacattctttctggctccagccgggtaccagattccgcccaactcggcaggcggattcttgggccttttcaacacaacaacagc

SEQ ID NO: 79426 - DNA, 7771 bp, Cannabis sativa
aatcgggtggcacattacgttgctaggaacgcccgtttcaatactggttgtaacatttatgtttttcatgtttcaaaagacttaaaaaatcttatgtattcagaatgctaattatttcaatgaagttgatatttcatttaaaaaatatataaaattatatactttaatttaataaataatataaaaaattgctcatcacttgtaatagaattagttacacaaattaaaatacccaatacttaaattttactaaatgtcctctacaacgttttattttaccaagttgtcaatcctaattttatttatttatttcagcaggttaaacctgatggtttcacgtacttttctgttaaggttgcgatatttccttgtgttgtgttcctttgtaacttggtgttgttgcccaaatgatttttaattgcggtgattaaaaaagaaaaacccatatcctattaagaaaactagcagagagagagagagagagagttacacaaggacgaactaaatgtggccaatttttaagcggtgcacgcaggatgcttattgggttggccacattcttagtccttgtaagaaacttggattttggttggaagacaagaacccataaacccatcctccaaaataccttcttctttgccacccaaacaaagccttacaaccccaccaacaccaccaccaccaccaccgctaccactaccactatcactaccacaatcctttcctttcccactaaatctaaccgttttcaaagctgtttgaaaaacatccacaacccatttctcaaacaaacaattagtaaaacaaccagacccataacaaacctcttctaacactctctcttctacactaaacctactcttcctcaccattaccacattttccttcccacaaatctcgctgaagctctcttccatcttccactggaaaagctccttcatctctcgatctctggctgggcttcgattgaagacgaacacattctccatggattccatgaatcccatcgggtttctgatcaactcggtactttccgccatttctcgagtcaaatcgcttccgccctcgtcctcatctgccttgacgttcaggtccagatcagtgttgaagcttgattgcctcgaaagttgattctctttcttttcagttcgttgattctttgtgacaatctccttgttcgggaggtcccattcgatggcttttcgtttgcgatgatcgaattcgagcgtgttaaaataggtttctcctgacaatgtcgtttctgtgacattcaatgacatctggattactgatgaacccttgccttcattttcatgaactgttgatgtgtctcttttactaagaatgaaaattgcatgaatgaattttgcttcactaaattttccagtctcgaaaccttctgctaggaatttcatcaactgggaatctgccgaatcgatatcttccacaaacaccacgagtttcttgtgagttttaattgccatggaaaggactaattgatcggattccgggttcatcacattctcgttcgttttgtcattgttcaagtggagaagcaaatcagaagaaccaagaaccaattctgcaacggcccgagccaatcttttctttccaatggagtcattccccggaaacaacaaccaacaagtctccggctccttggtcgattctgaaaccatcattgcttctactaccgaaggaatgatttctgattgccaaggcacattctctttcagtattttacacatttcagttctctcccaactacttctttccattttccggtctcccactttgctagaatcagataaggtggaaatgccaagagcaagggtgattttaacctctttaccttggctaccacatctcagtgaatccaagcttggttcaacttcttgatgactgttatgttttcgctgatttttggtttcttcatcaccaccaaaattgaactcaattgtacaagaatgttgtctcctgaaacgccctactgctaaaccagggctgtgctctgaagccgatggatcggcaaaggagattgagtttgagtcttggaagatgttgttctggggtggccaccaagggtaggatgaagtataagagtaagagtcatgataactgttactcttatttccaaataagctaatttgattattattgttgtaattactttgcactgtggagcttaaacattgaatttgattattattctttccttggtgtagactgtggcataatctgctccattttctcctcaactcgaccaattcatcctgaaaagtggtcaaaatgaatgtacatatatataagttttttcagactaaaaaagtgataataaaaagaaaaagtaattttatgttttcgcaattattaaatacatagtaccttttgagggaatggggtcccacattgtggttgcagccaagcaggcaatttctggtggcctgatttgagcaactgagcttctttttcacaatgtgaagcacattcggggcagcaattgagtttgtggtcttgtaatattggcttggtttctgggctccgagagaacattatccttgagccatggacactgcccaccataataattttcaatagaaaggtcagttcaattatgtggtggtgggaaatatatgattttaactttaccattaagacatgttgtaataaagtaaatgagcatatcgacacgccagagatattgtctactacatgttatacaatatttcatattgttttttaactttcaaccttgaactttgaactttgaagaatgttatggcaggaaaataattgaattcaaaagctattttgtcgttaagcatgcatgctttcaatatccctaaaaagctgatgtctttttcggtacgaaggacatgcatttctacacaacattattatacattcagacatgtaaatccgtatattattacagttgaaaagaataataataataataattataataaagatttgaaattacgatcccagctccttcgatcttcaacaaaaacatgctgtttatcatacatattatattgtatttatatgtagataaggctgtatacctgcagagcttttctaagtaattataaagctctcaagtatgataattacttgatttgtaccatatctagattcctctaagcaagaatattggaatataaaaaataatcatttcataagcacataaatgaaagaacgacaactaataatggttcgttattttaatttatttttccctctcttagaatttgaaattggtctgtcggtgaagtgaaagcatataaagctagcgaagaataaaaaccataaaagaaagtgtcttcgttcgtatttgtctctcaccaaaccgcatactttttttctcagcggttctggcctctggggttaatttcagagaccacgtattgtactctcaccacagcagaaaattaatcacacacaaaaataaataaatgaacacacacacataataatattatttaaaataaaataaaatatcacgaaaacaagaacaaagagagaaaaaaaacctggtaggagcagctgcatggagactcaaaccgagtcctccagatggaacattaacagcttgaagagcccattgagtctcaagcggagtttctctcatttgacacttcatgtacgtctgaatactcgccgtagccactatccacaccttcggcttggacagaaataagcttgaaatctctgaaactatatgatcagctggattataaatactactggacactaatcctcctcgaccgtctgatctctgatgatgatcatgatcatggtcctcaacaatcgtccactttaagtctccagtatatataataactccttctcctccggacacaagacactccacttttctcttcagctccaaaagcttcctctccacgtcttctcttttcatgaacttgaaagaaatcggggagaattgaaacttaacgaaatgggttctcctaagctcctctggaacctcacctctctctaaccttcccatcaattcgcaaactagtccttcggttacagacactgagtcaccaactatcaccgtgttctttcttttcttcctcaagaggacatcaaacacaaccatgatatcctccttaaacttggtataatttcttccctcttcgctgcctttcggttgtgaaaacagaagcgggttttggtcagaagagtaaggcaacaaatgattatgccagaaatttggtagcaaaaagctagatgaagaactgaggaaaacggaggtgttaatggaagttgaagagtcttcctccagattgttcttgactgctgtactagagaagccggcttctctcataacccggctaacgctgggatcatccaagatggagatgatgagctgttcaagctcaactttgattgttaagagtggttgagcttgctgatggtgttgctgctgttcgatggagccacgtctctggtgagcttgagctcgtttgagagcggctatgagggcgttggagagagagggctggtggtgagaatggaggagaggacctcctgtggtaggaagtcggttaagtgccacgttgaagcaaagctcaagagctctgcattgaagaggctgctgctgctgctgatgatggtgatagttatgaatattggtttgactgttatgatgatgagatttgagacaagccctcctcaagagactagctctagaggtgagcaaagtggcagccacatgaagaggagtgacctgagcatggcctctcctcttggctaaccccagagagtgcttcaatactgaagcagcctccgctgttagtgtctgttgtagtgcacaaactcctgagcgcatcactcggccaaaacccaccccctaacccccacccactaactttcttgtcaaacaaacaagtacccacttaataaacttggcttctatttcttactttcctttattattattttctcctctccccccctttgttgtgaaacttcacactagttcttttcacaaacctttgtttttccctttctttctttcccaacaccacacaaactatcctagttttctaaccctctgtaggtatatttttcagaataataaacgcttggttttttggtacctcttcccctcttgtgcaagtttttaggctctcacaacaacagtagtatagtacctgaaatggaagtagcagatagtgaagttttagaaagaagagtttttcagagcttgatttgagcttttactagaaaacccaggctagaccacgccaccaccttctttatacttcctcttcataaaagaataaagaaaaaaaaaaagcttaattttatatttatcggggagtgtgtttctcttttttattctcctttcttttgttattatttttgctctctctctatatatatagtttacagttaaaacctgaaacatatttttttatcaccctagctatatatattttgtcttatgattagaaatgtagtttgggtagataattagtatacaataataataaagaataaatcataaataacgctttcttaggtatattatattgttattagtagaattatatggttttatataatttaatataatagttttaaggaaatattactatgagagtattgttatgggtggtaccaaacaccactataacacgatattttataattgattagcggttttttataatttttatttaattaaaataaatgaattttggtattaaattataccaataaacaatagtgatactacactttacaagggtactacatattatgggtatcctttggtatgtctctatcgcttactaattataagacgctacttataaaaggtgttggacaccactaaaaataatatcttactattaattattaatattttctaaaaaatatttcattaaattatataaaatttcatacttaattatactaataataatatcactattattttgtgaaaaacacctcatgctttttaacatttatcttctttttaataattatacttatatgtatatgtatatacaaatatataacttgttgggagttgtaaaatattagaaaaagagaaaaatttaataagcatgatgcaccaatcaaataattttactttgatattatgatcaaaagctgcaaaagaagatatcaatctattctacttttgtgtttcaatagatctatgttaaagtaattaataatagcaatactatattattgttgttttttccctactgcaaactgaatatgcatgtgatatcttattatatagacaactgataacatgaggaataaaattaaaaccattatcagtagtgttttgtgagttattttaaataatacaaataggaaataatttttttactttttattttttatttttatactttaaaataattttattttatttttacaaaaatctatataacaatcaatagaacaacttaaattataaccgaaattcatataacaacccacatataacgaaataactactagaacaactcaaaccgtaaattaaaaaataatatataaggtaatttatttttattatttttatctaaatgattaaatgaagtcccacaaatacacacaaaaaaaaattataaataatttgtaagctttttttttaaaaaaaaaaattatatccttaaaattaagatattttaaaatgaactatctcgtacatagaaattaataatgtgctctagtagttattttatgtgaattgttatattaattttaattacaatttaaattgctcccatggttactatttgtatttttatgtggatttcgtaacaatatatttaaaaaaatattattttaaagtataaaaataaaaaaatttcatattttatattgcattcattatcaccagtttcaatatttaagagaatttttaattaattttgtctcaaaaagatataattatttgttgcatatatacttttttttatactgtagtaagtaattgtatttgaacttgtttttaacattattaactatttaacttttaaaaatttttattgttagttctaaataaatacaacatatatcattattaaagcaattaaattgttttagataccaaaataaataaatggtatagagaaacactaattttaattatgttctataaacttaccccatatttttaatgagttctgagttgttctgctgcttaaggttaggtttccttcttttttttctcatcatgctttgaatggacaaacaaaggcagcagaaattcaaaaaaagtagtaaagagaaaaggtggaaagaaggcagagtgtgatgagagataaaaagggtcactgttacttacttcaaattttatttatatttattttcccaattctcctttttcgtgattatcatttttgttctttatatattaataaaattccttcagtgttggcttattctcaagtaaggaagagatgtaaaaagcacacacactctttctctctctctctctcttcacgccaatcctcgtagagagacagcattttattccccaagtacccaaaaagcaaccctctgtctgctatcctacattgcattattggctctttttcagctcttctcactctaaactgctatcaccttttgtccatgaatatatctctttcaacaacccattaaaaaaaacaaaataaaactgaaatcttaactctactaaaggataatttgagttcacatttagatggactagacatatttatcttatacaaaaaggcttttcatctagtttgaaacaatatcg

SEQ ID NO: 79427 - DNA, 2131 bp, Cannabis sativa
accaggggagtggtccgcctctaataaccataattgttgtagtgcctataatcaaagagaaaccttttgcatatacagtgagcaacaatagtgagaattgaccaaataataatgaagaaatgaacacatgagattagattatagaagcaatatccatttttcaacagctcttaaaaattaaattgggaaagataaaaaattgcaaacccttgtctcagttgtctggctgtagttgtgagcttgaaaaccgtaaaaaatagctagggaaataattaagaacatatatagctagatagatatgcgaagcattaaacctcacatgcctacaactctaatataatgctaaaaacaaatgttaatgaagatgaaatctaattataaagggatagaatccattcaacctacatccattaaattaaaactataaggtctcaagtctttgaataaggccttcttcttttctacataatgtgttcgatgaagtcaatacccgaacccctataatccttgcaaaactcgaaatttgaaatgctaagaaaggatcatgtaaggtgcgttcttgacttctccaaaatatttgcatttcctcaacaccttagatttctttatcttacttctttttctttcccctgctgcttttcactaatttcgaccatcttcttctatcaaatatgactgcaaaaaacactaatcaaaacccgaattaatcacaactgagaaggcaatcggattattgcattgttatacttatatattataactgtaaggtttttatatacacatgtaaaaactaattatagtactacatacacttgcactatatattttgtgctccaaaactcatgaatgaaataatcacgtgccattgtttttggcaatatattgagtttgtaagaattatagaaaatctctattaagaatacttgtacttgagacatgagaacttacattattatgaaggtagctaggtaggactgtgatattatgcagtgtcgcatgacaaagaagccttaatcctctcgacggtgcaagcaataagattgttaacagttgcgactgatccaagagaaagcttagctgtagggaccgagtcaaccaaaatctgaaacgcaacagtgagcagagagccgccggaagagcaaggttccacaatcccatcaccaccaccaccggacccatctggaagaatggcaaatccagacggaagtagagccacatagtcaggatcaccgccgttaagcaccacgttcatcgcaacaatatccaccggagcataaatcacaaacgacgccgtttgatcagtgcagctctcttgcaatatcagcatgttgctttggctcgagttggcactctaatacaaaagaataaaattaaataatgaatttcagatctccaaaaaaaaaaaaaaacttatataacacaacaagagagaaaattagtaaccaaattataaatacaaacatttactcgaagtagagacacgcagtttcctgtttcacgaccatttgctatgtgtgccatttcttgaacaactccaccattggaaagaatatcccacttcgtaaattttacaacaaaataaaattattgttagtctatatatttatattggaaaatttattggtgagatcatcactcctaccataattaattttttcataatttaccatggctattttattttgctcatcaatactaattaagtgacatactttaatggtacaatatatatgtgtacatatatatacctcgcttcgagaatgctcgtcacgaaggaaatcaaagactcttttgggtggaacaggaagccagaatgatgtagcagcacttaacacaatcccaggaggcctgcctggatcgtcaacgctcttacgggtcatgacccgaacatcatcagctccggttcctgagagtgttgtccatgtgtgagtggtggaggcactcacaccagcacaaaagcttatcaccattctctcagccaatttcagcatactctttctcccttcttggtttgttatcactgcaaaaaaaaaaatatatacaccacaccaattaattgatatttatattttatatctgtatatgtaaattaattttatcaattttgattatgttattattaccaccaaca

SEQ ID NO: 79428 - DNA, 2388 bp, Cannabis sativa
aaaaaaaaaaaaaaattaaggttcaaacatttagaaatttcaaatttgttgaaagttgtgtattttccataattttttttctttcatttatatgaataacatgtgcctttctttgtttgtatatttatgttacataatagactttgaaatccttactattttgggttgaaacggaagtaaagggcaactatataatttgaccttttggcttcagaaaaaatgacataataataatgccaagaagatactgacattctacttactgggccaagcaaaacagggtatttactccagaacttcaaatgtcgtttcccaaatgtggtttcatcactatactggaacctccttggatctgttccatgtataaatatattaaactaagagttattatacacacgaaaactttatgtttatacatgtaaatgaaatgttgtatatatgggttaaagagtatagttagaagcatattcataccatttgctatttgatattcgagagtttgagtctcactttcccacgctttccatttcctcatctgctcgttaatttttacataattgatattgatgtctaatactgccgtggtaagggcactaatggtcatcatgatgaccctactaattaaatacaaactctttttcttttttaacaaataaactcgttttcttgtcataactactcttcataaattattcatttatttaatttcaggaatctttcaaatatatacatgataaaatttatatatgtaaattaccaaaaaaagtttgtaaatatagtgtcctttattgtccatatataattctactacatcaataccatattctcatgttgtatattgaaatttagtgaattaattaaacttgtagataccttggccatgccaagaaacattgtaacaaggcagtatagtacatgagacactgctaatacagaaacgaaaatgtttagctgaaaaactccatctcttgaaatcagagaaaccttcccctgttcattaaaagtaacataatattatcaaaactcaataaaacaaataatacagaatcaaatgaatgtccacttacaaattttgaaccacaatctgacattcagccgatatgaccataaaatatttacctttgagtcgcagtaattttcatttgtacttatggcatcggtaaagaaggtggtactgttattggatttgtagttagataattgatcatattcagctgttgttgcagactcatcagaaggattttcacatgggagaaaagagtttgccaatgtttggcttatacagatttttgatattggtacttcagataccgtcagtaacaatgatatcaatcccatcttcatcatttctgaatcattacacacacgattaatagctatttataaatctgtgcctacatcttatatattataagtttgtgtatgtactaacctgtcttgaacttttccaaagctctgttcagagattttcttttccttttcctaagaaactggtcataaaaaaatatgcaacagctatataagagaaatcattatgcagaagatgcatatagataaatatatataccttgttaagacaatgaagacccccatcaatagcaaaagatacaaagaagaaaaataaagcaaatatagaaatagcccatgttggggtatgttcaagggatccactattgttatcacccatatttctctctctttttctcaattgatctattaatctgagtctttgatcttattatcgttttggataatattacatatgtgtattgtatttataaatgcttgcccactaattaattttatttttcaaacacacatcactttcttctttatagttgttacttttcacatgtttgtactatagtgctacggatagaggttttatttaaattttattgcagaaagagagatttggaagctacgtattgatcaatagtacatcatcacgactaatttggtagtccaacatgcaactccgtacaaacaagagattacaaattaaataaacaataaaggaaacgtaatcaacataattgtcctactaattcttgattaattacttgatacatggctatgcatttgaagatatgataatattgctagaatattatcaatttggtcttctttagctttacataattagagtaatgataagtgcatcaaaatatgcaccaaataaccctctcacacaattttctaaaacgctaattagtaattttttcccttgaacttttttggccgttaaaaattctccctaaactattgagattgttaaatttaaagacttttgtctaattttagtgaaaaaaattctacgatggatgaaagttcaagggggatgatttagtacatatcaaagtttgaagggcatgatttggtagatat

SEQ ID NO: 79429 - DNA, 1443 bp, Cannabis sativa
ttttcttctgaagaagcacacatgaatggattttagtgggcatcactggaagccttgacttgtgtctacaaaccttataaattgttatgtatttttcttcagttagaccatgagttttaagtccttgcaatatagtggtctctcaattggctttgttacctgctaattcttttcctatcctttattgtctgatttttttcttgtacaattatgtgcttgacaggttgttcataatccagaaatgagggaaggaaaatggaacttggaatgtgaatataagcatcgtttcaaaggttaattaaatgaatatgtagaaatggccctgcacttttggacaggcaactcgaaatgtgtattttttttatgagaaaaaaaaaaactctggtagcttaattttggtaaattatctatatctggtaacttttgtaaccaatacataccgagagatttatcgtattgtccatagtgtggtatagtagtaaaaaatgcttagacaactttcagtgatacagttgctttttccactttgtaatgtgtagttatgtactcacgtgagattgaattgcctctctgttttcattcaacttttctgggtatcgtttgcttatatgagaactgttgttatgttcacacgtttttaactgtacatgcttgaaaatctctgtttaacgcagaaagggatgtagcaagactatttttttcacctctaggcatgaattgagatccctgaaaatttttcctttgtgaagactaattagaatctcaagtattgctttaagaaaattgttgggaacttatttggtcattgagatcttattatatgtggtctaatgaaagggactgcagcattagtgtacattagcaataaataaataaagcattcctcatgaacacgatccatcgtgtgatcatgactaattgaagattagcatctactttagaaacgtaagagagtttatatatatatatatatatgactgatttcggttgaattattacctcgctttagttttatttataagaacaaaacaacatatttaggcactgatcctactccttatctagagatgtccttgctatggaaatttattatgccaatcaaattcatgcgtgtcataagaaattgagcatcttaaacattatattagttattaacaatatcatcatcattaccaaacagatatcatgtttttgttgtttaataaaaaaaatattggattacttaaataaaaatagatgaaaaacagttaaagtaactatttatcaattctaataaatgactaataaggtatcaaatccaataaatacttgacaatttcttcacatttgcaagctaaaaaaaatgattaattagttcaatatgacaagttttttttattattatttattaaaaagaaaaggctaattataatttttgtcctctgaactttaacatgtactaaa

SEQ ID NO: 79430 - DNA, 2212 bp, Cannabis sativa
aaatgctcttgcttaaattctaaattctcaaaagatatccatgtctttagttgtccgttcttattaagattggcacaaaataatattagggttgggaatgggaagagactagatgattagcattgaatattattagtagtaaaactgaaaagaccttgatattttcatgatttcatctgttaattaatgggttgaaaacgtttgcattaaactttgaaatcattttcaaattggctgttcgctaaacccaaatgatattttcccacttaataattgcctaatcaacttggccctctaagcccaacacgtgtctcgattttatttgttaaaaggttcaacaggttgactgaccaagtcattcacgaccacgtaaaccggaatgactagattgctcttcttccccacaaaaaagattatatttcgtcgcctgagagattcgaactctcgcggggaaaccccatgtacttagcaggcacacgccttaaccactcggccaaagcgactttttgatttatcatggaaacgtataatataaaacctattatattagtaatctgctattacgcaatgcacttcagggagcattttttaaatccaacaatctcaatagttcaggaaatatttttaacgatatgatttagtacatgtaaaagtttaaggggcaaaaatctcaattaatctttaaaaaaatattagtaatttgctattatgcaatgcactctctaaaactgctaaaagttgtgattagctactctaacttctttttcatattaaaaatttcaatttcaaatttaaaatattgaccaagtaaccaattaccatataacatataactgtgaaaattggcaacttattattgtgatgccttttcatattttattcaaaatttaacttgtgttttaccatttttaagttttattatggacaagtacctggtaatgatagtaaagaaaattggtaacgtttattatgagtcatgacatcttttccatattataaaaaaactcaaaacctgcaaagcaatatttttgtaagttttgttgcaagaaagtagcttacttggtaaccaataattggaaaaatagtagctggttacaatgatgtatttttctagatttcaaaattttgtgacgaattttaagcaataaaaactagtaactatgggaacatgggataagattgttcatatttgcttaattttattcactcatttcgtacttatatttaccttttctctttgttaatggtaatactatatttagttacatttattaagtggtgtactaacacagctctcaataagttatgcttacataagttcatccacaagttgaaatatcctcaaataaagacactcagattgttatctatagtctacaaatcccattattgatgcttacttattacttttgcaactatgactatgcacctagtaacatgtctcatttgatatttatctcaattagggtgtattgtgacgaagtttgatgtaattggtgaggtttttaattccggtttaaacttaatttttaatatcaaattaaaataaaaaattaaattgaatcaaaagattaaaagaaaacgatttctaaaaaaattgccatgtttaaagacaacttggccaaataacatgctaagtttatataaatgctctaaaatagataaaactataaaacattccatggccatataaaattaacataggcataggctggtggtgaataatatctatgatagtttatattgatgatgatgatgaccgtacaatagttcccaaaagtacaagaggaaaaggcagcaaaataatagataggtttgatatgttctttcaagcacttccatttccatccatttgtttagaatgagtcacttatatgtgtaggccactaattgtaagagtgtccatctaataatagtagcatatatatctcggagctgtacctctatctctctaccatttacgttgaaactcaaactcattgtttgggccacatttcaatcaagcatcatatcttccttattattattattattattattattagagtaattttcaatttagttaaaattttggggtataattctttagatttcaattattatgtttgagtctctacttttctattaatttttgaaataaattgaaaagtatcttttttatttatttatttatactctctaatatataattgggataatttcacaaatgcac

SEQ ID NO: 79431 - DNA, 3032 bp, Cannabis sativa
aaaaaaaaaaaaaaaagtaaggaaaaaacaatatatggagtaaataccctatttttttttaacatgtaaatgagactaaaataaatggaaaaaaaaaataagcaataaaagtatttttgtaattaaagaactctttgaaaaataaaattgaaaaacacatgttataaaaaaaagttaaaaaaatcaaacataaataaaaatataaaaaaaatgtcaaattgacatctagtgtaaaaattccattatttaacatatatcaaacagtaataactttaaattgcttcttcagtttagacaagtgtattataaaaaatgttttaattaaaaatttttagtgtttggagagtcacaaaaacttcctcaaaatcttttgaatttttttaaaaaaataattatgtacatagattttttatcattagtccaaacaggactgaagtatcttgccttgagagcaaaaaaaaatgtttgcattcacatgaaatttctaatggaatttataaacttttactgcaaaattctcaatagctgtattgactattattcatgtcacgatgtagatacaccaaacaaaatgttcaaagttcaaacttttactaatatatctaatttacactgatgaaataatatttttccttgtgggaatatcttacatgcagaggaagagcctactcaggagctgtaacaaagcacagcctattattgtaagtaccaggtaacttgcaggtaggaagaaaacccagttcaagataataaatcatcatttttacaagtggacaaaatcaagcatcggctgccttctctagacgagctgcctctggagtggcgttagcattgatacctcgtttagcttcatagtctttaacagcagccttgatagcatcctcagcaagcatgctacagtgtagcttaactggagggagtgacagatgcttggcaatttctctgcaaataagtgaaatgtacattcagaaactgaataatgttgaagatgagaccaagtatgttgaatgtaaatcgaatggaacacctataaatttttcattataaaccctattatttaagtcctctaatcaactcatttgttcttttcaaaagatacaaggatgtacattacttatgtaacacaaaagtaagtttcaagaaagagagaaattacaataactgaagttactaaactatacataatagaaaaataatatagtagatttgattgttgagacacgaaaataaaatataaggccaatccataattagctcaaacttacgtgtttttaatggttaggacttcctccatttgtttgcccttcacccattcagtagctgaaagaagaaggcccaatgagttgagaaataagaaacataacaatccaatttacattcattagtcacaaccaacccttcaaagacacaacttggaactccaaagcattttacggacggagagaaataaaaaaggcaagtttaactcctgattagatcacttggtaggtaatctgtccgtttcataaattagattagggcaaagggtaaatggataaaacgaaatatagtctcaacacccattgccaacttgtaatatatgcatagagcatgtaattcgtaagcgtgtttacaacttaaccagaatgctaaagctacagaacaaatatatgtgtgtgtatacaaacatgcctaaatcttgtcatgacatgaccagcaatacatcataaaatgcaaaatctttaaaatgtcaattgtgaacaagcaaacccttgatgaggaggagataagcctctgaagcattagtaataatgacaactaaaatatattcctataatcagctaacgacagaattctataaacaacacctacacaaaaaacataaattcttccattgtatgcaactgaacatgaatcaaacaaaaaaaaaaccattataaactacataaacgaaagaaacatcaaattttctccattgaatagttgtcgtcgcttagctcactacaaatcaaagaaaatgataagataagacaaccactaaaaatcaaaaccgtaaaaatgtactctttcacacatcataatccatcagcaacatcctaaaacaatgggaaggtaagaaatacgaagatgctgtaaacagattcaattccagaagttcccacatattgggaaatttttcgatcatcatttaggtgaaataatcagaacaaacaattacgctatgatcccagatgaaaaaaaaaaaatataatttcacaatcagaaaataacaaaacaaacaaataaatactaaccgacagaggaagacgcgatagctgatccgcagccgaaggtcttgaagcaagcatcgacaatcttgcccgtaccctcatcgaccctaatttgaagcttcataacatcgccgcatgccggtgctccgacgaggccggtccccaccgttggatcgctcttatcaaacgatccaacattccgggggttgttgtagtggtcaacaaccctctcgtggtagtgacgtggtaagacctggacggccggtgactgcgccgaccgtgacgctagagcttgtgcaattctcttcgacgtgagcctcaacatttttcgaattcgtggtggaagagaaatcgaatggtgcgaaatttgggtatttagggtttgagtattgaggcggtctcgattttgtgttgtgtatgtacggatggtgggctgacacgtggagggcaaagatgattttagattattttatcgattgggataatgatgaaaaatcccttatctgtgctgtggacacgtttggttcacatcgtagtgggcctttcaatttaggctatgatttgtgggcaaatggcagcccaaataagcaccagctaacgaaaaaaaagaagcttacaaaaatactggaatttaagttaatttttataaaaatactgtcacattgaaaagtttttaaaaatactgcatttttataaaacactagtaaaatacaaaacagaacaactcaaaataacagtagaacaactaaaaaataccagtggaacaccagtgaaaacttaaca

SEQ ID NO: 79432 - DNA, 3895 bp, Cannabis sativa
ttattattattattattatagatgagatgagatgcccagaatctagcttacaacatttaaaatacaagtgccatgtcataattgaaaatgacaattgggtgaggggacttttgtaaggcaaactcattgtgcgttttagctgtctttgtactcttttcctttatttatttatttattttttttgttttaacaaaaatttcaccatcatgataataataataataatcctgaaatatttgtgaaactttgtatagtactgttccttctttgtctcaacgttgagttacgctagatctaatgaaatcttaaataatagtaaatcgatgcttttccttacattgatttagaattaatattacgtgataaagatttcttaacctccattaatattggaaaaacaacacaccaacaccaacaacaatatttatgtattaatattctacctatacgtatgaatgcataaaatgtcaatatacttttcttttctagtcgaaaacttatcactaaaacacaatatatagacaagtattacaataggatatgcaaaattgcacctacaataagtacaatctaattgaggtacttaaatttagaggtgcatctgatcctactgcaaaaaatctaagaaaacgaccaaatcgagtacaacgactgtctaaataccgaaaaaaccgtctttgcacggtcagttttagtgttaatgacaaaccgaccgattaaatgtatattatacactatacacatataatataattatttttgtatatatttaatatacaattctattacaaaaataattggagaaaataattattagaagtactgcttcaattagactgtgttccacaacaaggttatttctttgtatcctattatagtccctccctcctatttataaatatatatataatttctactcaatatttttttttaatgtataaatatatactttttctaataagtttgagcaacttaaggcccccttttcaaaaaaaaaaaaacaacttaaggttttatatgataaattactgttggtttttttttttttctatgataaattattatatacattatagtactaaaaaattacacagaaataattatattgtgacaatatttattgcgacaatataaatgccattgcgcaacagtatcaatagtgtcacaagtctaaaatttttggaagatatatagtgccaaaattatttgttttatttttctaaataaagatctttcgtgacgacattatcatcactacaaaggaaaaaattgaacaataaatcccacacctgaaatttaacaaaactgaaagaaggtacgaaatttggatgttaacaccatgcagtaacgacatgtcatatatcgctaaagatgaaatatcaaacaaatatttctcttgaaatttattaaacaaatattttttttctgggacctatagcgacaacattatgattatagatttaatcaaaaaaatttcatcaaatttataacggtgatattcttaaaaaaagtttacaacatggatatttttacatgaaagtgatgaatgatttcgtcgttgtagggttttttgttgagagcatagtgaaaaaacaccatattaagtgtgtgaatgatctattggcaacctattatagcatggttataaaaaaattaatgtaaaatcaccatattaagtgtgtgaatgagcttgagcaaaaaaagtgtgtgaatgagagttgcacatcttaatcttaaattcatgagctacatttgttttatagctattgcaaatattatttggacagccaataaatttttggatgttacagaatgacatgggaggaagtttatagcgtaaacttgtaaccaaagttgaaaaatgtcgctatgtttgttcattgggttctatccctatttataggagtataaaatgacagttattctcttagaatcttcttacttgtaattgttcatgaaatgtaaacattcaatatgtttcatatttacatcacatggaataattataaataatcgctgtaactgctctttgtccttatttatagacggttatgctaactacgcttcagtagttcttgcaattcaatcaatacttttcttaaacaccatcgtgggacagcgtctaagtatatgtcgtagtattcctcgcgttaatgttgagtgagatatatgtgagatgtttattgcagcatgacaaaaacgagatgaatcatgttgaagttgttgtctttattctttcaataaattcacgtgtatgtgggtcaatgagctgtaaactaattatctacctgttctaaacaattctataatgtactctatttatcccgagatagcttttcttcattcctctcattggtctcatcagtcggtagtattactcgcgtctcgccattatctacatgatggtgagttcaagtatttctatcaactgtatttctcgagacaagtcatctgaatgcattgattgatgcataatttgagtcggttcatatttcaactatgttatacgtgtcaactccatattgctgcttaaaatatgagtataacaattgccccctaaaaatactttttaaaatgtaaaggacttcttaattgccttaagggtacgatcatactttttccatttaaaaattgtatgcttttattttggtgattcaaaacttcgaggcaaatcatttcagcatttattgttttgacctttctctttctaatagctcacatcagttcgatctatcatcatcgctatcaaatagttttcaccttttgggtataaatttcaaaattcctttacttttgccattttcacttacaaaatccttaaaattcaaaaaattctcagccacttttttttttttcctgaagttccatggcctcaatgtttttcactttttttcttcaaatttcattcgactgcacttctcaaattcagaatcgccaagcttcagacctctcgaaccaagagttctcatcacgaaattcttcgagacccagattttcccaccaaagtgatttctccccaattaatctctttacttttttcattttaaattctttctttgatctcgtgctatgcaagcttcttttctatcttttatggctcaacaaaagggttttcagagcatcagccaacttaacattgagcttcgcaagtccattaaccaacacgagctcttggctaagcaatggaacaatgtccaataagaaatttcttgacaaaagacaaatgtcgataatttagagaaatctgagaaggctttgaaaattaaaaaagaagctttaaaagtaaaaaaatgagcagcttcgcgaggctaaccaactggcccaaaagaatcttgaagaggccaacaagaagctcaaaaaagccaaagtggatgctcatgagagagttaccctgatggccaaaaatatttttgttaaagtacaaggatcattttactattataaaaaatataaatggtgcatttttatttttcacaaaataaatggtccaaacaacaatgtcaattacgcatatagattatctagaagccccaattacatcccatggccaaagtgatactcgattaataaccgattgtatcaaactattcagaccaaagttctttttttattatgaagattaagaacctacatgtatcaaatcaaagttatttatactaatccatggcttacatttgaaggatttaagcagaggaagaaaagagaagaacagagtttgttcttgcagagagaaaatgaaaagaagctcaacttttattaatgaagtaaaggtgtttatatacaccaagcattacaacagaaccaaaacaattacaacagaataataacaaaacaaagcaaaggaaaataacagaactgtaactaaccaactgtcaaaacagttagttagttaaca

SEQ ID NO: 79433 - DNA, 3169 bp, Cannabis sativa
acatcttcttagagtggtcatgttaattgtattacatgtatctatgaacatattttgataaagctttcttttatctatattttgaatgaaactttctgatatcggttggaactttcctatatatctaattactcaaatagacatgcaaaattgagagctatatctaatctgatcacatggctagttcttaaagcccttttttgtagtagtgagggtctacatagatttttgttaatttgcaacacttcccgttaggtctaacctagttttgtttgtttttttgttctttatgttgatttcagatcgactcgtatataaatttttgttgttgtaaacccattatccgatcgagcttcaattttagcctaaatcaggtaattctatttacgacttcttttacaaaccttttattctagctaattcgattttgtttattgcttatagtattgttagcctactttgcccatctgttgatcagtttcttttcttggtttgtgccaattttttttttttttcatattgcttggtataagatgaatttagtatgggttagattatgggtatttgaattggtgggtgaatgtggtaaatttgtctatatatttgtttagtaaagcaatttcaattggaatttctaataatggtctatctgaatgaataggtttttgttgtgatttggtttggtttggtttttcttgatcagttttctcaatgaataattccaatacgaaaatgccatatattccagcatttaatgtgaacatgcttaatattcttattttttttgtgaagtctttcaattccttatgaactcctgagtttttagagttcctctttatgtttgtctgctgattatagtaaataaaattatattttaggtttgatggcatcttcttcggattcatggatgaaagaatataatgaagcagtgaagcttgccgatgatatcaatgggatgatatcggaacgaagttcactgcctggatcaggcccagaaatgcagcgtcatgcctctgctataaggagaaagattacaatcttaggcactagacttgatagcttacagtctgttctatcaaagcttcctgggaagcagcctatgtaagttaacttcattgaatttgagcaacttatcaaagggaaacctgatgtcatcataaaacttaacagtgtcaaatgttcccactgtagaattgatgtttgtttagataaaagaaaatgattatgctttctgattaaagttgattctactattttctatgcgatgagctggaactgggaagattccatgaagtggttaaagaagtaccaaacttgatttatataaatgtttacttgattaaatatggtgatattaggaaagtcttcattttaaatatagaagtctgggtgttggtttgaaacttgtttacgttgtttattgcctgttcacagatcagataaagagatgaatcgccgcaaagacatgcttggaaatcttaggtcaaaattgtcccaaatggcttcaacattgaacatgtcaaactttgctaatagagacagcttacttggtccagaaataaagcctgctgatgccatgggcaaggcagctggcttggacaataatggccttgtcggtttccaacgacaagtcatgaaaggcattccgctttaattatttgaaacaatatttttctttttgtattatttctttatgatttttttaaatgaaagatcattaattctagttcgtaactttgaaacagagcaagatgaaggccttgagaagttggaggagactgttataagcacaaaacatattgcactggcagttaatgaagaactagatctacacactagacttattgtatggtttagtttttgtctcttgagttctccttgattgtttatttttcaaaatgttctgtgctctacgtataataatgtaactacgctgttgtacaggatgacttggactaccacgtggatgttacagactctaggctgcgggtaataatcgcattgttcatataattctaataagcatgaagttgtttctaatgcatgaactttacttttataccttcagtctgtggtccgtcgttaagtcaaaacttgttagtgtctttgttatgttgttaaatttatgatataattgctagaatgattgtaataaaaaaagcaggagcaatataattcatttttaaagtctaagattctagggtacacaatgcttgaagactttgatatgacatagttttagaatatttggaattcttcgactcatctccaagtaattggatgagtcggcttggaaggaagcctaagaaagagaaaattatatgtacatatgtctgaagactaccaaacctcctgcaaaaatcattgttagatgcttactttttggtaagaaattatcacagtgaaagagtcctcaacagaagtcaaagatagtattttttttggtgaaaatgttgtgttcataggtagaaatctggaactaacatcatcttatgttatctattatatacaaaaacagagagtgcaaaagaccttggcaattatgaacaagcgcaccaagggtggttgctcctgcatgtgcatgttgttatctgttattgggattgtggctttggctgctatcatatttctgcttgtcaaatacctctaataagaaagaaccacgagattacaacaaaaacagggactgcattttctacgtttgtgcttctttgtgtgctttgacttttactattgccataatggctgtaatatagtatatgttttttgtgatttcatcttgtgcatttgtgaagaattgtggataattcaaataacttgtttgatgtgtcatttggcaccgatttttcttcaatttgcttagttttttttgtccatagtcatgcttattttttactgctctctagccagatattaatggagctaacagcatctcttaagtctcactctttcctttaaaggacaaaaacaatgaaaatagaataaatgattcagaaaccctaacatatgcccaataaagatagggaaattttggtttttcatgcatattttaaggtaaaattggttagggaaattaaggtataggtaattgttagtataggcaaaccttttttaaaacctaaaattacccctctcacaaactaaccaactcccctctctctctctctct

SEQ ID NO: 79434 - DNA, 2026 bp, Cannabis sativa
  modified_base (1327)..(1330): a, c, t, g, unknown or other
agcaaatatttacaagttatctgatccacgtgtccctgttcgattggtccacgtatattaggtgaaatcaggggcaacaaatatcatatacggttatgtagtttatttaaaaaaaaaataataattaattaatgatctccataaatcaaatggtaagagtttatactctataatgaagcaaatataattaattcaaatttttctaaacagccttcccattttttattattaatttatagaataaatcaattaatttataataaattaaatgatagcaagaaaattatcaaacttgacagtagccctagaaacacctaaacccctcgtcgaagtgttgccaaaatcctcgccagcacacgtgtcatctccggcaacggtggaaattttggctcccttgttgtgcttggctcgttatttcacttggaaattgatcctactgtcttacttacctaactaggacttaaaaataccaaaaatacgaagcccaaaacaatggaaccaattcttcttcttcaaggacggtacaccgtgaaacatggtctctgaaatcacaaatcttcaatccagactatttttctcagttttttcacgtccaaaccactcctgaagtgtcccttaagctttaatatcactttctaatacgcttgaatcggggttcgtttcaagaatgtatcttcgaagcttcaacaatggtggttctgaaaaaaaaaatgatcttagctagcccgctctcctagatctcaaacactcaaactcacccagattgtatcctaacgtatcatctaatgtgtttaaacaacgaatcgattgtgaagcgattctttatcgatcattttgttttattaagataagttcaggtaattagggcacgtctttattactagactaggtttgagagaaaaagaaatgatctaaaacctattcacttggctctgattttgagagaatgttcgatcttgagatggaaataaaaaacctaatttgatctattgttgggagataatggcacttgtttacaattgctttaagtaacaccaatttcaacaaacttatcccaaatctcacacccaagaatgatgaactcttttagagtaccttcaattcaagtgacatttcattgttttcccaccataactctactaattaaagaactggtaaatactattttgttctctgtattttgtaaaagttattaattagactctctgttttgttaaatgataaaattgactttaattataaattttaaaacagtaaaaataagactctgagttcaatttcaataattttattttttaatattaccaactttaagataatttctaannnnaacagatacagaaaatataaccagttttgtcataatatctctagatcatattattattaaattttattttgacaaaaaattagttcagtgtcttatttgtataattacccttaaaagaattaaactgatattttccagaaagcatgccactcaatcataagatgttttaagttgactaacttctccatgttctaaagtaatcttgtcaaagataaagatatctcaaattgtttcaattcacacaacttcttcttcaacataaaacttattcactgaaacacaaacccattaaactgatgatatgaccacttctaccaaaggtggtaatgtcaaggtacaggggttatggaggttccatctccataactcgtataccttgacaagatttagatcgttaactacttcataacttgtctttacaaataaaattgtccaaaataagagacataaccacccaacaaatggaaatataatgcacaaaagcaaaatggatgccacacctccaaacaacaccctcatttttcttattgaaacccaaacacttcttcttacttcatcatcattattcatattattattattattattaatattgtcatttattatgaatgtctctatggcccatgccaaaacataagtaagcaaagctacaacaaatgctaccattattccatattgggtatcaaatggggaata

SEQ ID NO: 79435 - DNA, 1047 bp, Cannabis sativa
aaaaaatcattacatattggaatgacagtccaataatttaaaatgctagcaaataaaaatattgagttccattccattttgttactacgccacctaaatccataacaagaatgaattataagtttatatttttacttttaacttggtagtcatgaaaaaaaaaatcccaaaattataagttcgatgatgagcccaataaagagtttaaggtatgtacatttggggcctggggtccatgtaaaatggacaggtggaggtggtccatgaataagaagcccggacattaagcattacaaagtgtgtacatgtcccctgaccgacactgtattatatattatggtcccaacactccctcccaactccaaaatttcttatttcccattcccactaatcaataatctcttgtttatttcctattccgactagattttcttgtatattaaactgatatataaatgtgtatagatcattttaagcttttgtattttgcttaaatattgacttagttattgaggtttcaaatatacgatctaattgtatttgtgtgttttgttcacatgcctacttactctttatgtacaacatagttattacttgttacatgtgaaacgataattatacttcaacataatggaaaatgctaaatattctaaggggatttataactagtgtgatgtagcatttcttaattagtgcctcattttgatttgacatcaacataatcttttcatattagattaaacagacttttttatcattggaatgagaattattattactttttaatcttcaaaaatcttcctcatttctctgttactaaacaaattcaattgaaaccttcaagtcaacatgtgtggaaaaaacaactatgtacgagtagggctgtaacttggaagattacaagaaatggaccaagttaatgagttatattactgaaggcccagccctgaagctggatggattatatacatggcttgatatgcgtttctctcatctcataccaaatcacggctttaaggggcgcaatttatttttatttttagataa

SEQ ID NO: 79436 - DNA, 1417 bp, Cannabis sativa
atattcaaatttaacccaatgaaaaagaagaggctcaaaagtgtaactcaaaatctgaaatgaaatagagaaatatcatagaacaaccataaatgtaatcctgcaatgagaaaaaagtctggtctatattagaggtcgaggttgagacaatgtcacaatgactgagaccaatgttctccgcaaaaagaaaaaccaagctaccaaattatacttaatgaaacatttttatatataaattcattaaaaatcatgtatatcttcatattatataaaaatcaaaatccataaatgtatacaaaaaggtacaaaatacgaaaataccttcgtacgggattgcttcaacagttcagtgctgcattctctatgacagtcgccaaagacgggtgagttgtagtgacagagctcaaagccaccaagaaaaatccaaaaatcacaacaatccgagaactcaaattcccaaaacaaatcaaaccttacaaaagcatcataaagctataaaaaaaaattaaataaaaaaacttaaattatcaggcagcaatgagagttagaggcgacgacgatgagccacagaggaggaccaatggcgacgatgatgagccgggaccagcggtagcttcaaggatttttcaaaactccatttggcgactttaaggtttcttcgaacttggatggaagctttagtggagacgggagagaagggtgattgatagtattgatcaaagatcaaagtatgaggtaaaaatggtagatcaatagagaagatgagataggtgcctccgcagagaggcggctgcttaagtcttatgaagaagctgaatagggttaggtcaagcttagttataaattgtaaataatttttcatctttctaaatcaatagaataaaagtttaatataaagaaaaatattcatgaatctatgacacgtcacaaaaatttgtacatgtctagtcaaatatacatttcacatatttttgcatgtaggcgtatatcattttatttaattataaaaataaaaatcaaatgtgaaacatatagaatgggcgggaaactttgcccccaaaagttaattctaattccttcaaaatatttaatagaaaaaaatatatattatttaatctaaaataaatcgtcaatatcttcacctacatataataccaagtttagattatttgtaggtaaatcctttcttcagctacaaatatatatttgtaagtaaattatttgtagctaaacctcagatttcttgtagtgtgatgtcacgaaatttacattttttgtaattaggtaaggcattaatttttgtaaaatatttatatttttaagttcaaagaatgtttatttatatttttacagttttcaaaaaaataatacgaaaacaacataaaatcaacaaaaaactacataaaaataacatgaa

SEQ ID NO: 79437 - DNA, 4970 bp, Cannabis sativa
  modified_base (26)..(26): a, c, t, g, unknown or other
aatttataaatcaaatagacaaatanttgataaggtgaaccaaaacatacgcaaatgaatgaaaaatacttgcgtttccatattgatattgaataatatggattacattgaaatggagttttatttagggcatagaacccaacatcgagctccccgagctgcaatacttgtatcaggaggaaccatctggttgaaacttttgtgatcgaagaatctggctccagcctgtctgttcgctctcacacccctgtggaggagaatgtcgaatctcctcgcaggagccatgagaggcattgcctggaactgtagagggttagggcagacctctacagttcgtgagctgaagtccctgattaggtcgcgatctcccgattttgtgtttttgactgaactaaaagtggatgctactccactggtacgtattctaaaatccctacacttttactttaatataactgtgccacctattggtattgctgggggtattatattagcatggaagtatgggtttagttttgaatgtatatcctgttctcgcaaccatatttcgggtctggttttctcggatccccccacccactcgtggctcctctcgtgtgtgtacgggcctctttaccttcatgcaaagaaaaagttctggtctgagttaatggctctgggggataaatttggaggtcactggttaattcttggggatactaactttgttctcagtctctcgaagcgtgatgggtctaccggaagggacccttttattcctttcatttctaaccttgttgaagctagaggccttatcaatatgcatatccaaggagggaagttgacgtgggataacgataggtcaggaggtagccgtgtgaaatctgctcttgacaaaggtctagggaatggagcctggatccacctatttcctaaagctaccctttgctcctcccctacgtgtaattcagatcatagacctctttgccttgatataggggggtctgtccctaaatttaagagatgcttcaagttcgaagaaggttggacgagagatgaaaggagcggcctagtggttgctagtgcgtggggttcgatcaatcattcatgggctcctgcccggatttttaagaaactgggagcaactcgtgtggctcttcttcattggaacataactcaatttgggaagattgatatgatgctcaaagaactggaacagaaactggactttttacaaaaattgtcggctggggatcgagattggaatagtgaatgtgagattcgacgggcactgaatgaaactatggccagaaaagccatttactagaaacaacgggcaagaatttcttggcttaaggatggcgataagtgctcaaaattctttttcctatcggctgcaatcagaggaagaaggaatgccattgattgtattctgaacaagaataatgtctggatctatgatcgggagttaatttgtttggaatttgtggatttcttcaatggtatctttaccaattctgatgttggtcgaaactctgaccatcgtcatttgtttttggaaaagacctcctgtgatgatcaggaagggaccttagtgtgcccttctcgtgatgagatcaaaagtacgctgtttcgtatgagcaaccataaggcccctggatcggacggaatgtctgtgttgtttttcaagcattattgggagtctgttggggatgatttttgtgatgctgtctcagatttttttgccacaggtattatgcacaagggcgtaaattctacaaatgtcgtgcttatcccaaagatccagaactcgaaaagacctaaccacttcaaaccatatcactatgcaatgtgctttataaggtcatttcaaaaattctagctaatagaattaaacccattctcccttcccttatatgccccactcaagctgcttttgttccaggaaggaatatccaggataataatgttttggtgcaagaaattattcactctttttataggaagagaggcaaggagggattctttgctattaaaattgatcttgtcaaagcctatgataggctaagttggagatttattgagcatgttcttgattgttttggtttccctcagaggtttcgtaattgggtttctcaatgcatatctaccaccaatctcaatatctgccttaatggaggtcaggtttggaagattattccctcttgtgggctccgccagggtgatcctttatcaccttacctgttcatttgtgcagctgaagttatgtcaaggctattagaagaggcgctgagtaaggggaatattcagggtattaagctaagtaggggaggtccggtcctctcccatattttcttagctgatgaccttatgttggttggtagggctaatttgaacgaagctaaacagtattggaattgtctagagaggttttgtgatgggtttggccaaaaagttaataagctcaaaacgtcaatattctttaagcaaaaataccccgcttgggatgagaagaggtattaaggaagctttgggaatagatgctccggaaggtgtgattaaatacttgggcctccccctattcaggtctaggcaaaaagatgcagattttagcttcatccttgataatctcacttctaaattacagggctgaaaagcaaaaactttgtctaaggcgggccgagctacccttattaagtctgttggattgtcaatgcctatctatgctatgcaaaccaccaaactctctaattgccttgttaataggatagatggtttggtacatgacttttggtggggttttgagaaagggaaccatggtattcacttaagagcttgggacaaactttgtctccctatgtctttagggggattaggctttcaaaagaccaaagaaatgaatctttcctttatgaccaagtggggatggaatatcttgaatgactgtcagtcattatgttgtaaggtcctggaggcgaagtatctaaaagggaaagattttctcacctgtagttacaaaaactctgattcctggttctggaaaaacgttgtaaaagccaatgcaattctaagaaagggagcgtgtaaattggtgatggatgggagagatacgagcatttggagggatccctggattccccattacaaaggtttcgttccgaaaccaaatggcgtagttactgcttataacaactgtgtcgctgatctcttgtctcctagcgtggattgggatatcagtaaactaaatagtctgtttgaccaaaagactgtctctaccattctcaagggaggctctccctctggaaggaggaaggatagatgggtctggaccctggaaaggaatggacgcttcacttgcaaatcagcttatctgactcaggacttagacaggactcctcaatgtgttgtggctccttcactttggaataagctttggaatagcaacattcttgactggcataagattctttggtggagtatcctttctaatgctctccctgttcgatcagtgataggtagaagatttccgatagaggatatgagatgtcccctatgtggatctggggaggaatccgtggaacacttattcctctcttgtgacgtggcgatgcacctgtggcggtcttctccttgggaaatttatcccatttgtgatactagtattcgtgtttgggactgggttaaattcatctggggtctgaagagcaggggtcttagagttgaggaggtgtttctttatgcgtcaattgttgttgacaccatttggagaacgcgcaatgaagtggtacataataataattctcttgatgtgttaaaatgtattgacaatatttatacttattttgcagagttacatacctctatcttgccttgtcctacaccgatcaggagggagtcctggctacctccacctccggagtggataaaattgaattgtcatgtaagagtgggattagagagtatgtgcacagctgtagtagcaagaaatcaccttggtagggtgatacgaattcacactgctcggttggatttctcggatgttctttgtggtgaggctgcggcctgctgttcgacgatttatatggcgttggatttagggtctaagtttgtcattgtggagagtgactcaagactagccatcaatgctctcaatgggaaggcgtcccattgggctattgagaactatttctcattttgtttgaagtcttctccctcttttgtcagttgtaactttataaatattagtagggactgtaactatgtcgctcataatgtggctaagtgggcttttacccactggatgtatggaattattctgatttcctccttactggaggatcttttatgtaatgaccgggaggtctaaacttaattaattaatactactacgctttttctcagaaaaagatttaatttacatttgaataattatttttgctaaaagaatatagcttacgaatataaaaaaaaattatccattttatctcaaaatagaataaaagttaaaatattgaaaatatctattataactactactataactattatatgaataaataaattaaaatagaaaaattttaaaataagaaaatattaaagtattatatttttgcttgaatggtgtgagatatgttaaaagtattaatatatgaccaaaaaaaatagaagaaaaagaaatgaattggttagcttacactacaagacaaaaagaaagagaggcgagagagtataaaagaaactatgagatattaaagtattaataggataaacatgacaatgagattttaataaaaagaaaaggatataattgaaattttaaaaaggaaataattggaatttttttttgacaaagtgattaaaatcactcatgaatttacgacgcccatgtccgccggcgggaacctcctcaagccaggatagctcaccgtctaaccgcagagcatgctttgccaaccatgagccgcgaaaatcttagagcgagccccatggga

SEQ ID NO: 79438 - DNA, 2168 bp, Cannabis sativa
ataaataaaattattttgtcaactaacttggcaaaaaaagactttacaaaattaaaatattcatttgagcaaatttgattttcaaattaagtattgtacatagaaaatagtcttacctatgattatggatttggaaatcacggtctagaaagttagaagatagtttccaaaggtggatgaaagggagagatatagctatgaaagagagagaattaaagaatctaaatagtagaagagagagaaagtttcgaaagaaacttgaaggaatggaatggaatgtgtattagatgatagaagataatcaaagaaagaaatatagaatggggaaaaagggaagtagaaagaataatagacagagagaccacttctcttctctccacacgagcttgacatgacaaaataaatgcaaatagtttgagtgcattctcattgggtcccaattaaaagaacatataaccttttggcatgtatgagaggtcatcattgctaattaattaccggcatgtttacataaactcaatggaatcaattgtatacaattatttactaaattttaaattaaaaaaaaaatatctcacacaaattagagtaaaaatcataagaaattttttctctatttttatagagaatatatttcatttattattttattttaattttaattttattaatataaaataaaaaagctaaatatatctatcaaaattctatacatacaaaatattaacatgttctcacaatttattaaattaaaatatttcgattatttttttactaaataaaataatataattttttttttcaaataatataataaacagcataataaaatattatttttgattattttttattttgaacctatttattttttgtattggttattgccattctaattacagtttaataaatattatactaaaaccctattttggtaaaataaatctttattattagatagagtaaaatcaattgagatagagttaaaaaaaaccatgttgatgaaactttcatactatgtgcggtttccattttgtaccgaaaagaaaaaaaatcttattttttttcatgtataatttcccacaaagtaaagaaaaagtgggattttacatctacttcatccttaaaaaaataaaaataaataaataaataaataatgaatatttatgcataaatggaataaatgttttgaagttgtaatctttaagtaatgaattcacgagatattaataagagaaatcacaatcaaagtcataaaatgttgcttaaaatttaattattttggagaaaaaaaaaataaaaaagtggactttatagataataaaccataagcataattaaacaaagatgacgaccaaacgagaaaagtattttttaaaaaaacaaactacaatttaaagttctgatttttttttttcttttttaatatataatttgagccaaaaaaaaaaaagaaatatatatatttattttgactagaaaataaaagtcaataagagtaagaattctatttttttttttattgaaaggtgtaaaaaacctaagaacaaaaacagataggtgaataaagtaagaacgagagagaaagaaaatataggaagcaagggtggagaacgttgtttactatttttctgaacaaagaaaatacataagacgtgtcatttaccattgaaaacgcgcaaaccttcgtcttcttcctttcgtcttctttctttctttccttcttttctttcgttttccctcctttcctggccgacccgtttcgtcgtattcttcttattaactcggccatgaattctaatcaaaatccaccttcttaaaccatccccaaagcttaaaagactaagctttatacatttgttttattcttttcgatactgggcataccttatattttaatattcttgcgtttaaatggatcctcgaacgagattggctttgttgggtttattatcgtttttggctttgtttttgagtgttaatggtaactttgtgttctctgtgcacaataagtttaagggcaaagagcgttctatgagtgcattgaaagaccatgatgtccgccgccatcgtagaattctttcggctgtggatctggaattgggtggcaatggtctcccctctgaaaccgggttggttttcttcctactttctatttttaattaaaa

SEQ ID NO: 79439 - DNA, 3430 bp, Cannabis sativa
actaatttatttgtgcttacgtatcgtatcttttgtgtttcttgtgtcgtgcttaagagcatatttttcgtatcatgtcgtgccaatttatagcattgtgctgtatcgtgcccaagtccatattcttttgtacgtagacttactcatgtctttcgaactcgtgttaatttcgagacatgtaaaaaaatttgaccaatatttacaccactaattacaaacataacaaaacaatcagatagagatacaaataattgtatattaacagaaaacgacatgtagttttcatacataagttacaaaacataacaaaaacgacatgtctattatacaaaacgacatgtcgttttcatacactggttacaaaaatatctgtataacagtgacaacacagtaactggtgacaccaaaccaaacacaacaacacttgtctcaatcacaaccgttgatcaaaaagccaaatcaaccctgaccctaatatataaactgcttttgtaaaagcacatgggctcttcttcttcagtttacaacttcactgtctgtgtcagactctgaatccttatccatatttttgtatattattggagttttgtacttaaacaaacaccagatcaatcagagccagtccagtactactacttttttatgtccaagatctaaggaacaattgatttaaggtacaacattattttaaggtggttgtttttttttttgttacagttctgttcatgtttgatattatgattatttcaaaagttgttaaagttgatagttgttgaagatcttgtgattcatgattctgggtattcaaaaatgaatctgaacaaatcaaaagtttgattctttttttcattaaacatgtatagatcttagcgatcggttagtttggttagtgatctaagtcctgtgtttattcttatactttatatgaatggatactaactgtttgtaaaaataacttaaaaggaaaggaataatatatctatatatgtatgtatgtttatatatttacaaaatgaacaatgattagtgttgatttagatcaataattagtggagacattttcatagtgaaattgaaggtttttggtggaatttattttgtcaataatgaacctttgcaatattaatgatgattctcaatctatatatataaatgaactctaagtgtttttaaaaataacttaatgggaaggatatataatacaagggtaaatatcgttttagattttatgttttgcaaaattaattttgttaaataataaattaaattttgtattttttaaaatagtacaaaataatattttgagctgaattcgatcgaagtgttaggacaacaatttatcttcaagttgattatattaagaaaaaaaaaattgatgaaaattgagcttagggtactatctatactattttattaacaaatttatagtccagtttattatttattaaaataaaaaaattcaatttgtaacttttacaaaatacaaagttcaaaatgttattaacccaataatacatataattatatgtatctatttgcaaaatgtgcaccatggtggtgctcagtttaaaatcaatgaggttattttgaatttccatctcagtttaacaatttatgatgcattttttgacatatttgtactgataatttagagcaatgattagtagagacattttgatggtggaaattacttctgttaataatgaacctcagtctaaaatcattgaggttattttgctatttcctactcagttcaacaatctatgatgcatgtttttgacactcttgaagtgatttagagcaatgattagtttcataatgaaattgaaggtttttatggtcgaatcaatttgttctgttaataattaacctttttgtacttttgagattgttgtagagaaatggcattagtgtcaggagaaaggtcatcatcatcatcattgaatccaaatgcacctctgtttgttccagctgcactgaaacaagtggaagatttctcccctgaatggtgggagttagtcaaaacttcaccctggtttagagactattggctaagccagaaccaggaggaggattttgatggtggtgccaatgcctatgataatgatgatgatgctttcgacacagatgatatggcgaacgatgcattcgatcttggtttcgttgaagaaggctttactgaccattcatatgaagctggaggagaaactcaactaaagcctccttctgataacaaaaagggtagtaagcctaatgatggtgagctcttgaattctggttttgaatgttatgaaatgataaagctgttatttgttatgtcttatgcttttttgctttaaaaggaagtgagtttattgttgtgaaaattaaatttagtattctttcatctccaaatttgtatgaacaatttgttggtgtaataggtcaaaaggatgtcaaagcaatcttgttaaaatcaatgaaagaaagtgaggttaagtgggaaaaaatgcctgtaagctaccgtgagaagccagttcagaagacgagcccaaaaattgcccattttcgcatccaacagcctcgttgaagacttgggaaatgttcgaaactgagaacttaagaaataatacaacgctgcattctccgaagattgagtttttatgagtcaacttgaggtgggatttttgtacatagatggcaaggttgcaactacttcatcttgttatattatcagtgtgtgtttttatgcttattgtctaagttaaatgcttgaatgttaggtcttttgtgtagaagagtatgtaaccttgaactttgctcacttgaaataattattgatcaagttgaactttaccaatatgaaatagaaaatgaaagacatctttttgatgtaactaaaagtattctcttgtttattatgctaaaagttgaacttaagagagtttgttgatagatgaggtccgaaattcgaatccctctttgattttacaaactttttacttctctaaagatattgtaaggttagatatgtttcaaaatcaagctaaaaaagctgcattttgattctttctttttcttcctcaaacttgaatttggagtttgttttatattatgatatcttgttattaaactaaaattctccatgagtttgtctaagcaaaatatgactcaaaaatccaatcacactaatatgaataaagctttttaagaagttagttgaaggctcaaagccatttttatgcacttaatgcatttcgaaatgaggcaatacgcagatggattataaaattatactttagttgtagttttctttaatcattttcactctcgaattttaacaaaaataaaactaactacttcctagttcgaggttaagtccaactaaaaaaaaagaaaattacttcaagtacttttctcgaagtaacatttattactaaccatttaaatt

SEQ ID NO: 79440 - DNA, 1038 bp, Cannabis sativa
tatatatatgttagcatgatagtactggttttaatctcctaaaattaactgacaggggatggtgggctccatatctttacacagctactatagcctcagcaaaatatttctttcaacatgttttaaggaaaaatacacttacacaggctcgtacaaacatttctcgccattatgacctggtactaattaaataaattattgaaagaacacacagaatttttttatctttttttttttttttttggataaagtaaagttgttggaaaagtaaaatcctgattactttacatttgtctctttgtgtgtttttagagtaatgaactttttgctctgtttttggatgagacaatgacatattcatgtgctgtatttaaggtcagaattgaaacctcctaataatttaatgttctaaaagtttaacatgtactagtaattttattgtgaattaaattattatttcagtcaatagatgaagacttgaaggttgcacaactacgaaaactttctattctaattgagaaagtgagtttctttattataaaattattgtgtataattcgatgtgcattgtcataaaatgttcttgtattctataatttttttttttgtctttattatataggccaaaattgaaaagaatcatgaagttcttgatattgggtgtggttggggaagcatggctattgaagttgtcaaaagaactggatgtaagtacacaggcattactttatcagagaaacaattggaagtagcccaaaagaaagtgagagatgttggccttcaggtactaaatataatcaaccaactaaaattcaatgaagttatttatcgagtacttttgttctctataacactctctttctagcaagatagttgacaagaactcataattatttaattttgttttgacaaataatgctggtaataggataagatcaaatttcttctctgtgactatcgacaattacctgctaactacaaatgtgacagaatcatatcttggtgagtaaatattaaattttgtgtcaagcaattaat

SEQ ID NO: 79441 - DNA, 1990 bp, Cannabis sativa
  modified_base (54)..(54): a, c, t, g, unknown or other
  modified_base (1936)..(1962): a, c, t, g, unknown or other
taccgtgacactcattaaatgtactctgagacccatttaatgtaccacggaatncattccgtgaaagtacatcagggacaaaatcatatccctaaataaataatagtatgtggtgttgaatgttgatcttgtctcataataaataatattgttattttggatatataggaaagaagatttgactttatgagtttacgttacatatgcattgatttaaagaccaacatacgattaagttcggaaagttaaatgaaatactacttatgttacttttctaagttttatatatacttatttttcaaataataaaggataagtttgtttggtgaagtgttagacaaagtattattagtgtcatttaattttatctaatatgaaagagagttagattattttcattttagcttttcaaaaattttataaattcttaaacataatctagtagttatagtcttgtttaattgagtttttgctttcaatttttaactttataagaaattttttatgagaaaattagtaaaattgacttctgttacaagaattttttaaagttaaaaactgaattttattagttacccaactagtagtagaaatacttttagagcttcaaaatctcaaaaatcatatattagcttaatggcttaaagatcttgaattcgaacccatcacctttccatttttcccatccctccctcaccactaagctagccttagtggcttatctattcttctctttttattcattatgtaaattatggaagtagtgttaaatgaaaaattaaacacataattcaacacatgacaactttgtgctattgacctttcaaccaaatccaataattttttgataaaacaaactaaatataacatttatctaattaataaaactaaatataataatttatcctatgaatcaacaattcatctcatactaaactaaattattattaatattgtcgagcttccgcttgagctaaatttactaattagttgtgtagctattagttataaaattatacagttattaatttggtaactcgaaaaaaaaatttacttatatatatttcatcatatttttctatgtgtctcaattttgtttttagaaaaaaatatattttctaattatgaaggggaagaaattaattatattttttaaaaaataaataaataatactctaccatgaatttatttattattttttgaatatagccatgaatttattaaacatagcaaaaagtaaatggattaaaaagtctttgctaagtaaatggattaacaatttaacatcaactgaaaatgtggtaagacaaagtcacactcacaatattttaaaggttatttgcactattatgacagtctatagtagtaagttaattcacttgttaatataattttaaattttaaaaaaatattgtacacatatatatacactaatattgtattacaattgacaaattcaactataatgatttagccttgtatgatttctattgaagcatatactcgaaagtgggtgtatgatgaacgttgtataatacatacaacaattagtaacggtaactagtctttaactagactagtatataacttgatttttgaagaaatatagaagaaaagtaaggagaagaatataccaaagaaagtaaagggtcttgatatatatcccaaagaggaaaatttattttagatacccgaaagtgtaattttatgattcataatgtgaataaatgagccttgacttataatactggaattttctgtcatgtgtggtttttttttctctcgtgcctcctcagggaggcataatcaataaaaaaaataaaataaagggagttggtttggttgagcatttgaggggatagggatagggagccttgtgcatgaatggattgatgtaacgtcctcgcttcaagtctccattgggtccttacaccnnnnnnnnnnnnnnnnnnnnnnnnnnngtacgccactctagctgcttcctggatt

SEQ ID NO: 79442 - DNA, 3056 bp, Cannabis sativa
ttgttaatgctactacttctttatcaatctttttgcattactaggagttttggcataaatgcactgtcaggggaggtaccaaaggaattgggacaacttactgagctaataactttgtaagttgtagtgcttttcttcttgaatatggcaaccatgtcatcatattttttcatgtaatatgtaatcttgtctttgaatcaactttttatatataggtcattttcatcaaacaacttctctggacctttgccaccagaactagggaatttatccaaattacaagaactgtaagttattgtaacaatattacatctcatgacaacatgaactattcgtcattcctttgtatttttttcttgtttacttggcagatacattattagttctggtgttagtggtgagataccttcaacatttgcaaatcttctaagtttgcaagtattgtaagtactttaacataattgtatttttctaccacatgatgattaaatagttttctcttattgctatataaaatctgtaacttgttgcaggtgggcatcagatactgaactcacaggaaagatacccgaattcataggaaattggtcgaatcttaataccttgtaagacaagttaatcattttttataacattgcaacctctttactttagctatttacatattaacaataaatctatgtttgtatgtaggagaatgcaaggaaactcttttcaaggacctataccatcaacactcgcgaatttgacttctcttaaagatttgtgagtaacaagttgaacagaatcatttcataattatctttacttttcttaggctcaagacaaacttaagtttgaattatatgtaggcgactgagcgaaatatctaatgcaagtacttctctttcattcatcaccaacatgaagtctctgtcgattttgtaagtaacatattttcaatacataatcataaagctcatacatgtacatttttttttcttgggattataatcaaacaactttttactacaacatgtagagtactaaagaatatcaatgtcattggcacgattccatcgaatattagtgaactcaaagagttgcaacacttgtaagttcattcatggactactttaaaactagtcaattttgaaatttctaactatgaagctgtaatactctttcttaacagggatttgagcttcaacaagttaaatggacagatccctgactctcttttcagcatgagttcacttttcgctttgtaacatatcgataattttatcttcttgattgaatcatatcatgtgcaacataacagctatgaaagcaactaatttttgtttatttaaccaggttgcttggaaacaatagcctaaatggtacattgcctcagcaaaagagtgaatctcttctcaatatgtaagctaatcacaagagttatggcaatgattttgaaattgacactcttcttaattgtgatatatatgttatatgtttccagagatgtatcatacaataatctagtgggaacaattccttcttgggtcaacaaacaaaatctacacatgtatgcctttgtattttcggtacttgtaatgatcaatgcttgttttcccaccttctttaagtttatatttcacttttttgatgcagtaacttggttggtaataactttactatagatagttcaaacaacaggtgagttttcctcaagtttttcaaaatagtttacagcattattgctcttggttgcaactaattaagcaatatttggtttgttatcagtactcttctttcaggattgagctgtcttcagaaagatttcccctgcaatcgagatcgtcccctatgtaataacaatagttttcacaaatttctgttaatgtcttcttagtttcatttctattaatgcctgatgatattttgttatgcagattataactttgggatcaactctggtggtaaacaaattacctcttctaatggtcttgtgtatgaaaaggatgatgaagcacttggtccagctgattattttgtcaccagttccaagagatgggcagtaagcaatgttggaattttcttaggcaataacaatgctacctatacaagtaattcattttctcaattcacaaatactttagaccctgaactattccaaaccacaaggctttctgcttcttcattaagatactatggtttgggactcgagaatggtaactacactgtcaaactccagtttgcagaaattggtttcgaaaattatcagacatggaaaggtcttggcagacgaatatttgatatttatatccaagtaacgaccacctaattgtcctatgcatcctctcactatgtctctaaattttgttctaaacttaaatgttccaaattatttgtgtgaatttatgacagggaaagcttgaaataaaagattttgatatcaaaaaagaggcggctgcagtccctctccgagcagttcagaaggaatttaaggctcgagtttcacaaaactaccttgaaatccatctttattgggctggaaaaggaacttgttgcataccagagctcgaagtgtattatggacaccttccatttcagcaatcagtgctactccaagtaaaattaagcataatttaatatgacaaattctagaagcaaatgcaatgtggcttaaaacttggtttaatgttgtttcaatacagatttcaaacctactgtcagtaacattcttccaagccataagaagaatcatactagtatgattgcagggatcattgttggggctgtcattttaatccttttgtctgttttagttgccttctatgttgttcaaagaagaaagaagtcccgaacgaatgatgatgatgaaggtatgcattttttcttgttatgttgaaaatttgttgttgctttaaagtgataatatagatagttcatgatttgcagagttcttgtggatggatgttaagccattcacatttggttatgctgaacttaggacggcgacaaatgattttgattattctaaaaagttgggagaaggaggatttggacctgtttacaaggtattaatg

SEQ ID NO: 79443 - DNA, 1461 bp, Cannabis sativa
agttctgcagcaccaacttcaagttaaacatgttcctgcagtggctcaagcagactgtctaactaagcctgtttcaagctccaaattttcaaattttcgaaccaaactccatgttgtttctcaacacacattgagtttgaggggagctgttaaaggtgataaagttagttaaggtggttaatacagttagttacaactgtcagtgtttagttagactaattacccttatttctcaattgtatataaatagcttgtatctctgtactttgtcattaatcaatacaatacacaattttgtttcaacttttctccctcgttctctctctctgtctttgtttaatcttgacaatacttaatagtatagttatcgtaattttaatatataaatatcataaaaataatttttaatttgaagaaaagttaaattagaaataattaatagatattacttatatatttatatggtattttttcaaatcctatcataaggttcccaagaaagattgtattgcaaatttggaaaattataaccattctaaaattgattttatggactcggatctttaactattaattgttttcagattacaatattctaatactttgttataatctgttagttgctaggtgtttattgtaactaacttttctattatgtgtaaccaactatttcttaactctgtatataaagttaagttatcaatattcaagaaatcaaataatacaaacattggttaccaatatgataacctagtatgatatacaatagtgatttgcttaagacgtataattaatgaactccaaaatgactcagtagaactagaagcaaacaaaataaaaacctgctttgaaataatgtcaaaagaaaaatcaaattaagagcgagaaagtttaagcaatcactataagattggagattgaggtacaaaatttgatacaaatcatcacttgacaccttaattatgcttctttatttggtgcattaatcatacaccaagtaccaatgaagtcaatcaatgtaaaaattggtattatttcttttctattatgttacaacttactaaaaaaacacaataaaatagaattacataataattcggcctgtgagttctcccatcaacaaaactaaaaaaaatccaagtttattgagccgcatatagacatgtactagccccaggcaaagaggaccaaaatgaagctgtgttgtggtataatcctataccattggagttcatgatgtataaactgggattaatccctctcaggtacaaaaactccccaagtaagaattttggaaaattttaaggtggaatagaaggataaatgaggccaaactggctgggtttgagttcaaggtcttcaaaaaatggatttttcagctattcaagggggtcaaggattgaacaactcacatcaagaagcagagacggcttttatccaggtagcatagaccccgtaatc

SEQ ID NO: 79444 - DNA, 2153 bp, Cannabis sativa
aacagaaatggtcagtattcatacatataatgaatctatttgctttcctttcccttacacacacacacagtgttgtaagaagaaatctttggtttataattgtctatcattgctggggaatttaggcccgcaggagattcagctacccaaaaacctgaagggactgatgatgaaagagtggaactagagaaaagtaatattcttttgatgggtccgacaggctcaggtaatatatcacttggtctaaactaatgcatactactcttaatatctcatcttatattattacactttgcactgtgctaagaatgttaaattttctggtattagacacccttatacaagtcgttatgctattaaggagatcctgatcattttcttgttttatatgtttccctgttaattttcttgttgcttttagttacacgtctcacttcttctccttaatgccgttcaagtacagggaagacattacttgccaaaaccttggcacgattcgtgaatgtcccctttgtcattgcagatgcgacaacactgactcaggcaagtctatgacttgccactcttttcttgaaatagaagtccaagtttttcatgagattgcttaccctgttttttaattgcaggcaggatatgtgggagaagatgtggagtctatattgtacaaactccttacggtaatttttacaagcataaatgaatttataaattgtttgcataatattcgtatacctaactgtaatggatgttgtatttctacttaaatttatgatagttagcaccaaagcttcttcacttctttacacttatctgggatatatacttgtccctgtttatcataagttggtataaatgtgagttgatgattcctattgttatgattgttgcaatgatggctcaatcagtattagcgatgtaataaattggtataaatgatacatagttgcttagtcatttattaacaaatttatttatcttttgacatctgaatgtatatcacaggttgctgactataatgtggcagctgcacaacagggcattgtttatattgacgaagttgacaagattacaaaaaaggttccacttattttctaatgctacaattcgctttagtccttgtttgcaccctgtttgcatgctgctagaaattattttatcaatttatacttcttcgcatttcaggctgaaagcctcaacattagtagagatgtatcaggagagggtgttcaacaagcattactgaagatgttggaaggaacagtaagtgttccgtagtctttttcttgaatttatatgaaataagtaggtgatttaattgcaaacctttatggcaaaaagtattatggatgctgtagacgagttttcctcacctcttcagggctattctaacctctggttataaatatgtttgggtgaattacttatatatctttgctaattttcggttggatgaatagattactaacttctttatgatttttggacctgtttctgatctaggtagtaaatgttcctgagaagggagcacgaaagcaccctagaggcgaaaatatacaggtagacatccattggtttataatctattcatctgactactacttttatctggatttgttaatggtatcatgtggatgctctcataattaggttgtagcttaaattgtttgatatttggtcaaggcttgtaagtgtttcatggcttcattcgtgctcttgtttgctgtggatcctgcaaaccttgattcatttttcgtgttttcttttcagattgacacgaaggatattctgttcatttgtgggggtgccttcattgatttagagaaaacaatttcagaaaggttatcccaacacatattctactattttgctatttttcttatgtcttttttctcatttaaacctgacaagtttttgtgctcatttccagacgtcaagattcttctattggatttggtgctccagtacgtgcaaatatgaggggtggtggtgttactgattctgccgttacttcaactttattagaaactgtaagcgcactccatacctgataaggaaataacatttttttttattgttgtcttattataatcattcctttttcatatgaatactacgaggcatgtcgctaattcacataacatggttgttacttg

SEQ ID NO: 79445 - DNA, 1570 bp, Cannabis sativa
taaattggaattgtgaatcgagctgggttatggagagtttattccgggttgggactgacccgaagggttactggggtggtgagcttggatttaattcggcccaaacaatggaacccgaggcccaatagtcaggaacagctggctccaattcgacacttgttcgaatccaatggaatccatggccttcaactgaaacctttaacgatcttctttctcgttctcttagcttagctccgacatggatcaggattcaacctttcgccggtcccggaatgttccacccaggccagatatctactccactgtagtaatccacgacgatgaagaacaagaaaacgacaaaactggccgagaacgacaacgaccacgacgccagtctttgagcgaagaagatctttacgcgacgatggtgtacaaaggtaacgacgatgaggaagatgaagatgacgacgcctctcttcctccgctcctgaagcgccttcccaaggacttcggcggtggatcctcaatcgattacgatgacgacgacgacggagaaaatgattttgggacaatgataatcaagagcgatcggaatcggcctcggaatcgttcttcttcgtcgtcttcgatgtcttcttcggtaagaagagggaaccctcctccaccgattcccaagcgagggagcactataaagagggacgaggaagaggatgaagacgaggacgaggatggtggcgatggattttccacttttgtggtgaagtccggggagagggaatcgtctagcgggagtgtggtgagaaggaccagtggtagtggtagtggtagtggcagtggcagtggctttggatccacaatgagtagagctgttgcaagtatgcaggcagtgggggatttagggtttgggaatcagaggaagaggagtgggtcgtcggaagagcctcgactgatgacgaaaatttcgtgcagttcaattcctgacagcgttacccgtgaagatccaaccactaaatacgaattgctcaatgagcttggtgagttttctcgattcgataccatcgctgtgtttgagttttcttcaattttttatttgagcaataaacatttcattaaaaaataacaataagagtatactacatttctgaagaaatggttagaaaattcttttatccaaacctctagagtgcgtgtgattctcattcatgagctttataggcgtcgtattctggtagagaacacataatcaaaccctaacagtttgactcaattaaatgaagagaagattcaagcccaaaaaaccatccaacgccaccatcatagcaataaactgaagaggaccattctaatgccgccatcattgttacaacttctgcttaagtaattgttagtctctctacaaaatattatcatactaaatattgataatataacaaaagtaagattcacgacaatagcattttacaaaaacatgtcttactcataatgtggtgcagagattctttgtatatagttaccaaataaaacaatactatacaaaacaaaccataccatcacataaacataataccaaacaatcaaaagttgtatt

SEQ ID NO: 79446 - DNA, 5598 bp, Cannabis sativa
ctctctctctctctctcatatggtatcagaagtcaccttgcccacaaattccatggaaagaccttccacatgctttgaagatggtgttcctccatccacagctgagcctcattccttagaaatcaatctcgatgtcgttttcgcccaaaatcctctatccttggctactccacgataaaatacgactttcaggcctcaatctcagatttttttctacaaatctagatcatcaatctccagaagatgacaacaccactacagctccatcaagacgatctcattcttctctcgatcaccttgtcaatgacgatgtgttcagtccttttttcctcagtgatggcgatcaccgtggccttgttcttgtgtcaactatcctcaatggtacaaactatcagtcatggaaacacgacattaccatggctttggctgcaaagaacaagactgcattcaagatggatgtctcccttgtctagatgctagtaatccttttcttacttcttggtttcactgtaataacatagttatgatgtcaattctgtttcatccgagatagcacaaagcatcatatactttgatcttgctactgatatgtgacatgatctagccgaaagattcaatgagggaaatagtccttgcatttttccattataaacacaactcactcgataacaatagagtgatcattctgtcacttcctatttcataaagctaaaatcaatctgggatgagttgaaagaattttaaccaaatacaacctgcacatgtggtgcaatgaaaatatttcttgattactataactaaaattaagttcttcagttcttcactggtttaaatcagttgtatgcataagttcaagcttagaccttgctcaatgaaccaattctaaatttatcctgatgttttttatgattgtgcaagaagaacgtcaaagaactcttggatcctcagagacaccttctatggttgcttctgtacatctctcgtctaccaatcccccacgtgcaaagaaacctcaccattcttgctctaactgtggcaaaccaggtcttttagttaacaaattcttctttatccatgggtttccccatggctatgaagacaagaagaaacaagagaaaagaaaagctaaggcatatcaagttttaactagcacatccacaaatgatgcatttggaaacttagccagcactgatctgtctacacagtgccaatatcttatctatattctcagccaacaacttaatcaaacaactcctagagttgaccctaccatgacccctactgcatcaaacatggcttgtaatgactctccactcttctttcattacttagataatagatagtggtactacacaccacatgtgttctaataagtcatgttttacattcttttctaacaattactttccaaaacatgtcgttctaccaagtggcaacaaaattcctgtacataacattggtactattcatattaattcttctctaacactttatattgtattatatgtctccaatttcaggataaatttgctatccatcactgaatatgttgacaaaacatctaacttgattttctttaaccatgactcatgtgttattcaggatcattcttagaatgtagtgattaagacagctaaaaggcatgacaaactatacctgctacatcaggaacatattcccattgctattgctagtcaatcttcatttcattttgttaacaataatgtagtagaccaatgacacaatcgccttagccatctctcaatttatatttccaatactttcaataaaaagattgactcttctttttcaatttaattggacatgcagaaactagcctttccctctcaaatgttcattttttttttgtagatgcagattggggaagctaccgggacataagaagatccatttcaggctattttatcttccttggaaactcccttgcctcatggaaattaaaaaaaaaaaaaaaaagaacttgtctctcgatcctctattgaagctaaatatcgtgctatagcaaacacaaactctaaactcacttgggtccttgctcttctcaaagatattagcatctctcacaacacacctcctatgttatattgtgacaacaccgcagctatacacatcagtgaaaatcctgtataccacgaacacacaaaatatgtagaaattaatttccatttcattcgggagaaagttcaacaagactcactcaagcttctacatgttccctcacaacataacttagctgatatttttactaaagcactacttcctactcctttctccaatattgtttgtaattaacatatacactccatcttgatcggactattaggattagctttagttaattattcaccttggataaattagttgagttaggttgttagatggttaggtagtatctctaactaactcatctctctttcttctttctgcctatctaaaaggcttttgtacgaagcacaattcagttgaatgaaatcaatataattcttgcttatctctctcttttcctcatatggtggagcaaaagagccagcaatttgcttgtctaattgcttctcagttttgtagaccataaaaattcagaaattacataaagattttgcgtatacgtcactcttgaattatgggaaaagcataacgttattttcctagaaaattaaaggtaaatgacagctgcattctgtttaaacaaaactacaggagaaaggccttggcctcactcagttgaaaacctcataaaatttctcaatgacaagtagacctgaatcaattgactccaagggatccttccgaagacgatgtcttaagcagttagggatgacagtagcaatatcctctgttgatactttatctcttcccttcaaagcagccaaagcttttgcagccctgtttgttacaatgtcccctctcaatccatcaacattcagctctgaacaaacctttgaaattttcactttgagttcatggtcgatctgaacagaagatagagtacttctagctgcagtaatttgctgttgcagtttttcttgctcggcgtcatatgattcgcggaattcgttgggatttttatcaaaccgagatctctcctcaacaatcttcactctaagctctgcatcccttacggtacccacttgtgcatgcattccaaaacggtccaaaagttgtggcctgagctccccttcttctggatttcccgagccaatcaaaataaaccgagcaggatgtgaaattgaaataccttctctctccacagtgttccaaccagaagcagcagaatccaataaaacatcaaccaagtgatcatccaaaagattaacttcatctacatatagaattcctctgttggcctttgcaagaaggccaggctcaaaggctttgacaccctcagtcagagctttctcaatgtcaattgtcccgcataccctatcttccgtagcacccaaaggtaaatcaaccatgttgattttagtcaagacaacagaaagctggtcccctttcaagacactctctctgacttccacgcccatagactctggatcttctggatctgagttgtaagggtcaccagaaacaaccttaatttcgggaagtaaatcaaccaaagaccttacagtggtggattttccagttcctctatcacccataatcatgacacccccaatcttgggatcaatcacatttaggagaagacaaagtttcatctcatcttgtcctactatggctgcaaacgggtaaaccggcctctgactattcttagctttaagcttcccgtcctgaaaaatgatcaactccaccactttatttgcatgtaatttatttttcaaataacgtttttctcccttgtagtaaactccaatttgaaacaaattatctactgaaatacttataagcaatgctttaaacgacatttaacaaagtacaacagaagaagaccttttaacaaacatctacaaagcagaaccaaatttgacctgtaccaagtacttttagcgaaccatagttcataattctaagagataagctgcaaacctgttccacagagttgatttcagtagcaacattggtaactgccacgtggaactgagacctccccttttttacctgaatgccggttcctccatacaaccgattcacattgccctgccctgtaaaagccacaaatttcaaagggaaaaaaccacaattaaaaaaaaagctcaaaataatgaactgggtcaatgaatatcatccaaaaaatgaaaattagacgaaacccagaaaataaatgaactaaagaatgaggtccatagccatagattgattcgttgagtagtgtacctgggttgaaagaaaaagagggactggaagtcttcgaggagggagaagacaggaagcgagaagccaagattgctgacgatgaagttccaagcacggatgccatttttcaaaagctttgcaagagtggaatgggatggctattgagactcggtatctggagcttcaacagcttatcggcattgattctattggctctcgaagctgcgatcctaaggataagaagatagattataggaacacgttgctaaacgctttgtcgtatctaccaatcaattttttttttttttttgggtgtcactctttgtaaataaagtacgagactgagttagagaaccagcgggatgtcaaaatttctcacgcgagaccgtttcttatttatttattttttttcttattattattatttttttttttagagaaaataaatcatttcgttaagataaatcaactaagaatttaagaatttagaatttttggacaagcatttgttcgaatacagtcttttatatttagtaacaaaagtaatgatcataagaagaacaccaagaccacaaaatgacattattaaagaattaacatccaaaataataaaatttaaactaatatttaaacgtgaattattcacccagcctataatcacaattaatattagtaggattaaattcaaaacaggtgttccaatattagtcctattcgaatagcaagaagctccaccacattaacattaaagtctcccaagagccccgctgcccacgccaactaaataacaccatcatcaccctagatcaccctccaataaaaaaagtcccctaccaagaaccattgatgtatctgcggatgacgagaaacatccagcaagtaacaatgaccactgcacagtctgacaaactgtcagcactgaagggaaacagtccatcaagagtccacattgatggtgctcgtggaattccatcgattggtttttagcaagcttcgggacaacatcaatccttgattgagcaccaccaaacaacatcgaattcctatcacaccacaaccacaacatcatcatcattaccgactcaaagatctcttgggataactcttcagagaggaaatcaaaacctcctgtagcggaccatggccaaacccctaagcgaacccacttaggatgtagaatagagaaaaataacattgcatgttctggagtttcaacaacttcttcacatctcgagcacaaagtcgagacttgaattatttgggagatcactcaagttgctactg

SEQ ID NO: 79447 - DNA, 3206 bp, Cannabis sativa
  modified_base (1451)..(1469): a, c, t, g, unknown or other
atatagagaataacaaaataggaaatattaattttttaatatttaattaatgattataaatatcaaccattagatatttgattcaatggtcaagaataaaatatgcatgtaatacccattaagagcatacccgatatatgtatatgttaccaattaattcaaaggccaattgatttttatttgagataattttaaaaaaatacgtaaacaacaaaaaaattaaaaaaaaaatattgtacgactttttaatatttttataattttttaaattttgtgtacataaaatatgattttttggtatatttttatgttatatttttattattttattattaattttgtgttatttgtatattatttttttttatgttgttttaatgttattttcttattctttttatataatttttttttatatttttataaatatcgtaaagatgtaaaaaaaaaaaattaattggagtaaattggtgcttttttactttataatgggcggcaaacctattaatgtatggaacgataagtaaaatgttatataaaaagacaagtgttgttgtaccaaatccattaattagaagccggatttttacatgaatatggtgaataataatgtacaatgtgtcattaataagaatacatattaaacctttttataaattaatagtaatatgtttttactttaagcttgaagttctcagtggatattaactaaatgagcatattaattattccttgagttcaaattataatagttctctgggactgaataagtcaatcagttttgcctaaacaaataggttattattcttattaatgtaatgtttccgatttgcctaactatagccactatgaaattaaaatatttaaatcattaatagagtactaatatatatatatatacaattaacattcttattaattagtctcaaattcaattaacgcacgtgattcatatgttcacatcagtcacaatatcgggaaaatattttattcgtattgaaagcaaaagttaaataacattcgatatcgatgtgtagttatattttagacgatgagatttgtggcaggtttaattatttgtttgtgacccaatacttaaaaagacgagccttcatttattgtgatttttgggtcaatttattattattctatggagaaagatttttttaaagtaatacaagattaacttctcttctaattataataagtggggcaataaagaaaacgatcctccacattgtataagaaatatataattatatattgtattcagactgaagtatccattcacacaccagcaccattattgtcacaagttggggtcccttcacttgcttgcttcttcctaaatttctagccctagtttttctttttcttttttaataatagtatggaaatagcttgcactaatataatattgtattattattgcaaataataataataataannnnnnnnnnnnnnnnnnnaataataataataataataccaaacttgcttttggcgcccctaaaactgggggatatattttggaaaaaagggaagcttaagaacatcaattagcaaatacaagtttagaagtcacatatttgtttatcaattatatatagtggccacgtacgtaatgatattattttgagtagacttaattacattgttaatttattacaaatagagtgatgctaattgtaatgaaattaagttaggtatataatagggaaagtgtgtatattctatttctaacatatgttggtggtttcttaattaatttagtttaagtcacgaacctataaatacgtaccacaaggcaagagtttaataggctcaatttctaatttctataacatttttgtaggtatagctattgtatttgattgtgcttataattagttctctatcaattaaatattgatgatgtgtataaagtgatatatataattttagcattctttaaagaattagttttctaatagactgtatttaaaattatatttgccaaatttttagaaataagttgagaaatattattttttattacacattaattagatataactacaaaaataattttaattaataaatataatattttataatcaaagtattaaatataatctcacacatcttatcaaaattaaaatcgtttaacacacgtaatgagaatataatctataaaactaacttaaaaaataataaaaaagataaaaattaaaataaaaaatataaaattgatatacaatacggtactcaaacttagatatggccttttatacacttaattatatttaatcatcgcttagaataaatttataattaattattaaagtagataaaaatgcaaaacaataacttaaaaagaaaaaaaccatttttccaattattcctttaattaatatacttaattatatctaatcggtaattattaagagtttatagcttgctcgcattacagcatatcctacaattaagatcttgtatgttttaaaaatttatgtataatattacctacgctatgattaagtatatataccaagaatttttttttaaaaaaaaaaaaaaaaaattaaataaggaataatattcgatgtggaaacatgatttgaacgaaagaatgatcacaaagttaattaatatatttatatatatatataccgataatataagagagttgaaaattaaatccacgctttatgcattgaaaacgagtcaaagaacatgggaaacgtacgtgacatacaaattcaatctatgatgactttaagaatatatctatgtaaaggattgatgctgaggttaacaaattataataaaatacatgtgagtgaatcagttgtactggctaccaccacacttgctttgatgctccattagttaaaaccctgctctttggaccaattttcactaataataataacttattcgaatatataaaatctctaataatttgcatattaattgacaagtgataagctaccacgatttttctacttttaatgccacttgtaattaagggtgtgtttggaatgagggagacatgggtggatggagagggaaggagagagaggggtggtgagagatggaaaatccatttgtttggcatagaggattgtgggagggagaggctagaggtggaatgatttacaatctatttgggcccaccattttgaatccttcctcaaatggaaggatttatactcttctttcta

SEQ ID NO: 79448 - DNA, 2774 bp, Cannabis sativa
aataccatttttattaatcaattaatcaaatttacctttaattttattagttgaaacatatctctttttatatgtattgtaccaaaaatatcctaacataagatacccaaaatacctaaaaaataaaagagtgtgaaacacttgggagattgagtgttgtttcaagatacctaaagatggtaaaataaaagagacaatataaaaaaatgtatagagctcgattaaatgagtgaaacttagggattagaaagagtgtgaaacacttgggagattgagtgttgtttcgttgatgctcgactctgttgtattttgaagattgtttgaataaataaagagaaagatatgtggttccgaaacgagaatagggacaaagctgacatcgaacatgtataaatactttatttattttcggttccttaattgtttgattaatgttttttaacttctgctttaattgtgttcgtttaagtgttgtagttgaattttgatattgatgctacttgtatataaaatttctgcagataagtggaaatttcatacaaaagaaatttcatgcactaaatgaatgtgaaaaacatcacgtagagttgatgagattgtcatgaaaaaattgtttgatatcataggctcatagcaataatcattaacataacaaaaatgcaatgataagagtaaaactgtggaaggaatatcagaatttttgatagatcaatgaacgtaacaaaaaataatttcaataagactgataaattgtttccatgttttgaaatattttattaaatctttaagggaaatttaattttatataaaattgattatctaaattaaagttagtgtgtatggtattgtgagccacttttacaatacatcctcaaagtacccttctcatttaaaaaacccaaaaacaaacctcgagcgctcgttctcacccaacgaaccaccaaagaccaccccaaaattacaccaatggcaccaccaattcaaatcgaaatcttgcccacgatcgagaccaactcacacgaaggttttcaacttcccacgtccaagacccacgaagattagtgacggagacccagagaccctcgatgatagcgtcgattgcctaattagagacctagagacccgcaacccacgtcggagacccacttgggattggcctttagagattcatgatttagaaacctaatagcgaaccagagatgatttgaagaaggaaatgagaggtctacccaaaaatatctaagggatgaagtttttaagtaatttttcgcataatcttagttgaaaatagtattgtgtactttcatatgttagattaggtttgttttagcacaagaaaaattgaatatgtgataatagtggtgaattttgtgtttctgtgatttttttttgggttttgtattggtacgatggtgtccaatataggaacaatataggttcgatagtctcatatttagaaaatcaatcacatgttaggcatgattggatgatagggtacgatgtaagttagacaagggtatgattattgttccaagtttaaaacgatagtttgatatatggtacaatgtgggtccgataatattttatgtttcatttttggtacaggcacgatagggcacgacattgtgtccaatagccgtattttttttagtttttgatttataattatgggacaatataggtttgattgttggtttgatggttttgcccaattttaataatttgttcattgtcatttgtgtccgatagtagtatgatatgaggaagatattttcttggtacttttattcagaatgtttaacttgtattttttaaaattttctttgcaaaacgtaagacctccaaagcttttagttttagtgttagaccattactcgagatatatcacttgagggtggaaatttttactattcaaagataaaagataaatttaaggactgcgatttattggaaagggtgaagagatctcccttcgaacagttcttcattagagagcaattaaatttttctggtgcactgatccattagttgttttttcataagattagatctgaaaagccagatgaagtccacttttacattacgaagaaaaaatgtaaattagccaagctgagtttgctttggtgattggattgaattttttaccaagaccgattgaaaaaaagattaaagagaagacaacctcaaactagttgattgttgagtatttcaatggtagtacacctatcatctttggacaattacgcagaatgtttgacagttgcactgtagttgatgatgagttcaagctgggattggccttgtttgttatgggtgtgctgattggccgtgaggagaagactatcgttctagcttatgcaatgagaatggtgaacgaccttgagttcttttaccaatacccgtggggaaagatatcgtttaagaagttgatgcaaacttgcaataaagattttaaagaaatgaagaagcatttggataagaaaattgagaagaagagatccattcagagggagtcaaagtattccacatataggtttgctgcaacattgcagtattgagcttataagtccattctagagctgagtattgattttggtgtcaggaatttgcatgcctttccaagaatagtgatctgggagaaaaagagcaacgttgagatgaacaaggaaattataaaattatttgcgagagatgtaagttttaactcccttgaacttgtcaataatattttgttttgtatttgatttcaatcaaataaaattttgtatttattg

SEQ ID NO: 79449 - DNA, 1514 bp, Cannabis sativa
  modified_base (1283)..(1291): a, c, t, g, unknown or other
  modified_base (1455)..(1461): a, c, t, g, unknown or other
  modified_base (1488)..(1489): a, c, t, g, unknown or other
aattaaaaactcactaattaaattaaaaacttaagaactaaaccaattttagtttaaaaaaaatgtgaaaataactctaattcctaaagttatcagtgctctagttgtctggaacatcaatactcctcaccttaactatctcattcattcttttgggtcaattagcaaaaaattctagggctaaggttcggttcactctctccttaacatgaacaaattgcacccatcctctcctatggacttgtagcctaatttcttcaaatagtgggtgactaggcatcgtagtatcaccacaatcaatacctctaccatcaataaatgccatattcttcaattctagatagcggtcttgggcctcagcactaacaaaccttgtccgatctacatttgaccttctcgaaacccttggcgggttggatgatgaagcaccctcttgatcaactcttcacctcttaagatccattctcactcaaaccacaattcactcaaaaaaaatttccagcacctccccataatttttacttccagatgaatacccaattaatattcaatagtattaacacacacaaacaatattcaccacaacattatctaagataaacactatacacacacacacacacacaccaattcttgcaataatctaaaaaatccacaattatttcaaaaatattgaagaataatcatgaaaaatactcacattgatgagagaaacctttacacaacctccgatgatgaatgcctttgaaaatcttgaggttgaagataatgaatagtggatttttgaaattgggtgtaaatcagggattttaggtatgatttggaagggaagagatgggttgatgaggggaatagtgttattggttaagggtgaaggattgaaaaatagatgaaaaaaaattggatttgtgagatgagattgatgatttttgatgaggatgatgacgaactcggcagggaatacgaaatagggttagaaggtggttagggttgaataagaaggtgaaatggtgtttaagcccaaactttcccttttaatctcgtttaggccatctcgtcgcgtcgatcattaggcacaacctctcgacaccttaacctaagaggtaaaatagaggtactaagttcgctaaatataacacatgaagatattcgccctaaggagagcacatgtgacacaacttgttaattgttgggctttgtgccctaaataaaatccatttcaatttaattagatttactaattcataaagatcagaaattgcttttatgttgcatggttcacnnnnnnnnnttcatgattatgtttaatgtataaattctattaagtccaaaagatatataaatctgtatatatttgttcatgattatagtatcgtcagcacagtggaatataatcatgattatacgtttaaaattttaattctgatgatttatcagttcactagatttagactnnnnnnntaatcagcgataaggtatacttacacnntggataagtgttatgtcctttctag

SEQ ID NO: 79450 - DNA, 1814 bp, Cannabis sativa
gatagattaaagttgtgtcttttattaaaaaaaatgtttttcttgagaacatattttattcaagtattattatattgaaatttaaaccaataaatgaatgtatgtatgtaatccgtatgcatctgtgagagttttatgttttgttaaatttaattttgaactttggtcactgaagcttatgataacttgttataggtaactgtcaagttgcaaattcctcctgcgtgtgaagttccacagctaattgcaaaccttgtttcagagcttgggttaaaggttgaacaacatggcggtggatcagatatgctattgcgtgcttgggacaggttatataaactattgataagttttttgtttagttttatttctatttttaatgtttctattattcattttaatttatgttctgttacttgttttattacatttttgagtaattactaaattagctattgctgtcattgtgtcaactgtttctatatgaatcatttcagtgcaatatcttggcaactaacacttactcggccagacaaacagaaggaaaccgaagggaatgaaggggagggagatctatgtgtactcatttttggatcacttgttacttcagataaagttgtgagttatatttcagcagttttatggcattactatcatatggagttctagttttcacttttctttagcagatgacggccactagatttatgaattagttgattttcacatcgcttagcatgacttactgcaggaacttgaatttataaaaaatggaagcttgagtgcaaaagagcttgatgcatttgtatctgttttacaattagcagggagaaagtcaagagaaaacaattcattggaaaaaaaacaaatgccaccaccttcagataaatcaaaattagtttctactcttgagtcaatgggagttagggtttatggccttgaagaaccgcatttgaattccacgagcagtgaaatatcatgggacaatattgctgggtatcatcagcagaaacggtatgttgcattttcaaacttttatcttattgttaatgttttatttgggataagttatcttctcaattatgtactgaccagtactctgcagagaaagtagataaattgcctatttttgataagctatggaatataggctgttgatgagctcgatttaaacttcacaggaaaacatgaaactaaggcaattatctctttgtttttattaagtttgtcctgtggttagtgaaatactgtttggcgcatagacacatatcaatttacgacctataattcatttgggatggaatgtgtagctcgttgctttaagtaagacatatcataatgcaataacctatgtagtttaggacgccagttatcatattaatgctcacatataatgtgtagtctagtcatatgtattctgactggaatcaagtttgataattttatctatattttttaatgtaattgagtacgtttcaacaatgctgctgatctatagggaaatagaagataccattttgttggctctacaaagtcctgaagtatatgatgatatcgcccggggaacacgacataagtttgaatcaaacagacctcgagctgtgctttttgaaggcccgccaggtagataattttagtaagatagagtactctattttatagtttacgctgtagaatattatcaatttaattaatatattgatttacctgaaataatcaagtcagaagtttgaacatattctttttttatcgaaagagtttgaacatattctcttactagtggctttatggactactagtactaggccactttcttt

SEQ ID NO: 79451 - DNA, 4546 bp, Cannabis sativa
  modified_base (4499)..(4501): a, c, t, g, unknown or other
gttagggtgttacagttcaggttagtttcatttgttgacacccttaggttcaacaacttcttgaaataccaactagtatccagctttgagaggtagctccaaattgattgacctttaagataaatcgagttaatccatttcacccacaaattgtcttgtttactcgatatagcccaaaggtacttttctatcaagggcttattccaatttttcccttctcgaaacccaattccacctaacttcttgggaagacacaccttcccccaggaagctaggttcaatttgcttctattgtccttcttgcccctgagaaaatcccgacaacttttgtctatgccatcaccaattttttgggggattatgaaaatactcatccagtaatttcgaatcccaagcagcactgagtgaataaattgagctctacctacgaactaaagattcctgcttgccctacaatttagattcttatttactttctcaagaatcacaccgcagtctaaagcctttcattttgtagtacgaaggttaacccctaagtatttcagaggaaaggttccgtcttccatttggactaactcaaggatcttcagctttatgtaatttttaactccaccaaagaaaatttgcgattcgctttgttagcagataaccctgtagcattacagatttttataaaggcttcttgaattattttcaccaaattaaagttgcctttgctaaaaaggacaaggtcatctgcaaaacaaagattagtcaaccgaaggtgttttcataatgggtgataaccaaagccttctttctctgagtagaaactcaaaagtctggatatgtactcattattagaacaaacaaaagtggggaaataggatctccttgccggagaccttttttacctctgaagttaccttggattctaccattcattaagagatggtaattagttcccttcaggcatgtcattatccaattgataaaccgagaagggaaacatagctggttgaacagagcttccacaaactgccagtgtacagtgtcgtaggctttacttaggtcaatcttcataatacacctcgatgagacattcttccttgtgtaacccttcagatcttgaaagatcatgatgttgtgggcaagaagacggttcttgataaaggcaccctgacttccttggataagggtcgggagaacctctgcaagccgagaatagataatcttcgagatacatttgtagaccatgttgcaacaagcaattggtctataatccttggctttgttaggatccgacaccttaggagttaacgagatcatcatttcattcaactcgtttggcaggtacccagtagcaaagaagtccaacatagccttagaaatttcgttccctatctcactccacatatctttgaagacacttgaaacaaacccatccaaaccagcgcttttggaagagtggatactaaaaattgctttctttacatcccccacagagaaaggccgaattagtctaacttgttgctccaagttcaagaaattcccctttttaatacaatcctcttctatattggtcgagacagagctcttacttcctatgaacttctcaaagtggctaacaaagtaatgcacaacttcctcatagttatcaactatgttgtcgtccttaacataggttgttattctatttttgagtcttctcttccttaacatagcttgaattctcatcattgaacttcagccatcttaatttcctttgttgaccaacaaactgagtatatctcttctgagcaataagctactcttgttgctttagatcagtagcagtttgaagacttaaatcggttggattagcagcagcctcttcttgtattctacaataatcttctctggcttgtttgtactctttacttagatcacaaacttcatgtttactgaacttctttaagcatgcttaactttaagcatcttcttcacaatcttttacatacttgtgccacctgaatgcttatcccagcaagttaaaataaccttcttaaaattaggataagttgcccaatgattacagtacctaaacggtttgtattcaactttgttcacctcatgattccaaattaaacacatactacgatctgatattgtctatcatttaaaacaagcttaagtttcaaaaaaagagcccaaccatttatcattcatgaaaactctatcaagcttcgaataaattctttcacccacctcatgtttgttactccaagtataagaagcacctaaacatttgaattcctccacctgaccactagatagcaaagtttgagcatccaaaatatctctggatagaatcggtttgcccccacttctatcatggaacgagaacatggcattgaaattgccaaaataatccaagaatcctgaatctggccataactttcaagttttttccaaagacattttctttcttccatagagtgtctgccatagaccctgttgacataaaagtgctctgttggccacaaaattttactctacaatgaaccagctgcttatcctcatctataatctcaacttggacaaaattttcctaccaaatcaacaagattctactagatataactggaatgcaataatacctccagtttagaaaactattagccatgatctcttgaactttctcattcattgcccttacaaatatcactctgctttcctttttcattcattgcccttacaaatatcactctgctttcctttttcattcattgcccttacattccacccaagaatgttaccaacttccattaataactaaattggaattgggaaccattacctcatctacatctccttgcaataaggcatacctattgttgcttactattttaggagcgtccacttttgaacatgaattcatctttttcacttttcttttgggagtgatccatgtgtttgaagtacctgcatcctcaccaccagctttcttctgatccgaagcatgatgctttttcagaccttctccactctcaatagaattattgctgtcccctggctgttttttctccaattctgtctctgtattttgcacttgcatctcctttttttcctccacactagccttgttatcacctgcttgcttttcctccagaccattggtttttccttgttacaattagccactatatgccccaaattcccacaggccgagcatttagaaggaatccattcatattctacttgttgctccacaagttgtttcctttcattaataaagaatatcgtattcggtggctcctccgagatttgcatatcaaccaatattcgagcaaacttcaccattgattgtttttgggtgaccttatcaatcatgataggtttacctattgtactaaccaaggcgctaagattcttctttccccaatattagagacctaatccatttaaacgtatcgacactggaaccgaattgatcatctttgttgaatccatctctactgtccaaggtctcaaaataaccggcttcatgtcaaagtggatgactcctgcttccaggacaatatctctcgtaacctcatctctaaatttgactagagtaaagcccgagtgcatacgaactaccttttcaattcctaagtttccccaaactcttttcacaaagccttcaaagaccttaaatggaggattggctcccaaaacaatacaaataatagcattcttccaaaatgaagcatcaatttcaacttcatcgaggtctaactttgcaacaatctggtcccctactttataggttctgtaaacgaaagtctggtagaagaagttggtacctgattggtcttgatttgactccacaaatcactcgcattggtctggtaatcagttttctcgacctcctatgcccagctaaccgttttgggggaacggactgtattggtcaattcaccctcctgtcataactcattctccaagatatcaatagaatcgttgaattcttcaccagcagtcaggtcagtattctcttccaggattgaaggaggctcctcatcggcttcgacaatcgccgtgctcgtagatgttggctttcggatgacccatttcttctttgccatgagagaagtaggggaacatgcacgtctaaatattaatgaaatttatgatatttattttaattatttggctgtttaaagataaatttggccttattcacttagtttgcttattgcaagctaagatctgcgtcacttttctctgattcctcgctattcacctttagcgacatatggtttctctctaatacactaagtgccaatttgtacattgattcctcgcctaagaccttacagtcggtgagttacaactatactctgatacttacgtaattaatgagttattccataaaaagctattgcattgattctcattctctttatcttaacacatgtccttcagccgaatttcgggtattacaataatttaattatattaatatcttatttcacatttgttacatggacaatgtnnntttaattttatattgtttattcaattttttttttacaaacttatt

SEQ ID NO: 79452 - DNA, 1706 bp, Cannabis sativa
atgacacactaaataagtgatgaaaatacttctgtctctttattgataattaaatgatagagattacgttgaaatagagttttatttagggcacaaagcccaacaaaagaaacattaagtcacttacaattacataagaaacgtgggtgtggccatacgttgacctccatttacggtgttaaaatcatcaagaaagtagaaactctaatcgacgactccaacaacaatcgagaacagcagttgaaactcgaatcgacgactcaaattttaatcgagatcgattttctatgcgaaggactcaatttcttaaggaatttgtttcattcgccatcaaacttacaatttttttggagaattaacttaccatggtaagcttttatttattttttatttaattaattatttaaatttaaattatttattaaatcatatttaattatttgaataaataatttaaccaaatttaataacagatatttatatcttataatcgatttaagaaatctctcaactacttgaaagaacatctcgattactttttaaattcaaatatttatctattgaattaattaattatggggacaccctagaataatggcacatgcgctgtgtctgaacacagtgcactgtcaacttttattttttttcctattcaattaatttaagaaataaattatctattataagatataaataattattattttgacaatttaaaatagattttttctaaatatccataaataattattgtttggtttattttaggaaaagaaaagacatacattttagactattttatttatcttaaggatattagatagattttagactgctttatttatatttgactctctctttttttttttttggatggttgtgttctatggtacaaaacttaagaatctgaattgtttttaaacctttcaaatgagattattatggtttattaataatatatatctattaaataattttacaaaatacaccataaataaattattgttattgatacataaaaatttatgaaattaatgatgtacatcaaaatcaattctctaatttttcttattaggccatcattattttaaaaatattatatataaatatgtgatattaatttatagtattattgtagtaataatattttgcaatttgtagaatacaaattaaaaaaaaaaaaaaaccctaattttatgataacatataatgctaagtttagattttaagctcaagaaaataattaattttctaaagatcttataactcttgtttttttaaaggctttttaatcaactcttgttgaggaaccctaaactattaataaaaaaacaacaatgtaaataaatcatcaacttgttcttcatatataaacttatatatatatatatatataaaacttgtatatatataaaataaaattatctttatgtagttgttagaaaaaaaacaaacaaaacattagacatcaataatgtttattattatctaaagatatattgtgtgtataatttagtgacattatactttaaagaaatattaataaatattcatagtgcttaactcaatattgaattctatttattttactttaatatatattataaaaaattattaactaattgtaaaataatactttattgtagcggtaagcacctaaatatgtcataacaatgctctatatatactttagcgttttttttttt

SEQ ID NO: 79453 - DNA, 836 bp, Cannabis sativa
aaattaatgattttcacttcattagaagacaacaattgcaaaattgtgctgaatataacagttgctcatttcttttgtgtaaattttgtacatttttcacatcatgcattagagatggtctaacaattaatacaataaaccgcgacatttttatcctcggtgtagtttttggtctagcaaaaaactaaaaggaggattcataagtgaccctttaaggaacatattagagaccactttatacatagcttcagtaaggtgaactccatcccaattcacatattgagatgggtttaggcaggctttggtagaaggtgccccacaaaaggaaaacacatcaatattatagggtgcaccacccatgccacaacatgctttaaaagtctccttgataccaaatttggttggactttgcataactgttagatatgaggtccaataatcagcatatgttatgatagctttgggaaattgtcttctaagagatttaaccaagtttaagatggcttggttgtgagtataactttggttgttgacactcttcacacaacctatgttgtctctgtcatcttcagcagctaatgtcattgccagaggtaagcatcctgtcattggaaaaccttgaactacaacatactttgcaccttttcttaacaatgcctgcaaaaaccaataaattatacatcaagtaagaggattacatggtctagagtatacatagcatattgtatgcttgagactaaaattggaaaaaatctatagtaaagtatgattagtaaggtgcaaatctagagttcaaaattttatacaaaataatactatgtagtaaaaacaatagt

SEQ ID NO: 79454 - DNA, 1281 bp, Cannabis sativa
atggactaaataaattgtaaattttacatatttatagaacgatcaacatttcaatagtaatacaaaccatttggagagtaaatgctgagatgaattggaatgttagatatttgctttgatttcccagttatacgatctgtctcatcttgaatctccttacgcacagcagctgcaaaatagaattaaaaccctcaatcaataaatggtacaagtcttaatcgagaagaaatgcccagataaaaaaataaactcaccaaaatcagtgtacttctttctaggagcatgaagaaactcagcatactcagtctgaccatcttcagtcttatgaagttgcaacaccagtggcctcctcgtaacaataccttgaaattaagaaaaatggatacacagttcaagacatcaatcaagttgaataaaacagttaaaatactactctgattggctgctaagaaagattgggaaaacttgaaagaaaatccctttaggttaacagctggaatgcttaaaatagcaatagctttattcaaatgagttccatatccatacaaatgtaggctcaattagataaagttcccaatattttactaaccaaaatacagtaacagataaaacccttatcacattttacagttccttcactttctaagctaccaaacacaaatctttattgataaatcatccaaatggaaaaagaagaaataccagatccacgaggcaagaaatctctgcccactacgctttccaacaccgaagatttaccagagctctattaaccaatatataaaaaagcattaaaatccgagaaaatgaaaaagcattaaaaatgaagaggaaaagaagaaaacctggccaccaacaacagcaaccgaagggagagcttcccagagggacataccctctccaccatggtcgcccaaaacggtgcaagctcgttggatcttattgactaaaccgatcaagctctgcattgtcgccatcttttagatcaaatccaatgaagaatgaaaaaaaaaagtgattttaataaatttaggtaggtaatggatctgaaaacaaaatgtgagatcaaagaatggattttttcttcttcaaaacattgatcgatctgatgagtttaggttttgagatcgaatctaagagagagagagagagagagagagagaagaatggttaaaatactgaaatgattgtttagagaaagttggagaatatttttttaaaaaaaaagctaaaatttatttcaaaaaacaaaattcatttttttttttttttttttttttt

SEQ ID NO: 79455 - DNA, 2329 bp, Cannabis sativa
  modified_base (880)..(880): a, c, t, g, unknown or other
atcctgctcggcatgttgattcgaccaggtgctctaagtagatgccatgtgtcaccattcgtgtgatgccacgtcagagtgccaattttgggataacaatataaatattagaaaattttttattcatacatgaggctgtggcttgtattgcacagaaaattaagatcacttagccatgaataaaataactagtaacatattaaaatttaggaatatttaatcaatggtccctagtgcagttcactgatgtccattattcaatataagtaatcccgatttgaaatttgatgttgcatgacatctaagtgaatgtgttgtatataatagcgattatatataacaagggctgatatgtaattaagctatcgttatcaaatatgtcgtttactataaagatatgattaatatcataatgatgatcaatggtagatcgaccttaatcctgagtaatcatgaactcctattcatattattaatttctttgattcacttgttaaagtttctcatggaagatgattcttaaaacttctgttttgagaatataataacgtggatgactaagaacatgatcaacaattatggaattctaactttcctaactgattgaatgatgattcttttttaaatgttagttttggaacttaaaagttgcacaaaaattttgattagatctaaattatactttcaatagtgaattaacggtactaaaggataaagaaataattagaagggtaaaacgataatttaacaaaaaactaattacaaaccgaaacaaggagggctaattactagaattgattatatcaatagacattgcagtaaaacctagtaaatataattatataattactaagagttcaatttcatatttatagtggantaatcatggaattaataaacatgagaatttggttgataagattcaataaataatctagtttattggagcttagaattatagatccatagttcttggatcgccacgttgcaacactatcaaaggagggataaaagttatataaagaagtttgataaaatccttaaatcccaaaccccccaaatccttattcactcaccgatgaactagacgaagcatccttactctccctttctcagtcacaagaaccagacggagcaaacaagaagacagagtgatgaatcagaagacaaagcgacaaactacaagcaccaacggggagggagaaggtcacctattccattatcgccatcaatctggaatacggatatgttttgacgatgtctgttcttgcctctagctggaagtggaagagtcgaatgaaaatagaaaaatcgatgaagaaaattagggaggaaaggaggcaaagtgagttgtctttctcagtcaatagtcgcaagaaaaggggaaaggggactgggctgtttacgattgacaatgaagtattttttattttttttatgcacaacgaaattagattttaagtttatatgtatataattagtttataataaaaataatataagttttgaaaaaaatatcatagattttgtaaagtattttttatgtttttttttaatgtggtatttaatctgcaccttacatgtgtctttttttaggctaacagaatagtggtaacaagaagcctaaaatacaacatttggtatttaatccgttgaaaaaaagatatgatatttaagtgtataaaattaaaacatatagtatttaaatcgtaaatttccctattaattatttaaaaatgaagaactacaacaacgagaagtataaattaacgatatatataaactaagttaatattatgcgcaatgcacatgtataattttagttgtataattttttaaatgttatttaacaaacatcattttttattaagaaatatttaatttaagtaatatttattgtgacaattagtagtcatgtgttccgtaaggaaaaataccaggtaagttgtgcaatcccacatcgcttggagaatgtaaagtgtgatgattctgagactgtgtacgtatgagactacatagttgaaaagagcttaaatggattaattgatactacctatatcaacaaggtgcatcttatttttttggtagcccatattgaaagaactccacagttaggtgtgcttaacttgggataatttcaagatgagtgacctcctgggaagcagccatagtgaaatactcgtgtataagagccatcattttgtaggtgtaatatcccaatgaaggcttaaagcggggatattacaaattgtatgagggccttgacccagctggaagtgtggtcgatgaggacgtcggaccttgtaagggggggtgattgtgacagtca

SEQ ID NO: 79456 - DNA, 2274 bp, Cannabis sativa
gcattgatcacgattcatggtactggtgtaaagagaaagatgatttttcttctataaaaagcgtgtatcagctcctctaggacaccagattgtaactcagggttttggcgtcctctttggaaattaaaaattccacctaacgtcaagaacttcctgtggcaggcgtgttctagttgtctgtctccttactagaactcagatgagagtgaaacatgttcaagtggctacttgctatccctagtgtgatgatgaggctaaatcatttatgaaccttttaatttcatgttttgtggctcaggatttttggagcataactggtgttgcagcaatagcaggtaatcacaccatgtttgctgcttagttgcatgaaggtctatcttgttggtcagttgcggtcaagatcaaggtgggtatgctgtgttggtccctttggaacttggaagcatagaaatgagagagtttggaataataaatcaccaccgttggtgagattgtgtcattatctagactcaaatttgagaactggagtaatgctcataaaaagtttcagatgccttctccgtataattaagcgagagaggtaattgagcattggaccacacttatgtttcctaatctcaaaagtaatgttgatggtgctatttttcaagcagatggtcgatttggttttggtttggtgatcaaggactccatgagtttggttcttaaagctattcaatgaagtcatcctggtgttgcttattctcctttggttgaagctctgtgactcaaagaggatttgagttggatttaaaagaaagggtagattgatgtggtgcttgaaactaattactgtaatcttgtgaatgatttaaagtctaataaacctatggtttctccatatggtgttgtagtttagagttgtaagacgatcttgttagaactttcttttgtttcaatttgctttgtaaaacgacctacgaataggataccacacgctttcacttgatcttctgttcatgttgcttctatttttagtgaagattctttacccactaaaatttcatccttagttagggatgatttgatttaaattttctttcaaaaaataaaataaaataaaaattataacttaatttggaaaatttagatatatgcctattatattagaagtttgatgagttaattaagaaatttatactttatgaatagcaggcaaattgcatttttgccatacaataacgcgtgttgttggactagtccataatcgattatgcctctcacaacttacgaatagtgatagttacataatctttatttttttttaattttatttatttatttattgaagatttataaatactaatcatgagactttaactcattaatgtctcagactagtccttgaaacacgaaagaacaatgaaatcatcaactatttcactgataaaacggagtgagtatttagtgtcaacaatcatgtaaatgaaaatacaagagagaacaacaagcagtatccaatgatgggggatgccagccatgttttggtttattttgcaccacaaaaaatttggacaaaaactatgaaaaaaaagaaaaacaaggctcatggttgagacccaaaactttcttcgtaagaaaaatactactgggctgagctcacttgttgcctaactcttcgagcacagtctgcgaaattccgaacaagatcagcacatttcagagggtctttgatatgttctttgtagcatgctaagcaagcttcattctctgctacacaaggcaaaggcttctggtaaggaagcttgaactctttatcacggagatcttttgctctttgtgttacttcctgcaccatgttatcttcctgcttttgcaacctctccacaaccctttcgctctcttgaaggacagatcggattgcatccaactctgcactagaagagtatgcagtagggggtactggcaaaaaaattgggggctgaagtggccatcctgaagcggttgatcccttgtgtgtttcaaagccatcggaaacttgcttctcctttgctttcgtttgaggttgttgttgaggcactcgagacttagttctagtttttttagtcttcttcttcgatttatcttcttcattgccagcaaggctattcaccaggttgcggctaatctggatactaaactcacccatgatttcacaacttcctgataaaatacctaaatgcattaacagaagtaaaacagaaagacaaatttctctcaacataacctccatatatttctcctttctgctataac

SEQ ID NO: 79457 - DNA, 4296 bp, Cannabis sativa
  modified_base (376)..(386): a, c, t, g, unknown or other
gtgtgattgaactgaaattctgaattaaagtatataaatgaattttttttgtacaaaaccatattatttggcttacttgaaaaaatgtgactcatgtttcggtagattgacttatttcatttaagttggttgtttttagttgttagttcctcgagtaaatatttagtttgggaaaatttattaggctatttttagcctattatttgtgcaatttgtagagttaatttttttcttcattttcactttttggaatagaattacgcttgtaatctttggtttcaagtttcaacacttggaatatataaattggtcaaatttcaaaaacggcgatctataaaatagagaaaattttgtaagaaaataaagctgaaacttnnnnnnnnnnntcgactatgttcttatcatatttttgaaaaagtcaaaacatgaagatatagatctctctttcaactttccaaaacatcttcaatcgtccaattccaagcaatattgaaagacttatgaccaaaacattatcagtcatcacaccaggaagcttgttgccaaaaatcaaactttaagcgccccaacactaccatgtagtgtcgaggcccgtgtgaagaattttgcacaaaatgtaatttatgcactaatccacttaaaattcttggatcgcacatttttaaggcttcgcgtcaaggaggacacacacctcaacactaggcctgtagtgtcagggcgcgcctagcaaaaattcaaaaagtggattttttttttcctatttttttaagctattacttgttaacgatacgtatacttgcgtgttgaaaataccacaacaacgaaccctaatttcgaattttgaatcacaatcctaaataggctctgataccatgtagaaaatggtgaatgaattgtatattgtatttcataaaatagtgtatatatatatatacaaagctataatactagataagaaaccactacatacaatttactttaattttcacaactaatattctaacataaaacaacctcaatttataaacagtgaaattttccattaaaattataatttacaataaataggaatttccataaatctcaaaaaattgaatatagcagaaacaaacagcaggcagaccacaaaaaaacaatagcacaattaggttcaacttgcataaatcacttaaaaagtacatgcaagcagagagatgggtcttttcattaccatataagtatcaaatcatacattttcttttcttttttgttcttcatctcgtttttcagcatcacaaattacatccaacaaacccacaatgaacaattaataaacagtcaactgtacctaaataagtatcaaactattgccatatcgtttgcaataacttaacattacacaaaaagaataatattgaccatactaatttctgaggcacggaaccataactaattgcttcatatatccttattttctctaaacttttagtccatcaggacctataaaatgtcacaaatttcagttcttcgagttctcaaataagctattggtaaagtaagtagtactaccacaacatgtcaacaacaactaaataagccatcccattaagagcaacagcaaagaagtagttcacaatacagctctcccaaagtatttgagcagtcccagtaagagcaacacaattttttttataagccataaataaaagcaacttaatgattcatattcatgttcattcaactataagtatagtacctggtgagaaggcccaaaagctgctcacttttcacttctaaaattacttagtataactgagtgttgtatgtgatagcttaatctttgtctgcaaaaacaaacaaatgaaatgtaagaaataaagaaataatacaaaggatcaaaccagatttgcgctcttaaattaatattagaacagtcgataatttttactccagcatgataaacagagcagtaactgtaatggatttaaaaggacgcaaattaattagaatgagaacgataaagtaggataaggttctaacttaatgcattacacatccttattcgtgctgtaaagaaaaccagcacattaataaactcactatgaaagaaaggacccctagtttagtgaaagcgaatacttgtataagttgtgttcttagagaaacctaatggcaccttcttcaatttcccatcgtatcaccgaatggtaacagaaatagcatatatgcaattgaacactacaaacacgcctatagactagtacatattatgaggaatcattttctaattgacctctgaaagtattgaaaatatttcgtctttgacagaaatcgcagaacttccgccaaacaaacttctttttaacagtcaagtcataattccattttcgccagtaattaattggacatactattccccaaacccaaccaaatgccctgcacatccttagaataaagatagatctgaccaatatttacaatacacatatcactgaatagttcaagaattagaatgacagaaagatacaaagaaattgagctatcactatatcagttcttcaagaagaaattaaaccaaacattcaatctaaacacaaaaccaagtcatggaaaaagatacattaggccaatttcgaagagctacattttggggaaaaagatacgagagaagaaaagagctctctgggtgaaaaaagtaaaagagattaagggagctacaacgatcaaaatccatcggcataaaaaaataacaagattagtacatacacccaatacagagttaatcccatcgattttgatagagaaatataaatagcgaaggagaagaggaacgttggctaaccacattaggaggagaggagccggaagcaaagagaagccctacgctacaccttagtacctgaacctgattgcgtggagaatatgacgaatttgatcagattttcttaaaaagaagtaaaaatcgaacaaaaacgaaaaacagaatttcttttttctttttttgaagaatatttaattatttttcaatattttttttaatattgttttcatatatatttttatatattattatttatttatttatttttagagaaaaaactattattattaaaaatgagagtcattaataacaacaaaatagattggggaggaaatttcccccaaccaatagatatcctcatccaatcgaagagcaaatttggctaaagcatgagccgctttattcgcatcacgtttaacatgtgatactttcactctaggaaaataggacaaaagatagcgaatatcatctaccaaatcatgaaaaggcgttacaaatgtggtagaagacatatggtttattgcattcgcaagctgcagagaatcggtctcgatgatgtcaataggcaaatgattctcaatcgctcactggatactataaaacagagctgctgcctccatctcttttggagaaaaacatcctttgaaaggctttgcaaaaccagcagaaacactaccagtgtgatcccgaattaacgcaccaaagccaagaatgtttccttccttatcacaagctgcgtccacgttcagtttatgagaaccagtgatcggtgggagccaggattgctacattgtcgctgtatattggtgaagagatgcacttccagcattatgatcaggcacatcagtaacaattgcagctgttgattgtactagtttagtgacagagcaatattgatccaaataagagacagcaaaggaacagataatagctgctgattttggcttagtaccatgtatttctttattgcgttcagaccaaatgcaccacataagacatgtgattaattcaagatcagcatcagtatgtgcagcagctaagtgggagaaatatcaaacccttctaagttatagatatgcggcataaagacttgaaattgatactttctccatacttctttcgcacgggcacagcggaaaatggcatgaccaacagactcccagccgtccttacagagggaacaaacagcagtggttgtgatctttcggtgcgctaggttcacagaggttggaagagcatcattaatcaagcgccaagcaaaaattttgactttcttaggcaacctgagagaccataaccgattccaccattgtctattagaagaagaaggagtatgatcattagtggaatccaaagcaacagctaaatgataccccgtcttcaccgtatagataccggagtccgagtgatgccaaattagcctatcctcttttagaaagtgactaagaggaatcgagagtataccttcaatgtcaatagtgttggaaattatttta

SEQ ID NO: 79458 - DNA, 4344 bp, Cannabis sativa
atttcactgtaaatgtttctatataaacatagtgaatagaagtcatgagaaaaagttttctcaatagattgaagaaggaatacaagtacactatatatatatagcagcttgattccagctgctgtaactaattaaatagttacatgatacaactgtacataactaactcttactaatacagttcattcttaactaattcttcttctgatactgagcatgaatatcaaataatctcatcttgtctttgagtagtttgatcaattgagctggaaacagaggcttagttaataaatctgctatttgatctttggtgaaaacgtgtaagattttgataatcccttcttgaatcttttcacgcacaagataacaatctatctttgtgtttcatcctctcatggaagattggattagctgcaatatgttgtgcagccttgttgtcacaatgaagcattgtaggccctttgtgatcgatctttagataaaatctacactatttcctatgtagtgtttgccataactctgtactctactttagcagatgatctggatatggttgttgctttttactttttcaggacactatggatgttccgagaaaaacacaaaaaccactagtagactttcttgtatcgggacaaactacccaatactgagtctgcatatgcctctagcttgatttcacatgttgctgacaacataattccatgtccaagatttgcttactgtaaaactctttgagcaatatcatgtgattgatttttggagtagttaagaactgacttaacttattgattaaaaatgatatatatatatatatatatatattaggtctggttatggtcaaatattgcagtttaccaacaatttttttgtacaatgtaggatcagccaaccttttgtttattgtcttggcatagctttaggttgacctccatgggagtattcataagtttactccctaagtaacccaaatcttcaagaagttgaagagcataagctctttgaaaaataataataccttgttttgacctagctatttaaagtccaagaaagtactttagtttttaagatctttgagcttaaacttggtgttcaatcttacttacaaagcttccatctcttgtatatatgtgattgatgaccaaaataatatcatccacataaacaagcaataagataaaactgttaccaaagtgcttgatgatcgaagagtgataagtggcagaatgatggaatccttcatgtaccaaagctgtagaaaatttctcaaactattatcgtgaagcttgtttcaagccatataataacttgtttaacttgcatacaacatttggcagtcatatacacatcttcatgtaaatcaccatgcaaaaatacattattaacgtctaattggtacaaagcccagcctttaatatcagcaagtgcaagaataagtttgccagtgaccaattcagtcactagtgcaaaagtttcaaagtaatcaatctcgtcttgttgattgtacccttttacaaccaatctagctttaaatcttttcacactaccatcaacattaaacttgatcttgtaaacccattttcatccaattacctgatgatgtaaaggaagactaataataattcgggtattattttcttcaagagcctcaatttcacaatccatagaagcatccaattcaataatcccatgagtttgataaaattgctcaggtacttgatgtgttgaaatagagagaatgagagctcaaaattttggagacaacgtggaataatcaataacagtagacagtagatgtgcaatcactagataatgatcctgaaggaaaataccagaagaataattagccaagaaaaaatgataatctgtgagataaaagggctttttatgtgctctggtgggcctggttgtctgagaagaagtaggcatttcaagattagattgaggagtttctgtaatggaaatagaagaatgagaattgtctattggagagaaaagagagttatgttctagagaatcagaaaaagcataaaagaaataataatgtgtgtatggaaaatgggcattttgaacaaaaggaaaaatatgttcatggaaatatgcatccccactgtagaagacacgattagtatagagatccaaaaaattataggctttcatactcttgggaacctagaaaaacacagggagctgacattggagagaacttagttcgagaaaaactaagtgtagaaacatttgctaaacaaccaaaagattttaggtgaatataattgggaggcttaccataaaatgggtttttttatttgagatttggtgaaggaattcttgagcaaaataggaaactaaagctcttcagaattgtctgatcgaatgcctttaatagacatgttaaattaagttttgacaagttgaagaaattgataaatgaccaattgagcatcagatttttgtttaatgaaattaacctaagtgaacctagaacaatcatccactatgataataaaatacttatatccttcagaaatcatagtattataaggcccataaatttcaatatgtataagatcaaaacattttttaacaatattatgattagaaataaaaggcaaccttttttgtttagcataatgacaaacagagtagtgaaaatgagggctagagttaaggtctgaattgcacttttattaattggatgttgtttgatacatgaggggtgacctaatctgtagtgccacatagttttgtcttcaatttcaaaataaaaaataacataaaaaatagcaggagaaagtgaattatgagacaaattcaggtagtaaagatctccaatcaatcacccatcccaatctgagtcttcatactatcctgaataatgtaatgattaagaggaaaaaattaaaatggcaaccaatagatttgatgattagtgtagtagcaaataataaattgtgcttaaaacaggaacatgtataacatttttaagaataaggtcagaggaaagatgaattatcctaatacaagtaacagaaatatgagcatcattaggtaaattgacacttgaataagatgtattttttttttaatattggtaaataaagataagccaggatacacacataatgtgtggctcctgtgtcaatgatccatctattatgcaaaatagggaagctcttaccagaaaattgtgacaccatgggttgatatagtttagatgagaggcttgatgattcttgattcttttgagacaacaaactcattagttgttggcactgatatgtaagactctgaatgagatcttgatctggcataacacactgtccactttgtcctgcatgtcactgtgtccattagaataatttgtagaagcttttctaggttaattggaagagttttgattaggatttttttattccgcagaatacttatggcctagtgggtatccatgtaacatgttgcatttagccatgatatgtccaaccataccacaatgattacaagtaactccgggatgattaaaacttacattaccagcaaactgatttgtagtagatctagattgactaggtgtgatcttagggacttcgacaagaatggaaataatgcacctttgtctctcttcttgaattatcgaagtgtacgctttgttaacagtaggcattagatcttgcatgagaatctaagactttgcacttctataagattcattcaagccaattaggcactccataactttgtcttctttttgatattcttgaacaaccttcatcgcatcacacttacaaatattgtagagtggtctatagtcttgaatcagatcccataaaagcctttcttcgagtaaaataagcagtaacatcgaaagatattggttaaacattttcattgatctctttgcttcaaaaatccttgggacatttatttgatgatatcttttttgtagatcattccaaattttagtagcgaattctatgtacacatgtgcggactcacatatagaggcctgccccctaaaaaaaaaaatcgaaaaaaaaaatatatttgtattttggttaattacaacatatatttgtaattaaagatgataattataaacataataataaaatcgtatttatttttactattaaatttactttttgctcccttcaccaaaaaaaagtgccccccctcaattttagtttgtacatgaaactataatgtaaaagtcaagaaattactaaaatgttacatcgatttcaaatatcatgattttcatctgttaccttgatcaactttctctattgtattttgttttgagttaacaaagcaacaatcaatgatcttctctaaatattataattg

SEQ ID NO: 79459 - DNA, 1883 bp, Cannabis sativa
agggggatttgatcttggtattacaattaaacctgtaaagctttcatgattttttagttctcagaagaatttaactataataaaaatagtaatacaattatcattttgttatgctcaccaatcaccatccatttagtttctgttaaatgtaatttctgttaatgttttctaaaattatcccagttaaacaatattaatttttttttcgtaagaagcaatattatagttattctaacaaaacaaaacgaaaataaatgaaaatgaggcattagatattaaagtttctctgtaaaaaaaaagccaccgctttttaacaatttcatatgaaaaagaaaaccatgtaactgtttacatcaaaattataaaattctaactagcaccattacaggttcttccaaagctggtcaaaatggaacaattaaaacaccaaaagccaaatggttaggcctcattttgcttattcgaaactcaactcaaaacacttataagcacaacaaacaactgaaccttataaagagactcaaactaaataggatcgaaaatggagaacaataagcctttcaatcttcacaggttatgttttgttttgtttagcattgggaagcaatgtggacaatcaagtcaacaacacgggaactgcaaaaaagcaaccaacgaaaaaatgaggaaaactacttttcacaatacagaattgaacacaattcattttgaaaccgaaatcgaagtattattacctgtaaccccattcgttgtcgtaccacgacacaagcttcacaaagttctcgttcaaagcaattccggccttggcatcgaagatgcttgacctgttaatgatgatacataaatcagtcatcgaattagagtctacatgacaatgtgtcactaatttaaattatgatcaaaacttggaagacaatattacctgctgtcaccaatgaagtcggtagagacaacatcatcttcggtgtatcccaagatacccttcaatttgccctcagactcctccctgtttatatagcatgtaaaagagttaaaaaaaacagttatgtttcttagcgatctaaacaacaaaagcaagagagacaatcctcacttgatggcatttttgatgtcgtcgtaggttgcagcctttgcaagcctgacggtgaggtcaacaactgagacatcgacggtaggaacacggaaagacataccggtcaatttaccattaagagctgggagcacctttccaacagcctgcacaaccaaaaaccaggatacccaagttagagaaccttattaataacataaaccaaatgaacacctgatttgattatatgcactaagatttataccttagcagctccagtgctgctgggaataatgttgaaggaagcggctcttccgcctctccagtccttgcttgatggtccatcaacagttttctgggtagctgaataacaaataaaacaattgatttagacataattcaatatcataaaacatacatcagaaattccacataaaacttgggtaacagcttaccagtgatggagtggacggtggtcatcaaaccctcaacaattccaaacctgtcgttgataacctgaagaaaattgaaacatgaatacagcaattagtgaattgcattaagagaaataatgaataaaatcagcacagaaataataaccacaaacttcaatatattaaggtaaaggtaagaaccttggccaatggggcaaggcaattggtagtgcaactagcattggaaacaatatcgtactctggcttgtattcgttctcattgacaccaacaacgaacatgggtgcatctttacttggggcagagatgataaccttcttagcaccaccctgcaatcgcgaaccaattcaaattcaagtct

SEQ ID NO: 79460 - DNA, 4178 bp, Cannabis sativa
tcactttcgaagatggccccgtcgacattgatcttgaactttgtaaaaagtggttttgtccaatgctccttcccattcccaatattaacattgagtaatggaaatgatccttgtgattgagcattttgtcaattgccaagattagtgggcatacaaaaatgagactttaatttgaaaaaaatatggtatttctaaaaattaatttaaaaaatatataccctaagctaggtagtcctaccttttgtacaagatagaagaatgagtgggtcttaagaaaagaaaattattaagctttttatttaaaaaatatgtaatatttttaaaaattactaaaatatacatattttaaaaaaatatttttttcttcttaattaggtgggctctaatgtgggcctaatccgtctgaacccaaactcggccctgcctttgtaacaaagaacaatcatttatgtgtatgtatttttgtatatattaattaattttgtctaaaaaatactatgattatttaattaatatttacaatcaaataagtatatataaaccaaatgtaacagctacttcggttaattaggtagtttttgctacaagatcaaagttttctaacataaaaatttaataaatgcagcggactaaatactaacattttaaaatattggggatttagatgcaaaaagaaaaaatatagggttctaagtacaaaaatagtgaactaagttagaaattatatacctccaaataattatatattaatttattataaaaaaatatgtattaattattgacacgttgtcattattcagttcatatgttttttaacagctaaatactaacattttaaaatactggggattattgattttatggggcgaaaaataaaatatttaaaactttatacatataaaatttaaattatcaaaagttgagggagcgtatgaccccataaattaaactccctccctccaaatattaatctttctttcaattaattaaaaatatatatttatataaatatacatgtgaggtctatatatattaaactgaattacccaaaaaaaaatggaggagatgatgaggcatatttgctctttctaattaacatattaattaagaaaataataataataaataaataaattgtacatgctcactctgttccaactatatacatatattagttttatcattatataaacctttttcttttaccaacttttgaatgttccaattttcataatgaagaatataaatatatatatatattcttacacccccttatagatttcttgagtttcatgcaagaaacccaaaagtgattaatatataaaagtgttacactctctataatcataatattctctccattatataaatagagatcttcaatatatctcattgttctcaactctagtactcaaaactatactcttaaaaaaaattgtttgataacatataatttcaatatggcaaatccaccaactcaacaaacgactgtggtgaccaagccaccaccaagaaaccacatccttcgttgggtggctacattcattttagggctaataatcctagttggattggctgtgctcgtaatatggcttgtcgtcaagccaaaacgattcattttcagcgtcgaagatggttcagtcaacaacttcaaaatctccaacgacaatcatctaaatgcatcgtttaactttgctgttcggtcatataaccctaactccaaagtctctgtctactatgactctattgagtctaggcttgattacgatgaccaaaccctagccttcaatgtggtgagccctttcttccaacctcatcgcaatgtgactcgcctccaagtcaaactcacagcctcgtacacaactctacttagctcggtctctaaagacttgaggctcgagaagaagtctggaaagatcgagctcaatctctcgcttaaggcaaggattaggtttaaagtaggtgtttggaaatcttctcatcgaaccttaattgtattttgtccctctattttgattgacttttctaagtccaagactttcgatagaactaattgtagcgttgatctttgattttttagacatttctaatagaagtacgaaaaattcgaattatcgaaaaactcgttttctattaaagtataatgatatgacgataaacacaaaatttattctcaaaactatgtttgagtataattagtgtttatcgcattcattttattattttttctatcaatgatttcaagtagtaatttgactaattagggttgagttacgactcaaatctttgatagtattacgatcgagtgatgtgtgtaataattggtttttgtaaaatgattgatttgtgtttgaagtgttaatttgttaattttgtatcgagttgtatggtggtgattgtgtcaatagagagatattgtatttggtgttttctttagttgaaattatttgtaatctttgtataaatttaaaagatgggatttacatattcataaatttcttatataattctttgagttaaattaatagtaaatgaatattacatattttcatagcattttttattttagaattcagcttaattatatttcatcaaccaagtatcatcatcacagatattgaacttaatcaattgagtcttagaaaaaccgatctagtctacagcgaaccacaaaataaatttatgctttggagtaattaatcgaccgtgcccatacctatccataccaccccaaaataaaattgaaaggctttattaagcttttatttaattaaaataaaatgtattgtaaacaataaatattaacagtttagttgattaggttatatgttacataagtgggttcaaatataatacattttttttatatatatatatttctaaaatttaggatcccaaaatatattaagtccatatattctcaaaatcagactaactataaactagcatgaaaaagaaagtatataaatatattcccgggaaaacaaaagaactaatgaattattaattgtcattgccaaaaaagaaaaaagctattgacatatatttcatttatagacctttttcttttcatgaacttttaaatgttccaattttcaaattgaagaaaagaacactatatagatagtacatatacatcttgtgattaaaataacattgctaggccccatcaaatatttcttgagtttcatgcacgtaaatattactatataattaatttatgtaaattaattaataaagtgtaacaaactcaaaacaaatattctctaattacaatagctatatatatagctttattaatgatctcctaccaagtattacgaactctactaaattcaaattgatacattgatttcatttctatggagaatccaaaaacgacaacaactggtgagaaaacgacacaaagtcaaatcttcatctcatggttagctacattcattttagtcttgatagtgttatcaggtgtgaccgttctcattatatggcctgtactcaacccaaaatgactcgttttcactgttgaagacacttcattccaatacttccaaatctcaaacgacaatctaaatgcgtcgtttaacttcactgttcaatctcaaaacccaaactcccgaatcgcaatctactacgactcaatccatttcaaagtcatttaccaagaccaggccttaagggttggagtaatgggcccattgtttcagcccaaagatgagaagactcggttctaccttaatactactactaataataggcccattgggcttccgagatgggcttccaatgatttgaaggtccagcagaagaagtatggtaagattaaggttgaccttgagatttatggtaagattaggtttaaagttggtgtttggaaatcttctcatcgaaccctaattgtattttgtccatctgtttggattgatttttatgaggttaaatccttccacaaaagtaattgtaacgttcaacgtctttgaattttagttttaattgagtaattatgtatagggttaatactatttttaatcttgtattttcttaaaattattcgactctttgttttgttaagataaaaataaccatgtattttctaaaatagtacaaataggattttgagctcaatttttaagaattttatttttaaataactaacctgaagataatttctagcatgatgt

SEQ ID NO: 79461 - DNA, 1342 bp, Cannabis sativa
atatatatatctaatgacttgggcttctcggaaaacagaaaacacctccataacattaattagatctctaaccaaccattatggaacctgaagaaggtagtgttcgacggggaaagccagccctgaaacccatagaaactgaaaccagagaaatgaaaggaagagattacagtactgatcatcaaaaaagcaggaacgacgtcgtttttggagaaggagaagaagaagaggcagtgagtccaggaggtcgtatgttccacgagccaaacttcaacgttcatgttctagcaatcatggggtccaagttcaaaatccaattagatgttgctaaggccaacttgcctattactctcctcaaacacccccgcttctccagtttgctggtaagtaattcgttaaatattaatttatatatttattaaacttgtttgttttaattactttatcatttaataatgatattttcaaggttgtggaagaaaaaaatagagtgaagagtatgaaatgggttagaacagaggttgacgtggacaaccacctcatagttgctgaaattgatccaaacatgaaaatatctccagacgagttcgtggaaaattacatttataacctcacgaaaaccagccttgacatgtccaaaccactctgggaggtccacgtcatcaacctgaagacctcggacgctgaaggagtagtcattttcaggatccaccactcgctgggggatggaacgtcactcatgtctctcctcttggcctgtacacgtcagacggcggaccccactgcccttccgacccttccgtcggcgaagaggaggaaagatgagatcaagggtggtggtggtggtggtggtggtggtggttttatcagaagctattcgcagtgctgcttctggggtgtttggtggtctcttcagttgctttggaatacttttgttgatgttgtcgtttttatggctacgacgtcgtttttgaaagatacagatactcctgtttcgggtcattcttggagtgttaggaatccacgtcggattgtttataagacggtctctttggacgatatgaagttgataaagaacgcaatgaacatggtaataataataataatgagaataataaattactgaaccgatcttatattttcatttttaagatattaattagttttattatgttatctttcatctctctctgtctgatgtctaatcagaattcttatttcttataattagatttaacactcttttatatgtatgtatataactatttttcctcatctacttaatttgcaattaattaaatatagaataattatgattttacttattgtaataataataata

SEQ ID NO: 79462 - DNA, 1529 bp, Cannabis sativa
aaaaaaaaaaaaaaatttttttcaaaaaaaaaaaaaaaaaaaaaaacatatgcaagagtgtttaattcatttgtaacttaattaaccatcataataagctctcgtttgactactaaataattttaattgttgatttgttacagtagcacatagttaataataaaatcaacaaaacaacattacttctgatttacttctcttgctgttaaagaaaaattgaaacaaaaaacaaacatattaaaaagtacgaattactcaaaaatgtaatagattaatctatatgttactgaatgaatgacttgatgaagctttatacagtctttgggcttggaagcccaagatgtggaagcgtagatgagagatggaaatttgggatgggcctaggagatgggataagaattgaattgggcctggtcctgggcgatatagttagatgttgaagggcatcaaattggaggcgtgaagggtactctctgacgcagctaatacgtggtccagccccagtgcaccatttggacgaagaggaacccatactcaattccattttggtctcattgctacgtttcaaaccatttgggacactcagactatttccactttcagacttcgtcaaattattattattattattattactaggtggaacgtcatcatccataggacatttctgcatcatcatcatattattaattaccaaataaactcatgatcagttcatttaaatttataattaaatacgtacttaaataatatatataataatttaatcaccttgacatttgttaagtccacatgatgttgctccaaatagctaattatttccatgaaattttcttgtgttgggcgataatgaccactataggaccatataccctggaaaaagtcgattaattaaattaataattataattagatgttgtatgattatatatgtaaacaaaacaatttaattatatatttatataaacctgaagaatgccatcatgggtaaccaatcttccagctgcaatggtggcagcacctgctagaaagcttgagtgttggaatatgcccttaatctttttagccacgtataattttcttgatgtgctcagcacaaagatccacttggtgccctcatcagtctccacgtggcatccactttgcttgtagagaagcttcccactttccactattacttcgtacgcttgtctctctatctgcatgcatgcaatattaaataatttaatataattaataatgaaacgtgactatatacaaaaactttcttggctatttttgtagtcaaactattggactaaaaaacatttctaagtccccaacccaaacacaaagctggatttaaaatataaacttaattttcttaaaaaaaatatattaaataacttatattaaaattataattataaattactaaaaagtattatatataaattaataaatataaaaataaaataaattttcataatacatttagatatagttattacaataaattaatatccaatatacataattattacccaata

SEQ ID NO: 79463 - DNA, 2030 bp, Cannabis sativa
agaggttaaatctttaatgggttttggttgaaaataaagaaaatatgtaaatctttcttgaacaaagagtcagcaattattattaaaaggagggaaagagcagaaaagggggaaatgtattggttgctatgcttcaaatttataagcaattgtagtttgtgatcgttgtatgtaattttggaaccttcatggggaaggtgagaaaaattaataaaaaaaagagaaagattcgttccttaattcagttattcggttatggtgcacagccatttgataattcttttatacctatgtgacaacatattatatttataacaaataaaaataaaaattataataaaaagtatattattagcaagtacaccctattatatagcatatagaaggatattaaaaaaggattgataatatgtgtacatataaatcacactcacgtgacaaatcattttagataagtagaattcattttgaataaaaataattggttgaggtaacttcatatataaatgtatgtcgcatatttgtgtgtaatttgtttgtgcacatattattactctgaaaattgaaaaaataagtaagaaaacgaagagcagggacttacttgacttgaaagttgaaattcattgactatatttatgagaagaaagactaaagaaagagaatccctttaaattgcctttttcaactttagccataaaaactaattcaaatgcctttccagcaaaattttaggtgttaagttgcatttgttttcaatatttctactcttttatatcttgctaaaaagtttacacttcaattacttaataccatttacttcctcagtgtcataacccaacaataaacttcggaagctaataaataagcctttaacatggtcagttggccataaaaggtagcctacgtagtatgaagatgatgcattccaaagaaaaaagatgttttcagaaaaagtaaagggaaaacaaaaaaaaaaaagggaaaaaagagagttaatacagttgcaatagtttattaagtttattaatttatatacacatatatgttgaattgtaaggaatcactgaatgggggttcaacaggagcttttaatggaaaagttttatgagaaaagctccccaacaacttggcgtctagctatatcatatgcttattttatttcatcatttagatttgttaaccactaaatataatacgatactgtcttttacatttttatagccccaacattattgtttagctatagacagagattaccattcagaatgttttgacataaagaacaaaactttcagttttcagtgtcaatctttcaaacaggttacacagaaaatgtcaaaagccaatctccttgtcaccctttcaaccagaatgtcacgaacatgatgtgttaaactggaacaatattgctaagcttgataaaaaaaaaaacatcgtccctcatgttaggcaacctaaagtaacaaaactgaaaaggattaaacccttttttcattgctttcagagtttcaccccatagaattcagacaaatttgggttttcttcaaagtaaatattatatctgttgtatggattttggcttgtctgagagtatttaaactggcaaatttgaaagctaaaccagaacgccataaaaccatccctgccatgttaagattggtgaatatttaatttaatcgttgcctacgtcggatacattttcacactaaacatgattctggaagcctgaagcttaagcaaaacattgactgcagaacaaagaaaaaaagaacagccaataagtatccaaccaagtaatgtttcttaccatagtgcagaaatgagaaaaagaaacaaaagaaaagtgttcaaacggtggtaccttgtttggagcaacatccctgaccctgtgaaatattggatcttgtatagacgaacctaaggcagcctcagcctcctgaaatagtcggaaaaacaatttacatcaaagcaatgaagaaaccatttttgagcaataaaaaattttgttacataacataataaatatggtt

SEQ ID NO: 79464 - DNA, 1571 bp, Cannabis sativa
tatgagatgtatctactattgaatagtaatgtatagtattaacaatgtgtcatctgctagtagtggtatgatgataattatatcaaattaatcataatgaacaatacattaatttaattttggtttttaactatggaatgaaataagaattagacttgcctggggtggtgcatgctcggatgtttggaggcgatactcatgcatgatccaatcagatttgcggccattgggagctcgtcccttgtagaagacaagggtcttcctcatcccaatgattctgttcttggaaagcacagctttgtctcttcctgttgccttccagaacccagctgccgtcgctctgttagttcgagttcctgtcgggtacttcttgtctttgtgactaaagaagtaccattcattctgttcatcgtaccctaggttgcatcgagctgcagtacggacgtacaaactcaattaatatatatatatatatatttatataatattatcatctagtgctctatataaaacagtgtcgatgaataaattaacaaacaatatagcatgttcgaactatatacctttttagaaaaaaatgaagtttttgtgacacaaatgtcgactaaataaaagagtgatgtttatgtgtgcgttctcagtttcttcctactaaaaagtgcctttattgttttttcttctttcaagattcctatagctccaaaaacgtcaaatccctatatctatatgtccagaccttgctatatgtatatgtcggtccaataattaagtattaatcccatatacattaatataataatttttaaaaaatataacttatcaatggcaaattaatgtataaaggtaatagccaccattaatgtctaataatgatatgtatatatatttcaatatatataaaatagttgctatacataatgatcagattttatacatgtgtctcctataatttcatgtaagctgcacaagctcaataacaattctctttataatttgtgccattatttctatttgagttttcctaatcacagattatacatacacaaaaagtccaattaatatattatagattttgtttgaatatgctagtattaccttggatatcccatggctcaattttatagagatcaacgtcaataatgacatcaagatcaattttgagtgcgttaatctttcttttgagatagtaacccacaagttcttcttctgtgggatgaaacctaaaacctggtgggacacaagattccatttccattgctttaaagattatagtcctctgcgataatgacaagtcaaagagagaaattgagatattagctacaaatccaatatcattgattcttgaccatgttatatcatattatcatacacataatatatataatcatcaacataattttacacaacaataatttttgaaaaacgagaatggtgactataatatgagaattgctaaaaaaaatactatgggagtttattacttttttttttttgtattatcctgctattggtgtaattaagtatcgagtactatataaattaagaaaataactgttagggaatatcgctat

SEQ ID NO: 79465 - DNA, 5465 bp, Cannabis sativa
gttccaagcaacacctctcatggcgcctgtggaggagatttgacattctcctccacaggggtaaccgagtgaacagataagctggagccagatacttcaatcacaaaatgcttagtgcgttcgtacatttcagaagtaggtgccactctaatgacaccacccaaattcttgatctcatatagcaccaacttccaaaaaactttacgatcataaagcaactcctcaagagctttaaagaaatgagacaaagtcctccgctcttcttcataatttttctctacctcttttccattagaattggcaaaaagaatctcctttcctaccaaagaccctccactcccaagggtgggaccaaccttatcaagagacccacccaaaaccaccaagagattaatgagaaacgggcacaaagcactattccctttctccaaaaaaacccggcccaagctcatctctcggcccacaaccacccaaagacaccacattaaacgtcaaacaatgaaacaatttccgccctagagaagcacacggcccactacctataaagtactccaatcccacacacctactaggcccaccactcaaaacaaacacttcactaaaaccctccttaacaaccgcactaggcccacatatgactttctctacccccctcggcccaacaaccaaaaggcccaactcaaccaaaccaaaaatagacccaacatcaaaagaattcccatcaggataaagaataccattgaccaacagattggtcttttccaccaccagggaagcaggcgctaaaatgggaaaagtctcagtatcctttccctccacattcaaattcaagccaaccccattaccatttccagtaaacctagaactccgtccaacagacgctcccaagggcacccaaaactgattcctccaacttctcgaaactcgagacgagtaggtcatcggacggacctccgctccaccttgtacaaaaacgaccgacgactctccacgagcgaccaaacccggttgagtcccatcagacgagaacacaataaggaaccaagaagccgaaggcaaccacggaccaaacaaaggttgcttcaagccataagccgcctccaccaacatgtgcgccaccacacaaagaccaactaccccacccacaccaaaaatatacacttcgaatgacaaagagttacaaccaacaccaagaaatcacaaagaatcccaccctcagacaagcacaccaagcagaaaggggaaagaacaaaagactcaggaaacaaaaggaaggaaccaaaacacacacacggggcaagccaagaaagaaagactaaaagaaaactagggagcaagaaaacgggatcaaaaaacaccaggacaatgcaaaggtcaggaataaacaagacagagattagtaaaactaagctcagggaaagagagcagtgaaagaccgcttctccaagctccaccaccgcttcttcatgctcggtctttaactctccttcaactagatcagctgatcttctagatctatgccaaaacgatcgacggcatcctcctctctcactctaaaaattaactcttaacttttaacctttcaaaagtcacttttttactacactgttttatcactctattaaagatgttcttaaaaccgttactcaatattttatactcgctgtagtaaataaaatatatttctaggtcatattttaatgaatatacatacatatttacttagagtcttatcaaagtgtctaaccatgtacacattcttgacccgaccatgcttacgatcataacttgaaccaaatataatagaaaatattaaaccataattaaccataaactacacaaataaaataagaaaacctaaatattcattcttcttactctaatatataagcttaaaataggaaaaattatataaaacacttatttttgtaaaatattatttttaagtttaaagttttttttttttacagtattctataaaaacataacaaaaaaatcatatgaaagtaataagaaaaaaaacatcaaaacaacaataaaacacataaaaataatatacaaataacaaaataacaagagtacaacataaaaatacaccaaaaaattatattctatgtaaataaaatctaaaaaactttaaaaaaatgttgaaaactctacacaaaccgtatttttgtaatttttttgttgtttttgttaattattcttttaaaataaacctcctttatatcattactagttgaatatgtgtattttacatgttgcatttatttattattttattaaatcatactaaacacaatatttacttaattaatgaaaccctataattagattaacacatgctgtatttgttagcttaccatgggtttaacccatattgtatttggtaggaatttcaagcacaacacccccacttggccaatttttggctggccaactccttagtggtgcacctctggccggcaaacatggtgaacttcctccccagaacattcaggagcaagtcatccaaaggctgatctttaaccagctaggtttgggaacaggtggaaacacccaagacaacaactcaagaactgaatacaatctcttcagacagttagatccacccgactccagcaattggtgtgatttacccctgtcaatacacaggttgcatcgaccatttaggagagaacgggcggctagacattacccagcatagggctggctggccatggccagttaccttacttagggctagtaaaattctaagggcaaaccttgacctcttcgcatggtcacatggagacatggtcggaatagaccatttcgtgataatgcatgcactaaatattgatccaaacttttgatttatgcaacagaataggaggttgttagacaaagaacgcgcccaagcgctaagagatgaagtcgaaaggctgagtgcccatgaattataactgaagcattttatccactttgagtatccaaccccatgttggtacccaaacctaacaactagtggaaggtgtacatagatttcaccgacctgaataaagcatatccaaaggattgcttttcgcttccaaggattgaccagctggtagatgttacaacaggccatgagatcctgagcttcatggatgcttattaaggttacaacaaaagcaagatgcacctaccagatcaagaacacataagcttcatgatggatctaggcctatgctgctacaaaatcatgccttttggactaaaaaacacaggggccacctatcagaggcttgtgaacaaaatgtttaaagatctcattggccgcaatatggaggtgtatatggatgacatactagtcgagtctaaaaaggttggggaaacgtggaggatctagatgaatgcttcaagatccttcgagagtatcacatgaaactcaaccccctcaaatgctcagtcggagtaggctcaggtgaattgtttggcttcatagtcaatgctaggggaataaaagcaaatctggacaaggtctaagcccttttggatatgaagtcgcccacaacaatcaaagaagtataaagcctaacgggaactattgctgcactaagcagatttatgtctaaatccacgaacaaatgtgtacctttcttcaatataatcagaggaaacaaaaaattcaagtggataggagagtgtgaaaaggcattccaagagctgaagaaataattggctcaacctcctatcatatcaaaatctctggacaatgaagagttaggtgtgtacctggctatcacagaacatgatgtgagtgcagtcttaataagaaaagaagatggtatacaacatccagtatactacatcagcaaaagaccgatcgacattgaaactcgatatccactcatggagaagctgacatacaacttattcttagcatcaagaaagctaaggtcgtacttccaagctcacccaataagggtgtacaccgaccagcgattatggtagtttttttaagaacctgaagcatctgcccgactacttaagtgggccattgagcatggtcaatttgatatcacatatcaactgtgagtggccataaaaggccaagcccttgaagactttgtggttgaatgtacaagcatatcacctaaaatctctcaagattcaggagaaaagcaagagccagagaagaagcaagagcaagagtagcaggaagaacctaaaaaatcaatatggaaattgcatgttaatggaagctgcactggcgaaatattcggtgcaggcatttccctcattacggggacaacagttggacagggcaatcaagtttgggttcaaagcctccaacaatgaatatgaagccctaatcacttgcctcaggctggcgcacaaagtatgggataaccacctgaacatatatagtgactcttagctagtcgtaaatcaagtcctaggtaaatacacagctcgaggtaaaagaatgatagcctatttgagaaagatccaagacttactaaatcgactcgaaggctatacaataagataggtccctagaaaatagaatgcaatagtagatgcacttgcccatctagcaagaaataccattgccgacaccacatacttggtggcaatacagttcttgaaagaacaaagctttaccatccctaaagaagtcgatatgttggacgacaatccaacttggatgacacctattgcagcttacctctaaactggagccttgcccaaaaacaaaaacgaggcaaagaagatgagaagaaaaacagctaggtatctaatcctttatggagtaatatacaaacgaggcttctcaatgccactcctaaggtgtatcactaagatagaagccaagcatttattgatagaagtgcatgcaggcttctacagcaatcatgccaggggcaaagcctatctaaaaagatactttgacaagggtacttttggccaaccatgatcgaggattcgatggactatgtcaaaaatgtgagaagttccaaagatccttaaatttcccaagagctccacccaatgagatcacaatgatgtagtctctttagcctttttccatatggggaatagacctgattggtcaactcccaaaaggagaaggaggggtgcagtatgtcgtagtccttgtaaacaagtgggcagaagctgaacccctagcgacaataacttccaagagattcctcgactttattgttaagaacatcatatgtcgatttggaataccacaaaagattgtgtcagacaatggaaaacagtttaatagtgacatgttcactgatttctacaactagaacaacatcatcaaaagcttctctgccgttgctcatcctcaaacgaatgggtaggtagaagctgtgaataagaacctgaaggacactttaaaaaggcgcgttgaagaggcaaaaggaaattggctagaattgctcccaaaggtcctttgtgttggaaattattttaccagaatctta

SEQ ID NO: 79466 - DNA, 1526 bp, Cannabis sativa
caaaagatgatggagcgtagaggaaagaataaatacctagatggagcgagcaattaagtttaattacaaatattcacgtattttatctcaaaactaattggccagttatagctctatttagattggaaaatgtaatactattctagttgatcgaccatttccaaatgtgttgatgagaaaaattgtcaatccaagaggatattttacaccataatattcaagagtctagccttcttttggctgcaatctataaatacatttgcctcttttttctttcttatgttctctccttgaccccaaaatgaaataaaatcaaatcaaagcaacaaaaaaatatgcagaccacaaaaatcacatctgtataaaactacagatcccaccatttacaagacaaatatgtccaattccatgcagcattcggaaaatgaaacgagtacatcattagactatgaccggacttgaaattcccctgcacgcgtaagagcccggaaacctttgtaaggtttggtatgtagattctttagatccagtttatctattttaacaccagaaagggcaattcccataatcctaaaaccaacttcgaatgtggggaatacatgtagccgctctaatccagtctcgagaactaatgttccagacattgaaggggttttatcttttggaatccgttcaattgaccaaacacatttctgcattagcaagttgacagcgttatactagtcaagctccaagagaaacaaacatgtctaagtttgtttcccatcacaggaaagacgcatagaaatatacaaaacgaaaaattgtgatcgaagccacactaagggtaccttattagcaagaatgttgactgttccatgatttgaggaaagatcagcagaccgaatgcaaggaggtagttgaaattgtacagttatggagtcaatcatttttcctggatcattgcgtattccaaccatcacactaatacgacatgtcccagcatctgaagtcagctgtggcttcacatataatggagtgctcttcagctttctaaccctgtagtgatgcaaaagcaaaggaatattcagattgcataaacatgtcatcatgctgatgtaattacttaagaaaattagagataaatgtattcattgtgccgttgtctgctccacaccacacacctgtaactcattaacttaaattgtccatcaggaggcacaaacgaaagaatgtgatcagattcccatgggcgaaaccggacgcagggatgaaatcttacagtatcaagaatagaagggtttgcaaaagaaagggtcagatcaggaagacctgacagatgggaatttacttggacttcaccatatatttcacatttcaccagattcccatccctgcagcatttgaacagagaatttgggttaatgttagttaataccatgcaatataagatacaagctaagaaaatgctaatttgtatatgacaagtgatactcatcattgacaatgcattgcaaaaacttgtgtataaattcaaaaaatagatt

SEQ ID NO: 79467 - DNA, 2808 bp, Cannabis sativa
atgccaaacatgcactaagtttttatgccatatatatcaaaacatatcttcattttttcatatttttgtaaatagcctgacatcaaaaagggagtgttataaatattaataaacatatggatgtccaaatattttatttgttaccattaattgtaattaatattcattttttcttagtttcttaatctttaactctcatatgtgtataaacaagagatcgcccattgagataatatactaagaaatttttcatccttttctattttttttctctaaattataataatagaataaaatattaatttaaatttttagtatatttattttgtgctatgtgatattcttaaaacacactctaataaataaatattatgaatctattaataattaataaaaaaaataagtgatccaattaaaaaaaaaacataaaattttttatcaaatagaatacaaattattgaattctgaaatgtgtatgacgtaatattaaggtcagccctgggcataggcgaactaggcccacgcctagggcccactcattttaggagcccaaataaaaaaaaaataccttttaatatatgtatttaataatttttaaaaataccatttatttttataataatcctccaaaagaataatttttgcctacagcctatttcaactcagggccaaccctgcgtaatatacccaaaaaaaaaaatggaagagataaaagtggaggcttttggtgaagaatattttcttggaaataaataggtcatacaattttaaagaagccatttaccatatttgtctaagaaaaattgacattaacttaccttataattagatggaaggtgatttgttgctatttctctttatttattgaatggtaataagaatgagcggtgattaaaaaacaaaatctactttaaatcgttttgataaatgagtgtataaaataagagtattatttttatttaaatggtttaatattagagaaattttttttttttaatttactgtttgtgttgctatgctagtttctacgtagggtgctatgtggattttagttgtaatttagattactctattaattgctttgtatttttgtgagaatttttgtaaaactaaaaaataaattacttttaaagtaaagttttaatagttatttatttatttaattattaattatttgaatgcttgtaatacttatttataaaaccgataataataagtggaattactatatatactgtttttttttttaattttttttttcaaatttacaatttgggtttctaaagtggcactagttgcaataagagtttctatacgattttttgttgcgatttaggttgtagcgctagttgcaataggaatttcttcgtagaatttcataaaaactaaaaaaaaaattattttaaactgcaaaaataaaaaagcagctaataataattatttcaagtagcagttaggtagcagaaaggaaaaaagaaagaaacaattacaaaagtacatatatgttttctacttctgagagtgaaatatgaaacaaatagtttacattaacttcgttttagtccatttatgtatattacataccctagtctatacagtgttacacaccttccaaactgaaaaaaagaaaaacaaaaaaaccttttaaggaactaaaaacagagatactctgttcacaagagaacaggtaggaaattatagtaacagtctaacagtagatgtatctaatctctaatggtatagccacgttttgcggcatatttgaccactgtatctaactcttcctcgtcaataaagccatctcggttcttgtcagcgcggcggagggcacgaaaggccctccagccgggtgcaaaagagcctaaactcgcgaaagcatttctgagctcttgcttgctgagacgaccgtcgccgttggcgtcgctcagtctaaacttgctttttaattgcgtttcgctgtatgggactgctttgacaccgttggtcccaatcacacagcagttgcctgcaatattcttctgataaaccataggaccatacatctggcttgagtctgtatgcagtatgttttaacaagggaacaatatgagttgaactagtactactaatgttcgttttcttgtatatttgtttgatcagcttggggaacagggaactaatgctaaggcctttatatattgtgaatatgcatttctatattttattatttatttattttagacatggaatcctaaaagttagcccactagatattaggtaatagattattactcaaaaaaaaaagacaaatatcaataaaaagaaaaagaaaggtaatagataattattgtactcatattctttgtagctacctctcatttataataaattctagggtggtggtggtggtggagggcagggtaacatggcttccttttgacacatattcaaagatctttcaacatcagaaaaagagacatattcacaatatatatgttaaagattcttaccttgcgtgttgatttagcaactttttcaaatccctacttttaaaatgagtaatgcactatattatctgtagtttatgaatatatgttatatgaatagagaaatcatataattcgatctcattgattcaaagtaatgaaaatgttattaaatgaatgcattatccgttaattcgtaatgatcctgttttgtaattgataataacattgatgaagtataaattatgatgattttaacacaggtgatggcgccatgtattttgtaagtggatacgtagagctttacgtatatcgggtgatagagattttttttttttttttt

SEQ ID NO: 79468 - DNA, 3399 bp, Cannabis sativa
agtatcttgaagtgacaggagcaaaattggtacaatgtttaaaaaaagaagtaaaaataatagattttaaaaaagaggataaaaataaaagaggacaatataaaaaaggtgtaaagtgtaatttactcatttttatttaggccatttttgtacaggcccaatttattatttgggcaattgagtctcttcaagtgagttcaatggggaaaacactaggcttcgttgcttttctcagctggtatcaccgtcgccgtcgtacttccgttgtcgctgcaacctctccatcgacgacgccattgttgccgcctccgtcaacggtactttcttactttttgctaattcatctcttcttggctattcttagtaaaagtaagaattagaaatgaagtgctcaggttatatatttaaaaatctaatttttatcattatttttatctttgattaccaatcatttccttccattacgatttcgaaactgaaattctaacttatatatttcaatcagtacaactttcgacttatcatattggtattttcatgcaaattcaagaaactaaaaaattatgagtgaatttctgaaaacacaacagttttgaaatctgaaaacagagtaactgtctaacatttttttcaagtaacaggtgatagcatgagtttattcgaggctttgggtgtttcttccccacctatgaattccttcttcttcccaaacccagctcccaccaacaaaactagaccagtatctaagccatcgccaactgttgagaaatcagatagagatttacaagccagactttcaagttcaattgctgtacacaagactcaaaaacaaatattagttgattttttgcgtgattctgcgaataaaagatctttagaagctacacgagctgttcatggttttgtgctgaagtctgggtttccagaatcagacttggtagtcctgttaaatcatgtattgcacgcttattcgaaatgcatggactttgccactgctcatcgagtgtttgataaaatgtctgaaagaaatatattctcttggactgctatgattgttgggtcgactgagaatgggttattctatgatgggtttgagttcttttgtgagatgatgaatcatggaatctttccggataagtttgcgtattctgcaattcttcatacatgtattggtttggattgtattgaattgggtaaaatggtacatgctcaaattgttggaagtggcttttcatctcttacttttgtcagtgtatctcttcttaacatgtatgcaaagttgggctccattgaagattcatataaggtgtttaggaacatgaaagaacataatcaagtctcctggaatgcaatgatatcaggtttcacgtcaaacaaccatcacttagaagcgttccaattttttctcaaaatgaagaatgagggaatttcacccaatgtatacaccataattagtgtctcaaaagctgttggtaaattaggtgatactgacaagggtaaaatagttcaggcttatgcttctgaacttcatctggattctaacattaatgtgggaactgctttaatagacatgtactcaaaatgtaagtctttgtctgatgcaagatccatttttgactcaaatttcactagctgtggaatcaataccccatggaatgcaatgatatcaggctattcgcaatgtgggtacagccaagaagctttggaactatttttaaccatgtgcgagaaaggtatttatccagacctttacacgtattgtagtgtgttcaatgcaatatcttctgtaaaatgtacaggttttgtaaggcaagttcatggaatggttttgaagtctgggtcagtgttcaagacaagtgtttctaatgcaattgttgatgcgtacgctaaatgtgagttacttgaagatgtaaggaaagtttttgataggatggaagaaagagacatagtgtcttggacaaccttagtagtggcttattctcaatgctctgagtatgacgaagcacttaagaccttctcaaaaatgagggaagatgggtttatacccaatcagtttactttttctaccgtgcttgatgtaagtgctagtctttctttgcttgattatggaagacaagttcatggtcttttatgtaaggctggcctggattctgataagtgtacagaaagtgctctcattgacatgtattccaaatgtggcttcataaccgaggcaagaatgattttcgagaggattcccaaccctgatattgttacatggactgctataatatcaagttatgctcaacatggtcttgtggaagatgctttactactctttaaaagaatggagcaaatgggcgtgaaggcaaatgctgttaccttattgtgcatcctgtttgcttgtagccacaggggtatggtggaagaaggtttactttactttcaacgaatgaaggaatgttatgatttggtaccaaagatggaacattatgcttgtattgttgatctctttggtcgtgtcggtcgccttgctgatgctattgacttcatagaaaagatgcctattgagcccaatgaaatgatctggcagaccttgttgggagcatgtagggtccatggaaatgttgaattggggaagatagctgctgacaaaattctttcaattagaccagagtattcagctacttatgttcttctttccaacacttatatggaggcagggagttacgaaaatggaattagtttaagacatatgatgaaagaccgaggcataagaaaagaagcgggatgtagttggatttctgtcaaaggcgaaatccacaaattttatgcaggagatcaactacatcaacaaaaggaccatgtatatgctaagttggaggagttaaggatgacaatcaattcaatgaattatgtgccagatttgagctacgaatagtaactgaagttggacaaaaacttgagttacttggcggaattaagattggcaaaaagacttgcagggaggtcggagccctgacctgatggggcggctatgagacttgcagagggtgtattccgccaaagaagttattgattctgatttggacgatgtagtcgagtatattcgttcaacaaatacaccataggtacagtatcactagagatgaaataatggatagatgtataaagaaaaatgaaaaattatatatttgttcattttttggcaagctggagatgaaataaagattattttgtacagattacaaaaaatatgaagcacaggaagttatcttatagtgattatagaattttgactacagtaacaaatatataatttgacactataggaggttggatttgtaggttgttaaaagtttggttgatttattgatcaaaaaaactataataatgatatatatttgtcactatttatta

SEQ ID NO: 79469 - DNA, 3544 bp, Cannabis sativa
tatacacaaatagggaaaccatattaaacactccagccgaaatatacattaaataataaaatatttttgtcaattaaatatgccaaaaatgaaattaacaaaaatgagcgtccaactacgaaaaaagaattctaatgctagaagtcgcactgtaagatagctctctcattgactacgctcaccgactcatgtaccacaataatacaacacaaaacccatgccacactacagaccttctattagggtcgaccttaaaaatttgtgagctttaagataaaaaaaacactaaaaattatttatattttccaaaaagaaaaaagaaaaaaaatattagaccttccctacatgtaatataaatcaaaagtaaagaagaaaattgatttattatatattattatttttgaattattaatatttatttaccatgaattttagcctttttcatatattttttcctttaatatttatttaccatgaattttttgttttcattaaatagcacgtttactataatgtatttaaaatcgaaataaactaatagagaaatgtaactgtataaataaaaaataattagaattaatatttataatatgttgtttgctaaatatttttggaaatggaatagttgtgatttatcttgtttactttattaggaaacgtaatcggaatgcttaaattgactaaattgcatttttgagttaaactatattatatggtagttattttgtaagacatatttaaaaaaataaaattgtcattatatatttaatattaaaataaaataaaaataattaaaattcattacccttaatggtattcttggtgggagaagttctcccttatttaatcaatttctacatttcctaattttaattatataagtaaacaaatataaaaaaataattactttactattcattctcattacttattagtaaacatgtcatttcttctaactaaaaaatttatttatacacataaagagagtaaataactactaaacaagtatctattaacaatctttgctatacaaaatttatttataggccattgcaaccataaatagtttctttcaaaatcatgtgtgatggtttgcacttatcaatcattgtgctttacgtacttgaagatacaattttactaattattcaacggtaatgatcattttgagcaaagttaaaacttctctaattacgactaataatatataataaacacactaaactagtaatactaggcacactaattgttccttctactttttcaattcgagcaatcgagcagaattaaaacttctccataatttggactagtaataatgagcacaaatagttcgttccttcattggagccaaattaaaacttctataatcacgtctacgtctagtaataataggcacactaattattctctcctcttttcccattcaagcattcgaacagagttagacctttatcctatattaatatacaatctactttatttattatactaaaattaatattatatctataaatattatttatcgtaacgaactaaaatgcatatatatatttctttaatttttttactcggcctcacttatatgtgggtccacccttgctaccgctaataaaagggtacactagtaatcactcgctctttttcaattcgaacttctacaattaatcgattcataccatacacaccaagatattttttttttcttttaagacttgcctatttttagtcactttccattgtaatcactatcactataggacccaaatgataccataaattatacatatcatagtcataccattattttcttcttatcacacaaaatcaaaaccaaaattataataataaggataaggacaaaaatttattactctaataaaacccattttcaccataacaaaaataaaataaaatcaccaaacttatcttacaagtaaaaaaaaactcttcagaaaatattcaatcattcattcacatataaatcaatcattcattcacaaaatagttatttaaaatcaatcatcaaatcattaatataatctaaatttaaattctaaaataaaataaaatttattttgttaattattattatttcttcgaatctggaatagttgcaaagcaacttttggatcgactgagaggcctcataagaccacaaccggcgccggcgccgtcgccgtcgcctcttctcggcgaatccaaagttcgccggagaacatgtttcatagctgaaatcaaatcctcacctgtatgagtcggaggagttgaagatttaaactcttcacagattttgatatgtcgtttcatagcttcatcagtactaatccttctctgagatctgaaaacttcgtatttgaccgcttcagaacaaagtccacagatccaacggccctgatgtctttccctaattcgagcaatgtaagcttgagtacactcctctgttaatccacagcaatcgcacctcgcaaactccacgtcaccaccaccaccaccagtcaccgccgctgttgcctgagccggtaattgtagctccgccatagatttcgccgattccttcttcataagcttcgctgccattgttgattctctcaaataaaaaacctaaacagaaattcacaaatcaaaatatatatatataaatagattgaaaatacaaatgaaaatcacatgaaatcaggcgtgattttaccgtttgactaataattatttatttatatatataaacagagtaatgaatttgaatagacataaatgtaattttttttttgttttcagttacaattttttgaaattcaaaaactgtaacggaagaaagaagagatttgattacttttttttgtgtgtgtgaggaaatgaatgaattttgttatcgttctttttcccaatcgttttcgttttcttcgtcgtcgtgagttttttgaccggtgatatggagaagaagaccgagaatggtgatatgcatatctggagagagattttgaattagattatggaagaagacgaagatgaaaatggagaagatgatgtatatattatatatatatatatgtatgagttttaagtagagaggactattttccaatcattacttaactcgtttacattacatggacaaacacgtctttaccaagttttgttactctacttcgcatggcacgggataggaaattggtggagagtgttttttataaccattttcgttaagaattttaattcccatctacctcacccttcttattggagaaagagctttaaaaatttacatatataaaatattaaattacataaaaattaatgtattttatatatatattaattattatacaaaaattaacttaaaaaattattaaaaaatgacactaagagtttgtttggtacgccgtattatatcttattgtactgtatattattatattaaattatatttcatgcaatatttttatgtaaaattatatgtggtattgaatttaatgggctcctaactatataatattttagtataaattaaaatttaacttaatattatataaaaatataatat

SEQ ID NO: 79470 - DNA, 2118 bp, Cannabis sativa
aagccctgcaagctctcctggaactgctatggagagaccacctttagctttaagagtttcattgccagcatacatgtcctgtcaaaaacaaaggtcttcattatgattatcaacttacaatcctaacgatctattaattgtacaaaagagagaaattgaaggagtgacctcagaagcaagcatgggagcagtttctctcatatcatacacttgtgcctttccagtggctagccttaaattcatgaaagctcctccaccaatgccacttgaagccggactcaccacccccaaacacagagcagcagccaccgcagcatccacaacatggcctccctcgcgtagaacttgagttccaattcgggaacatcggccatgatcagtggcaacagctccatgatgtgcaacaattacctctcgtctgtgtttgtgtttggtcgaactattatcaatactcgttgcattaaggctcgtactacttagaagaagaataagtatgagtgggagcaaaagttgtagtgtaaaagtatgccaatgagatgtatgagctgcatttgaagatgataataaacaacatgttaactcaagaagaaggagaacaaacaaaccatcaagcaaagaagaaaaaacttatagataacttacacactaccatcattaagctctagaagagaattcttatgaagaaaaagaaaaattgattataactataaaatgagcaaagggaagttttataactatggttagaagaaatatgtggatatgagttgacgttatgaattgttgaagactcaaagctaaaaggaaaagaagttttattgtaaaaaaaacttgcatatggaagaatgatgatttgacaaattaagaatacttggagttttaatcacatagctactaaagaacactaaatgtcatgtgttttatggtgtactaaattatataaaaacttattgtcccatacatggatggatcacatacattatagatgcttattaaatatttgattttgattaattaatatgttatgttaaaaaagtcaaaaaccattagcacttttgaaccattaaagtattgctttcttgattagaaaaggaaataaagtttaagctctctattatttttctgaaagtaaaggaatcataaagaaattagcaaccgtgggcgaatgattagtgtatgttattgtcgatattaatatacaccactctttctttctttctttctttccttttcactcttatcctttcctaaataaatttctcataatttttcaaaattaattataggttgttgtcaacattttggtcttttatgatacacattttttccattctgatatagatatacatatcaataggattatacatgcaccttccctaaataatttctcataaattttcaaactttcttttaacactatacatctgtaagttgaattttggtgagaaaataaaaatgtaagaaaaatataagagaaaaaagtatgaaaaaataaataaataaataaataaataaaccaatttctcataattatggaaaacataagattcaaccaaaatttttagttgaacatgaaaaattggttgatttttttttttttttttttttgtgttttctacaattttttttcttgagaaatttgcatggactaatgcaaattttattttatttataaaattgtactttactattttattattctaaataccattagtttgaatgatatgatgctcttattttgcataccgtttttatgacacttttctttcattttattttttgcttttttttttcctttcattaaatagcaacatagggattaaattctctcacaacatttttttttgtctttttatatataatattaaaaactctttttttaataaatgtgacatatgatagtcttttttttattttttttttaaatttaaaaaaaaagaattaatcacgtcatttattatttatactcaaaaattacactattgtaatctattttttgtggtgatcattttaacatgtggaaagcatataattttttatcgctacaaaaaaaaattaccaaaattaaaagtaacactaaagtatcttaaaaatctaaaaaaaataaaattgtaattttga

SEQ ID NO: 79471 - DNA, 1323 bp, Cannabis sativa
atatatataggaacaagagatcgaagataatttttgtcctatgtcaccaaatttcaaaaattaaaagttttactatatacttttgtcttaatatcatccgccttttgttattcttctttcaactaattatcattatagaaaaaaattcttctcataaacaacaaataatttgtatataattacgcagtataattaattattataataattaaaacagaaaaagatcaaaaatacgtcgaatatgcaataataataataaaacgtaattttgaaattataaatagtaatttatttttttttagaaaagagattataaatagtaactacattattatgtatgtattacacttttaattaatttttttatatatattttttggctcagtgagccttagacacagtcgcgcgcagaactagctaatctaccttaattcagactacatataactatatatttatataaatgttaagatggagtataatatatatatatgtactaaccatttcttatgtatacaccctgtggaaaattattgggaatgttcccttggatggtagtgataacaacagcctcccctaactcatcctcaaccggctcaaagtttttctatataataagatatatatttatataattaatctataaatacataattattctaaagtgaatatatatatataaatacctgagatgggagcaatggttgatcaataatctcaaacatggaatcaacaaaggcatccaatattttgattgaagtgtttttcattacatgttctattcggatcattatattatttgcacctttttccactaatgctccgtacaaaggctgcttaatatcatacatattaatatagtaaattaattaattcattttcatcatcatcatcatcatcactatatatggatttatacgtataaatatatataatgataacaaaaaaataactaaccttgaatatagaagaaaatgaggtcttgaaatttatgttataattataattatgtgattttgaagtagtagtagtagatgacttctcatgagtagagcaactcaattgaagccctaaatataatgatgatgatgtcatctctctttctatctcaaacgtttttcattgatgaataggttttatagagattatatagaagacagctatatctatatatctatatgtatttatagccttgaagtacgtaatggtaagtacaacaatgacttgatgtaatatttaatgcctaattggtaatagcatatatgaggaaaaagttaacaaaataatatttgaaaaaaatcaagccactaatacaaacttagc

SEQ ID NO: 79472 - DNA, 3100 bp, Cannabis sativa
gcggcttccatggagcaggagcagggacggcttgaggaggaggtggctgtggttggccgtgagaagccactgggttgtatttagttgttgcaacaagaaaattctagcagtaggtgtgagcataggaggctaaagtttctgctggctttggcctttggccatgtacaaccttgtttcgttcattccagaatgaccacatcgtacaaaatatttgttccatttcagctttggaatgaattgaatggagatgcagcaagtaatcaccttttttcattgaagaacaagcattccagtcaaaatatagcttcgaacacgtccataccttttttgcatatttacaagtgaaaagagcatgcccaatggtttcccaagcttgacgacatactgaacatgtcgaatcagtgatgatcttcctcttgacaagagaagtagccaccggaagagcatcattaataactctccatgcaaaaattttaactttcggaggaagttgaagtgaccagaaaaaattccaccaagtagatgctgaagtggagctggcggagttctctgtatcatcaagtgatctggccaagtgatatcccgattggactgtgtacattccagtgtggtggtgatgccatataagcttatcattggagttgaaaaagcttagtggaaccgtgagtattcgctccacatcaagaggcgaaaaaaattgctccagcagagataagtcccattggcgttctggtgtgatgagattggaaacaataccatttggaggccccatgtatcgaaaaggcaagaaggagctatgtcctgggagccaaggatcagcaccactaagaattgatctcccttcacccaccttccaacgcagaccagccttgagaaggtctatcccccagtgaatagcctgccaagttaaggatggggagtgacctatgtgagcttccaatactgagttatgtggaaaatatctactcttgagaagctgtccaagtaaagagtcgggtttttcaacaagacgccacgcttgttttgccaatagagcttggttaaagtgtacaaaagatcggaaacccatgccaccatcacactttgttttgcaaagcaaattccaattgcgccaatgtatcttagtgccattctcattcataccccaccgaaaattagccatcatggattcaagttgtttataaaagtacaccggtaaacggaagcaactcatagcataggtgggaatagattgaacaaccgctttgagaagcacttcacgaccacccgctgaaaaagtcttttcattccaattgtgcataagtttccaaatcttttccttaatgtggctaaaaagttccttcttgtcctttccggagtaagatggcaatccaagatatttttcatgacatgtgctaatgggcatgttgagatgcctgtgaaaaaatatttgggcagccaaagtagtgttaggggaaaaggacattacagatttgtctgaattaagaacctgccctgaagcgcgatgataaagatccagaacccgtttaattgcaaggcaagagctttcattagcctgacaaaagaggaggctatcgtctgcaaacagtaggtgagagataggggtagcacgcctagtgagcttgaatccgtagagattaccaatgtcttgctcatgttgtaacagtcttgacaagccttcagaacatatcaaaaacatgtacggagataaaggacagccttgtcgaagacctctagatggggttagagcacccataacctcgccattgatgagaaacgagaaactattagtagttaagcatctcataatcagcgatgtccattgagaacaaaaacccattttcttcatagcttcttcaatgaatctccattctacccgatcgaaagccttgctcatatcaagtttcagagatgcaataccgttgcgtcctgaggttttgtttttgatggcatggactagttcaaaagccaccaaaatgttgtctataattaagcggttgggtaggaaagcactttgggtttccgagatcacctttggaagaacatgcttgaatcttgctacaacaattttagtgacaagtttggaaacaacattacataggctgattgggcggaattatttcattcgttgagccttcttaaccttcgggataagagtgattattgttcggttcaaacttgttggatcagctccatcattcaaaacacttaatacagcttgacaaacaagatcccccacaatagaccaattatgttgataaaacatggcggacataccatctactccagggcttttatctgctgccatggtccttaaagcagcttcaacctcggctgctgcgaagatttgggtgaggctgtcattatcttccaatgtaacaagtgttggaatgcattgaagtgtggtggtgagggcagattcatcaatatcagaagcagtaaacatgtcagcaaaataatcttgtacaacatgagcaatatcatctttcaaatgcactttttggccgctgttattaaagagaaacttgatacagttattcgatctacgatctgatgctttggcgtggaaaaatttagtgttacgatcaccatttgtcaaccaatcaactcgagagagctgctgccaatagacctcttcttgttccagcaaatcatcaagaatagcttcagcttgttgcaattcagtggtattgttgctggtgtgggagattaaattgttgagcttggttactttatcttggcaagcattgatctgtttcttcatctttccatattttcggatatgccaagattgtagtgattcaacacataagttaatactatcaaagaccgcataaatcgggtcagcagtgggtatgttattccaattggagcggaaaatatcttgactttcaggattggatagccataacttttcaaaacaaaatcagcttctacgtttggcctcagtaacgggtgcagattgggcgttaaagtcatccataatagcccggtgatccgattgataataatctaaatgataaacagtaggagtagtgaagttgttttcccaatgattgtttacgaaacaccagtctaagcgctccttaatgtatttaac

SEQ ID NO: 79473 - DNA, 1454 bp, Cannabis sativa
tatttttatatgaggcattgatatttttctataaaaacttattatttaattttatcgattcaaatttttattatattaaatttatgtgaataattatttattattaaaatatattttaaatttaatcagtctttatttattaaaaaaaaaaatagtgcagtacattctaattaaaccaaacatattcagcacaatccaattcaattcaaccagtccaatcttctttcagcaaatggaacatcatttcatgagatctccatagagctggggttatatgtaggtcctcttttcttttcctcacaaagagataatttattaaataattaatatacacagattacatatatattatataaattatagatttgaattatcactggaagaggatttaaagtttttaacagaggaagaaggcttgagttacagaatctaggccagagttcacaaagaagtatctgacaaatgtctggcttgtgtccactccactgcagtcaaatgttatgggtaacgttttcatcaacagatattatggctaggaattataggaaatcattgccattaagcaatttaaggtgtccaatgactcgttgtaaatagttaatagtttcctatattatttattaaataaagaagtgtaagaaccgaaattaaattagactagtgttgcttaccattttttttatatataggaataggatggatatgggtggaagaggaaaaaaaaaacaaatataacagtatttcagacacaattcgtcaatcactggtcacataaggagatctgtgatgcaaaaagagagtacaaacactagcaacaacagtttactgtgataaaagaaaaagcgggcactgtttctctattaattattattattactactattgtttttcttctgggaaaagatcatcagaacacactaaagaaggtctactcatctttaattaattggggaacgaagatcatagctgctggtttgatcagctcatccacacaatctatttatttaagtgtttaaataagaaaaataaagcatgcggtctgagagtctgtatacgatctcaaatctaaatagtaagatatttcagctgtctgcaaaagcattattattgactagtagtagtaatatagtacatatacatatatatatatatatacagctatagctggcttgagaagaatcaaaacgttttgatttgttcacaactgtttatgtaattaagaactcaaatttccagcgaagtactgatagcaacgtgataatgcaagagttctctccacgcatgattaaacacatctattatatacataaaatatttatattaaatgtgatattatattattacgtgcgactgtacacacacataaatctatatatatatatatactagggaatatagccgctcttcgcgcggctgatgtaatttttttagtattataataaatagttacttaa

SEQ ID NO: 79474 - DNA, 3723 bp, Cannabis sativa
ttttaaaaatatttgttaggtaataattagtgatgagacccatcaaatatattatattatgtatagttatatacatagaaatatatgtcactgtatatttgctgttgactaaatcagcatctgtatggtccaattaataattaattatatataagaaaacaacaaagatcagaatgataactatatattcttcatgctagctagctagtttggtttaattgataacataatcaattgatattattgtttaggacaaccacataattatattatgaaattcaaaacacattattgattgttgatagaacaaaccaaatgatgttgtactataggtgttatgagctgactttacttataattaacttgagttagcataactgaatattatattaaatatataaattaaattatctatttttcaagttcagttgtattctacttctactttcttgtttctctattttgccacatttaaagcttcaactattaaaacttatccggcatcataagcaagacatatggcacaaattagatatatgtttagtaacttcactgccatgcaggctctttgttattttatatttgattatattattatgcttttcttcccaaaaaaataaatatcattttttttttgaagaataattattggataaaattgatgatcaaatctgccacaagaaaatttaataaaatcagcattgggtttctgatgaggaaagataatagctaattaaaagtagctgaaattatttagttgtatttcaaaaaattattatatttcaatatttaattatagtaatattgatataatattttgtaagtaactgaactactattatcttttatcttttagcatgtcttaattattaatgtattattatataaaagtttctaaatttaattagtgttaagtctttattgtttgttttgggattgagaaaagttattatgtttgcctgtctcatttattgggtttatttataagataggctgtttttattcattctctcttctatgaaattaaataccacaataattagaacctttctgaccattgaccaattaaccaaacaaaaaggacaagtattttatttattttgtgttctgaatggaacaagtttcggttaatcgatcaccatattgattaggtttgtaggtttgaattgttccaaaaatgaatcattaattcatttacactttattatgagatagtaaagtttttttttttttttctttttttcattaaattttcattgtataatttattctgcgcgaattggcaacataagttcaaattccattctttttttttttttttttttttttgacgaggtaacttcagaagaacaaacgaagttacagaactgggacagaaccgttctagcttttctccttatctagccctaaagccttccttgccaagcaatgagcattccgattatgacttcgagcaatgtgtcgaatggaagctgtagggaagtaagacaaagagagtctaatgtcttgaataacatcagagagagcggagagatctggtttcacacttctaattctctcaactaaaacttttgaatccgtctctataaccgccaatgggattttaatattggaacaccacaggagacttgatcgaagagctaaggcttcagccattagaggatcgacattgccagcaactggaatagagaggcctgccacaattctgtttttccaatctctgataaccgccccaaagccaagcttacccgattttgcatccaaagctgcatcagtattgagtcgataggagcctggggaaagcctgcaactattattctggtgtgtaaaagagggctgcaggagtaaagcgcactgcttctttaattgagcttcttgaaaatctgtaataaaaacagtagcccaagtaacaacatcattaggtagcatgaaagagttagcaaataatttcatgttcctattatgccgaattgcccaaagaattcccaacagatgcacaaggtcctcttcggatagttcagtaaaagcagtaattagaaaccattttacatcctggtgccggttggaaagataaaatgttctgaaaggtgaggatttccaagttttagcagcactggaacaatctagcagggcatgactaacagtttcagcgggacagctacagttaaaacaaatcggagtaggaagtgttttcttcgaaaaaagattgagagcaacagggagaatatggtggtaaaccctccaggtgaacgttttaactttaggtgggatgttcaaagaccaaagaatagtccaccatttccttgagagggaggaattcgaagatgagggagggagggagcccgcattagcaagatgatacgcggttttgacagagagaatacccgaaggatggttgttccagattagaaagtcctccttgtcacagccacctacaggaacatgtaaaattgaagtgacagtaggagggtcaaagtatgtgtcaagggcctcacgattccagtggccctcagggtgaagaaaaaaatttacgttatcagatggagggaaacaaccagctttatattgaagttgcctcaccccaggcacccaataatcatcaacagtacgaatggtttccccattgcctactttccagagtaaacctttcttaaggagatcccttccccatataatactaagccaggtaaaggagggggagtgaccatgaccagcatcaaggaaagtactatgatgaaagtatttagccttgaggacaacagaaagtaaggagttaggattagagtaaatgtgccaggcttgcttggcaagcatggcttggttatgatgaacaagagatctaaaacccaacccaccaaaaaatttggatacacaaagttgattccaggacttccagtgaattttagaaccatttcccatagagccccaccaaaattgggccattagtttttcaattttgtgacaaatggagaaagggattttgaaacacgacatggcataagatggtatggcttggatgacagcttttaagaggacttccttaccagctcttgaaaagagtttgctattccaaacattgaggtgactactaacacgatgaagaatgaaatcaaaactatccttttttcgacctgccaaaacattgagggacacccaaatatttactgataaatggcttaggggtcatacctaggttctggaaaaaatagtctgaaatagatgtaagagtgttaggggaaaagatcatggaagactttccataattaacagcttgacccgaggcaagatgatacacagttagagcctcctttatagcatgacaagaggaagtcgtagcaatagtgaagagaagagtatcatcagaaaacaacaaatgagagattgggggggcatttctagaaatagaaatacctctgagaagaccaactctttcttgatgtctaagagcagcagagaggccttcagaacagagcaaaaacaggtacggggaaagggatcccttgcctgatgcctcgagtaggatagatttcataagtgatagtaccattgaccttgaaacgaatagagacagtggaaacacattgataaatgaggttaacaaacttagtgggaaactgaaaatgttgaagaatggcaacaagaaagtcccactccacacggtcaaaggctttttccatgtcaagtttgagaccaactcaacccaatttaccctgcttcctatga

SEQ ID NO: 79475 - DNA, 2285 bp, Cannabis sativa
aggatgttaatgaaacatacatggtagtaaatctaaatcctggtaaaatattttcaacagaaacattcagagtctttcaccctatacactgtcaaaaggcattaggagagtatttagcaattgaagccatactaatgtggtagaggattccacatttcaaaatcgcaagagagtgaggaagaatctttcccttgatgaagttgttaaagatggagagccatagaaaagtacagttaaggagtcatttcaccctccaaagccacctaaaaagaagaagaaaaaaaaacttagtagaaaaatttggtcacaaatatttgaagaaaaaaagtcatgagataaaatatccttaaacacacgatattttcttatttttgtagtctcgcgtgagattatgtaaattttccttatgtttatcacttttcttgtttttttttttttgtttcataaatactatattttagtttagacattcacaaattaagagaatatttttaacataaaatatatcacagtaattctagatatgagcttaagctttcaccttttccaaacttggcacaacgctgttattcttggtgggtttctgaggtggaagaatcgaattttcaagcaaattctaaggatactatacatggagcagattcaaagcaaacctggtaagaactccatccacaaaattggattttaattagctgataaaaatggcgatcaacttatttctaaggttgatttggaagaggtagagaatgaatcttctcttttgcaaaacttggttatttttttttatatttttggtgtgaatcccttatttcaagtttttgaaggtttcattaagagaatttggacagaatcattagaatgcattatggcttcacattggccagttttcaacttttcatgacgaagcaactcctaatttgattcttgagacgtgagtaattcactgtgacaagaaacatgtgctaatacatctctggtgtagtgatcttcatacgatcaattctaatttggatttgattgaatgggttggggcttcagtattggaggagaaataccctttagtgctcttgttagcacaaatggaaaacctactatgagctcgagtgtttattaaagtttagatttcagatgagctgcccaaatcaattagtttccttaatgaccatattcaattgatgaaacaagctataaagtatgaatggctcccatgcgtgtggtattaattcttggtcgtagtgtgagaattggcaataaaaaattactaggtccttgtgttacaacggctgcaagtaagtaactcctatgaggtgcttcaggaataagtggttgctgctttgaatttttctaaagttgttgttaatggaaatggtgcaatatataaaaagagattagtgaacaaatatctataaattcgagtttggtgtgctttttgaaacaaaagttcatcatggagataaggttagtgttatgatgaaaaataatgtgtctaattgggattttctaattttcttgtctttgcaaaattatgctattgagcttttttacaatagattttatcttcatttttcagcttattattgcaagaggtataatacacttccttttcttcttctatttttttttttcatttttgggttttgttctttctttctctgcttaatcttttttattcaactaatataatttgtagaaaataatagaacattttaatataaaataaaataaaatagaagaaaaggtatttttgaaatgaaaagaaaagtaaaaatgattttgaaaattggggaaaattagattgattagatttataaaataatcataacagtagattattttaatatcaacaaccaaaacaaaaagattaatcgtaagataacaaaatagttatttatgactagcttgtaattacatgtaatttttaattaaaacaaatatagtataaagggattaatatatatatatatatatatatattgaaaaaaaaaatatagtaataagtgaagatggaatatatatataagtgaaaattatttgttgagagaatgtatagggatatattgcttagtgggatgataatgtagaaaatgtgagaaatgttagtatcaattaacgttatgtttttttatatagttgaataattaggtcaatcatatatatcaacatacatatatataaatataggaatatgattttgtcctgttattgtactttcacagattgtaatccgtgatgtacggcagccgtcagataaaggaattatttgatctgacggttgagattgatct

SEQ ID NO: 79476 - DNA, 4887 bp, Cannabis sativa
atattgatctgattgacgcgattctagttgttttcgaaagctctttcaagacatgtctcatactcatatcgcaattccaaagatttgaagtcaaaatttcatccttaagtcaaagtgtatttttttctgcagattacctgaaaacgatctaatggacacgatttgagatccaaaaattaacgattatcatataaaggaaattttagccattagatcatcatcaatgatctagattagaccagaatgctttttttcatattttctgtattattttaatggacccccatccctataaaaggatagctccattagctctagtttatctttttagaaatttgagctcttgccttagccaattcccttgtaattctcgtaagaaataaaaactcaaagtagatgtagatctattactgtcacgatacgggagtgaactactataaatcttgtgtgtctgtcttattacttgcttaactcatacctcatctcgccaatctagcgggtgggtgttggccagtttttcacattaacattttggtgctttcattgagatcctcgaatcaagatcctgaacaagatggttgccacgagatcaacgagtgttgaaagaagtatccacactgttttgcctactgggggcatgccaaccgttggggttggttccgagatgacacctgcatcttagataccaggtgaaggccttgaaactggttcccaaacttgacccccaagaccaccaaaaactgctggtactggtaccaatggccaagttccacctgatgaacctcacgtggagctagaagaccctaaggaggtcgacccttgggttggacaacttagccaattagttactcacttacaacaccagctgcgagaatctcttgacaagaaccgtgaaaagttccaaacctagttcacagaacactggagaaacattgaatctcaacgtgttaaaaaagagaaaagaagagctaatcttgctcatcaaatctgagaagcttattgctctagcaatggaacgacttctcctaaaatcacttccactagagctgaagacaacccacatttgccaactggccacgtgggaacaagccctcagaagaaactcttaatgcatgatgtacttctaccattgcaggtaatcgtgccactactcaacatgcaacaagaactgaggatcctaaaaggaagtgaactatgagcaagcatccaaaaggactcagacttgggaatgcagagttggaccatttgcttgatatggaacaattacctatcagagaaataatctacaagcgagcatctaaaaggactcaaactcaggaatgtagacctacaagcccaccaccttccaccgataggaccaaccataatcctgctcgaagcaatccaaacaaggtgggtaagcgatctcatttgtaggattctcttcacatgtttaatgactctagggcccacaatcctataaaggggaaatggcctatagtcaacctttggggaaggatatggaggctctaccatgaaactagggagtaggagattcaaagggtaaggaccaaaaaatcactccacactcgaaagtattttcatgatgaaaggggtgttctgtgtaggtactttgctcgcggtcctgatggctagatatttcatcgagtgcatgaggaagagctgaacctgagtaatcagtttaactcccttcgaacttgtgaccatgcggaacactattttgaggggaataatcactataatgcttaggacggtcgctctcacaacaactagtccaaggatgactatatcatcatgctggagaaatgcctagcattaccctcacgaccacgtggttaggaggctatagccaagcccaaatcgacaaatagtttcgatcaacttggaaagcaaaacaacttgcgtgataccatgaataagagatggttggtggaagcaagagcttctagcagtaaccctgttaaccaagcagctaagactccaattgagatgcagaccaccacccgtggtattaataagaccaaatttgataccctagccactttggttaagggaatcacgactcttaagctattagagtttgagttagaccgagaatggtgctcactgctcctagattgaataataaaagctttagaggtcctctaaaattcaagaatcccaccgggcatcaatacaccaggaaagaagacacgttgtctcatatccattactttgatgttcagaacgatcttcaaagggtaagagatgatgtccgttgtagaatcttccatgccacgctagtaggcttagctcaacgatggtaactcaagctttcccttggatccatcgattcacagaaggagcttgtggatgccgttggcagttagttcactttatgtttataatgccagatcgaatccaatgatctggtaggcgtaaagcaatatgaagatgaatccctcaaggactatatttgatagttcttagaggtagccactaagacaaaaatacttaacaaggatgcgagagttatggcactcaagccaggctcaaggagatgagtccactgtggtcatacttttgcctcaaggcagtttacaccatgaaagattttcttcatagagcagaaggttttataaaactggaggaagttacttctcaagataaaatcctaaaaaacaagaacaagaaattgtcagactcccctacccttgacactgaggcacaaggggaagtgggaaaggaggaaagaatggggaaagagattgaataacagtggtaaataggctaactcctctagcggaaagaaagctagaacaggagataggcccaacaaggggtacgagcctagattcaccacctattatattatcttggccccaaaagaagaaatcttattgacaacttagtcaatagtgccatataaaaagcctattccctttaaagagtcagggaaaaaagacacaaataagttgtcgctaccacaacaattacaatcatgacaccaatgagtataattagttgtaggatgagatagatttctcgatttatcaaaaacatgttgcccttcaacggtatgtgaggcatgaggcccccataggtgccaatgatcctctccagcctgcagtagtggcaagacatctcgacatagtagttggaggtccacatcttgccgataacttgagaaaatcactagagaggtatccaaggtctctatggcacaaactgagatcaaaattgtttgaggttgcagagcatcctttaaaatctctatgcttcgagtgtgatccaatcacattcagagaatttaattcagaccacgtttgttatcctcacaatgatcttgccattgttaaggttcaaatagccaacatgatggtggctaaagtgatgattaatgatggtgcatcatcaaacatcaattttaagcaagccctacaaaaaataagtttgtctttaaacgatttggaaccatacaatcaactcatgtatggttttagtggggttggaatttctccttgttatgaactcaaattactaatgactattggcactaccccaaggtaaaacaccattatcctaactttcatagtggttgacaataagtcttcgtacaaagtgattatcagaaggctagccctatacgaccttcaagccatctcatccatctacaacctatttatcaaatttttgaccacatttggccttggtcacctcctcgataaccaaaaagctgcccgtgagtggtacaacacatcgttgacactcgcaaagaaggcttccttcattatacttacagctgggggggcaaccaaggcctctcccaccacgttcggagagatgatgaagacgtccaaggctacaaacataaagacgacagagaccgtatccaaggctacttgaaggtgcacccaagacatggatgacattgaccctcattttggggatattgactcaggagttggtctgaccgaggaactcaaggagattcccctcactaagatggacccaaccaaggttttcaagattcatacgaatgttatactagccttaagttcgtctcttatggcttacctcagaaaaaattaggacatttttgcttggtcgcatgaggacatgattgggattgacttcaaggttatctttcatgcccttaacattgataaaaagaacttcaagcctgtacaatagaaacacatgctccttgacaaagagtgctccaaggctctcaaggaaaaagttgagacattgcgagaaaagaatttagggaagctttttaccttatctgggtatctaaccctgttctagtgcccaaacataatggaaagtggagaacatgtgtcaacttcactgacctaaataaggcttgccctaaagactattttttgcttttctgaatcaatcaactggtggaatttaaagactacttaattttattatataattagaatttaattatgaaactagattattaattatgatttatgaatatatagagatttatttaaatttagggtgcattatgcatgttgtatatgaaattttacatttttcatgttttgtgcccggtaacattagaacacgacttttggccaatagaatcacattttagtatttttgtagtagtggggcaacttagttagacattgggaatgtcgggaatatttgaggttttagaaatgaccaaattatccctaagtgacaagtgtgttttttttttggcttatgtgagggtaaaatggtctttttggccatttgattccttgtcttttagtgggacttaattaagtcaaataatctaattttagttttcatttagttagataataccaagatttatgctttttattcaaaaattagaaaaaaaacatataaacactctctttcttcaatctctctctttct

SEQ ID NO: 79477 - DNA, 1607 bp, Cannabis sativa
cttgcttatcaagatctgtacgaagagaattgatgccctttgccgtcgagtaggaagagaaagagagagagaggtgtggacggtggtggagctatggccggggctgctgttggagggaggcggatacggttgagttgaatagagaaggagacccttcttctattttagttttttttacagatatggtttttgaaattaaatatatcaaacatatggcacaatataaaccatataaaagttttaaaacaataaaatgccatataatgtggtcaaagttaaaattgccatatttaagtaaaatattttcaaaaacccatgtaattttcactagattaaatcaaataaaagataaatgggcttaataaaaaccctacagccgaaatccactgtttggtttttttttttttttttttcattttgttcaatcgaacgttgattaaaatactcgtctttttcaaatttttcctttaattatatctaaactatttaaattccaattttaatttaataattatcaaataaaatataatttaaatatattcattaatttaaacaacaaagtgtcataattaataaatataaatttaaattacaatatttaagaaaataaatatttatataaccacatttaatataatatatatttatatatatatatttatatattctttctgtttaaataaataaaacagctaaattcataattaacattgcaatatcatatcacaattatttgataaatttatcaaactaactggcctatttgccaatcatctttagagtctggcattgcgcagctgctgcttcagaaggggtcttacgtattcctggtagccatcaggcacaactgattcattcagaggatccttccatgcctcatcatacaggttctgatacacgttaccgtcgtagcggccaagcaccgagctaagatagtggtcggtgtaattgaatgcatcaacaagggcaaccgcattggggcggacctggtggatgatgatccaggtaactcgtaattttagtattaaagatgagcaaagtggtcaaagtactaaaaaaattcaggaggaaataaaggatcatgatgaaagtgagatatatggtacaaaccttggtatataaagaacgaagttgttcatttgcgagcgaggcttgcttgggtgtaatgcagccagtggcaacaaaatcgccgagatgtttgtggataagggacagagcataaatgtaacaaagactctgcatctgttccttcactccttttccaggaatgtcttgttgtaatttctcaatgaacctgatgtaagagaataagagatgagaccaacaaataagtaatcaacaccggctggtagggtaggcaactttgctgcaataaccttttcttttacagaaaactaaaagaatttttaaagtctaggctaaattatgaagataaaacccctccaaagttccaaggaaattactttagattatgagaccagtccctaaaaatcaccaatataaacttttgagcagaaaagataatacactttaatttttgtatatttatcttttaattccactaagagaataatgcttagcacatacttgattgtaatgcaactata

SEQ ID NO: 79478 - DNA, 2568 bp, Cannabis sativa
attggatcaactcatttattcattaattttaaaagatccaatcttaggattggaactgatccatccaataaataacttgattgaattggatccaaatccaatgaacacaaacttggtagttatgtgtgtatagatcccacaaatcgtacatatacgagcaatgtgggacaaaatacaccagttttttttttttttttttgataaatttcaaatatgcatagcatttatccgaatactaaaattttataaagtagttaacacttgtatctatttgtgtaaaataatcccacaaataagttgtcagacacaataaacgatctaataaattccattttcactatcaacaatatcctttaaatctttaaatattccattccacaaaagattcacttatttgatattctgactacataatagcaactttcgatggacgattttagcaaacagcacatgttcacaacttttatattttgatttttttatctctttgtactgaacttgtacttatttaaacaaagacaagcaaatatacatatacaaaatcctcttacaagcaaaacaactggaaaatctaacattaaatcattgatgacagagttactgatttccagtaatagggctgtcccgagctctcttgatgtcatcccaacctctcacccatggctgtccaggttttgctcgagtttcaggagaagaatgtgtattaaggttgttcatgactttgtcacgtagagcattaaagacctaagcaaaaatgtatgagaattgaaaaataagggaagaaaaaagaaccaccgagtcatgaataaattttatccaaatcttacaggattaatttggagggcctcaggaggttgctcttgaccagttatccacttccagagatctggattttcctaaacaaaggagaaagagaagcataaaattagaaaggcaatgcaaataagttgatcaagtcatttcttaaatctcttgtttttgacaacagttctcactaaaaatgaagtcctactctcctaaacttgtgactatcccatgttagttcaaatgactttgtatattacaccaattaaatgaggcaagagctgaaaagaaagggttctaattagtaatttggttattagaatttagactaaatgtaatctttatttgatattcatgtcgaaaaatccctgtctatctttaaaaagccaattccattcaataaaacttatacgcaagcaacacaccatacataataaatcttcccaattgaattgctctcatacaatgccaaaatcaaattcaagggaccatgaaattgacatcaactggttctccttcatggaaggaggcagcttgaatggccccgtgtttggagttgaatctcacaggaagctaaacaactagaactaccaaaagaagtataacttcaaccgcatggaacatcctaagagattctactgtcaggtaaatgaaaataaattgatggattacaaactagatggccacagcacgacataagctgttgtgatcaatgtagatttagattacagttgtttcatccatgagtcaaagaagattaataaaccaacaaacctagcacgctaatttctttccattaaataattcaaaaggttctaatacaagctcaaatcccaaacaattgatttattcaaattcaattatccagggtaatgaaagacattcctctggaaatgcattcaattcatgaagctatatgtgtacatcgcacgaaatgaaaaattaaggaataaagtttaccaggtcgaggacatggacgagagctttgattccattttcatccatggaactgatatgctcctctacccatttgcccaaaaccaaatccaattccagaaaccccctctgtttgctcctgtataccaatctattcgtttccccacaacccaattcgaggaaaacgaaaagtaaataaaaatagcttgttatttttcaaactgaaattccacaaaccaaatataacgaagaaaaaaaaaaagaaagaaacctgttataaaggcgtttcttgttctcttcgttggagagatcgatatccaaagactgtaaattggtgtaattgttcgaataaaaacggtaacccccagaataagcaacgcttgaacgaggcctgccaagtgttcgtcgaaatgcacaaacgaactcgttatcacgattacgaattcaacaacttcaaatcacagaacaaacgaataaatatggaaataaccgacctacagaaggattcaggcgctcgaacgagagagttggccgcggcgatcgagatggtgcgatggattgcggccgatgattggagaagacggtcgatcgaaaccaatgctcttctcaaactccccatttcagactcaaatagatattcttcgttgagttggtttgtttggcttattttgggatggggaagataaataaaatttgtttcgaactttataatttatatactgaatcgtggctcgctgtttaaccgaggaactcccctatggatatcgtggattttctttctccgcatgtaatcgcacgagtttctctcaataaaaaaaaaaaaaaaaa

SEQ ID NO: 79479 - DNA, 1988 bp, Cannabis sativa
  modified_base (1193)..(1193): a, c, t, g, unknown or other
aacttattgattaaatatctatctgcatcaaaatttatctttttataattttcatcactttttcaaatattaaaacttgagttatgaccagtcaataaaatgacaaaattgttaatgaaagatgagaggtgtgcatgtcgagttgtgaatttatataaacatacatctaagtcgattctagaggtgtgcatgttgaaaacacagatctaagtcagtcccacgagccatacactttatttattagtttatatattatgaaaaatccagacaaaaataaagggagagatcaatctgatgttagtagtgtggttagagacaaagaggaggagattctgagcgtggtagatagaaagagagttagaaggaattatcggagagaagaaaactgaagagttaaaatctgagttataaccaatcaacaaaaagacaaaattgttaatatctatttttacaatgggtaaaatcgtctgtagaactattacacgatcaagacacttttgtaataataaaaaatatatatgactatgagtatttatattgttggtgatttgtcctttaatactagtgagttttttcatccaagccaagctcattcctttaatgtcagcaaactatatttcatatttattttcaactaaaaaagtaaagtaatctcaaacaaacataatttggttggtgactactacttatataaaaatgtaacatgtgtagttttattcacaataaatcaagtgatgttagtttctgattctatttattcacttcaataataatttaaaatattattaaaatataaaatatttattttattaaattatacgaattaatttcataaataataaaaaaaaaattataaaaatacagttgcgcgtaattttaaatatttttacgatttttaaaattttatttacataaaatacggtttttttatttatttttattttatacttttgttattttattgttgattttttataatttatatattattttttaatattgtttgaatgttattttcactaaaaaaatagttatttttagtgacaactttttagttacaacataaattttctgtaactaaatgtgagttttagtcacaacaaaaagttacttgtgactaaaatatagtacttagctataagttgtcaccgatttagttttagttacaataaatattgtgactaaaaatacanttagtcacaataaattgtaatttttgtgactaatatttttagccacagactttttagtcacacaacataagaatgatggtttataattagtcacaagttttgttgtgagtaaaagtaagattttttgtagtgtttcctgttatttttatgtagttttcttctctcgtgtttttttgttgttatttttatgaacaaaaaaaaaaaaattaaacatataaatatgaaaaatttaccaaaaataataatttatgtaaattttcttaaaatatataatagttgaaggagtaaaaaaaagtatggctaacattatttctctcgtttgctttcttataaaaagttgatcttaactgttagagtaacaacaatagggaaatttcatttaatatacataaaaaaaaaaattcttatttcaaaaaataccctcttaaatattttatacaatactattctactaacttcccactttacccaaaatacccttattatttctttattttcaaaacctaaaataaattctctctcctaaccctaaccataacagccagccgccccctttcatcttcttcctccgcccagccgcgtcccccactaacgcctcatccttgaccttggaacatctgcttcgagaacctttcgagaacttatcgataaccagtcgagaaaaataatatcatgacatgacattgaggcagttagacactaaataaaactgtcgacatatcattgagatcatatcgataaagattagcttcgagaacctatcgaataacattcgagaaaggtcatccctgacct

SEQ ID NO: 79480 - DNA, 4460 bp, Cannabis sativa
  modified_base (4218)..(4219): a, c, t, g, unknown or other
agttcctggtaaaataacttccaacagtatgttcttggtccagtggatgcattttgatttggtgttaccccaaatatgcatcctcaaagcttaggatttcatgtgcggctgttacatccacaagttgatcaattcttgggagtggaaaacagtccttgtgacatgccttgttaaggtcggtgaagttgatacatactcgccattttttatttggcttgtgtactagtacggggttagccacccaaactgggtagaaagctttaataatgaacttgttttcatatagtctttctacctcttcttttagtgcctgtgcacgttctttgtccaacagtcttctcttttgttggagggacagaagtctggattaatgtttagggtgtgagacatgacatggggttaatacagaccatatcctcatgtgactaggcaacaagtcaaggtttgcgctcaaaaatttttttaaggctaattttattttgagcagcaagcctttaccgattttgagcttcctggtcaggatatctggatcaatttccacttcttctaattcttttattggactgacatttgtatttgtttccccaagtcagagatccatgtcttcattcccgccttgggaaagttcctattcgtcaatgctcttccccttatctaaactctggccagaggtattttccttcttgaccttagatagagtaagtttgtagcattcccgtgcgatccttttatttccctttagacagcctactcgactttcagttgagaacttgatgcacagatggaatactgatagacaactttaagacatatagggctggtcagcctaacatgacgttaaaagctaacaggacatcgatcaccaagaattgtgccattacagttttgcttctcggagcttgtccaactataagtggtaggcaaatttgtctaagtggtgctacactctggctagagaacccatatacaagttaagtgtaaggaattaagtctttaagccggagccccatcttctcataagttgtcttgaatagaatatttgaggaagctccattatccaccatagtccgtgacaccatcttgtttgcaatctgtactttaatgaccacagggtcgttatgtagcatctaccttggtgaatgttattgttggttcccctacatgtggtattctaggtttcctttcctgcatggctagaattgtatcattttgttcatgctacaaggcttgagcatacttttctctagctttgcctgagtctccagcgaggtgcgggcccccagtgattacctgtagatgcccgtccactagtggaggcattagttggttttggttattttctacctgggcgatcgtttgtttttggtcggccttaacatatttttgtaagtgtaggttattttttccaattaagaattcaatctctcgctttaaattattacattcattcgtgtcatggccgtagtctgcatgaaaacgacaaaaattagatgtatctcttttacttatgtccttcataggagagggtttcttgtacgacaccatagactgggtggttgcatatattatttctatattatctgttaggactaagaaagcagtaaatttggaagcattctctctgggatgctgttcagcattgtcactgaacttgcctttctttccattaccctgttattgtcgtagttagacccttttccatttggatttgagctgttgcgatattgtaaattctgggtagaagtaccgaatatagtggtgtgttttttattcttcttttgttccacggtatccacacaccgtattgtctctttgagcttattaaatccatctgctcgatctagaaactcagccatcgatcccacaattaatctcttgatatctttccataattctccgagatgctcaatgcccccaatattgctgctaatcttccctcctcagtcagtcttttaacttttgttgctttagtcataaacctactgatgtaggtccttagaggttccctcagcatttgcttcacttctaccaggtcttttaggtgcgagggaagctgacgagggggaagaaaactgtgcgtggaattcaaaggagaaataaatccatgaattaaattttcttggaggaaatgtgaaataccatcgctgagcgacctctgtgagtgtggccaaaaattttttgcactgtacattgcctcttactccttgcaggtccatctacatttcaaagtacttcaaatgggataaagggtcttcttttcctgtgtatattttctatattagcattttgaactttggtggtaggtcaagagcctcgatttcatgtgagaaagaggatccccgtgtcaagtcgagttcgagacctatgagttttgggttggtcagcccttgtaccatgtttttaagttgatttatttatgtttgcacaagcggatgaacttggctagcctgatgactaacctgtgtgacattgggatctctttgaactagatcttggatgtaattatctggatggacaattggtggaatattttgcccgtccagtccccttctgtgatttagattatttctgaggtcatgcacggtaccaagccagtcgaacactgaggcacctggtggtcttggtgtttgacctattttgttgagaggttagtctgatacctctgtatgggtatagttgttcgaatgtgtacttcctcccaaggggcggtctagcaagatctggctgtctattatttggaccatagtttggacttgtggccttggattagacggttgaccactatgagtctatgcggtatgaccagctacatacccttctaacacgctcagggggatactagattcagttgatggttatatactagtgacctggtaggcccttctgattagcacggcggcctacctggaacgatcgtcaatggatgcttgttgagtcctcatgacttccatctctcgatccctccattctatgaattgatgtctttgctcatcaaaggtaagtttaatagctgctcggagatcttcctaatcatgatgtaaagtgttgttatggccttgcataagcgcaagtgcttcttgcagattttgaagttcagtgtcatctccagcaggcctttgagtgttattggtggacgggacctcaatgctaggagtggtttgatcggccgtcgtacttgtgttcccagtcttctgtatgcttggagtgaatccagttagaggggaagtcactccgtggccaaccgttgatggttgcgtattagcttgttcagggtttgttcctggtgtcctcttatgtttccaagagtttacacgttcggatctgtcaccatgggatttccttgatcaataagacctccccttcgagtttttacaaccctgttaacctgtgaatactttaaaataaaagcttgtgtttttgctcttaatgaaagcactaaaatattgacatatcttctagccaatgacagtgagtcaagataaaagtgattaaataaaataaataatagaaagtaaaaataataaggtaaaaatgacaccaaattttctagaggttcagtcccgtatgaatggtaatagcctactcccctttttgttgcattgacttgagaaaaaaaatgaaattttattcctctctaaagctcttacaattgatctctgagttattctctctcttagatcacttttctctcttgagtgttcttttggattaatttttgtctctccacaatagtgagattatgccactatttataggagcttattacatgaagaatggttttccttaatctataataaataaaataggaaactatattaattctataattacaatgcaaagaataaaaaatcaaggtgaattatctttattctctaacttaatcccacgaatatagggattatcttcgtgtcttagaagcgacaagactcatctctaaaattaccaactcacatatcctacttggtgcatagagttgatcacgagattgtactttggttggatgtcttttgattactcagttcagccatcctgttatgacaaacatttatatcaaccttcaagggctattaagagtacttccttccaccgagacaggaaaatgcaagacacatgtcatccagctcattgccatgttacattacaaaaaattggataacagtgttattaggtaatatatttatgcatgttatagaagaatttgaatatcttaaatattcnnccgtagtgaagtaggttctatgattaaatatactgcggtcggaatggtggatcattattttctggaatatactacatacactgttctggaatttttgttttttttttttttatttgtaagttttagaggtttgagatttatgatttttaagtcattatactatcgaaattttggtagaaataacgtagtaaaaaaaattaaattaaaattttatgacacaaaaattgttatttgcttgata

SEQ ID NO: 79481 - DNA, 1106 bp, Cannabis sativa
ggctaagcttgtgcttaaattccacccaatataagatttctaaaaaaataattccttttgaaaatatacatcatcttttgataatttacaaaaataccacatatctctaaaataagggctcaataatttattttttttctaagacccaaacaaattttgatgatagtctacataataattatataaaaacttctcacaagttttttgtgaaattttaaatatttttgcaataccaacaatatatgtttcaaaataatttatttcactagcgtataaaataaaatttaaaaataatatggttttgtatgtgtagaacattataattttattcttttttacatgataatgtacaatataattatttagaatctcttataaattttttaaaaattttcaaataatttatagcgaaaaaaacacaaatatagttatattgaaattttgtttatatgctcgtaaataatttaattttggcactataaattattaaattttttacaaatactagcaagagatagtaaattaaatgtatattattatatataacatgtaaaggacaacttgataatcttttttaatgtcgaattattgggtgtacaattaaaaatctcacattggttagatatatgaaaaatcatgggtatatataaggatgtattttatttttattgatatgaaacattttaggtagagttcaaaagaaaatttacgagggcttaggttaaaatagataatattataaagataggtgttcaaaatttcaacaattgatgcatatcattgtgtttttgacacttggatgctatatatatagtgcatattattgtataaaaaagattgagagttaatatgttgaaaatataaggaattgtattgatatatagtccccttttaagagacttataattaaatttataaagcccattaaagtttccaaagttattgtaatatgtaatattggtgatttgttgttggtcctcaaattgggtagacttcctaggcatggtcgataatgaatcacatgacactaaattaacccaaaaaaaaaggaaaaaaaatatactacttttgatcattttaatttttttccagttatatacatatat

SEQ ID NO: 79482 - DNA, 2998 bp, Cannabis sativa
tatctagctcatattttaggagtccctcctgttccctgttatgataaatatctcggtctcccttattttgcgggaaaaagtaataatggcctatttcaatccatcaaggataagatttggaacaagctttttgggtggaagtctaggctattttcctcaaggggtgtgtgaggtccttattaaatctatcattcaagccaatcctacttatgctatgagtctatttcatttgtcggtgggtattgttaatgagatgcatcgcttgtgtgctagattctggtggggtggggatgatgataagaagaagatgcactggtgtacatggtcctgcttgtgttggcataaaaatgatggaggtatgggttttcaagatatgtttctttttaattaatccttactttctaaacagactgcccgattatttaactatcttgattctttagctgtaaaagtgatgaagggtttttattatgctaatggttcctttcttgatgtcgaagagacaaaacatgcttcttttctttggaaagcattctttaggatggggatctttggaggcaaagttgtcgatggttggttaggaaaggtgatactattaggattcgggaggatgcatggattctaaagcaccatgtgggtcgagcttattattttaaaagggtcctactcctcaactggttagtgatctcaaacttgaatctggtaaatggaattcttctcttattgaggatatgtttgacacactggagaccaacgctattttgtctattccttactctttgtttgaaagacatgatatgcttctttgacacttttttgatgatgggatgtactctaataagagtagttattggagctctgttttgagtttggggtgggaccaggaatcgacttcttttggcttttctcgttggtggaagatccttttgggcctcaatctttcccccacaaataaaatttttttcttggaaagcaagtttaaatttcttgccaacctatgccaacttgactcgtcatggcctccatgcttctaatgtttgacctatatgcttttagaataatgatactaccattcatgcgctttggttatgtcatttgcttgttaaaggtcttgattctttaaaagatgcttcttacttttatgagctcctgttgggttgtatgcttattttgagtaaacaagaactggaagagtttattgctctatgttggcgcattgggcataggcgcaatacatttattcatgatcacaagttcttagcgtataatatggttagtccttaggccattaattatctttggatgtattaagacggtcaaagtggtagttcttcgtgcactggtaagccacgtacaggtttggtgccgagagctaattctaacacttttagggagttgactttgggtgagattaatctttttgatgatcctgcgctattgttgagggtgcgaagatgggaatgggagtgattgctttggaatccaatgaggtagtgttgttttttggtgcttttcctttgattggtacttttgagcctcatgttgcggaggcaatggaattgtttcatggtctttccctttgtctttggttgggtttcaaaaattttgcaactgtttctgattccctttgtttattcttggtggtcaatggttaggatgttcgtcataataaatttggtatagtgcttaatgatatatctcatgttcaaaaatatttctttagtttatctttttcttttgctcattctctagcaaagaggatgcttattttagatgggtcttgtgtttggtggcccaaacttcttatgaatctaattgtttgcttttatgttcttatttgtattttttgaccttcaagttttgtgccgtttaatggattattttcgttttctttcaaaaaaaaaaatctaattaaatctgacaaagagaatttacagaaaaaaaaatgatatataggctccgcatgtcaaattttatactttctttttctatattatattaaatgtgactatataacaattgttatttttttaaagcattacaatttaaattcaaactcattatacatatctctcttatcttttatcttttatcttttattaaatgtggctatataatataaagtaacttttttaaaaatattttaattcaaatttaaatccattgcacatatctaaaatatatctttctattatcagtatttttactcaatcaatatacttaaaaaatatatatttcaattattattttctttttaaacaataaaatcaaaagtgtttatatattttttaaaagaattactattgtgaagtcattatctattacaattacaaaaaaaaaaaatatatatctttctattattattttttaaaaaataaaataaaattagtgtgtgatatttctaaaaaaatgaaaagtattataatatttaaattattacggctaaactaaaattataattaacaataaattttgaatatttttatatttttttttatataaatagcacttaaattaaaagttttttaataaaaaataatattgtttattaaataacgttccaaaatatatatataactaaaaatatacataaccaaaataaaatctaagaatataaataaataaacgcccattgcacttgatattaactttttttttgataagtggataattttattgaagaaaacaaactacaccaaactagtgaccacaaaggggaccacttccgttagaacacccctacagtttgaggaagttactctagcccaagtagctaacttatcagctacaaagtttttcagcatgaagaataaaagtcacttcaacattttggaactccttacacaacttgatacattgagaaaacaaatgaaaaacactccagcaaagtgggattgaaccagcctaaaaagtaattacaacaacctttgaatccgtttcaatcttcaccactctaaggcccacattactagccatctgaagagccaacagaataccc

SEQ ID NO: 79483 - DNA, 2428 bp, Cannabis sativa
  modified_base (2359)..(2371): a, c, t, g, unknown or other
atttagtgtaattaagtttttatgccatatatatcaaaacttatctttatttttccatatttttgtaaatagcccttttttttaagtatccaacccactatgattttagcccatatactaaacaaaatctttcagcccaagcttgttagggcaaccatgaatattcttcttctccacacgatacaagcaccaattgataggtaacggattctaatctccaaagtacattttttgaggcagtacgaatctcttaattaattaaactacacaattatatatttagactttcacctatttttatagtgtacacaatgtgatattaattgtggatcaacccctcttctcacttttaccgtccataccacatcccgttccacgggtcatgtggattagtgcaatgttatttgtgcaaattttgggataagattcacctaaatacatactatataggtaattaagtgcaactaaaaacgacaaataattccacaaaacgacactcattacatcttgttacatttctctctcattttctgttttttttttttctttatgtgtggtcactggtcgttattaaaatggttgtcgtttatattagtccattgccgttttactgttcatcctcattttgcatggtaataacgtacgtcgttttttacattagcatatagttggttttaatttgaaggtttacgatgattttttgtttttagtaattgtattgaatatctggaattgttttaaaattaagtggtagaacaatgatgaataataggatcttacctaacaataaataaatttataatgtactacaatttaaattaattaaaatccctattgtcaacttcattgaatatatctttcttttggatttgattgattgattgtcgataataaagttataatattaattggaagaggaaaaaaatatatatttcttttaatatttattacatagctagtgggaattaataaggaaatatgcaataaattttagttgagcaaaatttaatattgctgtatatatcaccaattaatttacacaagtactactattgttacaaccaaatgaatgtgataacgcaccaaatgatgataatattataattattagtgtagtagagttaattaattaatactacattttattaaatcaaaaagtgtatatgataatgatatttataatttcatattaaatacagtactgacatattatgatttaacgattatttattgattataacatcatattataatttttttaaatatatacataaagttattaattatattttattaacaaattaaatcctattgattttgattacattacatgacttaataattttagcttctggaaggatctggtctggtgtggatatgatgataaaatattttataaatgaatgttctcaatcatatatatatattcaagaagcactaattaagaattgaatataaaaaaattaagtatcagtatgatagttttttatttcctaattatatatattagaaaaaatttaaaaaaaaaatacaaaaacaattaattaaattattttttttacatagtttatatataatgaggttgaattttttgattgtttttttatatatagttttatttatatagttattgtgaggttgatttttttattgttttttaattttttttatttgatcaaaatttatttttgtaattttaaaattttacaagcgtatttttataataaaaaatttttggttgtaaaattataaataaaatacttaaaaaaatacttttgaaaattcttctatttttttaaataagtttcatgttactagtgcaacaattttggtgcacgtattttgtgttcaaaatatcattagtcatttatatatattagatttaagtaattcgtacatacaaatatcaaaatatataatggcaaaatgcatgatcttatgtgtacagtgttataaggattttggattactatataaacagtatagatatatagtggcccttcatattaattgtgtggcttgtggctggggtcatatgtgcttataatttagaattatatatatattgatgatcaattcatattcatggtgtgaagctacgtataatctgtgtgatattattaaattaatggcttccaagttttactgccatatatataaaggtgtacataattataatagtaaaaaaaaaaattaagagtgttttgccaacaaatataccgtaattattcatgtgtgtgattaatagaatataacataatagaaataaataagatgctaattaattaattaaatttgttgaataatattacttgcttcattagatggatacatctatatatatatactagatgagagnnnnnnnnnnnnncacgtaaatattagttttatataagttttagtggtttttgtttaagaatccagtaac

SEQ ID NO: 79484 - DNA, 1600 bp, Cannabis sativa
  modified_base (1258)..(1266): a, c, t, g, unknown or other
aaaataatttccaacacctctatgcattgaggtagttcgaaaacaggggaagcttttgcaaccatttcttttaggttggacaagttgcagtagaaagggggaatactctccacattgaccatatgggtgttttgtcgaaccggacttcttgcggggttaaccaggccggccatggcataataactagcaaagccccacatacgaaccaagggcgtctagctaggacgttcatggcatcattcctatgagcgaaagtgaactgtaataatccatcttcaatctccttccacttccatcctctgattacattccatgagagtttcaaagaaccctgtatcgccgcctttcccaccttatatctgcttattattttctcaagtagcactttgttttcctcttgaggttcgtctacctcacctgggttgagggtgaatgttatgtcgtctggggcgatttggattgagtcttcgaacacttcacagattcctgttgggtccattgtggtggcagttacaaataatactactgtttgattgagagcggttgcttgcagtaacgtttagttgattaacaatcctctattgctttcgcgaagcatactcctgtagagttgattagcttttttaagatgatctgttgagtttgagtttgggattcttctgttagatcatttatatgtgttgcgaaaataacatacacaaatataagtgttgttttataaatgatattcaagtaagtaagattgtttctacgagaattatatttaagtgtcaaacaattaaattttttattttatatgacaatcgaaaaaagaatttgtaaaactaataaaattaaattaaaattaacaaataggcaataataatgaataccaacaaattaaaattaaagggaaattgattttcattgcatcaactttctatggcaataatataatttaatttatctttcaattttatgtgataacagtttaaaaatcaaattatattcttatcggaatatataaaatataagtggtaaattactcatacaatttacattaaataaatattaaaagctaaacaagtcacacaaatatttttattttgtattaaaacgtatgtttgtttcacatactagcataaagaaataatttttttagatgaaatatcaacttcattgaataaattagtattttgaatacaaaagatataaaagtttacaataaatagaaatatcagaaatgttacgatcaaattatatgggacccgatacttannnnnnnnnatagcgatattgacacataagaaggtgctaggcaccactggtgtcttttagcatttctcttaaatgtattaagaatgaatactatattagaagaaaaaaaactcactattattattaaaataattagcatttttgtctcctgagttttagactctatctgccttcatcccctaaaatatacaacttattaaaaattctccttaaaatataacgattatataattattctccttctgttaggtttcgtttttttactgttaaaaattagcatttttaccccctaaactttgaccaatacaaaattttgcctctttttattaaaaaaattaatttt

SEQ ID NO: 79485 - DNA, 2628 bp, Cannabis sativa
  modified_base (93)..(98): a, c, t, g, unknown or other
tacgtgcctcgcacgtagtttttgctagtatatatatagatatatagatttaatataatattctttataaattttataatattattatatatnnnnnnaaataaaaattatgtagatatttacagatgctaactcttgtgttaactttaaaaaaaaaatcctgaaatataaattaaaccttcaattagtaattaaaaaatttcatatatttacatacattagaaatttgtaacttggattgtggtcctaatttatcggaaacgatcctgattagaactaatggagtactaataatttgattattaaaatttgtttgattttgtaatgagaaagcatataacctcaattttatttcaagtttttaatctaaatgtcaaggaaaacaaatagctatattttggatcttaaatataatgtatgtatatatatatttttagaaattgattcgttgaaagaaatcttgaaattgattttttttaagaaaatcgattttcagaaaaggaaagtcaaagaaaaagagagatgaagaggatggctggtcatgaaattgattatttgaagaagataatctcaaggagggatcattggcaacgaagactcagctcttctaactctcacatggtattacttcatcaatctcaccctctcgatcggaaaaggaaaggtagagtaataaaaaaatagagaagtttagatcatctacaggttacattgctattcgatttcaaactatatatgtaagatttttttggtcatttaaatttttagatgaattgtaaatttatatatttgcttgatttcatttattgatcattgagttgagtatttaattttgttttctattacatattttttttcttgaaaagggtaagactttgttaaactaaccgaataatcttggatttgtatatattttaaagtattttctcactcttatttagtttcaaacattaatcttttcaattttccttgcttttgttgttaaagggtttgacttttatttgaaactcaaataggtatcacaagatggagaacaacatgcaaagcttttggcaattaagagatcagcttagaggacagtcgaaagtttaaggagatcaccagtggttgatggcttcttctaaattacttgaacacacaaggttaaaaggagagcgcatgcatgaataaccttaatctttcaaatggtcctgttgagccaaggccaatggacaaatttgggtaccaagaagataacaaatgtgagatccttaattttaactcttggaattttgattccaaaatgaatgagaacatgaacaaaaattccttcggaaatggaatgttagtctatcagaagagtaatgcaaccactatggggaatatgactattaacaagcatagtgaaaacaacttgagccacaaggactctatcaacatcaacaataacaacaatagtgacagtggtaatgcaaacaatataatgtagctgacaaaaaggttcaagaccttgcttgctactgagaccttccctcgaaatgaagtgctaggaggttacattttcgtttgcaacaatgacactatgtaagaagatttgaagcggcaactatttggtaaatttaactatttcaataattcaacactgcatttttagattgtatatagaagtaaatgttccttgtatgtatgctagctttcaactggtcaagtttcaacaattatctttatattgaaattgaacattaattatattaaaattacacatgatattaaataaaaactttaatagctaaaataaaactaaacatacgtggcttgtcacgtaacatttatttagtataatatatataatcttaattaattaaataaataaataataaataataattaaattttttatatttagatttttattcaattcttaataattataaattaaaactttaaatacaacattaaaataaattttagtatcatctttttcgttgggtaccaaagaaatttagtatttttaatagtaaaatgtatccggtatttttcctacattattaatgacatcccctaagtaattttctctcaagatatggagtaataataacaaggctaattatgatttttatcccctaaactttaacatgtatcaaattatgttctttgaacttttctgaccgttaaaaatttccgttaaactattacttttgtctaatttcattcaattttactatttcagtgattgtttatgtaataaatcatgctctccatactttgatatctaccaaatcatgcccttcgaactttgacacatactaaatcataccccttgagctttcatccatattagacttttttttataagtccttaaatctaacaatctcaataattttaggggcatttttaacgaccttaaaagttcaagatgcatgatttgataatgtcaaaattcaaaaagaaaaaatcttaattagcctaataacaaaatacaataaaattaatagtttatacatagattggattcaacatatatattcgtaaagacactattaagtccctatttcggtttgcaaaaaaaaaaaatacattatttattaaaagagaaatgctaaagagcaccagtggtgcctagcaccctcctatgtgtcaatatcgtt

SEQ ID NO: 79486 - DNA, 3206 bp, Cannabis sativa
  modified_base (2675)..(2675): a, c, t, g, unknown or other
agaaattaaacaagctgcttttgacatccctggaaataagaaccctggtccggatgggtttgagagttttttcttccaagacaattgggatttgattggacaagaggtgtgtgaagctatcagatcttttctgcattcagggaagcttctaaaggagatcaattctacagtgatcacactcataccaaaggtcaaaagccctaacttagtgagtgactttcgacctatttcatgttgtaatgtgctatataagattgctacaaaactgatttgttctaggctcaagaacattcttccttatttagtttctctaaatcaaggaggtttcataaatggtaggtacatagcacataatatcacgatctgtcaggacttaattagaaattatggaaggaaggtagctaaggccaattgtttgattaagcttgatctacaaaagccctattacacattggattgggattcccttgaggaaatgatggatgctttgcaatttcctaggaagtttactgaattagttatgatttgtgttagaacgccaaggttctctcttatgtttaatggatccatgcatgatttttttgaaactaagagagggcttaggtagggagacccaatgtcacaattgttgtttgtgataggaatggaatacttcagtagaataatgaagaaggttgggaagaaaaaagaatttgggtttcatgagaggtgtgctgaaatggaattgaatcacttaagttttgcggatgatgttttaatgttttgtagaggggacttcaaaagcatttatttgatgatgcaagctctcaaattgttttctataacctcaggtttgatgcctaataatgctaatcagtagtgtattgtagtagaatgagtgaatatgaggttagaaggatactagacatgtcaggttttacaaagcagcaagaccctttcaagtttctaggagtactcatctgtgctaggaagatctctactattgattacagcagcttggtgcagaaaatggcagctagaattaggatttgaagctcgaggcacttgtcatttgcaggtaggttggttttgatcaaattagtccttctctcaatccacatttattggtcaaattatgttccttcctaagaaaataattagagagcttgaagcaatatgtagaagttttctatggataggaaaaagtataatgaatggagaaggggatgtagcaagggaaaagatgtgttgtccaaaaaaagtaggaggtctagggctgatgtatattccaaattagaatgcagcaaccatggtgaaacatgtatgggcaattgaagaaaaggacaatttgtgggttaatgggtccatagtgtttatattaagcaacaattatggtgggaatacaaggatcctttgattggaagttggtattggagaaagatggtagaacttaaagacaaaataaaaaattatgttcagcacactgttttcactgctaacggttacaaaattgcagagggacaaacgtggtttgcacaagactttgagaaggtaccatggagcaatgaagtgtggtctaggttgaacatcccaaaacatagcttcctactatggttagctatgatgaataggctcaaaataagggatcaattaatcaagcaaggtttgatcgacacgggaaactgcctcttctacaatattgctgcagaaacagcaaaacatctgtttttgagtgtgtgtttgctgtagaatgtctcgagcagttgaaggcctggtttggatggaatatcaaggatagttcacttcaaactatcatgagaaaggtgaggaaagaaagcttttccagcttcaaaaaaagagtgatggcagttggtgttgcaatagttgtatacctgctgtggaaagctcggaatgagcaattatagaatggaaaaaaagtaggcacaactgaagtgattcaacaagtaaaaatggcgtgtaaagagtagagtattttctgtaatgctaaaaaagattaaataaaaagatagattttggtttgatttgttataagtaacttgtatagataaagttaaagcctactcgataggtgcttatagattataaaggcatttgttttgtagagtaatgaaaattctgattcataaaaaaaacaaaataatgagaacatttcaaaattacctattctaaattttgaataacccgatcaaaggtagaaaccacaaacccatgaggaatggagcaatgaaatatagatgttattttttgtaagaatgatctagtgtagagaatccaagattgcattacaagttgttgagataatacttcacaccaacacagttgcaaataatgccttgtgttgacctcgaaattctaaaagtaaattttgaagtcatgatgaaaaaatactacaaaagtagctacttttagtgacaactttttagttacaacataaagttttgtgactaaatgtgacttttagtcacagcaaaatgttacttgtgactaaaacaaaacatttagtcacaaagtgtcactaatttagttttagtcacaacaagttttgcgactaaaaacacatttagtcgcaataaattataatttttgtaactaatacctttagccacgaaccttttagtcacaacataagaatgatattttataattagtcacaattttttacttttagtcacaanttttgttgtgactaaaagtaagacttttttttagtcaccactacaaaattaagttttagtgacactctttagtgacccacacaaaagtgcaggtcactaaaagataagggatgagtttcagtgacccgcacaaaatgactctaaaaattcagtgttaatgtcctttaatacgggtcactaaaaatataaatgtcactaaagagtaccattcataatttctactatattttcttaaaataatatttgcttatagtgacgcgtcatgcgtgactacataaatgtatccccactcgcttggcgcgtcactatatcaactaatatattaaaaaaatattttaattgtataaaaaaaaactaacagtacattaactagaaaaaaaaaaagaaaaaaaaaagctggcagtacattaactagacaaatacaaaagctgcagtaaccttcatctttatcaacaaaaaaaattaatgcatttaaattttgatatgtaaaaaaccctaacaaagtaactttagtcttctctctctctctct

SEQ ID NO: 79487 - DNA, 1560 bp, Cannabis sativa
ggccacctattgatactactaggtattttgatattttagggaaatattaccaagagcaaagttgagaagtatgaattgatactatcaggtattttgaatggaatagggccatctattgataattttttattttctatatggctaattggtgatatgtagggctctcttttattgagatggctatagaatcaaacaatttaaacaattaagttcagtctcgggtgacatgattacacaacatgggtttaaaggacttgatggtttgtgtgactataagatttgccctctagaacaaagtttacatgcctatatgctcctttctttgtgggctctctattgggggttcaacaagtattacatgccgtgggagaggatttggctgggcgactttgctgatgtactacagtgatacctataaatcaagagcaaattcctcaatctcaccttgaggtcaaggtgactttttcggcaagggtattgatagtcataactaccaggagccacaaatggtgtttttaagagtatttgaaagagctaaagaattatagttggcttcaacttacatttcagtagtgagaattattgtttcatgttgaatgacgagaatctctcgttcttcaattttgcatcgagaggcgggttgcttgtgggtttttgaccaaggacaaatgagctcattttcaatttcagcttctaattttgagtatgagttacaagtcttcactagcactccttatggacatgtcatgatagcagcttaacgaatgcacttgttggcttggttctttaatagtggacgaatacaagttataccttcaaattcaagatacgagcagacaggaagtaccgcagctactcgttggatcttttacaaaggacgatggccaaagtttttgttctaatgctttcacgcaaaaaggtaatttgggcaaacattgttgttcttcaccttgaaaacaaggtgaattttaagcggccaatattgttgggccttgggatattagaatattaaataaaggggcataagtataattgtattgagggtattggtattatatatagaaatgaatagtaaaagaaaaggtgtgaagaatttagcttaatttgtaactgttttgggagagaatcaggctttctaaatcctagaattcctaatttactcataaaagatcttttaataataatatccaaacactttgaaatccaaacgatataaacttatacttattttatacttttaaaaataagtaaaaataaaaacttaaccaaacaaaatcatgtatgatctacattcagagaaagaaactttacacacaattttgacaccatcttcacactgtgagtctagagtcgaagtgaatttcatctaagcttcaaaatggtcaaatggaagattttactaacaggcaaaatacaagttaaattatataaggcaacattgttgtcataaaatgcttgttccaggaaagaagacaacaaacagcagccctttcactttttcatgcagcctcactaaatgagtacccttcaagattggccttctcaattacctctttctgc

SEQ ID NO: 79488 - DNA, 2456 bp, Cannabis sativa
  modified_base (2158)..(2172): a, c, t, g, unknown or other
  modified_base (2294)..(2297): a, c, t, g, unknown or other
aaaaaaaaaaaaaaaaaaacgactgttttgaagtgtaaaaatgaaaaagccccaaacagaaaagaactaaaaatattaaacttacaaaattatgtataattaaataaaaaaaattaaaattctaattaaagttaacaaagacctgtacatattaataagtttaatattgaaggaggtgtcaagcaccaaaagatatgtggcataccgtaattagtgcatttcaatatcggatcttaaaaattttgttttaataaaaaataagtgggaggccgctatttatataaatataaatagtactactaataaccattaactatatatagatcatttcaaaaaaaaaaaaaaaaactatatatagaaaatataaataagacaaaaattgctaaaagaatttatgaagttatgtataattaaaccaaagttaaatttttaattaaaatggatgaagatatatacttaataaagaaaatgctaccatatctatttttgatgatattgaaaagaataaaaagatcatttataaaattaaaaagaaaaaaattactgataaaaaaacaaaaaatattttacgagcaaaaaaaaaaaaaatatagtacaaaagatcaattaaaaaataataaagaaaaaaaatcattcataaaaaatttaaaaaaaaaagaaaagaaataaaaaaaaaaaagattattgttattgatgacccaattaagggactgagatataagacttctatgacacatggtctctaaaattgccaaaaatgatcgaaagtgtaagaaaaaaagaacctgcactatctgatttccttagttggacctaaaacataaaaaaaaaaaacaaaaaattaaaaaattaaataaaaaataacaaataaatataatataaaaaatattaattacataaaaattacaattaaaaaatatcataaaagttaaaaaaaaaataataaataaataaataaaatacataaaaattatatatataaaaaaaatgataaagaaagagaaaaagaaagaaagcacaaaagataaaaacaagtcttcttttttgttttgtttgtttgtgaacatcaattcttctattcatgttatagatatactacactgtaaatgagtaaacatgttattcatcttatgatcttaacataaaaattcatactatataagtaattcacactacacaaattttgtccaaacaataataaaggaataaatattatataaaaactgaggaaacatttttgtttccgacataatagtgttaccgtacatttccccaaattctagtttgaggtagtaatgaatagtcaagacattatttatgagattaatcagcggtataaatatgataattaagatatatatataaatataaatataaataaaaaaaaaaatgaaggcaaggcaattaagatggaataagccaattgtccccttggacgtagtaggtcccaatgaaaggtttagcctcttcatctgtcagcattcgagcccatcgaactctaccggccaagttggctcctggtccactgcacttgtattcaccgtaatacacttttctgtatttatatacacatgcatattttgatcagcgtgaaatatttaatttaattaaccatatgtgaaattgaacatagcatgttaatcaatatttagttacaacacataagcactaaatcatttgttcaaatcattttattcatctaaagtgaaaatatttattgttttgaataaaaataatatactccttaaatatacttaaagtaagtacctggattacttttaaattaattttcgttcatatttttttgttccattttaggctaatttaagttgtttatagtgtagggcacggttaaaaatcgttccttataccttgttataggcgacggttttaaaccgttacgaatgtaaaaaaaacataaaaaaaaaatacagagttttctaccattaatagcagaaaaatctgtattctctccaatttttctgcattagttttataattttatctaaattaaaagaaacaactttttaattttattacagtaacaactaaccttaaaacacgttaatttatacaataacaaaatatatataataaataaaaaaagtatataaataaatatatttataccgagctcggagagagaaagagagagagnnnnnnnnnnnnnnngtggtggtggttcgacgtatgagacggagatgagagggacactgacaggaggtggtggtagtccgacgtatgcgacagagagtagacggagaccgattggaggaggggtgggtggagatcgnnnnatgagagagacgagaagaaagggagatcgagagagggaggaagccggcgagagaggactgcgatggtgcagaggcgtgggtggggttttggagagttaagattttcattttagggtatgggaaatggagaagaaataggtgagaagaaataggtgggca

SEQ ID NO: 79489 - DNA, 1131 bp, Cannabis sativa
atatatatttcacctagaagaattttccagtttattgtttttgtctatacacattgtatatgtatttatacatatctttatgtaaatgtatttattaattgtatatggaaaaatcacttgcaccaagaaatatatattacatatttgctattcagaaaataaaatcaaataaatcattattgcatatttagccctatatataatgattgaaatggattttttgttataacaatatgtaatttaagacattaatcacttattttaggagttaaaaatatatatataattatatatattctcatttatttgtaaccaaaaaaaaaatatgtacacatatataacaatagaataataaataaacagcaagacaaattcaggaaattaatagtttttgggttatattacaattaactaaattattaatgtatgatattatatatttaaagacaaaatctatatagtattttgtttttatttgataataatatcatgtcctcgactgtttcgataagttgtcttctaagtaaaaaataaattaatataactgtaaatttctccaaattattaaagccagatagctatatatatattgtataaattattactgaaactgacgtgtatatatatagatagatatgtaaaaatctcactgtgagggaacaggttaattaattaattaaattaagttaattttgatttttaaagaatatgcacccaaatatgaaacaatataacatcacatctactattgttatatcgtaaattacaactggtttttctacaatttattccaaaaatattaattatccttatattgtaacatattataaatatatattgtaataggaaacgtgtatgtacatatcatgtatgtactacatttgactataaaaaaccaacatatattatatatatatataaatatatatatcgatcttagtaataaattgtatatatatttacttttatatgacttttttacaagggaattttcttttaccgggcaacttataaaatgtacattttacataatataatcataacaaaaaaaaattacattttgagttcgagtgtgttatcatatcttttatatagtttgtttaataaattgatgttatatattgagaatta

SEQ ID NO: 79490 - DNA, 4847 bp, Cannabis sativa
ctctctctctctctcttcgagctcactcactcctactgtcgattttgataaagtttctgtaatgcaggtggaattggaacaatacccaactggacctcacattgcttctcgcatgctgttcacagtattactctcttctcatgtctttagattgcaaaagttgattcctttacttaataattaggattacttttatgggttatatctcttttttgttatccatttcttaaagtgggttgttggcgtacttgtggaaatttgaacttccgtacttaatgtgggttttatgatttagtttaagttcaacaatattagtaatgggaatcctgttgttggtaatcattggaagttattattagctaagtaagttttaagtttgaatttatagtgataatcaaaattttccatatttttgctttgattaatttgagggcaactttttgtttttaaatgcaatcaggcagagaattcatttgaagatataagcaacaaggtagtggctgattttggttgcggatgtggtacattaggtactgcagctgcactcttgggtgcagagtgagtacccatttttcatacttctgtttatttctttgatttggttaggattagtgtatatatccagagcacaatccaagcactattttcttagaagttatagataatgattccttaaattgtaaatgcacagtcttttataaataaatttgatacatgcactatctcttatcttgaacttgatcttaactctgttatgcttatatcagacatgtcattggcattgatgttgacacccaggctcttgaaattgcttctctaaatgcagaggatcttgaggttatgttgctctctttattctggttggtagtgttatattcttaattaattgcttgttgtagtctgatatcattttcttaaggttgaattgaaattctaacaagaacttggtgcaatatgcttgctctgtaactattttttattagccctaaacaaagttctatgttgtaaattccttgaatctgcagttggacatagattacgttcaatgtgacataaagaacttagtatggaaaggtaaaatgccccgcctttccatttctatgtactttggtctttgaaatggaaactattatgatttctgtttgtttggtttccaaaataccagcatattaggcccaattgatgtgtcatagttttataaaagttcaagtgatatttataattgcataatttatctttaattttaaatatatttgttttattaggtcgaaacgttgatactgttgtaatgaatccacctttcggaacccggaaaaaaggtgcggatatggattttctctgcattgctctgaaggtatgtatcaggactctatatctgaaattatgattgcttgtaattttcggtagaatcaaagttttcaatcagttgatctgtcatctctgttttagtctaatgtataacctattatctatattacctgttctgctaggttgcatctcaagcagtttattccttacataagacctcaacaagagatgtaagtcatttgctactttatgaaaagctgttataatacgactattacaactgcttcagcatgatcacgttctagtaaactaaatcactattcatctgttaattctgcaacttgacaagcaacttatggatattattatgaaaccataaagtttttggtcttcttatattcatatcccggagtgtgactgtaagcatattttctttggtcaccctgattgatttcagaccatatgatctggagattagcagtttctcaaaacaaaagcttccatttttttcagcaatgtcatttcaggccttaaatggtattgatagttttttgttttttcgtgggtcatttcagcatgtgagaagagctgcattgcgagacttcaatgccagcagtgccgaggttttgtgcgaggtcagtgaaagtcatgtcaggactaccaaaaaatgttgctttattcctcttttgttggttctaactatgaaccttaatgaactttccatgcattgctccagcttagtaatgatccttcttttttttatataattaatggcttcctattttgccttttttttttctgttgtcagcttcgatatgatgtgccacaactatacaagtttcataagaaaaaggaggtggatattgccgttgatctgtggagatttgtgccaaaataattactaaacactgcttgtttacattacattaagattgcttatgggtcatagactcgtggtacttaacaaatgtaaatatgaaatctgtctgcaacgtttcttcgtccaaatttatttgatttttccattgtcatgtttttgtaacaattaaaataagttccttgtctcttttcttcagtttgtatctctttagaagtttaagtgtggattatagatcaactatctgggatgtataagatgacgaactattgttgatacaatgaaggataaaccaaaaatcaaatataatgatacaataagccatattcgatttattgaatataatgattccaaaaattgcctttacagaaatgcatttctgtttttgataaaataacgaataagcaaaaagatgcttcctcaagatgtagatcccaaaatggttttcgtgatacaacacatacacacaacaacattctggctgaagataacgactaatcccctcaaattacaacaaaaagaatcagattactttcatctaaagttttaggttatccgctctgtaccctttacttgttattctctaccatgaatcaagaagcaccaccacatctcgccgtgcctgctccaagtttcactaacttgatgcttcagattctgcttttggtttctcatctgtctcctccccgagagtgaagcgaacaaaccttcttactttgatattttctccaagagcagcaacagtttgcttaaccaggtccttcaccagaacactgtcatctttaatgaatggttgctctagaagagcaagctccccaagcctcttggaaatccttccttcaacaattttctctctaatgttctctggttttgactgaaggtcctctctttgcatctcaagttctttttccttcttgacaaagctctctggaatatcttcaacggatacaaattgcacctgtgggctggccacaacttgcattgcaagatcatcaaccaactccttgaacttttcacttctaccaacgaagtcggtctcacagtttacttcgattagaactccaatgcgggaatcgtgaatatatgaaccgatcctgccttcagctgcaagccgactggatttcttatcagcagatgaaagacccttctttctcaggtactcttgtgcctgtgtgatatcccctcctgtctccgaaagagctttcttgcagtccatcattccggctccagtttcttctcgcaattgtttaaccaaagcagcagatacagttacacttggaggcctgcaaaataacgataagtatgtgaaacactttcaaacttgggagatggttggcaccatggaaattccactcaagataataaatacatattaaaaaaagaaaaatgcattgtatatgtttttgcaccatggaagttcactgatttagatttataaacacgctgagatgctgcactagttcgtttttcgcaattgcacttttctcccaaaacactaaacaatttatctgaatttcatgatcaatactgattgaaaggtaaagtacaactcagatgtagagaaagtggcacttacttctgaacactttccttagcctcctctgcagcagcaggttgctcttttggaattggttttgctgcagtttgggcagctacctcagcagcaaaatcttgacttttcttttccaagccttctcccaaattaaacctcacaaatcttttcactttcatgttctctccaatggttgcaattgtctgtttcacccagtcctttacaacaagcttatcattctttatgtagggctgctcaagtaaggccaactcatcaagccttttcttgatccgcccgtcaacaatctttgatcttatctgctctggctttgacaaaagatcttccttctgcatctctatatctcgttccttgttaacaatctcttctggaacatcttcagtgttaacatattgtacttgaggggatgcggccacctgcatggctagatcatcaaccaactccttgaagatatcacctcgggatacgaaatccgtctcacagcttacttcaaccaagacaccaatcctgctatcatgaatgtaggaacctattcttccctcagcagtagctctgctagctttcttttctgcactagccaatcctttctttctcaggaactcctgagcttttacaatgtcccctcccgtctcagacaatgcatttttgcaatccatcattccagctcctgattcttcacgcagctgttttacaagagccggtgatatagtagctgcagttgatacataaaccaatatgagaaataagatatatttattattcatgactaatgtgaaaaaacctggaatgatttcatccttgaattatattatctatgacataaatccttgttatatgccaaagcaattctagatagcatctttgacccaaaaaaaagtgcatctaaccaagcattgtcgtctttgtttgaaaattttcaaataataatcagcaacattaggaatgcgatagtgaaataaattttaattgattaccaagataacaaaacatttacagacttcagacacttaaaaacagattaagatacttcattcaaaaaaaaaaaaaacagattaagatacttctatgtcctagccattgaaatgtttcttg

SEQ ID NO: 79491 - DNA, 2888 bp, Cannabis sativa
  modified_base (61)..(77): a, c, t, g, unknown or other
  modified_base (104)..(120): a, c, t, g, unknown or other
tatgaaacttataaaaaaaacacagtaaaaaagtaaaaactaccgcctagcagtatttttnnnnnnnnnnnnnnnnnactaccgcctagcagtatttttgtaannnnnnnnnnnnnnnnngtataccatgtaaattttcctactcatattgatctcaccctaggtggtgttggctttaccgttggaaacttcccaatactcagtaacattattctatgacgtatgtacaatacaactacaaactgtacaatatgctaaccgtttacttctgtaacaaaattttcgattggacatgcacgaacaatttattaagtataatagaagaatggatttcacagaacaaactttggtcgttttggttattattaatattgtttatgttttttttaattttcatttttttttaacggttttgcttgttaccttcaatttttatagcttataatttgcttgtctttcatttgggttttgactacatttcacaacccaagataataagtattgttattttttcttaaactagtatcactccattttcaaaaataataatacaaaaaaaaattagtattcttgatgtacaatgcattttgttaacatgaagtgaagttactcgagttataacagtcgacttgggaaaaggtcctcaactttgttcctaggtagacttcggggactctggaatgggtattgaatctcgttgttttcaagtgcccatcattcagtattctaagtaaggaagtcaagaagaattcaagtccaaatcctactggaaacttaaaggagtcgatcagacccctagatgttaatctaagcgcttagggtttcacccagcccctaagttgacaacttggctagagtttccgttttggggattgtcttagtgtgtagatgaccccaaacgttgcacttagacattaattagacatgtcacgaatatatttgaggcaccaaaattagattcggaataacttcaaacttgggcacttaagtgcgcaaggtgcctaaagcaccaggccgatgcccatgttgacatttcgttaacctgtgtcgtctccaatcatcaaactgaagatgcttttattttctttgtcttcatcaaaaatgagaaaacaagtgctttcaaaaaataaacaatccaactttgagggaaaacaagtaattaaaatacataaatatgaagaaaaagtagtaagtagttaagtagttgtaactaactatttaatagctacaaaaaaaaaaatataaaaacacactactaataaattaggctatcttggcaccagaatctcgatggctacgtgttactggtgagatagatactaatcttcggggttacacatggaaccttcaagattgataatgtttttttaaaaaagaataaaataagtaagtccgatctcggtaggtccaactaggtctgctaagataaggtacaaaaagtaccctatctcgacggacccagttggacccgctgagattgggtcttttagataaaaaaactaaaaaccccagcctagcccgctgtagctctctcttccctcttctttttcttcttttcctcttcttccctctgccttctctcttccctcttcttcttctttcttctttcttcttctccctgcctcccacccatcagctcaccctctctcttccctcttaatctttattcttttccttctctacccagctagccctttctcttccctcttcttcttttttcttttccttctctgcccaacaaaccctctcgctttcccttttcttctcttcttctctcacccgtaagtagccacaaccatgagaacttgcaattcttatattttctttttctttctctttttctaaatatttattttgtttgaaattgttatagtttgaaatttctatggtttgatttgaaatgtgaaaaaagtttattataagtttatttggtattatgattttgtaatttttttatttttattttttgttgaaattatttatactaatcagtgaatatttatgtaaattagtttcttagcttaataatgatttagaatgtgaaatgtattattttgaattgacaattttagttttgtgacataaaaaattagaaaaatgtattatttttaatttgttttgaactatgtatattattttaaaatcataaactatgtatatatactatcaaaaaatatatatgtttatataaatgtaaacttatttttctaaacctttgtagagaaaatcatacataaattgaagaccataagatatttggattaaagttttagttgtaaattaatatatatgttaagttgttgttttgtgtaattatgaattaacaatcaatatcaatatttatatatatatatgaaggacggttttgaagagatggtgtgattttctgttcttttaatgttctattttttttttttctaatttctaattttttgttttttgttttgttttttcatttaacatttatcaataacaacaactaattaataaaaaagaagaattttaatagatactgtattattaaatgataaatatgtcttctcacttttataacttacattatatttatttttattattaattagtcaaatttaagtgtagttaaagtgtaattcctttgagctttttggtattacaaaattatattatctctctatatatatcctattatcttaaatttcttttattactatcacccttcataagaaatatctatctatcttctatcgatctatctatctatatatataatgctgttgttagtctcgatgacatagcagtctctataaagtttcttgacatacagttcagcatactgatccactgcatatgtaactttcactggcagaaagtgagctgatttcataaatctgtccactatgacccat

SEQ ID NO: 79492 - DNA, 3495 bp, Cannabis sativa
acaaacatatgtaaagatcattttaccagatctttgtagaaaggtgtctgctcaggaagtaaagcacgatctgcatcctctcctttactagcatattgttccccataccgtctggtatctagtgtaccagctccataatcaggaggaccagaaagaaaagcaaagactctagctgcacttacatttcaaagtagacaagctatcatcattttttataacaatataatcacccaaatttttactaaattgcagcagtataattacttgatcttaaaaattgttccaacctacctaatgcaaatgtgcttccatattctgatccaaggtaattaaacagagcttccattgccaccccaaatccccgaccgcccatcaaaacaccatccattccttggccagctgctgtggttctctcccatgaagttgtcggtcttagtgtttcaagtgcagatgcaattcggtccttacaagtttctacctgtaaggcagatatagttcaggactgaatgaaaaatttagttcatagacaccatagtgaatttttaaattaaaaaataaataaaaagcaagccatacaggagctaagaattgtaacaaaggcatgacatcttcgagttcaactgcaagggtgccttctgtgtctgggggaataaaaacattcttcacaactggtatgggcccttgaacatcatacaaccccagtttgtggctaaaagtagcaatgccgaagagtgaaccgggtgcaagagctggacatgaaacaacgtttatgatgatagtcttaatattcaaagaaagagatttaagcaataaataattacagttattacattaatgtataactattgaccttctaaagctgctagaagtgcgctcttagtaagttccagaaattcttcggaggctgcagattaaataaaggaagaaaagaaaaattatatcatttggaaagattacttcgcatgaatataaatgaagcttcaaaatgtattcactgattgagagagacatagtgcagccaaaatacaaaaagtgcagctctgacaagaagaaaacggaaaggttccaaattatgaaaataatgtttacaagtaagtttgactggaaaagaacaaataaggaaagaccatatgaaccaaagctacatacatttttattatgttagcatgattatataattccaaagctacccatgtgatgccatgtcacatatgctactatgtaatagaaaatctttgacttaaaagccaaatatttaggtttcataagttctaagtggttcaatttgatacgcgttgagtggttcccctctcttatcgagccacctaaaccaggccaaaagttatgcacaaaagttcttcccacatatatctatccaccttcactgaatcttttaggccttgaaactttgaagaaactgtaatgagcatagccaatgaagaaagccggcacctaggcacaacactccaattaagtgttattgcttctatacacaacgcttaggaaacaattccataattaccctaaggaaacaaattttctatcatttttgaacaattatcaacaagcttaaacaaaaacacaactaccttctgcaaaatactgcaacaatacatattgctcaatgctttctgattccaaacccaacaaacttctcacaaacgagactcgtgagtcgtgacccaaaagtaaaccccaaaaccaaatctaattaaagtatctgcctaaaattcttattgcagacttgtaattacagtggatctccaaaaaaaagttcttatgattacaacaaagtgcacttgaagttttggaactgttacaagattaagtatttccaatgattaatcaataatatgaaaactatctcttgtaatcaaaatcctttatacaaatattttcattttcattcctagcaaatccttgacaatcaatataatcgaaagttcgaaaatttctaatttgttcccagttaatctcttcttacactaatcataatgccaattatcagagaaataatactaacttgaatagaaaattcaaaataaaactaccaaattactaatatttaatatgaaaataacaaaaaagaaatgaattgtcaagattatctctaatttgaaaatattgattatgaaaacgaaacacaaaagttcactatgatcactaatttcaaaaccgtagattagtcaagaaaagctaaaaccagtcaatcaaatcttacaagacaaatcaatggcagcaacatataccggctgtggctgcaatccttcatcttcagctgaaaaaaacatgaaacaagaaaaattaaattttggtgatttatcaaattctctttcttcaaatccaaacataaatgccgaataacattccacactaaccaggcaactcgagatctacaaaagaagacttcaattcagggcatgactcagggagagaatagcgagcaatgcttttagttgttaacccattgagttgcgaacaaaggcaacaagtccagctccattgatccagactacagtagatattgaaataagcccagcaattctcacaccgaggcaagagatcgccatcggttccatacgctggcggcctatcttcttcgtccttggttgcgaatggcgtcaccgtcacgccccatggaagacccgaattctcctgggcgtctgagtcgatagggaatctagacacagtagctctcaccgccatggactcgagtctgtcagtagtaaattttcttttttcccttggtgctgcttttctcgggaaacaaacagagatggggaaaatgaggggtgtgtagattagagggagtaacaagtgccaagcgcatgttagcacagatgactgttgtacactatatggtgccacataaagcgagccaattctggagtgccacgtcaatagttacagttgattacgtggcagtattgtgccatgtctgatggtcctacaaggccaaaacggttgacattttctttatttatttatttaaagagagagaaaaaaaatagttgacttttgaattttgacttcttttttacttcaattttaagaaagaaaaaagaaaagaatgaaatcttaggagatttggatgatgaattaataaaaaaaagtattggcatggttttggtgtggtggttagagattcaaatgttattgtttttgaagctttgcaagggagtcggtgtggaacaattaatgttattatagcgaagagtgtaggacttaaagaagtttcgagttggattaaaagtatagaatgaatagatgtgattttagagacgaataatcttactttagtgaatgatgtaatggttaataaatttattgtctcttaatattgtgtataaacttatcgtctcttaataatgggaaatttacacaaagcacttaaattttctttcttttttttacatttttacgaactttttttttttttacatttttacatatttgtaatttttaaagggaaaacaatgttgtgttcatattacc

SEQ ID NO: 79493 - DNA, 1812 bp, Cannabis sativa
ttacatgtttaataatcaaattaatatcaccataattatggtccattactaaatttcttcataagttgtacataatgttcaacataatctcttttagtaaaaaatgttcaacaaaatctcaataagaaaaattatgttcgtgtcatatttttatatgaaggagtagataaattactaataaaaatacatttaaataaaataatttaatataaaagagtagatgaatttctaaataatttttttatggatttgaatttgtgttatatgccgtgctaacgtgtcgtgctttcgtgctaagaaaattgtgttttcgtgtcgtgtcgtgcttaagtccatattattcgtatcatgcctgggtccatatttatttgtgtcgtgtcgtactcgtgtcacctgtgatcgtgccagctcaacccacacaattaaagggatagagagagagtattatttttaaatgatgtggactaatgaaataatgccacgtgtacacagtgacaggtctatttgatatttaacagtaaaaataacagaaaaatagagacctaaatggaattgaagtttgaaggattttattctcaaaattttagtccaggagattaatcataccaaaccttaaggttcagataatttagttgcaaattagccattatttttcaatgaatttttcttttatttccaataaaaaaactaataaaaattattattaaattaatagaggatgggtgttggtttttttctcatgccatggtgaaaaaagaaataggcgagcatgaagcccgtttagcaaatgactacaacaagctgccttcaatccagcatgaggagctaggggatctggtggatgaatttttctagttggtgtatgaagttttttgccttactcattcttttgatttgtactggccaatattagcttaatttagtgcagtgtaacgttctctcaaagtagtccaaatttacgaagtactatcacacccaatcatgcgagtaagagctcatttagacatggaagaaagtaataatgacacaagaatattgttttgttcatcccaatcttcgtactttggactgagataatttgctcttcaatcttcatctgtaagaaactgcggaggcacgctacttggatcacgaaatttctagagacgaatcccctttattactgcaagaacttgttgtttccatggcaagtagttcgtttggatgaaacaaacaggaagagaatgagaaaagactacaagattgattttatgaagatgatgagctcctagttgctgaaatgaagtggtaggctgagacgaattgtccatggccaaaaacgataatgctctgatactaagtaaaaattctaaatccaaagaataaaaagaaagaaaagaataatagaaaaagagaaactttttgtattattgaattgaaaagagtattacatctttatatccaaattattataattgatctatctaactttagagttcaattgttttagtttcactaaaaaaaaatatgtaagacaaataatttttttaaaaaaaaaaaaaaaattggaaaataatattttaatgttatttgattttttaatttttttatttgattttttttttttttttttgagagattagttttaaaaaaattagcgaaatacttctatttgggtttataagtaattttatttttgaaaagtaaaaatatattttaaattatgaagtaaaacacattgtgctttggatccttatctttttcttttagggaaatttacatggtatattaacttttgctatttttttacaaaaatactgtcaggcggaattt

SEQ ID NO: 79494 - DNA, 2082 bp, Cannabis sativa
tcttattttttcagctcgctctataaaacgcgcataactctttactcgattattcgattttagaaattctaattttgttctcttagttaaatgatgtgattaaaaaagtcaatttaaaaattttatatatcatttggtaaataacttgtcgtacaagttagtggactaaaatctgtacttaaaacttttttaagtaaggacatgaaaatcactgtacaagattaggaaatgtaaataaaccttcatgaagtcttggcttgagttctttgagtcttgaaaactacttcgaatcactttcacgaattttggtaaaattaccacttcaccgttggagtcaattctgctttagaaaaatttattttatctttaattgtgctacaaaatcaataaatcattagtgacaaataataatcaaatatttgttaatcatcaaaacgagaagacctaaaattttgagttaacggtaactatattatagattctctaaaatatatatgcactttttccattttattgtttaaaaagatatgtggattaggtaaaaaagaataatatagaaagatatttttttttaaaatgtgtaatgaatttaaatttgaattgtaatataaatatatatatatatttttgttatataaccacatttaatatactaagagaaacatttgttgagtttaattttgaattgtagttttctttattcctttcttttttttaaaagacgactttctgctataataacatatatatttgaccctcaccataaaattatcttagttccgccacactcaaactcaagccctggatttcttctagtgaaactgcaatgcaaagtttttaataatattgtagtttaattccttaatttgtgctataaaataattaattatttcttactagctagagtacgtatgcgttagtctaaatcaaaaaaattaatgtgaggtaataattacattatatacaacaagatcttatctcatatagtcaatattataggtaaaaacattacttttttattttatttatttgaaaaaagctttctcattgatcacctatatgtatatatcctcatcatattaatttctgggttttctgacgacaacaaaaaaataaattaattattcacaaaatttatatatatatagcttgtagttgtagagtatctcgattggatttgatcactaattaaagaaattaaacacatgtataaaaagtcatagttgcagtaaatgcatgacaatctcatgatattggtcgtaattaacaaaaagaaaattatgcacatatactattatttatatataagaacaatatatgtccaccaatattgttaatttatagtagatattacaaagtcataatggttgagatcatcatcatcatcaccaaggacgaaacaaaactaggagttgccaactcaaaagttgatgccatatacataatctcatgaacacttggcttggaaagtgccatgtgggtggtgcaaaaacaaaccctaaataaacaaaaaaggacgattcccttgtaaaaaaataaataaaatagaagaagatgattcctttaatattgagataatatttacatatatatacatagtgatcatattattagtagacttatcattttgttgggtttttgtcaaaccttatcatcatcaattaatatatatcataaatgcagttcgtacaagaaagatgttattttcatttgctacattaatatatattatgtgaacaaaaatggagtataacaacaaaatatacactgtgatgatgactaataatatattattaattatgggcgctgtatccaattgtttgatttacaaatagagagcttaattaggagttagctagggcttaattaggagcgctttttgtacaattaacaatttttcagtggcgtaccaaatataaatataagaataattagtaattttgttctttcaattttgacaatattaattttggttcctaaaatatataacttattaatatataattttgtaggtactattgacgaatatctttatgcaagttaattatgaatttttcggttttttaaacataatattaattg

SEQ ID NO: 79495 - DNA, 3273 bp, Cannabis sativa
aaaaaagttaaaaaaatttagtataattaaagatattaattttaaataaaataaaaattattaaaatggggtttctttagaaatttttaaggtgtaaataaaatttaccttataaaaaaataattttacaattataaccctcaaatttaaaagttaaattgctaaataaacaaagccattaaaatattatttttttcactaatctatcagtaccatcaggttacataacaagcaatataaagtcaaaacaaccatttgcttcagtgaagtttcttttatctcatttgaggtgtgtaagaccacaaagtgaggtgagattttacataacactcctaaaaataaatatatattatttcaactacaacatatataacttaatacaatactggatgaagtttagcgctttggtaataatatcttcattaatcttgagattgaagagggtgacattaaagagagcgtggcataggagggatactttgttcatgcctgaaaaagtttccagggtcaaccttggttttgacccaaacaagcctttgaaaattactcttgaaatatttactcccccaaacacttgcttccatcacatttgtactgctttttttgttcattcccaaatcaagatccctataattgacataagcttctcttggattatttgtaacataaggagtcatgtagtcataaagattcctaatccaattcacatgcttttgagtgctcttttctccatcaaaccaaagagaaaggtactgaatcatgtaaatgattcctttcctgtgagggaatggggtagcagattccggaatcctgctcatcattcctccataaggtgtcaaaatcgttaaagggttttcttcaaccaaaaaccgttgccaaatcccttcgagtccactttcaggtattggatttttcacaaagtctgatttggccttaaaagaatattttgatgttgtttttggattgagcagaacctcaatgggagctccacttgggtatgttgttgagatgtaaacaacagactcaatccagctcatttcaacacaatcttttcttgtcaaacccaattcagggaaactattagacataacttgaacaagtctatcagttccaccaagaaatagagcttggtaagaagttgaaatcgttctcttttcatttgtagtttttgcactcattggttgtataagtactcttatgaacaaatcttcatccattttgtccacaatattttgccacttatagagtagcttagttgccccctgttccaatgtcctactaacggtaaaaactgtcacagttgcgggaaccggtacgagtcttatcttccaccataggatgacaccaaaactcgctcctccaccacctttgatagcccaaaaaaggtcttctcccatggctgcacggtcaagtaacctcccattaacatcgacgattttagcatcaagaacattgtcagctgctaaaccgtattttctcatcattgagccataggctccaccggttatatggccaccaatgcctaaagttgtacaaagcccagctgggaatccatggactttactcttctgtgatattctgtagtaaacttctcccacagttgccccggcttgtatccacgccgtgttgtgttggatttcaacttccactgatctaagcttggcgaggtctacaatggcgaaaggcgtttcgatttgggaaacgtaagagaggccctcatagtcgtggcctccgctgcggaatctgaggtggattccaagatgttttgagcaaagaaccgcggcttggacgtgggaatcagacaacggagtgaagatgaattcgggtttgggagatgaaggagacaagtaacgaaggttttgagctgaagattgtagagttgaagtgaataatgaggagttgtttggtgtgaagatgattgtgttagagagtgggagtgtggaaaggtctgagttatatgagacgcaattgatgaagttttgtggagttgattgataagcaaaggctgaaactgtcattgaagctaaaaattgatgaaatagaagaagaatacatatttggactaaagtggatattttggaatgctccataatgattgaatctagcaatgaatatttttagatgttttatgatctatatgactatatacatatttataggacttacgatgcagattggtccctttatcacttataaagtaattttattatttattattgatataactttctaaatatagtgtgaacctccaaagtactgcgttgaaaaccacctatacactttagtttgctggttgaataagtacgtgtgcaacttaggtaatgcaaacgtctttagttttttcaacattgcaacatctgaagcctttgtgagtactgtttgatttttcatattatttattaaattgctgggatctaatattaaattgtatccgtataaacctacttatagtgttagacacattaacatttctatgttttcaagttggaaatgaccgaaatcactaataatagttagtgtaaacatttatgcaagtttttgtggtgtatacatgtatctaacatctccataatgtttctctatatgtaaaaccaactcgagttattccaagtccacgtgaatgtaagatattttgtttctctccttccattaatgaatttggtgtcataatttgtcaactcctttttcaccacgagagcttccttaaaaccaatagtgattcccattctttctattaatgcattttgtggatcacattggtagacccccacccaaagaaagccatcaaattttttaaatcatattgattttggaagttggagtacactcaatattgaacagttcaggatagagagagtaacaacattataatgaaatttcataaaaaaaacaacgttgtatgaaaatatccttggctccaattccaaactctatctttgatatactgtaatatacgagcctttcctttttagtttttatgccagtaaaagaaggtaagtctagaattcttggccatctctggatagtcgtccaaccccattaaacattggatattttactaaacatcatttggaacacttggactcaagagtaatacatcaaggacatgcaagcgaaattggcactcagcaataaaagaagggaaatttgattttctatatttaaaaatgttcaaaaatttttttttaaaccaatatattttacactacaaaaaatatgacactttttttaaaactccaatcgatccctatcggaccatatgccttttttttt

SEQ ID NO: 79496 - DNA, 2146 bp, Cannabis sativa
ataaaactaatagtaattataaaaaatattgtaaatagtaattgttgactgttcttatgataactaattaatcttattttaacgtgttgactttacttttagccaaatattgagccaattaaagcgattagaataaataatattgaataaaaaatatataaaattaagcaataagaacacaaatatttatagatgttcggccccgtgatagtggtaatagcctactccccttttacttgtataaattgtgagaagagaagtaaaaagttcttgatctctcttgaaagcttacaattttacaacgtaagagctcttttgaacaattgattttggattcctaaatagtgaaatggttccactatttataagaaaaagttacatcaattaggtatctcaaaataattaagaaataatatgggaaacttatttactttcttaaaacatatagaaataaaaggaaaactagaaaggtttcctcttatttattatttttttttctgtgaatctatcccacaaaattaggaatgtgatcgagatttaaatgcttgaacatttatggaaaatatctttgaagatattctagccgcatttttaggccagtgtatgcatgttagttatgagattgatgatggtcggacgatataatataccctacttggatattaattccagtttattcttcaaacaggttatttacgaatgataaatcccctttgatgacacatcatgaagtgtactgcttgtccagataataaaatattcttcacgtgtcatccaggtaaatgtcactcaccctgtgcataattcgggaaaacatttttccccaagtttgtgtggaaactctttgctcgcatgtggacttattcagccactaagttggttgaatgggtgacatgtgttcatctttcacaccatatcttgatctaatgtgatttgatggaaggagtgaatatatgagtgtctcttcagtatctaggcatttaaagcattgtcttgaaaaatgggcctcaattggttcaatgacgggtattgagtaccgcgtgtctgacagttgtactctccaatatgtgatgattacacctttttgaagggaaacacaaaatttaaattccaaattaccaaaccacccttccaaccacctatataaggggttagaaattcttttgcactcttttagccatttttattctcaaagataactagagcacacaaaccttttttctctctaaaatctttgaagaattattgcttggagcttgatttacaaaagccatccaagtgcatttaagagcttccgaactgtgagtaagtcctatttcttcacttttattttctttaaaaacatgcattattattttcaaactgtttttataaattttgggtttttgaggctgttcttcgatgattgagattaggaaataaattagggctttcaattcttgattaagacgcacgttcatggcttttagattcccaaatttccatcaatttcttgttatttttgctagaaattacatggaatttcgtgtttgaagtttctaggaatttcttaggttcatctatctttaaacctttgatttgggaatttcatttttagaataaaatttcatccttttttcttttgaatttatctggtcagcatatcagacatgttttgctcttgcataaaatcatacctctgtccagttcttacctctctatcttctctcttttgtagatgaatcttggtgattactagggatgtaactactagatagataacaattaacttcatcttcttcacaaaaactagcctagactctgtgcaacttcatcttcgtcgagtgaaaattcatcgacctcgagcttcgatgagtggaagattacaagtgacttgttggagtccttggtgcccgtggtacaacacaatcgttaccctggccaaattagtggagaaggatacgatcggttcatttggaaactgaatagaggctgaaggcattatctgcctattgcgtggatgtacaagatctgagtggacatcctagacacacttccagaaggtcatataaacccttcaaagaaaaactccgctctagcaaaaatcactatctccattgcaaaacatacatctaaaaaaaatcccccatccaagcgtaaggtgatg

SEQ ID NO: 79497 - DNA, 4086 bp, Cannabis sativa
  modified_base (417)..(423): a, c, t, g, unknown or other
  modified_base (4041)..(4059): a, c, t, g, unknown or other
ttaattataattaattaatgggttttttaaagaaaataattatgttggttttgattgcaacaataattgtggttcccaaaatggcttttgggactgaatatgttgttggagatgagaatgggtggaaacctaacttcaattactccgattggaccaaagacaaaatgttcatggttggtgatactttaggtaataataatattatcattccttaatcatattttttattaattattgttattattgtgagaattattttatatactattttttaatttatttaaattatttacgttttgagttgttccgatatttttatatatgtagattgttatgtgtattttggttacaatttaagttattcttttggttgctatatgagttactacgagaattttcataaaaaaaaaaaaaatnnnnnnnaagtgtaaaaatgaaaaaacttattattattatgattttttttgagtaatcgatgatgaaaatatattcgagtaatccatgatgaaatatatattttgtactgcagttttcaattacaacagtctagttcatgatgtgtacaaagtgaacggtagtgacttcaatgactgcattgctcgacctggttcagaagtattgagaagtggaaacgacgtcgttacactcaacgccactggaaacaaatggtacctttgcagcaaatcaaatcactgtgatttaggccaaaagcttaagattagtgttatggacatgatgagtagttcttctactactccacctcatcatccccataaccttttccttggattattattagtctcttcactcaccatcttcatactcctttcttatggcgccatttgatattagagacgtttttcaaaatgatgatgtatattataattataacagatatatatttcatactaagttcggtaaattttgaataatttatggttttaaaaatagagttcaaactaataatttattgcacgtgcaatttaattgtttatgttgaactttgttttcaacttttaaattatttagaattttttaaaaattgatgaaataaaaaaaaaaattgagttatataatttctccagtactgaaaataaaaaacgctcctacctaatgaaattttccaatatttctcaaatatgtgttcttgttttattttatgtaaatgtgttgttgttgttaaataaatgggtgtaatttaatttgggagtaagttaattaataatctgtgaagagtatttaaatagtattaataattgagtaaataaaacagttgaaatcatatacctaatttcatatttattgataaatttctttttatttatttatttatttttttttgcttaaattatttagtttcaaaatgtatttaacaataaaaatgtatcttgcagtgatcatcaagtcatattagtaggcatatatttatataactattttctctaataaataggaatacatttgctgccatcattataccacacaaaaaaaaactgaacttaaaagattgcatttaatttcatgtctttaaacacaataagtttctttagacaaatgaaggaatttttattcattgacaacaattcaagatgcttcaccttctttgtctcaccgccattattatattatattgtatttgtatattaaaaattttataagaaatttataatttacgactatatatacatacaataattaacttaattatcccatcacaatgaataaaactctaataatgaaatgtatcatgtatagtacataatccatttacttgtatctttttttttatgataaggtgcaattctttaaatatttttagcaatttaaaatctgttaaatttagatttttaattggatatattctgttaaaaactaatatataagtaccttgtaaccgtatgatatttatttatattttaattaaaggtaaattgttaagcaatttagaaagagtagttaataagttcactatttaagtatattacatcaaatcaaacataatattattatccaaaagtaagctaataaaagttgaatctttcaaatatataaattaaaaaagaaacagatataaaataagaccacaaaccaaatttacacattaaacttctgcacaattaagttgtgtaaagaaacaataaaccagaggaaccatcatcatgctgtgatctgtccatgttcagtcttagggtccttttctacctcctcaaagtaatcctcacgggcattgtcagccaacatcagtgccaccaaccagaaaagtgctgaatcaagggacacaaaagcaccaccaccgagcagaccagttttcgcggtagggcaatcagacttgttgcggtgaacattgtgcatcaggtgaaattgctctgtgagtgtaggccacaacaacagggctgcagctaatcctgctgtgaacaaagcaatgttgaagaataccataaaggtagtgcttctgaataaagcaccttgtggaatggactttcccttgtatggataaaacaatgaccacaacccgaaaactgttgatactaagaggaatgcaagggatagataccccaacactactgttggatcagaagggtatttgcacataacaacacctattcctgggactggtgtccctgcagcaggctgtcaagataacaagggtacaatttgcataataaaaacaacattgcacttaaagagattggagataatttttggtaaacatctcaaacaaataaaccatttctccacaaccaagactagaattttgtgttcaaatacacatgcattctattacatgtatccaaagaggtaaggtgagttgtctttcgtatgagatttagactggaataagaatgtaaaatttaaattaaacttgaatgacaaggggtttgtgtttttaagtaggttttacattttaaattaaaatgatgtaatgttaattccctcaaaagcatgggtttcatatttcctcaaagcctactccctctaattttattctttccaactcaaattcacataaatagaatagaataacattctaatatgaatagaattaaagttgtttcctttccattctatttcattccttccaaccaaacgccacttaagttgttgtctaagcctactccttccaattttattctctccaactcaaattcacataaacataactagaatagaatgacattctaatacgaatagaattaaagttatttcctttcaattctatttcattctctccgaccaaacgccacctaagttgttgtctaagcctagaatttttttcaagaaagtgaattgacattctattacaaatactcttttgctccaaattcagaaataaacatcaatttcacatatcatacatccaaattcagagaaaaaaagcacaaattaaaatattacctttttgttttcagcaacaactccaaaaatgaaggacaacacaccagaaaaggcgactatcaacgaaaactgcttaatagataaggccattttccgggtttaatttgattaatatcctacaaaaataaaacattaaattgaatttaggggatttcagaatcaaagtatgtgaaaaaggaaaagaatgtttatttacaaattattaattgattcccagatgattttacagaaaactcaccgaagaaaagatataaaatcgcaattattataggaatgaagaatgaatgaagagtagaggagagagagagatccgaaggtctctcgagattagagttttggtagagagagaaaaagagaaaggattattataaaatggggattctttgtggagagagaaaagtataaatatagagtcaaccctgcctggaatctcgctcctttctaactaacttcttatcacaactgaatctataaatatccctttcaaacaaaataaattaaatgggcccaccaggcccactagcctagcccagcccaacccagtaagtattaattcaagggattattttacaagaatataaaaacagcaaaaaaattataaaaataccgtttcacagattcttaaacatttttacgatttttttnnnnnnnnnnnnnnnnnnnacggtctttttatgttgtaatcttgtt

SEQ ID NO: 79498 - DNA, 1449 bp, Cannabis sativa
attctaaacaagaaaaaccctatggccaattttgatctttcttttacaaaaaaatcctcaattttatggaatatccatccattgcacaaactgatgctgtggagggtgtttacctaacaacagcagataagttagtgcttgtcaataaagagagtggggaatttttcttgtgctcctctgccaccaagcgaaagaatctccccttcatatcattaaggaggaattcaggtgcattcctgctgattccatgtgagctaggcagcatcataattttgactaaactccagtcgaagaagctgcttcttcctaaatctaaagtggataaagtaaaagtaatgttgttggatgcttctttcattcatggttaggcgggatagagggactttaaccctcacgatctttaggcagcagatggtagctgtttgcaagaagtaactgaccctacatgtatcccctctgcactagaagcttaataatcagctatcctggttggcttgttcttttgcaaagtaaattatgtggtcttaaaaatcttggttcagttgggagtctttgtcctaagaaaggttctcctcactggtattggttgcttcaaaattctatgaacttctgattttaatttctatcttcagcatttttgatgctgagtttctgcctacaaagttatacggtagctgactctgtagccaagtggtcaagatctagtaagatcactgggtctttcgttataaggaatttgccacccgattgctttggtctaatgattaatcttctttttcttgcaaattaaaataatctacgatacaacttaattcgtttccaattttctaattagctcccgaaataaaagagtacaacgataattagaagcaaaataaacctaacaaaatcctaaatcaccaatgtggtagactaacaaacaatcaaactccggcgattcaccgattaaaaatgcataaacctattcgctaattgaatcagtaaatacctaatccaatgacagcaatgcaatgaaattagggcaatgaataggataaatgatttatcaatatatagagtcaaattctgcaaaaggaggatctaaaatagtggttgaagaggagggagtgggagttcatacctggatgacgtcttcagctctatcattgcaacgatgggctttgggctgacggtgctctccctccggcgttccccatggactatctctcctcggtacaggcctcgtctcgctcattcttcttcttctttttctccgaacacaatctctctttcagatttttgcgacggggttttaggtaacaaaattatattttgggttttttttttttgtaaaattaatccgaaaagacaaaaccaaccttccatcttggttttcataaacgcagaagaaaacagttggtaagggtaaaacgggaaatagacgtttacaaaatataacattttattttt

SEQ ID NO: 79499 - DNA, 3511 bp, Cannabis sativa
  modified_base (1353)..(1357): a, c, t, g, unknown or other
tacttgacaaaaggaatcagatacgatagcacgaattgaaatttatacaaaaattagtgggtttgggtttgccgtttgctttacctgtttaataaacgagtcatgtttaagttgacacagttaacacgaaactgatctattaatatttatttaaagttattttaatactttaacaggttataaatttattgaatatgttatacacgtattattggttgacatatttaaataaaatatacttataaatgggttatacgagtcgtgtcgtgtcaactcgtttataaacggctcgtgttcgggtagagcatatacctattatatatggatttcgacataacacgaatacgacccacgaacatgaattttcacccctagcttatacactatcgctaagatgattgccagctgaagctctcctacgtacgaaggtataccatggcctatctaatagggcacacaaacacccactactcccaaatgagcgccacttttaaggctcatgataagtgctatcaatctatcatggggactagaactctgaagaaaaactaagtgaggagcttagtgtaagtcatccaactaattacacactaggtggtataataagtgtcattattaaaaaaaaaatagatatatagtggcgccctcattaagttttttcaaaagaaaatggttttatagaattaaattatttatttatttatttatttatttataataataattttttataattagaaatatttggatgaagaataatttctcctaatttgtttttatttaaagaaaaggtctaaaatatatttttttatataattaaccgtctttatattaaaatatactatcaaaaataactaattatcatatttaaaaataatattgactttaaaatttaattgtaaatttttaaaaatataagatctaacatatatatatatatatatatatttttttttgaatttaagaaatcaaaattggtaattcatcgaaacaggaaggttcaaaataattaataaaaaaaaaactaattttcatgtaattaccatagttggagtgcaaaataaaaagaaaataatatagcggacctgttattttatatataaatatatggataattatgttaaaacatggctatatatttatttattttaaaaaaatctatatttatataggtacgtatatgaagacagtatatatataggagttagagtaaggttactattgtttgattctagctagggtaaattcagagcagtgaaaatatcatggtaaatgtcattattttgatttttcatttcttctatcatcaattttcgtaatatatataactttttatttatttattaatttttnnnnntttttgaaaaaaaaaaaagaagaaaatttgtcaaatttagcttactgttacgtgacgataaattatacatgcaatagctcctataaattaaagacttcatttatattttgttgacctaattattattcacatattaacacatgcatatatagtactgtaaaatatgataataattaataataataaaaatagttgtaaatcccaatattatatgttagtagttctattttgggaaaggtacgtagtcgtttcatttcatatttatataaaaatgtatagatataaattaaatgaataatatgtataactggtcattgagattgtgtatggaattttcttggcatgtgcatcatatatatatatattaatattctcctatagctttgtatatatatgtttttaatgaactaataataataaaaacaagaacagtcttatcaaattaatgtgttcgagtacatataaataatatacaaattaatattgttttaaaaatatataaagtgtaagtgtaccttattgtctttggattccctttcaatttttattgtaatttataaattaatagtaaataattagtaaagagtagtgaaaccacaaattcacttcaatttctacatattatataagtgcatgtgtaattaaattaataatattcattttacactaaaaatattaacctaaattaatattgttccttaatatttattttttattattattattttagatgtttacatctttacattctaaacaacacattttctgaaaaggctttgaataaactatacaacacacttattaattgaatattatgttctcaaactaacaaacatcttccttatactaatccttctaggtcaaatgaccaattctattcttaacactttcaacaatcttttttacatgatcttgttaattagttttggttccacaaaatctcattcctagcttttcataaatgataaacaagagaagctgaccgccaaaaaataatttctttcgaattttctaagctttgaccgagtgatttacttgataatcgagttaataatagtgctagattaaatttcccaattcatcaaatcttttattacactaaagcatttggagcttataggacaatttaagaaaagatgatctaaattctctgtattcccgccacaaagacaagtttgatcttgcactatattaaaacgaagcaatatatctcttattttgagtctattttgaatagccaacgtaccaaataattaataataaagtgttttaggatattaaatctattccataccgcattccttcatgtactcactcgatcaaattcttgacgaaacaagcgatagccttctcagatgtgatattaatgctctatttggaggtttggctcttctattagactccacatcctttattgttacaattttcctccaataccaattacgatctgcaatcggggcaattaagtaatcccaccaatttccttcttttatatatacattctgtattcatttgacccataaattattatttttagatgctatggcctaaacatatttttgcaaggcagccagcttgttccatgctacattaatgttccaaaatttaaggccacttgccttttttgttttacacattttgcagacaatacttctggcattagcactaatagttttagccctgtcacaagaacaacatgcatatcgtattgtgttcctttgtattaatttctctgtaaataatggtgttatagtgttattaattagtaaaaatttacaaatagtttaactaaaacgtacatgctcataaaaaaaaagaattagattataaattttttcaaaatataccaaaatatagattaaaggtaaggccacttttatgattgtagtacaaatttattctaaaatatattttcctttagattttttttcactagattgtcaatataaggtgcatgaatctctaaaaggttagacattgacatatgttcagaattatatagacaaatattattttggatcctgtgttttataaaagttattgactggatctgttttgttgaatgataatatatttagcctctatgtttttcaaaatagtacaaaatagacttggagcttaattaaaacttaataattgtgacagtcagtagtc

SEQ ID NO: 79500 - DNA, 3196 bp, Cannabis sativa
ctctctctctctctctctcctgatcctttacccccctctgttcttgctgtgcgacactggagttagattaggagcaccgagctcctgtcacctatcttagttagagctaatgtacccaaccccagaaccgtgagacccccatctccgacccttctcgcctatctctctcgctcttcctctctcaattcacgttgaagccatgatagggcctcaactgccactcaattaacgttgattttttatttgagaaagatagatatagtgagacaataaaaaaaaaagaagagaatgaaatgaaagatagttttggggggaaaattccaccatttaaaaaaaattattactgacgactttcgtcattgatatttttatcaatgacgataatgtcgtcagtaatagataatgttgttattaatatgtaattttacaaaaaaaaaaaagttttttatcaccaaaaacaccaatgacacttaaatgttgttggtgatactctcactttcaatgaagactttttgccgtcaatgatagtgacaatggttatagttataattcttgtagtgatagactaaataataaatcttatgtgttctatataacatcactcattatatatctttagtttgatgatttcatttttcgttaatagatctacgaagattgtagaaaaaagaatgaacgaggacttaagattatttaatcaaccttgttaaaagtaattaacagaaaataaaaacactcgagattttatagtgattcacctttcctttcgacattaataagatagtctagtacttatgctttattaattctcatgttcaagctttgttcttaagtgaatacaattcccttcttagggtttgaaagagcgaaagtcaaaagtccttttatttgtatggtatgatcataagttttttgtactcatacaagatcatatatactcttatatgaattgatttttttgatatttattaattatttaaacaataatttatatattcatttataatatatgtgtatttcatacattcaataatatattatctattaataatttgattttagggcataaaccctaacaatctcttacttgcacttaaagcaagtgcaacatattctataactcttataaatgcttgtcttatgaacatattaaactgtttgttctgttattttgttagttatttcggttaggtcggttagttagttgagatcttgtttagttcattttgttgtctatataaaacagcagcttctctcttgtattcattcaacacaattcaataaagaaatactttcaatttctctgtttctttattctaatatagtatcagaaaaaaactaattccccaagcttttctccaagcttttccaactctcaacaatggcgaggatgagagccactttctcttctacacccactgatcgcgtggatgatgctcctgctcaaatcgatccttccccatctcatacttccgctgaaatcaacaacaatccagctcctccacctcaacagcaacctcaaatcgatcgacctgcatatgaggatattcgcagcccatattacctgagtaatgctgatcatccaggcatggttcttgccactccaatcctcaccgattgaaactttcaaccttggtgccgtgacttcatgatttcaattggagcccgtaacaagacaccatttcttaaaggtacaattcctaaaccttcttctaatgatcctctttatggttcttggattaaatgtaaccaaatggttatgtcttggattttacattttgtatctcctgaaatcaaaagtagtatcatgtatttggatactgctgccgagatgtggaatgtcctccacaaccggtttaatcaaggaaatggaccaaggatctttgaactcaatgaaaccttgacctatctccatcaaggtgatgattctatgagctcttatttcaccaaaatcacagcaatttgggaaaaaatcaatcaactttgcccacggttaccctgcacttgtgctgcagcagcttaaaatcataatcatctaaatcatgatcaagtcctacaatttctcaaaggcctaaacgaaagctatcatgccattcgtgaccaaatcttgcttcttgatccatgtccccctcttgacaaagtcttttccatgacaatacatcaagagaggcaaagaaccattggtcatcgcactataccaaccttttatgctgctacaactcccacaccagcagcttacgatcatgcaccagcagcaaatcaagcatcaagaaacaaaaaaccaagaccaatgtgttctcattgtcaaaaaccaggacactacaaggataaatgctatttcctccatggatttccacctggatatggaaatcgaaaacctgctgatgctaccaacaacaagaaatctgatcccagttcttcaaaccgaaaccctcaaagcatgcaaatttcaaccaccaatactgatgcttctcagccacaactcactgcctctcaatgccaacaaataatttcaatgttggctcagcaacttcagcccacaccagatgcctcaacctccacagatgcactaggtgtcaataacttgacaggtataattcccccttctttcaattcttggacaattgatagtggagcaactcatcatgtttgctccaacttagcatgttttcattcattcactaataattctcatgctaaaactgtcaacttaccaaatgggacttctgtcaacatagaaaaagtgggcattgttatcattaacccaaatttaacacttttcaatgtgctttatgtgcctactttcaaatacaacttactatctgtgactgccttattaagcaacaactccaatatcatgttttttgctgctattgtatgttacattcaggaaccttctcggatctcgaagattgggattgctaaaagatttggcagactttactatctgcaacaagaagacatttcagcttctaattctaatctttcttgtaatatacaaatagacaaacacgaatggcacaatcgccttggtcatccatctgtaatgatttcaaataagatcaataaacatcttaattttcctcataatatttctcccacttttcattgtccaatatgtcatttagccaaacaaaagaaattaccttttcaatcacacaataatttttccaaagcaaattttgatcttattcat

SEQ ID NO: 79501 - DNA, 5020 bp, Cannabis sativa
attttaaagttttgttgccaacatctgaaaaattagactatttgggtaacactgaattcatcaatcacctatagcataaaaaaatatactacgtggaggaaaaaaaataaagaaaagagtgttcaatttatctatagctacaagtataataccaacaattgttttgagatttttttcaaaagattactatcactaaattttctaaatatgtgatacaactttatttgagaagagatcttgattcagctcattatcacataattatataacaaccgatcacgcaaacattccattaaaagatattcatatatgaaacaagagtactacatatttaaaatgaccaataccaaatggtgtgtctatacgtaatttaagaaacacaccattaaatcatttattactatatatttaaatagtacgtacgtagtagcattacttaaaaaatttattaggcaatggactttgcccatcccttcatgatctttgtattccactcctcgttattaatagcaaccacattattactcttgttcattaatagagtttctctcttggcagcttcaataatattttcaaaactttcttcatcatcggcaagaagataaagtggaggcggcggcggcggttgatctcgctggccgtcttcaatatggatgcaacattctccccaatccatgcccgccatcgccaaagcttcaattgacatcgaatatattatatagtaaatttgttatctcataacgtaaattattataataatttgtgaaatatttatgcaagtgaattatttatatgtgtggagatcatatatgttaagggcaatatggttatttcttgatgaactccattttagggaactgaaatttaaaaggttagaaatggtcacgagattttccacatgtttaacaatgaaattaatttaaaagttgagcttgtgacatattggttataaattcaatttgatagagactcctcttgcttctaattcatttcatttgtgtacgtacgtcatgaataacatatattcatatcgagatatttatgtgtatatatatctactaattatctccatccatgcatgcatattatattatcaacgtggtcaaataagagaaagttttaacaaaagtgaaaaatctaattcaatgtttccattaattcttgcaaaactttttcttaagtatattataaagttaagcgagacacgggtttcaaaaatattagaagaaatttcattgactacttttagcacttaattttttttataatttatgttttctattttctgtgtgacataagttatggcgtatgtaatattcttttatgaaatatataaatatgaatgtatagggacacgattttatcccgtgatgtactttcacgaaatgtattccataatgtacgacagctgttaaatgggggagttatttgatctgagggctggggttgatctaggagtaattagggttaaaaaatggtaacgtaccttgagcctcatctaatgtaccctgagacccatctaattaatgtaccacggaatacattctgtgaaaatacatcacgggacaaaatcgtgtccctacataattgtattgatccactcatcaccaattagttttgagatggaactccataattctcaatatagtatcagagtcatatctcttacaagcaagtgatcctatccgatttgtcccacatgaaataaatggtaaaatattgagcttatggaatatagtcatatattttactttcatcaattatgtttataaaaatattaaaaaaaaaattatatttaaacaagcacaaagtgtagcattggttcacttattgaaaataaattcatcagtcgtttatgattttctctactattatctattaataagcaaattttatatgaaaaacaaaataataattaacaaaacgttataaaaagtaaaaaacaatacaaaaaaattaatatcatatatatactcgtataattttctacagtattatatatttattaataaattaatatgaaaaaaaatcattaagaaaaagaagcaaaaaaattgaaaaaaaaaaaaggaacaagagaaaaaatatggtaagaaaatgtagaaagacttaaaaaaaatagtttaaaagagaaaatagagtaaaaaaaaaggaaatttgagaaaaggaaaaacaaagtgaggttaataatttgtataaaaaagacaagacacacaactccaaacatgataaaaaaactacaaattattaagaattttttttttttttttgaaaaagaacgtttataaagagaaacaacctcacggtcattacaaaagatacagtctggtatagaagagagctcaaccataccggttacatgattcgtgaaagcccacctagaaatattgtgggccgcgaaattacaaagtctgaaaataaacaaaaaatatcaacttaacaaaagagcagagagttgtttacacatttgaatataattaccaataccctaagtggattgaactccctttagagcattgataaccttctcaaaatcaccatcaactagaacaaaaaagtgcttcatcaaaattgatgtctccaaagctagagtacacgccgcaacttctccaaaaagtagatccgagaaattgagcatgttaaccactacccacaaaatagaccctatatgatcccttactaaggccaccgcacacttggagctactaccaactttaacatcacaattgattttaatccaatcagcaggaagggggaccaaataggaggcacagctaatgtcgagacaaacaagcaagatgcataatctttataaaaaatagagatagaatcaataaaatgtttaatgttacccatggaattattatgaaccttgtcgtttcaagccctccaaatagtatccaccacaattgacgcatagaggaataacttatcagtatccactccttttgactataaattccatataaaagtcacccagtccaaacacgagtgatagattcagaatcaggcataaagccccaaggagaagagacctcctcaaccttgattcttttaccgaggatggcccggatgggcagagcgttggagagaatacaccaccagaggaccttatgacgctctagaattttggagttccagagcttgttccaccgagcaggggccacaacgcatgcgagagctctttctaaagcttggacaagataggcagactttgtcgagaataatccacttggctcatttgcccacacccacctatctctgcctttgccactaggtttaccattcttaataatgtcgtaaacagttttaggattaaacagaggttgaagtttagggatgttccaatcctcattttctaacagtaaccctgccaccttcgtaaccccttaaccctagaagcaatggccttagggtaaaaatcccatccgtggataacccaaggatcagtctagatattagtctctttcccatctgaaattatcttgcaagcacctttcttaaggatctctttggttttcaccacattcttccagaaccaagagtcagaattcttataagcacactcaaagaatgatttgtttctcagatatttagcttttagcacttacaacacaacgattgatcatcgttcaagagggcccatccccacttagcaagcaaagcttgattcatttctagtgacttttggaaacctaggcaacccagtgactttgggaggcaaagtcgatcccagaccttcaaatagagacccatgttacctgggtcacaaccccaccaaaaatctctaatcataccatcaattttggaagctagcttctttgagagcttggtagtctgcatggtacagatcggcatagctagcctaacaaatttaatcaaagtagcacagccctccttggacagagtttttaacttccacccatggagcttcgagacaaggttctcaagaataaaattaaaatctgcgtccttatggttggtcctaaataaagggagtcgcaggtagctaatattactgattgcaatgttgagaccaagatcctacaagatgcctattatattattctatcaacttgataaaaggaaagctaaagagtgtaaaaatactcgtctggttcgaaattgacatttaaaggcaatcttttgataaaatctgtagctatatcatttattacataccatttaataaaggcaattttaggatcagaatttaaattgcaagaaacccctctatggcatcaattttttcaaaataaccgacgccatatcatatgttgacacgtgtttttttttaacatatgacatcagttatttgataaaaactaacaccaaaaggttatttaacaaacccattcaggactcgacctcagtttgtcttcttcatcacaaaagagcacagcagccaccaaaaccagaaacccaccaccaaaaaactcttaccaaccaccaccctaaacctccttatctccaccattttttacaccattttaccctatttttattttaaaaaaaaaatcttctatttttgacacttatttaatctttacacccaaaaagttttttttcccctatttcactgtaaaccgaacctattaaaaaagttggtggttataactctgatcaccgatttaaatggagaaaatattgaatttcaacgtccattaaggtataaatatgatttctattcattttagcagggccggccctgaaaaaatgggggcctaagacgataaaaaaatttgggcctcttaataaataaattttaatcaattatatgttacatttcatgacataaaaataaaaaataaataaaaaaaatctgaaataagttcttaagtgtcataaaaattagtagatttgtatttttttatttactctatcatccatagtaatatttttatcttgcccaatttgatcaacatacaataaatcaaattcataaaaagaaaaactatctagtctatatttacctatagctaaaataatttttaatacctacattagattataatccata

SEQ ID NO: 79502 - DNA, 970 bp, Cannabis sativa
catctccaaaggctttttcagttcaattccctccaccccaaaaaagtgacaacgaagagtaatgtgatacatgtgttatatattttgtatttggcttctcattttaccacttttaccttgcatgcaggcttccgataatgtgaacactcattttatctgcttcacatgtgtggatggtatatcctttgttgactctttatctctgtttgtgggctttatagttaaatacattcctgtcggaagaattttaagtggaccatttatatatcgacttacatactaaaccttttcataggtgttctgtatgagcttgacggaagaaagaccggaccaatatctcatggggcctcttccccaagcactcttttgcaggtattactcctgtacaaaaatgatataccgggcaattaggatgttattatatgattttggtaaaaaaaaaaaaagcttcttttgtttgtgctctttctactggtaattttcttgtgttcacttgaacaggatgctgctaaagtcatacaaggcatgatacagaaaaatcccgactcactcgactttaatgtcattgccctttcgaagaaatcttgctaaagttgctactgcgagatcatctgagcgccatatgaacggtataaaattttagtgatgtaactgtgctcaagatagttgtttaggtcactctatctagttgttttgtgggttcaatactagaatgtttatcattccgaagcttatggatttattggcatgagctaatacaagtgtgttggtttagatggtaggtacacaactatctttaggggacataatataataaaggtaattgggttgaatagtttttcgtttagttaatttgtagagattttagcgaaatttcagtatgtggtgtaaaaatcgcaatagcctatggactcattgagttggcccaagaaaaaatcgcaatagcttatggactcattgagttggccca

SEQ ID NO: 79503 - DNA, 1362 bp, Cannabis sativa
  modified_base (1286)..(1292): a, c, t, g, unknown or other
taataaaattacactttactaatatggtatcagattttccctctctctagccgacctaatcccctttttttttcagatctagatccactattttcggatcttgactggtcctctcttttctcactggttttcatggcttgcactcaccaactttctcctgctgcaagctccgacgtcacttcggtctttcctcctgcggctgctcccgttgcctgtcatctcgtggaagattcctccactgttcaagacctgatcgttcttgctcctgaagctccgatcgaaaacacaactgcaagctccgaccacgtcgccgtcgactccaccaccgttcccacggtgtctcctccctcggtccttcccgctgctaccacctttgtcgtcgaccacgtcgtcgtcaacttcaccaccgttcccgtggtgtcttcacctgtttaagaaccggcccctcctcttgttgatgctctaatcgaacgcgcctccactgctccagatcttttgcgcaatattttgtctccatctcaggtcgatccacctccggttggacctactttcatggttgcttcggtcatctcttcaagatctgtccctcccgtgacgaatggtaatgctcttctcactcattctgtcattcaaaatgttgactctatttttttgcagccttctcaagatcggggttcccaagtcaaagggtcggctgccaatcatgcttccgcttctcactccgttttggacaaacttgctttgctgcaagaaataatttaacaactcatccaacagattaatcatgctcaatagtctcagtcaaccgtggatgtcaacactccattggcatctaacctaattggtaaatctgtatcattctcaaataatctctggattattgatagtggggctacccaccatatttgctttgataaatcttgttttagctcttttgataatatccctagtgcctcacatattactttacctaatggcataaaaatctctgttactaaatttggtattgttcacattaatgctaatttttgtttaaataatgtgctttttgtgcctaattttcagtttaatcttttatcggtcacctctattgttcaagatccaaaatattctattttattctcacattctagttgctctattcaggacacgagtcggaatctatagattgggattgctaatcgtgttggacaacttttctttattcaacaagaaaataacgctacttgtaattatgtttcttgtaatgatgtatacaaatggcatttacgcctaggacatccctnnnnnnngattactaaatccttgaataaaattcttcattttgatgattctgactcatctttatctccttgtcatgta

SEQ ID NO: 79504 - DNA, 2886 bp, Cannabis sativa
tgggtctgttcgtgcggctgtttagccgctgcttccttcagccagtccccaactctcttgtggacttgtattgggtcaatagctattgggcctgggctatcagtatgtgtgaaagtaatggtttgattttgtcggcttaggttagtgatacagggtttgttagtaaggaaggaaaccttctttagccctgttccttcgtttatgtcaattttttttttaaaaaaaaaaacagtgcaaataagttctagttaatgtttgaactttgaaatattcgttaaaaaatgaaaaagtcaaataaaatgtgattgttacttggtgcaaataaatatagaatttaaaatatgtgagatccacgttgatcaatgttgtaaaagtaaaattcatgaaatcagttggggatttttatgatacatatagaaatagattaggatacaaggttggtagaatagaagagctatatgattttggtttccttgcttgtggatgccacacgcttctgttcgtcgtcttaaaaaattgaagattacgtatggttagttgtgactgccacacgcctccactcggactctaatcttatcatcaaaagaaaaggaagaagggtcacgtgtcattctcacgtgacacgtctcattgcactagtaaggcgtgctctgaacacgagccctcttgtgtctcattctctcccgccacactccacatccttctcccccaaactttcctttactctgtttcatccctaactctctaataatccaaattatttatttattttttaaataataataatccacatatgtacactcaccatatttatacgtataagtatacaatctcttgttttgctcaagaccctttcgatttcttctcaacatttatttctcttagttgatcataataccaaattcttcttgtaattaagcattttttgttttttttaatcaggaggtacgtatattacatacatacacacatatatataaattatatattctttgatttattcatagacaaactttgaattctaaaacattgtttgtttatgatattaggaatttagaactgtctgaagctcaattatacgaagatgggttcggaaaatgctgttcctttggttgaccaggtcaacgtgatcgttgaggcctcgtctgaccggtaaagactttagattttcttcaaattgaaatggtagcttttcatatattcttttctttgaattgtgtatcatgctaatatgagcgggtatgtttaaagccaaatcgattatatatatacacacagattcatgctttgaccccaatttatatgaaacttcaattatatatgttttttttcaccatctgtttgaattatggcttgtaattgtttacaaaacaaccaaactattgggttggggcttaaattcgaatatttatatgtgaattgcgagtgttccatgtgactttttgttctttaaatgatgaataatgttattggacctatgatcagggattatttggggaaaaagaatcggaggaaagttcctaaaagagtccataaatctgagagggagaaaatgaagcgtgagcaattaaatgagctgttctttgagctatccaatgctataggtaacgtctctttctcttaataaatcattatctttcatttgttctttttatttatgaatgtgatgggtagcattttacttagagaggaatgtctcttacagaattgtcacagccaaacaacggcaaggcctccattttgtgtgaagctactcgactattaaaggatttgcttgctcagattgaggacctgagaaaggagaatgcctccttgttatcagaatctcactatgtaagatccttaaaactttttccactattaatgtccggagaaacctagttatcagaacattaaagattaagatctcttttcttagtctgtaaaacattaaaaacaagagctcaagtccttaaagtcattaaagagttgtttttttaacaatttgcctaatctaaaacaataatttttgtcaaaattaatgatgaaaatgtctgccggtgcattctgtagctatttttattttgtttttctcttctaagagctagaataaaattttgacacaattattagatgaaacagagaatcacacacagaaacttgtagatcactaaatcttatattgctcttactatgtactgatacaagctgtttgaaactcttgacacaggtaacagtagagaagaatgaactaatagaagagaactcagcactagaaagccagattggaagactacagggggagctggattcaagggtggtccagttgaaacctgacctgaatgtatcgccctctgattcccttgccaggcctcctaccgaacatttgggtcaatcgcatacggtcattgttgttccactaatccctgactccacccaaatcccatctaatcctacctcaaacgtgagcaagcctcatgctagatatcccacctcagccgattcgtggccatcccagcttctaagggagcagcagccgaaaataggcgaggagctagttaaagataggactagggaacacagggaaaataaaccctgaaaatgtgtagtgtaaattatctattgttgacgacctgaagtttcttggctctttttttgtttattttttcaaaggggttattggatttgttgtgttggggttgaggtttgtggtccatgataatggaacacagggaatataggaataaatgtgcacagcttcttgagaatgtataatttaggttcaaaaggaaataggaaagaaatatttgagaatcggaatacctgtctctgaattggaaaatggctgttcattattcattctgttttttgagccatttgtccattaaaataaattagaaacttaag

SEQ ID NO: 79505 - DNA, 2748 bp, Cannabis sativa
atttcatgaaaaatcataaatataaaaaattacagcaagcaaaattactgctagtctgctaatgatgaaggctctgaggataataagactccttgaatctatgtcaattttgttggttagagaaatacgaactcataaaatattgatttaactatctcattggttctctagcactggaaaaatacatactaaaattaaaataagaataaatcagcacaaatactgaacctgctcatggttgataagagagcgagatgaaggaggccgagagaagccactcagttgagctattgcagcagcaagagcatctgttccttgttcatcaataagtttttgtgcagttggggtgaaatacttgatcgattcaggatgaactccactaagagtggcaaccacatggtcagcagatgaccccaaaacctcatcaatagatggtgggctgacaaactcaaatttgcacccaacatcacgctcaagggatcttattgttctcctttggttactagtaaacatcaaaatagcagaaccttcttttcctgctcgtccagtacgaccagatcgatgcacaaaggtttctggatcattgggaagttcatagtggataacctaaggaaacaagtaaagaaggaatttataataagcaaaaagaacaatctagatttctgtgttccacatgctacataaagaatatatagagaaaataaatgttaaagctaatgatccagcaaattcttattaaaaaaaaaagtccaacgtatagttattgttatctatctgctatactctactgtctaattagttagattgcatatttcttttcaaatttactcatactgaatcaattgaaaaaaaaaatgaatagagaaacacagggtagcaaaggatctatttaagtgagaaattatgataacaatatgataccatccaaaagtatggtacataccaaatcgacattaggaatatcaagtcctcgagatgcaacatcagtggctacaagaacagtgaatttcccttgccggaaaccgtttaatgttctctctctctgatgctgtgatatatctccatgtaatgcctcagaggctatactatttgttaatgacattgagacttcatcagcatctcttttggtttgtgtaaagacaatggtcttcccaccttttgcatacacctgaaaaataaagttttcacagttaagaaatactggtcctttctaattgtaaacttaactaacaatatacattattcagttatacaccggaagaatgacacagttctataggggaggagataacagcagcaaggaagtcaaactacaacagcataccatagtagtttcatttcattattcaacaggagtaaaaaacaattctttaaaaatattataagcaaaagcaagaaaacggaagccaatactcacagtaataagatcgccaagaatggtccgctttgatgttgcagttgttgataaggcataaagtttgattccctctgcaagcttttcatcttgctcaccaaccttgaagaaaagataaaaaagaacatcagtaacaactttctaaattaatattccatactaacataaggtgtagcttatcaatgatatttgataatccacaaggaatggaataatgatattttgaatttaacttaagaccaaagacaaaaagtaccaaatcaatagtcattggattgtccaaatgcttccgcgatagctttttcacccaaccaggcatggttgcagaaaaaagcatactctgtctctgagttggaagctgttccaagattaattccacatcctcctcaaacccaaccgcaagcatttgatcagcttcatcaagaaccaaaaactgaacttctcccaatttgaggcttttaccatttatcagatcaataattctaccgggggttccaacaactacatcgactccacgggaaagagcactttgttgcgtaacataagacacaccaccataaacacagacagtacttaaatgagttgctgattctttgatctccttttccacttgttttgccaattcacgggttggtgcaagaaccaaaactctaggtagacgaccactccgcctgtgaaaagtatacagtaagttaagaaaacattcaaacaaattttaaaggaagccgagtctaataaatttcgcatattttgtctacctctgagaacctctttgttgttcatcatcttcagtgagtcgtttaattatagggattccgaaagctagagtcttcccagttccagtctttgcacgggcaatgatgtctcgaccctctaatgctgggactagcacggccctctacattgttgcagggaacagtaatgtgtgaatcattaataagtattacttcacagaaaagcgaactttgaatggaaaataagtgaaatatacaaaacaataacaacgaataaatgtaagttcagagttcaatgagaagtaaatatattatagtcacattgtgtttgtgtagctatataacatatttttccagcgaatgagtagctcaatttaatcatctaaacataataatcaaacttgagtcgagcttgagctagctaaattggagttaaaacgttaagaaaaacagctgaatttccagtaggcgcttatcaaaaagtatatactatgtatttgtatgtatatataatataaatagataaacagctaaaatttaattaagataaatttgtaaaagctaaagaaatgaataaatggtgaagaattgaacctgaat

SEQ ID NO: 79506 - DNA, 1822 bp, Cannabis sativa
gcaatgtgaaaattttttatattttaaaattgttaacattggagatgctctaaatggttcaattttaattaagaatagtaatttaagtcacgacctgcaagtttgacatgaatacgactcgagattttatgagttcgacatggtacaatcgtgttcgtgttttataaatattttgtgttgcaaattgtgttcgtgtcagtcatttaaaataaatttaaaaactccacacgatacaataacactaaaaatagcaattcagcttattatctgccaacacaatacgagattttacgggttcgacacgatatgaaatttatcaaatcgagttcgtgtttaacaaattttttgtatcacgagtcgtgttcaggttaatagtattcgatatgccaacacgaaattgccaccctaatttacccaataaaaaaaatcaaacctaagaattttgtaagaaaaaaaaaataataagaattcaattgctataacttataaaacccagattttaattgctaacttttttcataactatttgtttgaaggttcttttgtaattaaacatgaattctttatgtgttatttgaacattttttaatagtttatatttaaaattaaaaaaaaaatcagtaattacgcagtatcattaaagaataaaaaagtgtaataaaaatccctcaattaactcaaattaaaaattaaaatccaattctaccatagctttccaattcaaataacaagctcttattaatgtattcaatttatgtttgaaattcctaaacttttatgtaaactgaaacttgaacacatatgaatcttgtacattcataaaaattatacatttattttatatgtgaaccaaaaaaaaactaatctgagaaaaaaattacttgctcagttcctaaccaaaaagaattgtattacagaagaaaaaataaaaaacaactcttctagactaataacaaagacaccaactcttcttattttccttgctcaaattcttcttggatcagaccaaaatgtgtttactttctcagattgttaagaaaagtaactcaaaaagagaaatttgtgcacaaaacaaggaaaaaaacagcagagaacagcaaaggaaaaaagcatagagaccctttttgtgagacttcaaatccttctgacccttcttccattatgggctctaatttagtatttgaagaagaagaagaagaagaagaagcttttttctgagatatgaaaagggctggtgccacttctccccaagttctcatgtttttcacttccttcaccatattttcaatcccaaaaaagagtaaagattggatttttaagatttcttttgtattgaaaagattggatcttgggtttttcgatggttttagattgtttagagaaatgggttttctttttttagttcttttgtattgtaaagattggatttttggtttttgtttgagagatttgatggttttagattgttggggaaaatgggtttttttctttctattgagttgagaaagttagaggtgaagagggagtgtatgtacatatatatagacaaatataatgattttcaggagtgaccaaatgatagaaagaaagagagaagaaaggactaggaagcttgttggaactttcaaccataaacaacaattttttttttttttttttttaatttgagggtgagattgcattatatatttattagtacttatttcattttcagctatgaaaaacaaaaaaaataagagtgctgaaagtttaattacagaaggcatttgaccttttcaaaattatttttgggttaattttaacttgaatattgtgaagttct

SEQ ID NO: 79507 - DNA, 1258 bp, Cannabis sativa
ttatattgctttatcatatatttgttactataaatcatttatcgcttataaaatagactcgttgtcattggctaaaagcgaggtcaacaagcctcatcaagcatctgaaaagaagattcatcaagacaagtactagcacaactaagaatatgatcagtagcttcaatattagtaccctgggaatcaaaaagatttttgtaaaaaagaagaaattgatcactgatatcagcagtattaacaacagaagaaccatcatctaaaataagactatgaataaagttatttcgagttctagaagaagctttagaattaaaatatttagtaatcttatccccaacttttaaccaattaatcctagaacgttgcttccaaaaaaacctcctctttacaaagaagagagtcaatctgagattgaattctttgagcctcccgaatatcaacatccaaaaggggagatttggaaaaaatcctttctaaactagactgaagattgttaatatttcactgctagcctagacgaacagtattcttaaagtcattctcaacaaaccaaaaattttcacacataaaccttttatttctaggaacactaaaagaagggtccttaatcaaaacttttaaagtcctatgatcagacccataaaaacctaagtgatacaaggaggcatacggatagagacttaaccaattctggttaacaatgcaccaatcaaggcgctcaaaagaggtaccatgcttccaagtatatttattacctatatatggcaaaggggatagattaaatgtggaaacaaaattttgaaaattgatcattgcataatgaggaggattattcacattagacctatcatttagagaaatattatcattaaagtcaccaaaaatcagccaaggcaacaaaggagccacatcatatagccaatgcaatagagtccaagtatgcaatttttcagaaacataaggagaaccataataacaggaaacttgccaacttatattatcattaatattaacataacaatctatatgattagaggagtaattatttatagttacatccacaacagcattccagaaaagcaacaacccccccccccctaaacccatactaggcacctcaaaagcattatcaaaatgaagcctagacttaagaaaagaactagaactaggtccttgtttagtttttgaaattccgtattttaatattcccagtttgattatttaattaaatgattaattaaatgcggaataataaaac

SEQ ID NO: 79508 - DNA, 1534 bp, Cannabis sativa
cagacctgtgccattgccgacaaaaatttggtcctgaccattgtagtctgctgtagtcattagattttgcagatcgagagtacaatggttcgtggctccagagtcggggtaccaattactatcctcagtagtggtattttgagccaaattagcctgcattggtgaagtttcagcaggtgcagcagctcctgtaaagctcttatcaaaacgataaaagcattcgagtgttgtatggccaagcttatgacaaagctggcactgaggccggttgtgattttgtgctggttttcccccccttatgccaaaattaaagcctcttccaggattataggaggatgaagaacctcgaaagaaatgaccagggtaaggtgcacgattagaaggcatgttaaaatagtttggaggaggaaaatttgagtaagagggataaaactgacctctttgagatacaggaggcctgaaattcctgttatattgtgcaatattagcttcatgttgcagaaaaacttcagaggattttggtgttgagtcgacagtggcaagattaacagaatgctcaaattctttgtctgatttttctattctcgactctgaagctagaagcaaagcttcaatttcaccaaccgaatactcttcaattcgagtgtttgaagagatgataaaagtatcatagtcactcagtaatccttttaagattgctgcaatgtgatcacgacctgttaaggtttccccaactgaagccaacaaatcaacatgttgcttcacttttaacaggtattcatctaaggacagagagcctttcttgaggttttggagtttggttttgaattcaagaacctttgatgaaacttgaagagtataatgcttctctagagatctccatatctgattggctgtattgcatcccaccatccgaatgagaagactctcattcatagaagacagcagccacgaaactaacagctggtcttaagtctcccagttcaagaactcaggattgtagattcttgcagcttgatctgcatcagaaagaaattgtggtggaggggtagtgtcttgaatgaatctttgaagctgatgttctcgaatggcagcaaggacttgctgtttccagaggagaaagttgtgatcgttgagctttacggagagagtgtgactgaagtagatgggggtgcgaggatgctctgtttctcgatttcgattccatggattcgcaggtggatttgtagctggaggtcctgatgaagtgttgccaccaccattaacagcaacattcgccattaatggagaaggaggctctaataccatattggatctagtattgtatcgtgccatgaatggaaacaaagagaaagagaagaaaggaaagaaagagaaagaaagggaagctgaaagagtagcttgttattgattgaagagagttacagtttatatacaagcaaaaataacagaaatcagttggatgaaaacaaactaacacaagacagctgtaacaagaactgtaacaaactcctaacaaccataaccaacttag

SEQ ID NO: 79509 - DNA, 4155 bp, Cannabis sativa
aaagatattctttaggagaagaacaatttgagcaccgtttataaatagtattcttttccatctttaaaaaagccttattgattacctatgacaaaatttgagcacttattcaatttaaacgagttcggcgcaaattaagcttggaatcttttagacacttgagacaaaaccagatgacgatgattacgtttttgttctctaatcactacttctaaaagaaataatattatatagaagcaaacaactatgtcatataatatatacgtatgtgtcaaaagattaatagtggcgaaatataaaaataaattaaaagatatggaaataaattaaacatggtgtaatttttcttgccataaagggaaaaatatacttggaacagaaagacaaaaccttcatcagaaaatatatttgcagtggtgttgttggtgtggaatattaattatattcatatataaaaaaaaatatatgtgactatgaggtataaaagtataatgttatataggaattaggataattagaaaggattatgattccaagattttaaaaatctaattaagtaggttgcgttaaagtgccgttgtaattatacactttatatgtatgagtttaataatataaaatatatttataccaatgctacataatgttgcccaccaagaaacttaaaaaaaaatctcatcttccatggggatatggaactattttcaattcaattttggactgacatgaccacttatttgatcatcaaaactattaaggattaaacatataccactaatagcaaattccaatgtagttgatgacacccaagaaaaaataaataaattaaaaggaaaaagaataagaaaactagagaagaaactttttaccatttttaagtgttgaactatgattaaaatatatatataaatctatcaatatcttatttatttttattttgttttaattaatttttgtggcagctatagagtctaagaaattgaatagatatgggaagtgttaagaatgattattgcagttaattgatttaataaaggatgaatgagtagttattcaactcatatacaaattcattcttccttttttcttttttgattaaaatgttttcaactcttttcatagatggaaagtttagggtgggaaattctaaaatattttccttttcagtatgtaatacttattaaaaggtcaagatcaggcaaagcctctcacactcaaccacattcatgcaaattacttagtacattttattaaaacattcaactttttcatattccaccgaaaagagtttagacaaaaaaagaaaaaaaagtagtaaaaggaacggtcacgatcatattgcaggtttactcattgcacttacattacaacaattattataattttctaaattaataaaaataaataagattgcaaagtaattagagaaaagagagcttactttgggagaagggtaatcgagttttcgaccataaacgatgtggttctcattctgaaggtccaaacgagtaatattattagtaggagagttgttgttgttgtgtgatgatgatgatgatgatgatgacctggacctgagaaacttctcaaaaatagccataagaaggaacatggatatgagaatagcagtggccacaaacccaaacgacaccgcattgacagagttatcaacatgcctccagtactcttctctttctgtgttcaaagcctccatcactgctggtgcttctggagctatggggagcctttcttcacccattaattttaacacttgttaatttctaatgatttatctataattcccaaaaacccaattggcattctctgttgtttatcaaaatttgaggagtgagactgcgagagcatacagtatatgactgcatgaattataatgagtagcaactatatcaacattgggaaattaatacttatatatatatagttacaaacaatttttccccttaaatttgagcttcgtagtggtactaagaaactacccttaaaaaactaaaacaaagtttattttagagagagaagagagaaagagagagagatggctggaggctgaatagaccggttctctattataaaccaaggagagttttgagtgtggggtcacctttgattaatttgcttcttgactagtattggttataaaatcacatacttaattacataaataacaaaaaatattaaatatcaataatactgtttaacaatttattaaaaattgtattaaaataaatttacttatatatgtgtcattttttattttcttgaattccatgatggatatgtgaatgaattgaatgattagttaaaaggaaaattcacggccataaattatagctaatgatgataacatgtatattaatttcttcttttacctacgaaaaagcaaccaatacatgtaatagattgtaattaatgagatgttatcatggtgatcatcatattcatacaatacgacctccaaattttttacagtcaagtttgattaataatgtagctaattttcttcttttattttttgaagggttgtgatgaaattgaattggtgatgaaatgagctgtggattataagtgaacggtcaacgtcgttgtagatgaaccaaattagtgtaattacgtgcacggggtacccgagggaagatactgctcaatttgggtgtgtgggtcagatatatttcaggtcagttcatggtcagaagtgggcccatgggccccgtgcaggtttgggcccatgtgcagcagctcctttacctttcgccttcttttgctccctccctcttcagtcctcctcattcatcaactttctcttcttttcatgtcttttccttttcttttttctttattaaaatattattatgtttttctcttttccttattatacgtaccaatacaatactgttaccacacttcatctcttgataagttactgtttctatgtactaacttgtttaacattttcatttttgagtgcatgggtaaatgggactgctatttatgaatttgtttatggttttgacaaaagtaaacacaataaaaattacgctttattttacttattttataacacataattactaacaaactatattgtatacactactttctactcttcttatgggtctttgaaacttggaaattatgaagagataatataaggataaacaaattggacctagctttaagaaaataaaaactatatgggcctacaggcgataactgtataataagtacaaaactataaaacataaataagagaaagagaaatgctggcccaatttttaactctactcatagttaatgtctcttttttaaaatagtaaaacaaatgtattttttactttttaatatctaaaatatcttttattccttcaaaaaaaaattatgaaaaacgatgcagagcttgatcaatatatggagcatgtcttccatcttttccaattcattccgttttgtttaagcttgtcttaggaatttctgtcatttatccaaaaaacaatcaaaggttattctcttatctaatttttctctctactgaattttttcaattattttctcttacgttttcctaatcgaaggtgtgaagaagctctcctcattttttgattggatttcacacttcaagcttacagatctaaaattatagaggctgattccaaacaatgacgaaagctccttctctctcaaaattttctgtttccttcgtcgaattttttgatcattgcctcccgattcttttctctcctctctttaatttttcaaatttgttcatagaagtttgttttttctgcttttctttcagtatcataaattctttcttattaatgttttcagatttgatttgtaactatatgataatttaattttgttttgttttgctgctcttttatttttattccttattacagtgtttgccttttagattttattgttgttcttgctgtctaatatgttattttaggttgtgctgtatgatttttatttgtatcttatactggtattagaaattgtttaccaatatatcattgctctgaaaaataatatacctcattattagagggaaacttacaaaaataatgaaatttgagttaatttttacaaaaatgttgtcacatggaaatcttttcaaaaatactgtgtatttat

SEQ ID NO: 79510 - DNA, 1832 bp, Cannabis sativa
tacaatacaagcagttcaaatcataatactcaaagcaataacacccatttaaacacacaattttacctttaaagtagaatatacaacaagctccaactttagaggctttgcaggattattggggccaagaggaatgactacagcccaactgcaattgacataagaatgaacttacatgtgaactatagtatcataaaaacagaacaacggtttctcgcttgatgaaccaattatgcatctatagataacagatgaatacaatcaaaagaactaataagcaagaaagaaagcaatatacatacatttttcttgataacagatgtggagctagtgctccaaggaaacctggaccataaatctcccgaacccatccggagaaatagcatatatgattctgaaagcattaacaaaagcaaactttggtcatgtaagttgtaacaacctactgataaaataaagaatgaggacagtgattgtgagcatacctcaagtgtccgaacaacttcggtatggccatttagtctagcaacatcaagtggggtttgacaatcatcatttcgcactaaagcatttgctgaaacattaataagcaaaatgatgtcataatcaaaaaaatatacagaagcaatgaggttttgacatgtaattacacaaaacatatacctccatgggagagaagtaatgcaacagtcctttccaggcccttttttgcagcgtgatgtaaaggagtaccagcatgacgacctaccagaagacaatgaaaacttttagttcagatgttaaagtatctactttgaagctaaaaacaaagtcttttaaaggtatacttagcaacctcctcaatgacaaaatctattagagaattatcatttttaagcttaccaggacggtaagcattaatatttgcccccaactcaatcaaggtttttgcagtatcaatcaaattgggattcatacacgccacaatgagaggattttttccatctctatcaatccactgttacaaaacaccactcaaatcaaaaacttaacatactatgttgatatgttgcaaaaatagcaagtaaataatctaaattttcagacaaacccatgccaaaaaacttccatactttccagtcaaattacatcttccaactccaaatgaatacttaagcatacccatttatcaatttttctaatcaaacattactttgtcacaaagtctttacctttatcccaatgttgagttcaatccaaattttcatcaaaaacccttatcgaaattttttcataatttccagtcaaattacagcttccaactaaaaatgaatacttacacactcccatgttatcaattattctaaatgaacagtaatttaccacaaaatctttacctttattatcccaatgttgggttcaattcaatccaatccaatccaattgttcatcaaaaacccaattggataaaaaaaagtactaataattttacctcaaggctagcaccctcttgaaagagaaccttaatggcgtcgacattgccagtggcaaggaccaaatcataaagcaactctgctttggagcgttgtggttgttgttgttgcggttgcctcattgaatcaagactttgacccatcgattttttccttttctgtaaagatcgaagtaaattgaaagagcaaagaaaattataagaaacgagattggagagagagagagagacccaacaagctcagaagaagcttaacagagaaggtttgttcttcttcgcggtatgactgaaccattcacaagctgccatctgtacctgtaaaaatacaccttaattttactaatttttcataaaaataaaa

SEQ ID NO: 79511 - DNA, 2726 bp, Cannabis sativa
  modified_base (35)..(42): a, c, t, g, unknown or other
tgtttgcaatccctgtggagacgatcttacttatnnnnnnnntacttgtttgactgcgtatacttgcgtatataattttcacaacaagtttttgaattcatgtatactgtagtgtctattttacatttaaccgattttttttaatgaaagaaaatgaaatatagtaaaaaaatcaaaacataaataatttcagagtatcttattttagttctttacttttcatctatagtggtatagtatttaaaaataattataactacgatggacgtttatgcctcgatttatcaatctattgatcttgttgccatttgtacgtctttaagggtattattttacttttgcttattgccgagctttgtaatggactttgtatatagatttttccttaattaggagtttcacccccaaaaataatttgtgtagctaagtgtacctctaagtgtaattcgagtaattttgttgcaaatatttattctatttatagtaatattgttgtgaatattatttttattgttttgtattgctggggatttcaaatctgaaatagatgttgcagtggtggtggtggtggcggtggtaactatgtaacaagagaatcttgttagttcgccgcatggttcgatgccctatcctcgtcttagtttttaatttttaaggtttttctttaaaaaaaattagattttttggctacaaaattttattttgataattttattcacaaaaaaatgaatgttgatatcttaaagattttttttttctagtgataaaattttcagctttactaaaaaatattgttgtgaataaaaattagatttttttctagtatataataaagatatatactaaaaaaaatggagtaaactactctgatcaaaacttactactagatattgttcaaaaataaaataaaaaatcttactactagataataggatagagttgataaatctaaataaaaaaaaaattaaaagtatatattaaaaatatctagtgtgtgtattataattttctcttgcaaagaaaaacattatgtatctacttatggtagatattaattttatcagataactacaatcgatagagctcgatacacaaatattttctttttttgaaaaaatcacagtccaaactttgtaatatctgaaaatataaatttaatgcatatataccaaacctagatttaagatatattttagtataatctatgaccaaattatatctaggtatttactaattcttttttcaaatattgtgaaggtttttttttcataactaattaattaagttaccaattattccactactacctttgactacttatcctttataagtaagagaaaaaacaccaaagaaaatcacacaagaaaaacaatggagattaacacaaggcttcaaaacacctctccaatttctatcttacaagcaaatgagttgtttgtcaaaaaaatcctctcaagaagctcttccattggagaaaataataataataatggtttaccaaatttcaacactgcagctaccattcctttcaagtgggaatctcggcctggaatacctaaagatcttcctaaggcgccctctattgagctccatcgagatcacccacctccaataatcgaggcgaggagtgctcgagtagtgttgtcctcgacaacgaggggtggcggtcggggtggccctaggagattgtggaagctccccaacaagacaaatgtgcttaagaagtcaatggtaaataataataataataaggttgaagcgacaacaaaggaggatcagaatgagcggtcgtatcattatttaatggattataattataaaggttcgatttcaggtgttgaatttggttcttttccatcaatgggttcatttttagattattcttcgtcttcacctactatgaactctaattattgtaacattttaatgaggaaaaagatttccaaggtcaaaaatatggctttgggatgtattaatgggctttattagatttagataacaaaaaaaaaaaatattgtgattaaataaataaataaatgtattttcttacaaatagttattttgttttgttaagaaaatggtaattactattttgattcctgtattttgtaaaagttataaattggattctctgttttgttaaatgacaaaatgaactcggtatttttctaaaattgtacaaaatagactctgaactatttttttgtcaaaataaaacttaataataattttatctaaaaatgttataacaaaactagttacattttctgtctgttcgtgttaaaattttctttagttatattaaaaaataaattttttgaaaattaagttcaagatcctatttttactattttttaaaactatttatcatttaacaaaataaaatgtcttaataatttttacaaaacacaggtccaacataatatgaaagatttgctcattatgaaagaatacattgaataactttaattatatgctcatttttttgtgtcatattctcttgatttgattcatttttcctttcaattattatgtttgtttaatactcctaaaagtttcagtatacataatagaattgatgataagaaattaaaattttgaaatcgacaataactatgatatgttagtgtcacgtgatacctttaattggtccaaatgtatttttttattaaaaaaaaagtctttaacatatttaaaaattaaaatttttaaatattaatataaat

SEQ ID NO: 79512 - DNA, 1911 bp, Cannabis sativa
tattattctattattttattaataaaataaaatattttaatactaaatatttgttaaatccaataaattattggtgatagttcaaactgtaaaaattacactgcatcgtaccattttttgcggtgcgatttccgtggttttttagtttcgcagttgcggtttgggaaattagaaaaatcacatgtgtgggttggtttaaaaaaaaatgattagaaaacgtactatctacaccacgaacaccctatttttttagtacacttaaaaatatacaaatacaaacaaatacatttataaaagttttgattaatatttatttataattatttaattttttaagtattatttaattattaaaaagcaaaaaaataattagtgttatctactgtacccagctaaaattgacaaacccaaaattgatgttacttttgccgtacggttggagtaattattgtggaaaatcacattattaatgggtttttgcagttgatggaaatctcaaaagttttgggtaattaagaagatgacaaaaagtgttgtttttctcattttgacaataaaaatctaaaggcacgagtaggattagtctaagtgaatactggtgtcatatatttgaagaagttaaagcaaaacaagtagtgcaaaccaacaaagtaaagcagtttatggcgattttcacttttaggctaatcactgttattttggtttcatacacagtttcttctgcaataatcgagagtattaatgatggggttgagtctttgtacgatggtggttccccattggtttcaaaaggagcaagctttgagctgggtttcttcagtccaggcagctctaataataaaaatcgttacttgggaatttggtacaagaacatccctgtacggacagtagtttgggtagctaatcgttgctccccaattaaggactcttctggtatgttgaagataaacaagagtaatggaaatctgatgcttttgggtgtgaacaaaagcgtggtttggtctactagtttgttgaaacaaacccaacagactaagcttcatctcctagataatggagatcttgtactgagagatgaaatctcaaataccattttgtggagaagctttgattacccttctgatacattgttaccagaaatgaaactggggtgggatttgaggactgttctcaacagacgtctttcggcttggaaaaattttgaagacccttgtcctggagatttcacctatgggattgagctgaatcaaaagcttcataatttccctgaattttgtatgcgaaagggttttgccaaattttatcgttctggaccttggaatggtattggtacaagtggagctccagagttaaagcttaatagtcttttttattataactttgttcttactgatgatgaagtttattatgtgtatggaatgaaaaataagtcagcaatttcaagaattgttataaatcaaaccacactggttagagagcgtcttatatggattgaagaaaaacaaacttggaaacgttacttatcagtgcctagagatgattgtgataactatggtgtttgtggggtcaatggtaattgtgttataggagataatccaatatgtcactgtttaaaagggttcaagcctaagtttcaagagaagtggaatgagatggattggtctgatgggtgcatgagaaatgtgccattgaattgcaaagacagaaatagagatgggtttttgaaaatttcaggggtgaaactgccagatacttcagattcttggtggaacaaacagatgaatctcaaggattgtaagggtagatgtctaaataactgttcttgtatggcttatagtaattcttatattagaggagagggaagtggctgtgttatttggtttggtgatttgatagatataaggcaatttt

SEQ ID NO: 79513 - DNA, 1128 bp, Cannabis sativa
tgcaatatgcattcaatatatccagattaacataaccaaatccataaaagacctttctgtatacagcattgatcaaactcatcatgacttatggaatggaaaataaattcgtagagtcagtgctttaaaacaagtgaatttacatatgaaagcatcgaatagagaatctctacttagtttctacacgagtattttgttaaatacactattaataaaagttcttggattaagaagtttcacaccaatggttttacttacaatatcaacaaggtttggaagatgctcagatagcacagtaatccaatacctaaagcaaaaagaataaccaaagtaagctaaaatggaaaaccaatgatgtatggaaatcttagatgtaatatgttattcttttttcaatattttaaaagaaacagaaatattttcaatttctatttaaatatgatactcactccaattcactgggatctgtgagatcaatcgtgtttggctcatatctgcgggcatataattcaatatatatgtgaatgtcagaaagaattaatagaactggtatcataacaaaaagagcatggtatcaatccactaaagtcgcatcaatagtttaacagctcacgtttttgcatccgccaataatggaaacacctccaacgttggcacaagatgaagtaccccaatatttaaagtgctggcatcagaacgcagagtacctcctttggatgaaggaacttcaaagcctccaagtccagtagttccatgtggagccattggcactggagcaataatctcagttcccttctgcacaaacttctccatccaggaaatctgcacaaggagtgcaacgggatcaaaatcaaacagaggtttacaagaaacccaacatttgatgtgataatttattcctcttccactcctttgctttttaaatcaatacagatccaaaaagttctcaaatttcaaagaacttgtaagaggccatgctctacaaagacatattatagatctagggttggaaaacaaataaactaggtttcagtccttgaaaggagacgaaacagctccaaatgagtgcataaaaacattagtcagctaaaaaggtgactaaattgattgctgaaccttcagccaaat

SEQ ID NO: 79514 - DNA, 2851 bp, Cannabis sativa
  modified_base (1184)..(1190): a, c, t, g, unknown or other
acacctctcatggctcttgtggaggagatgtgacattctcctccacaggggtatgagagtgagccaacccaagagagccagagccgccaatcagaaaagagcctatcaaaggtcgttccaataaattgtttcttccgttggaactcccttcaagcgactcagcagagcggttaatagcgatcgagttgtcatttgataattcttccaacgtgactttagtagcatgttcttgaatagttgtatctcgaggaaagaccagaaccacccccaggtgttgccgaagtagcttatgaggtttagagcaaatagaaaaaagccatcaaataactttttttccttgattggagtagttctagcgttaattatggaagtcgacttgatcccaatgttaccacccacttcacgaatctcataaaggtccaagctcccaacatgtttgagctcatgcaaaaaagtatcttgggcttagaaaaaattagataaggccttttcttcatcatgctgaaagttgacctcttgccaacaaattgagtaactccttaattttaatgaaatataatatgagagtatttttgattaatggataaaaaaagagtatttctaaattaatccctaaaaacaatgtataaaaatactatattttaatttgtaaatataccttttgaaaaatacttgaagctagattgagtttgggcccatataacttctatcaaattcactttttgttttagataactgatcatacaattgaaaagcccaataaatattccgtaagcccaataaagttccttctgattttcaaacataatttgggtcaaagtcttaggtgccttatgtgctttttgtttgtcattttaaacaaatttataagaaatgacacataaaatttcagtcttttgagttacaaagatgtagcattttcacttataaaaattaactatataattatattggcaaaaaattgtagaagccatttataaagctttttcccctgaatattctagaattttttaggatcaaattgtggcattatacctaaacatcaatttattgggtgtttagctgcctcaaatagactaatcaatattagagaacgcttgaagtttatggtttagattactataaatttttttacttttagtcacgacaaaacttgtaagtaaaagtaaaaaaattgtgactannnnnnnatcatcattcttatattgtgactaaaaaatttgtagctaaaggtattagtcacaaaaattacaatttgttatgactaaatgtgtttttaatcacaatttttataactaaagttaaaattagtgacaacttatatctaaatattttagttataaataactttttgttgtgactaattaaaagttacatttaatcacaaaaaaattattttataattaaaaaattgttactaaaagtaatttttttgtaagtgttgttgttttagtgattaattactatattaaccacatgaaagtatggttggaataccaaagttaataattatatttattcttcagcttgaaatgattggtgacatgaagtaagaatatacaaagttaattttttgttgttactaattaaaagtcacatttaattacaaaaaaattatattgtaactaaaaaattattactaaaaataaacttttttataatgcattcttcttgccacagtgtatgagattaattttgaaaatttagaaatattgccatttggaaacacaaagtgatcattacataaaaaatgtaataaagtgtatagttcataaaagaattagtcaatttataattaattcgatccttctaaagctaatactatatagatatagattagttttggaataggttgggtgtgtttgtatttgtttgagccttttgtagtgtcttccatttgttttacaattgcttaatggtggggttttacccttttattacttgtattattttggtatcaataaattttacttattacttacaaaaaaaaaagggcacatggtacgtacgtgtgacatgcatgcatgttccttcaaccaattgaattgagtacgtatgtacaaattaaattaaaaattgtctacaaagtagcaaattaaagtgaaataaattacatataatatacatcataattgctaaaaaatattacttgtgttagagccaccttatgttaatttagatcttaggcaaaaaataaaataaaattgaagcccactaaaaagtaagattgttgggatttaaactctaaatatatcttaattgttaaacttatcaaattagtattatatgtattactatttattttattattaactatattttaattttctttttcgaaagggggcggtcgcttattctttcgtctcacctcaaggtcgaaattgactggtgtttagcactcttttcggtgttataccgctattaatgtaattacatatcgaatctcatatataatttgagaaaagaatttttaaaaaatattattaattaatcctaaaatatcacttataataaatataattattagtgctcaataacaatactcatagtacatcattgcaaaatccttgcgtacacttttcaatttcaaaggatcagtttttaactctaacataccttttccaaattagaacaaaaaacatgggcaattatatttttatatatatatattatattatttccaactacttcatatatattatatatataaatgttaattaataatggtttctaacaacatacgtatacgtagataggttgatcatgtgcctctaccatctatccatatatcataatcaatatgtttgtacgtattaatgtagttggttgtttacagttatatatatatata

SEQ ID NO: 79515 - DNA, 5331 bp, Cannabis sativa
ttttttttttcgttcttgtggtggtggggtgaggaagaaatggcagccaaaattgggtctttcaggcatagttttgccgagaaaagcaaagaaagattactctctagaaagggttactcggactttggcgcttacagcatgaatggtggcgaagaaagagtcaagtgtgggtgctttcgattcatgtccgatggatttgtcaacttttggagttacttacacaacatgtttgttcaattatatgaaatgggtcgctctgatcctcgcaaagtcgtcttcgctactaagatgggcttatcattatcaattgtctcactgcttatctttttcagagagccccttaagagcgctggccaatactccatctgggcaatccttacagtcgtcgtcgttttcgaattcagcgtaggtattagctttcgtgatcatttttttttatctcaatcttcttttattattcaatgatgattttggtgattttcagatcatatttttatgcttatagatgttaagtccgttgggttgtttttctgtttttgtaataggggcaactcttagcaaaggatttaatcgtgctttgggaacattctcggctggagggcttgctttgggtattgcagaagtatctgttttagcagggagattcgaggaagttatcatagtaatcagtattttcatagctggttagagatactagtacttttgttttgtgttttggctatcctttggatcattccttttggcttgtcctcattgtgttttttcttcaatgttttaggattttctgctagctatatcaaactgtacccaacaatgaaaacttacgaatatggatttcgtgtgttcttgttgacatactgtatcgtcttggtttctgggagtaaatcctttttccaaacggcattttatcggttactgcttattgcagtaggtgcttgtatatgtttggttgtaaatatatttatataccccatttggtcaggggaggatctacataagttggtggtcaaaaattttaaggaagttgctggctctttggaaggtatgtcattggtttgatgatgcacttgcactagccttctgatgctaatttagacactaaattgcttgtgttttctttttgtttttaactgtaaagtgatacaaagaactaagccattttagattctttgattaggttgtgtaaaaaggtatttggagtgtcttgaatatgagaggatcccttcaaaaattcttacataccaagcttctgatgatccattatacagcggctatagaactgctgttcagtcttcaagccgagaagaatctctggtatgcttgatgttgtggtggtgctttcgagctctgtagttctcttctttaaataaaagctataaaattttgagccttgtcattgttattttttgctttggcagttggactttgcaatatgggagccgccccatggcccttataagactttcaactatccatggtctagctatgtcaaagtcagtggtgcactaaggcattgtgcgttcatggtaatggcaatgcatggatgtatactctcagaaattcaggtaaactttctactgtagtctttacaatgatcttataggagatgtatgtacttaaggcaaaaatttagatggaaggtttcttctttgaaatatagaatctaatattggcacatcttacctcagttattagtattacgagacatttcaaagtaggattgaactgtctttcccctgaagtaacttgccttattatttatctgtcattgattttggagctgataaactgggctatgatctaggaaaaagaaacatcaaaatataatagatgatataagcatgttatgagaagaagtatattccctttacctataagttttcttatacaccttttaattcttatgaaaccacaactaagaaatatttgctcgcaagtatggcctttcatgtttcatggcaaacacaatagtgaactcgagttttgagataatgtccttttatttacatgtgtcattaagcttcttcaacaaaatgtgatcgaattatttgaagtatagccgaaacaaatctgaagcctttctcataactgcaacctactcctagaatacttaaattagatgaatcatgaaatgtcatattaaaatattctgtggtgcctctgttgatatgctcaatgtatatatccgagccatgttcaagtaaaattgacgtcatttgcttgcttatttaaaattgagtgtggtcgggtatgatgaatggaatataaaaattatacttgtagaaagcaagtcaagattcgaaaaataaatttagtcgtcattacaaatttgtctgcgatgaatggaataaaaattgtacttatgaatggatgtgtttctatttcctacattatgtattacctttccctgttagctgtactgtacctattatattggaaggtaatataaaatatgcatatctgtaggcaccagcagaaaagagacaagttttccgaagcgagcttcaaagagttggtactgctggagcaaaagtgttgcgtgagcttgggagcaaagtagaaaagatggagaaattaagtcccacagacatactttttgaagttcatgaagcagcagaaaagttacaaatgaagattgaccaaaactcgtacattcttgtcaattatgaaagctggcaaggagaaaaacggccaaaggactttcctgatcctgagagtttcatcgatcctagagagaatgaaaatgcaaatttggtgataacatctctcagtgaaacatgggacacccagaatcccatcatgggcattgatcgttccatctcagagatgtccacagataatgtgaaaaaccaaaaatcatggccacagctttcattcaataccagtatcatgattaatgaacatgagtcaaaagtgtatgaaagtgccagttccttgtctttagcaacattttcttcacttctaattgagtttgttgcaagacttcaaaatcttgtggatgaatttgaagagcttagtgagaaagctaactttaaggatcccttgaaacaatcagatccaaaagaggtttctgggttttggactagacttttagggcgcctgccattcatgaatcgaaaaccggattcagctttctcaacaacttcagtttgattctatgtttggacattcataaacagttagtaaagttgatatactagcttgctgtttggttatttttgtattaaagtagatgtatagaagtaactcaaggatgagcctagccattggagaggatgtggggatctttcttcatttttttctaatcttatgattatgtggaaatccaagagcctccagaggcataactattttaaatgccaagatggtggaataaatctcatatggagtaaatgagactgcaatggacccaagaggataatctttctaggggatttcatttacaacattgtttgaattttgttttgttttgtttttttttttttttggatatgttgagtgaagacatagttcagagtaaaaagccaagcagaaaaagtgtaaatgtctttgatatatctcctttatttttccaacaatttaataagcttaaagttttggtgataaacttgattgggtggcatacatgtcactcttatgtttggcaaacttcccctgccctttaaagatcatacttgtatttttagtggttatatttcaaggacttgtattgatccacttcgatttccaaaaataagaatgaggaacaaaaaaaaaaggaaaagatacatatgagatcaaatcccttcccccaactcaagacacactcctcccattgtcagcaatggtttaaactcccctcaattttgattttcttttctatttttttttttttaaaaaaaaaacaaacacattacatttaatgattgtttagtatttttattaagaaaaatctctataattaagaaaaataataagtgcttttctcaatatccatgcctccctttttccgtaaaatataggttaaatttatagtacacttcctaaaatacatgtaattgagatttatatatctgagaagactataaattaccttattaaatttgctattgcatagaatttgataattggaatagaatcatgttaaaccataatcaatagatgcaattgaaatcgaaaaccttaacttttaatcaccgttaatttctttattgatttacttgcttcttatttttattgttttctaataattttaattttttcttaatttcgatataaccaaatagaagtaaaagtttaattttaaagtacttaactacaatccttatgggatcaacctcactctttgtgagtctactacttgttaacgatacgtatacttgcgtgttgagaataccacaacaataaagggtaaaactggaattttgcctaaagagtttacttttgtttttagtgattttgtgagatttttctagtatagtctgaactttaaatttaataaaaacaattaaataacctttcatttaggttaaccttagaaaatataaataaatacaaaacctagttctctctcttcacttcgacaccaaggaaaccatgagattaaggggtgtttttctgtgattattggtaatttctaacaagaattggaagctaagatcagagataaggtcctagcaattttctctttgaattttttcttttgaggttttagcgagctcaagcatgcaatccctttgaattaggttttgtccaaacacgttgagtttgggtatggtttttcgggttagtattgagttaattgaagtttatttgagttgaatttgaggtttaattgagttgttagcaagaactcaaacttggctcaacaatggtgaattttgttattttgagttattcttaattttgttgcttggattatgtttattggacggtattttggagagttttaacaagtgtggggttgatttgggctcgaaatgagactttgtggttttctacagtggaaaacaaggaaacggtctaccatttttactggcaggaactagaggtgtttaataaaatttacaaattgcccaacccaaataaaactgcccaaactaaaccgaataaactgacaaaaaatacaacccgaactaatacaatgaaaatccaaaccgcccaatgaatatattgggtgatttacaaattatttaaaccgtccaattaactcaaataaaccaaattaaatcaatttgtatagcaccccatattgtgagggttcaattttttaaaatatgtgagggttcaattttttaaaatcacgaaataactcttgacttgtaaaaagtcgttctctattgaacgtgtgta

SEQ ID NO: 79516 - DNA, 3028 bp, Cannabis sativa
tatatcaaaaatatgtttatatggtggtcgtttttttttttttttgttataatttaaaactcaatttattttttaaggttcattaaaaccttttaaaataaattttaggttcgataactttgctggtttgcactattttttttatggttttcatgccttttatggtttttgtaccatttttatggcttgccggtaattatttaaggtggattcgtaatatggtcaatggatacaagaagtgtttccttttgtactcataccttctacaaacgattttcaaatccggtagattattgtttcaagtcttaacattatgtattgttttactatttttgttcacattgactattttattttaataaattgtatggtaatagaattttatgtattgttaatttgtaggtcagttttgagaagggccaactactagagtttttgtcaataagtttatttaaatattatttatttgggagttgttgtcttctaactattgagaatttcttttttttaggttttaatatctttgctagggattaattctttttttatcttattttatttagtggatattttggaaacattcttgatacgttattgagttggcgtgtactattcagttgaagctctagctcttaggtgtcctatttgaggaagttataactttattgtctaaatttttgggggcagttttgttccatgttgcttactgactttagcaatttatggtttgacaaagcatgcctttgggttagacgatgagctatccatgtttaaggaggttcctacactagttgcggatgtctgcagcttaaattcatgagtgattctaatcactacgtcaaaaaaaatatttaagtcaaattcaacttttatttattagttttttgccgaaaattttatttattattatttttttagatgatggaactctctgcccataatgtaaaaataattttctttttctaattaaataaaaaaattaatcataaaaactcaaattttattaacattactcatttatagataatactcattaagagtgcatccaatatatatttatggaattaagctgaactttttttatatatataaattattatttgtccttattataaaataattttttttttattttgtaataagtcatttattatataaatgaaaagtattgtcatattattattatgaattagtaatgttatcaagtagctaagaataattagagaatagtaaaagttaatatatttaatcatgtaagacccaataatatgatatatatatatatatatatatatatatttaaagattttaaattctatttgataagataatattgtatcgtataatattatattgatctgatatataatatattatatttttatatagtgaaataaatattttatattaacttatatatatatttacaaatttcaatttaagtcacaaataaaaataatattatataaaaatatgatatataatacaatttaataaataattaacactaaaatctgacataatttactaaataaatgcttaaaaataatataaactattattataattaatattataaaaccacaatataatttacacgtgcaaagcatgtgctttaaatagtatatttatatttttataactacattttacacttttatgtacgtactttttaaattatatttttatagaaccttatgaaaaataatataaaaataatattaaataatataacacaaatataaaataatatataaataatgtgtaaataataaattatatttttctcaaaaaaaaaaaataataaattatattattattataaaaataacgtaaaaataaccgttcatatttttgttagaaaaaatttaaatctataaaatattaaaaaagaaactatatatctatttttttgtagtttttttacacactttttaggttattatgaaaatatcccgtcagaaaaatattgatgttaatgtcatattattataaattttatcaatgtagaatttttagttaacatgattagataaaataaattaatattatataaatttaatattaaattattaatgataaatttaatatttttaaattcaaaaacaatttacagaaccaatatcaaaattcatattttcatttttagagtcacattttttaaaatattagttttgaaatcaccaaccaattttgttttagattttagtctaaaactcaaaaatttattgagataattacataaagtactattttttgtaaaaaaatttacatttttacgtttaaagaattttttttacattttacgattttcttataaaaacaacacgtaaataacaagaaaattacataaaaataacatgaaacatcaaaataacaacaaaaaataacatacatataaaaaaaatcaacaataaattaacaagagtacaacataaaaagaccgtattttttgtaaataaaagtaaaaaaattgtaaaaatatttaaaattccgtaaaatcgtattttgtaatttttttttgttgtttttgtgtatttctgaaataatcccaaatttatttggatttagcttttaaaaaattcaatcaatcaagtattttatgtgtactcctcaagccccttaccaataaaaaagtactctggccctgaattaaaatgggttaggtttgtgcttaaggcccatccaatctcagaccccaaaaattatatataatatatttatatataattgaaaaaaactgataattttataaataagttcaataatacttacactcaactttaaatacagatgaaattataaattttataggtttttgtatattttttttttcaaaaatatgacttttttttttaaaaaaaaattattttatgagcaagtttgtaatttttttcgaaaaaatcatatattttttttttaaaatttatactttaaaaacagtaaaaataaaaagggaattttacaaaaatactgctttttgaccaaaattttacatttatactgggacacggcaaaaacaactttt

SEQ ID NO: 79517 - DNA, 3347 bp, Cannabis sativa
taattatagtgccaccctttccaatcacacctccaatatttccagtcggacataccaagcggatagagaactctttcgaagatgcttcatcccttggagctgagtacaaggaacgtgaccagtctccagcatcacctttgtatcctccatagggacccatcaatggagctaatcccacaaggggagcaccagtatttggacccatgagtgaaccaccagaaggatacacattaggcacggcagatgtaagtaaatgctgggatctggatgggttatcatggaggcgagaagcaattcgatagagagctttcttgacaactagagaatcaccagatatctgacccacagtaaccaataaataaatagataagcattaatagattgcaaagttaaaatgatttcgagtcgtaaccacaaataaacaacagctgaaaggaggaagacagaattaagtaagcttgctacatttccaaactcccaagtaaatatttcatttcatagagtgtttaaacatggccagagcatcacaagcagatgcattatcaacaagagaatgcacaatagcatgccgaactgagggaaatatacaaaactcataatgtttacctgtataagctcatcagaattcaaggcacaaggaggaagatgttcatccttaagaatacgaatctgagctccagtctcactacgaatgttctgtactatctgccctcccttcccaataacacaaccaatctggtcagacggtacaagaagacgacaagtaacctgatgaccaccttccatgtcatcatcaccatgcaattcttcagcaacaaccctttcatgaaccctaaagagagcatcttgagcagggcaaatattattaccattgtcttcagatgaattactctcatcactggtactataaacagtgacaacacgctcttcacttccaggtacagtctctccaatcctaatctttgattttgtgtccaacctcagctgcttcacaatctccccacctcgccctattatgcttcctatcttcttaacagggcataaataacgataaacagtatcttcagaatctatgacaaactgttctctatcttcaccaggatttctccttttatttcctccattatcagaataatcagaatgagaacgctttccataactattcctctgacccgccattattttgtcaggcttgctaactgtttccagattttcatgcataagccatattagaaaagaagaaagcttggacaaaccataaattccaaaaaagcttagctcaacaagatcagaccaaaaactaaaaaactaaaggggaaaaaaatgcaacactcaacaatagcatcttaatcatactctaatcccaaaacccactaaagttactattaaaaactccaagtccaacacaataataacaaatgaggatcacaataagtactcaattacaaaattggtatgcaatctcttatacctaataattggcagcatagatctccaaaatttccccaaaaccccagacaatgaaagaaatatataattgaacccttcccccaaacccctaaaaaacaaaggtaaataaaaaacctataaaactaatgaaaaagaccctccaaaccgacaaatttggacagttttagatcgcccaccatgtatcaaaacgttttatattgcagaccattaacgaattcaagttcccaattgaccgtgcatagatcccagaaaaagaaatatagataccaaaacccggttttgcaatacaaacaaaaaaaaaaattacttttttatcgaaaagaaaacaattttgaataatttattcaaaaataaaaatagcgattagaaaaaaaaataagtgttggaaagaaaattaaataggttagataccttcaaatcgtgaatcaagaagatgagctaaagcgagagaaagatatttttggatatttgattcgagaacgggtcgatttttctttcccgtgtattctagggtttggttttgacccccaaaattgttttatttcccttgctttcaatatttcacttatcgtcctccatctttttcaaaattacaaatacatccttttaatatttcacatttatactttaaagtaagctatttcatatcaaatatgtaatattattattagtgcaactcaatattgggttgtacttattttactttaataaatatgataaaaaatcgctaactaattatagaatgacactttatcgtgatatgagtgataatacatacctaatacataaatcacacacaaatttaagatttttaagtgacaattcacttttcataagtaagatttatcttaattaaaaatggcaaaagagcagatgaataattaagtagtatttatattgacgttgtaattaaaattattcatgaatttacaatgtagatttttacaaacagcacaagaacatcctcaaataaggatatcccatcatctaaccgaatgacatgttttgtcaaattataaactgctgaagtaagtgaacatcataagacaaaactgcctccgaaaaaagacaataaagatataacgtcttcaaacatcacaccagaagagctacaacttcaacttgcaacactaaaaaactactgaaaattttccctatgcctagctctggtaagtggccaataaaggccttaatcaaatcttacctccttattagcataattttcctgccaggccaaagaaaaaaaggtgaagggaagcagatgaaaaagagccacctgcacctagtggaaagggagcaatcatgcaatgcaaacaaactatccacacaaccccaaaatacaagcaacatgtaccagagaaactaaaaggcttatagtaaaatatgctttgataatttttttgagattttcatttgtattatgtttgacaattgtattgatattatgtgtgtgtatggttaaaagagtaaaagaggtaagtcacagagtaagaatccaattgtgcaaacattgaagaggaggaatcatatagagaaataaatgagtaagaagaggttagacagaggggggaaggttcaagttcacaggctcgtagttaatttttctttgaaacatagttgtttgtcttttggaacggggttgttttaacattagtcttttgatagagaacttggtttattttatatattgtaaatgtgtcttttggtgatcttaaagtaatgtaccaataaatttataagggcttaacttatattttattgatgcttaaatattgtacaggtactttttgacaatcttagaataatgcaccagctaacaaataaggtatattttggtaatgattcaatgatgcataagtgccttttggtgatatttg

SEQ ID NO: 79518 - DNA, 2463 bp, Cannabis sativa
ttctatttatagtagttaatttcctattaattaaatcatagttaattatttaaataaataaatatttataaccgaatttggttattgatatttgtctcaacaaatattgccttgattgtttttttttttctatttaattaatttcaaaaaaaattatttatttattacaaaaataaatatttactattttgccaattcaaaatagattttttcgtataacattatgttgggttttgtgccctaaataaaacccattataatctgattagttatcaatttaagagatttgaagtgactaatgttaacatgtatttttcatgcttatggtttaatatatgcacaaaatcagttcagactaggatctggactgacctaaacctgaacccagacccaaatctagacctcagatccggacccagagctagacctagacctagacccagacccgaacctacacttgtaccctagactcgtactcgaactcagacttgaccccacccaagccctagtcctatacccaaacttggatttggatccgaactcggtacccagacgcatacgtctcgaccctaaacccaaacctaggtatgtgagagaaaatataaatgaataagttcaacagaaaaattattttcttaaaaaaaattaaaaaacaacattttaatgttttcattttttttaactcaatttttaaaaaaatggttttaaaaaatttgcgcaaacatccttattggtttttgaaaataatttttgttttaaaaaaataaaaataatttttaaattatgaagctaaataccgttttagtgtttggtaccaggactagagattttgactaggcttatagagtttgttggtttgaacaatacttagattgctactttttagatgtagattttgatattctctttatgtttattgaccgcttgtttcatgatttctcgatcattattgttagagtttatgagcttggttggtcgttggtttatgtctcttatattcttataagaatacgagtttgttattttctaatttttattgaaagattattgagtgatagttattaatgggtagaatcatccatatagctcatgaataaaagcctagcttttttcacattttgtggacacttattgcaaataatatataatatatttagatgaaaatatacccttgtgatttaaatgcatcaattttaaaacaacaataataattgatacttgcatattatagctagagatttgaatggttatggtacacttttggttggatttgtaggccttttgcttttttgtgctaataactttatagactattcttacaaaattgtattctagtcactagtggatgtttctgttcaccaaatttccatatcacttggcaagaataacaaaagatatcatattatataatattatataccacatatatttctaaatatataatgtgaatgtatgactttatttagggtcaataatagatttatatactaaattgattgcttgtccgaatttcacatttttgtaatgttaattaaatagctttactcaccctcaagtatatctttgatcaccttctattgttgtcttactattcctagaaactctttttcttttctctctcttttgattattactagaggaatgagtttaaagcccatattcccaaaaacagaactgacaacatttgtgtttctcttgtcttgtcttgtaaatgaattttatataaacaaatttatacattatatacacgtataattggttaggacagatgtgaaaaaaacttgtgaacaaaaatagacaggtggtttagagcaaaagataatagacaggtggtgagcacagaggggcattctctctccatctgttagcattgttgaccaagtgttttttcttttttttttaaggtcaatctaatataattgtgaacctaattgtatttagtttctccatgtgaagaagtgacctattattttaatcaagtcctttttggtggaaatttgtccatgtcaaacatgtttatcacataggtttcttcacaccaaattcacagctacgatatttaatgtcataaattattggaacagttaatttttgtacttatttcttttttcttttcaattagcaataagaacgcggtaagtaaaattctctatctttttgtctttgtaactttaaaggggtaaaaaaaataaggttgcataataagatgttaagatgacccagttgactataagaagttaatactagatattctaaaattgaccaatttggcagattttggagttagtatcatgataatcaatattagaatacaatacacaacaaaatattgatttgatataacatatattaaatggttataataaataagtgtctttaacaaggaaatacatctaataaagctctttaacaagaaaaaacatctaataataacatgttagaaatccttaaatagcattataa

SEQ ID NO: 79519 - DNA, 3765 bp, Cannabis sativa
taaataaatagttttgacattaaaaggattgaaattataaaatatggcatttgtgaaagaaaagataaattgttgaataaaatggcaactaatatttagtggggcccatcttatggtcggccgcttaagtgtaattttagccaatttttttatcattttttaatgtcataatttaaatctaaccctaggagaaatcttataaaaggaataagatggttctcattctatccaacttaagtttacctagttttcattctctgttagacaactataaaacttgagaatctccttctatagaatttgaatctcccctatttttcttcataatttcgagccttatagtgaaagagtgcatgcccacccattgcaaatcaagtactcaatcatagtgtgtaagactttgaagaatccaacacctgaaggagtatcgggctcagattttgataatattttgcgacagaaaggaacaagagttagagatctgagtggaaggagacgtattattctgctacaatcaatgtaaggtttcttacctttatatatgtttaattccattgttttaaagaattcacatttgaggtgttaatcaatatatatgttagtaaatctaaatcctggtaaaataatccccaactgtccaacacttgagttttgccaagtattgattcatacattgtactcttaagggtactatagcagatcccccctataacgatatggatagtaattccctcggtataatacaaccaaaaggagaataggtcattacctgctagtacaagggggtcgtacctctataacaaatcttattgtctattgcttttcattcttatatctccacacatgtggcaagcatcaaatctgcacgaccccgctgtcggttgacaatttttgaggtcaacacaaaagtcagtaaaagtgatcactatcaaattgtttcccaatgtctgacacaatcttgtgcggaagtccgtaacgatatactatgttcttgatgacaaagtccaaagatttctttgaggtgaccatgttcatgggctctgcttctacccaattggtgaagtagtcaacgacaataattgcatacttgactccaacctttccaattgggaaagagccaactaggtcgattccccaaacaacaaaaggccaaaaattgttcacgagggtgatctaagtcaacgacgctcgcaaaactttggcataacgctggtcttgttcaaatgttttgatgtattcaatgcaatcattttttatggttggccagaaatacctttgtcggatgattttcttagacaagatgagtcttgatgtgtggtctccgcagaaaacttcatgaatttcataaatgactgcactatgaatctcaagtatggaattgataatcccatgcgatatagccgttcatctgaaataacgtatttgggagcttggtactgaattttttgggccataaccctgttagatgaaagctctccataattgaggaattggtaaatggggcctatccaggagtaggagtgatcaataacttttacccctagtgtttcaatacttgagactttcaagtgggaaatgggcactactttgtattgctcgatttttgggtctatagctagcttttccaacatgtatgtgaaggtattctgatccctacggacttggcagatgttgtatcttttaaagccttgcaataactccctagaactagacatgtaagtggccattttctcaccatactatcaaaatatttggtttaccaccagctgagagttattgtacactttgatattgtgatcatcccctacttcatttgctaggtgtaggctggcaaccatcactttgtgttatgctttattgttggaggctagaatttgaatcaagggtgttttggaattggtgtcttgcagaaaaattaagattattcccacttcaacaccctttttatttgatactccatcaactagactttctaaaattgttgttgggaaactggctcatctagatcatcattcattcgagtacactctacaataaaatttattaaagcctacccctcaatgaaaattatgggcttgtaatgaatatcaaactgactgaactctatagcattttaatagtcttccttatttttgtaatacatggataagagggtggttagttagcagcttgatggcatgcacctacaaaaaaaattactaatttacattacactctctgaagtattgtttttttttttttttttggaaacggtttgaagtattaagttaaaagcaacttatttttcctctggtcacacctattttacaataataatattaataagaaagggaaaaaaaaaaagcaacatgatcttttgctttgctgctcctcagtgtgctgctgtccttatctgtcgtttcctttatttctctagtataaacttttagttcattttttttaattattagtttttcttttttgataattatttttaatactattatttagtttagtttttttttttcctattacacattatgtacatctttagggtttgtttgtcacatgagtgcactgcacgtggttctattcatgattattttttcttgagtaatcaacctatttgctaattatgttgtgttttttcttttcttttcgttttctttttcatgtaatataattataaactctgttgtttatattatatgtattaaaaattgttactatgaagacatagtcagtgctcaccacaactctatgtccactctacttaaaaagattcctctacgtactcgtatcatctcataatgtgacttcgaactttgttttctccctaaattttgtaattagttttgttcggtttattattgtattaacaacaaaatcacatataaatatgagattagattagatacattttatcgagtaaaagactaacagttaggattggaaattcaactcaatacaaattattataaattatagtcataaaaaataaatctaaataaaaattagatctaactcgaatgacacaataattatttgaattggatcaaaattaacggatgtgatacgaaatcaatacgaaatgacccgactgtttattattaaattttttaatttatggttaaattattatttatattttcataaaaaatatataaattaaaaaaaaaaattgcttacaagaatataagatagaaaatttataattgatattaagaattttgctcattatattataatttgtgataaattacttaattaattaatattatttatttgtaatttgatatattttttatttagtatattatttaaatgagtcaaaaattgataattaaaataatatatatatgtataaattaaatatgtgatgccaatcatattgatcaacatatataacataagtatatagttgacatctcaatataagattacgatgggttggattaaaattgatctttttttacatgaacgatatattaatcgaattatagttatcttatacatgttaatttgcataaaatacaatacaataatacgaattgctatccacagtgataattatatatcacacgctaagagcactcccaatagttttttatattctattttttaaaatacctcactaaaacttcactttttctatttcacctcacacatttatattttttttgagcgtagtgtaatggtattttataatcatttaatagcttaatagcttcaaggtcctaggttcgaacccatgacctctcctttttttctcatccctccctcacc

SEQ ID NO: 79520 - DNA, 2225 bp, Cannabis sativa
agtagtaataccctaaattatagcatatatagccctgtaatgaggattttgagatgtgaagagatcagtgtagtacctctcaatttcgttgagaatgtcctcaacactattcactttggagcctcactaagaaaaatatggtgaattttgttagtatttttcctattcgaagcaaacctatataagaatttggtgtttttgtccctgacatggagccagttaacactagagtgtttcttccaataagtttcttccttagaaaggagactatctaaatttgcctacaacttcctaatattcagataggaggcctcagagttgtcaagggagtttctagcattctcgaggcacttttgggcattggctattttctttaggaacccaaagaaagatttatgcttccaattagataggtgatcagcacaagctttttgtatggaacctaggctttggatgggaaaattagagctagcactatgagtccaagccttaaggataacctcatcccagtttagttcagtcaaccagacattctcaaagaggatctcctatccccttcaaccttactaagatttgggggagaattatcaagcttcatattgatggctttatggtcagagccaaagaaattgagatgactaagggaagcaatgagataagtatccaaccaattaatgtttgttagctaaagcccagtctaatctttcctgtacattcctgtgaccagcatgattattgttccaagtcatcctaggcccttaaaaatcaagagcttcatcatggaatttgtcaataaaatccctaaagcattcagatggtcaatttctagtatttccattgcttttatcatcccaagtcaaaaaactattaaaatcaaccataagtagctacgacaaagaaatacaagctgattgacatattctattaagaagttgcaaagtatgaaaacgattagtgggacaaagagccccataaaaacaagtaaaattaaaactagaaaaattgacaccagagacataacaatgaacatgattaatagagtaattagtaataaatacatccaagtctaaagtccaaaaacacaggaggccccccaaaacctactcgagggacctcaaaactatggacaaaactcagctttaacctaagactatcaacaaaacccttacataatctagactccataacaaagagaagagaaggcttatacattttgactaagagggagaggtttaggaatgctcaatcactcctaaggcctcgagcattccaacttaagacattcatttctgtaggcaggcatgttcctccacaggacctacctcttcactggaagccacttccactatgtcctattgtggtaggggccttgatctcttcagcatatctctctgcttattacctacagtagttaattgtctcttgaagccaatagtgctagtttgcgagcctcgccttgtctaggtccatttgggtgggccttcggagctgccaacaacaaaagtttgggggttcgaggctcctacaatggtaaaattattggtggggaatgtcgttggctaggattggaagtcaatagggagaattcattgggctagcagtcgggaagtagaacttcttaagttgatggtggagttttgtctgggggaggtagagcatgatatggattccccagaagcaacaatcatctaggcagtaaaacaagggcttgggtcattttggggttactgggtatgtgggggaatggtaacaatgggagtggtatatatgtcagcattactgtttgggggaggtttgggtggaaatatagaggccaacaattccagagtgatcttcttcattgagttagaatgagaaatcttgttggtttattggtctctgaggggtggaggtgcttgcaaggttcacaaggttctggtttggaagttgcatgagctggattgggggtcaaagtgtcagaaaaacacggttatttatagtaaggtaagattccaaaggggccaaggttggtttgggcaataccatgcaaaacattttcatatgggagcggtggagagtgtggggactcattagaagcccacatataattagcacagccattacatgtatggccaagcagccgcagaagtaatagtgaccaaggaggtcttcatacttcaactcaagccaggtaggtgatgccattcccagaaagaggattgggacacctcttgggagggtcttgg

SEQ ID NO: 79521 - DNA, 4143 bp, Cannabis sativa
ttttttttttttggttttagtgccatgaaagctatatttatacataaatggctacaatctataggcttatacagcttttatggggttactgaaaattcgttacttttcccttatctgccaagtttagtgtattcaatactttagaatggactagattgttgtgctgtgtaccatttcttttgtcaaatgaaatttgaataagatggttgtttttgtgatatttgacgaaatttgaaagtgccttgccatttgctctgggcccttttcaagtgtggtacaatgccctttagtgaaagaacaagaaaaaaaaaaatcatctaagttgccaaactatgaagttttttcctagttctttgccaacgttcggagctctactcttcgagtttgagtctaaaaagaagcttttgaaatggagtctccatttgtgtctctcttatcagctaagttgagttagtaatccatcctcattatccttttttacagttgtgccattggcgaaccagaaggcaaaatgtctgctgcacaggaaggagttcttgggcgctctaaggcagagtggactccatctcgcgatgcatgtttggttcagcttttcattgaacagcacaattgtggaagaacagcttataatgaattcaaaaatgaagttattaggtcagtaacccgcgattttaataagaagtttagcatgaatttagaagagaaccagataaaaaaccgatacaatgtgatgaagaaagactatggtgttgttaaaactcttcttagtcacactggctttagctgggacgaaatacgaaaaatggttgtggctgatgataaagtttgggacaactacatagctgtgagtttgatcttttttacagaatattataattagaaacttaggctttaagttcaaaaaaaaagaatcattctttctctttaatgcaattaaagaatctcacaagcttattgttgcagataaaaagtgaagcaaggccttttagacgcaagagctttcctctttacaaccaaatggcgattatctttgaaggtgatctttatttcacttattggttctatagcatttttcaagtaggtttcatttccctgacctattctaaagcaggagaatcaagatccgttatgaaacaccaattcccaagtggagtgctagtgacagctgaagagggaaatagtaatactgaaacagttcgatcttcagagcctactaaccttccagcccaggtagttgatggcacccccgattcggattcaatgatccgaatagatgacaatgacaacgacgatgatgataataataggcaacaaatgaagctgaaatccgaggctccttcaatgtgtggtcataaaagaagaaaatgctataaggtcagagagaccatagaaaacaccttatacgaaatgttttgctcggccaacttaaaagctgcacaaagaaaagcatttagtgagaaaacactgtaccaaaagtgccttgaggaattacaaggaattgaagagcttgatgacatggaatttacaaaagctgttaatgttcttaaggatgacaaaaatgcagttgctttcatgactataaaaggacctcggcggttaatctggttgaggtctcaatggccagcttcatagtcttagttttgctttttgtttgttgtaggtgatatcttgtattacttaatcaacgagagactcaacttgactgccccttttggcctattaacatggaaatgttattgcttcttcaagagtattctccttccaattttcactatataaatataaatatttgatcatattattgttcactttagttattacgatgatcaaactgagttggacctatctcggtgaaactgaggttgaggatgaggatctgaactatgaccattaaacatgaaaacaggcattgctataaatggaaagcacatgctatgtattatgtgatgtggagtttgatgaggtagttgtctttggtagtgagttcttttatggtatatattttgatatgccacagataaaagcacaaaagaaagtctatagggttaagaccaaataaaatgtctattgttgagagattaagatgcatactcactatacaaggaactaaactcaaattaaaggcagcaataaataagctgcaaaaataaagggggccaaagcctctaatttgactaaaatataatcttcaactaatattataatataccttttcaaaaaaataaataaataattataatatgaaattaaagtttagagaaaatttggccgatctcaaatatttttttcttatattaaatgtgattatttaacggaaattgctcgttcaacagttgttttttatttttcagttaatgttaatgataaaactaacacttttaatttattaattaattatatttttttaaaagaaaaatattttaaatatctaaatttaatttatttattaaaatataacttatataattatttaaaagtatgaataaaattaaatagttattttttatataaattttaattaaacgttaattcaattaattaatcatacattataacaattttattagttatattgtttaaaattttaaacttatttacttattttattgtttaataaaattagttagatatattttttgataaataaatataaaactagattaattttatatttttttaaaatataattaaattgtatttgttgcaactctaatacaactataaccaaacactctctaaagatttaggtgagagagaaaagatgggaagaagaaaaattgaaatgactcaatattttgatatttaatccacgtagataatatttgtctaatatccccttttaaaatagctactattttttttgctaattaattttgaattattttattacaagttgtgctatttgcatatttatttttgttcgaatctcaagtatctctttacactatctaaatcttatgtgactaactatctgaatagactatctgaataaccgtattgaaggtccactaaaaatatggctcaagttgagaaaaataagcttccatataaagctaatacctgaaatttatatatatagacatacatatatttatatttattattgcgtagctaatcaatataaaaacactattttttttttgtatgaaatataaaaaacaataattgaaattaagaatgttcataattgctgatttaatttaatccatacgatctaattcaattcaacccgcaaagtatggatatccgttcttgtgcgaattgaaaattttaaaattcgtacttatgcgaattaaatgttaattaacatataaaaataactaatttaatttaatctctacactaattttataaaaaaaaaattaaaaagttgaatatacaattaatagtgtaatgtaaaaacataataatttaaaagtctaatagatataatacaattatatttcaaaacgatcaaatctaaaccctatttttatatataattttttttacatataatttaaaaataaattaaatattttttatatatataattttttttaaaaaatttattattttatttattttaattttttattagagacataaaataataatgtgttttaatttttataaatattaaataatttattataacaaacaataattgaataaaaaattatttcggaaaggtaatcggagctcaaatacactcctctctggacaaaagaaaagtaaagttctttcgattctaattcaactttaaaatatttctcttttcttcttcttccacttcttctcctactcttaaactctttctctgaactcttacaaccttactcttccttcaattatggatcggatcattcttaccgggtcacttctcacactcctcactttctctttcgtcttaggtaattacccaccaagattatcactttaattttctgttctacgattacccgctaacccaattcttactttgttctttttgtcgttgcagagatagagtcaacgacgttcaaattagtaaacaaatgccggaacaccatatggcccggcttgctatctggtgccaactcagctccactccccaccaccggcttcgttctccacagcggcgaatcccggaccttacgcatacccagagcgtggtcgggtcgt

SEQ ID NO: 79522 - DNA, 3449 bp, Cannabis sativa
actaaatttaatatcttgtattataaatagttaagaaattaattccacagtaatagtattcttatccttaaaaaaaaatcgtacaaaacgtaagaatctgaaagattattattcctattaaaatattatctcctaccaaacggtttcttaatactatatattatcactgccttttaattttataataattatttttaattattaaaaaattccaaaatatcacatcatttttcttcaaattgtattgttgtactcaaaataaataaataatattgtattggtggtgtcatgatcatgactagtgtaatattcaatatttttatcaaattttgaccatactaaattacaaactttacgtgtcagatcttctttgtgaagaaaaaaaaaatgaaagattttgtcaattgattagatttggtattattaatattatttggcagcacattaggtttttcttttttcttttataaaaagaaagtttaattgtattaaaagttgcaacttttgttgttgttgttgttattattattactttttttccattaacacattctatcattaaataattttacataattgtttgttttttttttcaaaatacgtaaagtattgtgaaaggagtccaccaagtggatggctagacacagagtttgggccaattgaaaccccgaaaggaccactcacatcaatgttttttggtccagacttcatttctaccaaactctatcaactcaccccaaaggaggtatctataatactttcttttatgctttattttcacatggttaaatacaagaaataaagttttgacttattcaacattttttattatgaattattgttgtaggatcttgagttggctatgagtttgacaaggccagggtcactgttcattgaagacttgtgcaaagcaaagaaattatctgaaaattcatatgggtcagttcctatagtttttgtcatttgtgaccaagacttgggaataccactagaatttcagaaatggatgatccaaaacggtggcgtttcggacgttgtggagattcaaggagcggatcacatgccaatgttttccaagcctaaacaaacttgtgatgttttggtgaacattgcatctaaatttgcttaatattacagttattaaaaatgagcttgttttaatcatcacttctttttctgtttttcttaaattctaccaataaattttaagtacaatacatatgtatactttggagatgaaaagtgattattgttaaaattttatattttataattaccaatttgttatttaattaattaaatgtgaaataataaaattagtactcaaacaaatatattgtaggtacagatcaagatggagattctgttattatagcctagtaaataaataaagaactaagtgtagaaaaataaatacacacataatttttataaacaatttttacatattgttattagtttacgattacgtctaaagataaaatttattagtcaaatttcaaattacatgctagttttaaattaaatgtctaatttaaaatatgcatgaccacacatttaaaacacaaaaaaaaaaagtacatttatatattacattactaattaagtaagaatatttggtgtgcatgcaatttgttcgagatgggaaaagagcatgagtgggttagagaacataaccatgtgatcagtttgattgatgaccatcacttcatgaggtggattcttctcaatcatccacctctgcatactctcctcgataacatagtcctggtcgcacacgataaaaactcttcttacactcccatatttctctttagtaagttttagttgttcactcaacaattcttcattactaaactgatcataaggtctcaacaatgtcagggcaagcaccaaatcctgcttattaaccacattgattaataatggaatattattaataacataattagcaattaattaaacgcaaatggcaaaattagcaattaattaaacgcaaatggcaaaaatataataagtaaatagtaacataaatatttaaaattttaattttataagccgtataaatttaataattattttaaacagcatgaatactaaatatttgtaaaactgtaatttttaataaaacacattctaaattattaagtctgaacaggtagtgtcagttatctctaaattttgttttcataaattcaaaataaagtctgtattaactaaattagagaaaaattacaattttactaacttaagaaacaaacataaaattttaagtacttatactataattattcttaatataatatctacctctggtggagagagctggtaaaattttgatgccaataaatttgggccaaaaagtacagcagttggagggttatttggaccctgaccatatataaatgttgaatccataggtgaaccaaatcttcgtgtattctgtatctcaaaagaaacccactccattagtatagcatataaatcatgatactctatctatttcaaattttgtttaaactaaaaaagtttgtctaaatttttttttttttaaaccaatgttcattataatttatgtttcaattatataaattataatatacatcaactattaaaccttattgttaattagtatgaatctaagtcatgaagaatcattttttctcaagcttgagatttagactattggcttcatcatgacggaataggagctccctccgatccagaacaatgtggaagaagctagctagactgaggattttcacaatactcagtcataattgggatagatttggggcttccgaatgaaatttatctgattagatttggaattcgatcctggacagaggaagttgaggtgaaggactttcaatcattagcgaaggatgcttggaccgaattcatggttaatcagataaggactccctctattaagcttaattttactaagacaatcaaatagggtgattagataattgctaaaattgatgtgaatgaggttgaagtcgaggcctcttactggaaaagctcggccatctgtgttgttcttggagctcatcccttttcatgtgtttgagggattatcaaaggaatttggggaaatttaggagttgatcgcatagcaagaactatgggtatataaggatggacattactccattagtatgaggtcttttggaaaggtgcccaaaagcaaaaccgagaacttaagcctaaagcagacaatatcatattaatgtgggagtcaaggtgaggtacaaggtagaagaacgggcccgacaaatctttagcctactaagttaaaatcttctaattgtggggaaattattgacaagattcaaaagaaactgcatggcttaaaaaattgttttgagtcttattttgttgggtatttgaaactattggatgaacatctctattttactctcataagttgcgaaagaaattga

SEQ ID NO: 79523 - DNA, 7936 bp, Cannabis sativa
aagatagcatggtagatacacattggaatcttttttgttttaacttcctcaactaaaacttcacaatacgaaataaaagtcactgacatccagccaagtgattgacaatccgttatatttgagtagtttttcttcttacaaaacaaaaggtaaattattttgacacgccgcaaaaattatccgtaacccgttttattttgtgtttttttttttttaaatgggttttattttgtattcaaataggataagtataattgtaaaaaataaaaaggataatatactaatagttttgttaataatacgagttctgacagtattttcgaaggtatagaatgtggcctagtgtttgcagtggaataaaaacaacaaataacttaataatcagtagttgaccgaatattttgcattattaaactaaaattaactccctttcaaacataataataataaaattaacatgtactgtatgcccaatgagtcagtctcctctcctcatcagctcaaaatattatatttactaaataagatcacaaaagaattggattagtttttggataatattcattattaagatgggaatttacaatgccccagattgtttgtccctgaagtgacaatgtcttcatttgttaaattgaagtcaaatgaaggaaattcaagggaaaaacaaataaagaaaagtctttattttgttaaataccacgcatagacaaaaatgtcattctgtatcttccaagccaagcttctctcccaaaaaatattcctattcttaaagaaaacaaaccccaacatttattttacttttaactttaattaacttgctgtttatatgaaacaatcaaatcattctcaaaacaaaattgtttgactatgaactcaaggccgctaagcaaactaattaaattcctcaatttcattcacattttcactctcatgggttctttctcatttcaacaagattgaagatttcacaaacttagtgcagacctgtacttcgtcttctgtatggctctaacgtgtgtatgccgtgccacattatggttctgtatggctcttcttggacaaattaagctcttgatgatccattccatctgtacagcttccactgaaacaagtttctaattctattttctagccggatcttcttttccataactttggtgttcagaaccttctggggccaccttatctgcaaaaatttcaccctcttactagtacaagtttatgaagccacaaacactgcaaattatgtatatagatttagcatcaaaaataaattacatcatatatatttaaagttatatgactactaaagtttgtcagtagattgtttcaagtcgttaaatatgtattcataagtcacacgaggataagaggtcattagtcagatcagatcagattattgtatttttgagcaagaacgatttgtgattattatcatataatatttgtacgtacactgaagccttagaatccactaatgagttatatatcatactatgctattctacaaatctgtagtaagaagaggacaggcatcattgtcttggaacagagacaatataagaaggaaaaagataataagatgaaacagagaggtttaaacactgtttattcctagtaaaaggaggcaaattatttaatgtcagttactcaatgcactacagcaagaatgggattaaagtctgccataatttagataaaaaaaatatatataagtaacaagttaacaactgctacgaaggtttctcaagggaagctgataacttttattaaaaaagacccacttcagcaaatgaaatttagcatgaaagaataaagatagtgcacaagggacatccaaagaagttatatcaagtttggggagaaaaataataccgtgcaatgtgctcacagacagcatccggtccatgttatcaactcttctttgtatggacttgagaactaaattcattgatgaaactctctttctaacagtagatatcttggcagcatattgcatgataaatggcagtggagcatcttctaatagtttgtcaagttctgcaaaacttcacaatttagttttttccctaaaaactacaaagacaaaggaatcacaagtacaccgcacaaagttgcagtatctttggcgacagcagaaaacaagccttgcagaaattttggacaaacgtttaccaatgatgggtctaccaaaagcaggccaaagtgactgcaacgatagtatgcttccctttcctagtgtaaaagtgcttgtctactttgagataactaagctacaattcaatcaattcaatgaccactcagatacatggtgacaaacggtactcatgctcaacaaattcaacccaattaatcagtaaaatgaccaataatgtatctgagcactttagtctttagtaagaaggagaagtggaaggtgcaataagggtatcaatacaattggacggatttgtgagtgtttgaggggagaaaattaaataatggattacaaatactcaattttaatcaagcgacaaagtataattctactagtaaaatctcctcattctttccccttctttctcctatcaaccaagaaaatgtttctagtctgctctccaaatgtccttataaaacaccagaaaaatgagtcttccatcttctttctccttacatatatcattggtttgactcatatttgagataagaatgtgaaaaatgaatctcggacttacagttacacatgaagattataggagtttttataaactacaaacagtagctacagtacttgtgaacacaacaacatggttaagcatagaatagccaagttgagcttctaattcctgtggctaaatctaatttctacaaaaaatagatcatttcgcaccatttatatattcaaagaatttatattgccccttattccattgattttcaaaaaagaatcccttaataacaagagagagtacctccggttagacgatcgatggaggaagagaggtggtgctggctcgtgagagtatcctgggctttggaatcgaaatcggagatggtggtggagagaatcgatgagaggcctctggccaaagcttcatgtgctgggggagattgtaaatttccattagaatcgtgtgaactgacaaaaccaccgccgaattcggggcctgtgactgtagaaatactgttatcgttctctggaatctccatggaaaccagtggaagaaacaaaaaggtccaaattaagaagagatcatccagtacgatcttacattgttcaaaactaaagggccgctagtgaagttttgggccggcccatttctggcccagctctgctcctcgtcagtattttaaggcccggcccagtccttagagtatccgtttttacagttttcggctgttatttccttggctcttggtactggacatcggcattctgagattggttcttcttctaacacagttactcagtgaaatctctaagtacgtttcgttaagattaatgtttactgttttattactagtaaagagtaactcttttggttccttgtttcgggctctgtaacaaagtatctcgttatcttttggcacatgatgatgccgaccacgtgtttgacgaaattcccacaagaaaaacttaaagcaaagcaaatgcattcctcccttccttctttgaattttagtttttaaattggatcatacattctatgtacaagcatacgtttacgtatttatgtatgcataattaacttataatgttttcctgcattgcagtaagcggctctgtttaacttatctctgatccatgaatggcgacctgtagtgttgggcttcaacgtttgtctgtgttatcctgtacaaatgtggtttttttaagaagacccaacaagtcgttatctacagcagttacctttgcgaatgggtttgcagccattaagtcaaaccagataataagaagctgctcctctaccaccaatgcatttgtggttgctgatgatgaaaagtacggcaataaacagattattagtattactcctcgcctttatgattacatcctcaccaacgttcgagaaccagaggtgataatgaaataacactcctttttttttttttctgtaatggaagtatacaaaagtttctttctgtggatatgtgcttcattttgtttgtttttctgtatatttttctgtcattgtttaattgttcaacagagactgcatttcagattttaaggcaacttcgggaagagacagcatcaatgcgtggtagtcaaatgcaggtacggttattgatttgtggcttccttttataatttaaacaaggcataagtatgtgtataagatgtcatacatgcataaatgaaaaatcaacaaaataagagaacaggtaagcgctggttatttgttggccaagattgcaatacaatctcatttcaaaattatttggaacacgcataattcttttgtagatgtctcttacattattatttagctctttatgttctttaatttttaacattgaccttctagtcaatttacagcttattatctctaatttccagacagtaaggcttgctaaaaaagtaaagaagcattatatttatatttgtatatcatcaatgtttgtgcccaaaatttgtatgtattttattaaattaatgttgtatgctatttctgcgtctgacaatcttggagtttctcctttattttggtagaaagattaaagttggcatgtcttgttacttttgctaggtgtccccagaccaggcacaactacttgcaatgctggtgcagattcttggcgcagaacggtgtattgaacttggtgtttacactgtatgcatcctgctttactaaacttcaaccacattattggcctgaccaatctccttcttcttttccttaaaatggacttatgctaagttgctaacaagtgatagtaattaggttttgcattttgcaaggatgaaattgtagtttcaaatgattatagttggaattttaagttgttaactgcaaggatatttggtgcttgttgcattcatttgctcttctatgtgtgtatctcactgcaaaactagtttgacataataaattttgcatgattgttttgttgaaagatcctcattctctaggtttgtctgcctcgttacttctgtgtttatatcccagcagttattttactttagatagtaccttctctattagtaggctgtaaactgctgatgttagccatgcctgaacttgtttttgttcgaaaaggtttgtcacattgcatcattgtatactaatgaaaatacctttcatattttcagcaaataaaaaaaaaatacttttcatatttatttcttgttaaaagatgatactgctggtagattgatctgtaagtagtaaagcagtgcctaagcaattacatagttgattatgtcagggttattcgtcattggccgtagcattagccttacctgactcaggtctcttagttgcttgtgaaagggatgctagatgtcttgaagtagcaaaaaagtattatgatcgagccaaagtttcacataaggtataactctttctcctttatggtacctgatcatttaaaatacagtttcttgttgctgtttatatctgtgtgctgatggggttgaaaagcctgtctgtcctttcaaaagaaaaaggggggaagtctggatttctccaaatgcatgatatgtatagtctttgcctctgtctgacttattttgattgtgaagaactaacatgcttatatgggaaaaaaaattgtgctgctgtctctccagctaatatgtaactgacttcaacacaaatgtttcgtaataggtgaaagtgaaacacggacttgcagcagatatcctaaaatccttgattttaaatggtgaagcatgcaggtattgctataaaactacattgagcatatgttacattttctgctatagcttttactatctttttcctactaaccataaaaccaacttcttgtattaaaatgctgccatgttttcaagcggacaaagttgaagttttaaataattcatcaatcatgttttcacattatgtatggatctaatatgctcattgactacattcctttgcaaataatctctatttttttttactaaattcttttcttctcccctttacatgagtttatatttgtataatactatttcactttccatctctcatgtcatttgtagagattgttgatgcatctttataatctacaaggcacgagagctgcagactaaggctgacatgctttctcctttttgcagttatgattttgcatttgttgatgctgaaaaaagaatgaatcaggaatactacgaattattattgcaactggtaagaccaaaataaattcatgatcgtaacatatgtattcctattccaatgtgttttatgtaaagatacaatattagtgtttggttctatttacgttttttatataccaacacacctccttccttttctttttaatgtcatccttgtttttcattgatttagtaattttaccatagctcatcatctttattgcttccttctgctctttctttgttgggtgtttctatgatttgttgataaggtgagagttggcggcgtcattgtgattgacaacgtcctttggcatggaaaggttgccgatccattggtaaatgactatgtattgcgtgtaaacttctcctgttgagataaaccatggttacacttgaataacttactataaatgacatgtatatgggcaggtgaatgatgccaagactgccagcattaggagtttcaataagagcctcgtggaggaccagcgtgtaagcatcagtatggtgagttcactacaattatcttcattttgaatactcttctgatttgattcatgactttaaacatctgaattttaaatctcaggtacctattggagacgggattacgatatgcagaaaaagataaccgcatagtagttgatgataggttactaagcagtcaatccagaacatatgctgtgatacaaaaccaaggattcatacatcagatgtggctagatgtggggatgaaatcagatggggaaagattcaaaggatttgctttaattgtttggcagaaaatttacataatggatcaagctcgtacaagtgtcttgttcagcatttctggaaaagcttgagtaagtttttgtgtttgaatttgaaaaaccactgggattcatgcatatgtaattaatgtatgtgcatagagagagggtacatttctgagcaagttattgtgcaaatttatattctacagagttgaactactataaccgaagtaattggaaaaatacatattctgaaagcttaaattgatgtagtaaaaaaatcaatattacttttatttcagaaagatgtaaggacagaaggcaaaaaataactattctttttctgttaaagtaagatacacctacaaaataatggtgtattaaataaatattcaaccgggtgtaccaaattgtaagtttaaatactatttcaaattcataatgggaaatgttcagccaccattagctaagactaaactgaatcataaagaaatggtggcttaaaaaataattattttattgcttaaaaaaaacacctcttgtgtgaaaatacaaaaaagaaagggaatagtgaaaagaatgaccatcaatcttcataaatttttaatatctgcaacatttatcatccacaattagtcttcttttaaagtgtgtcttagccatgtggtcactagaaatattaaaagatattcatggtttttagcatactcttaaatgtcatatcatctctattagtacaattaagtataaagtcttatacaatttaatatactttcaagaaatatcgttaattaatcgtaagatgccgttttagaaagtgttacgcactacgagtacttaataacaatattatataaaaaaaaaaaaa

SEQ ID NO: 79524 - DNA, 1285 bp, Cannabis sativa
attccctgcaataaaagtcttgcctgcaattgcttgtgatatttgcatttgtatattttctcttccaataatctaatctacaccattagcatattagacatctgactgaatatgatatgaaaagaaacaatgaggaagtaataaagaaaaagttttgagaaggaccacctctcctaattcctctaatcattcatcatcatcatcatcatcatcatgattagtgatagtaagtagtagtagtcactgtctcactagtcagctcatcttttgctaacctaaaacatgattatttaggacttttaagttacattactccatgtgtattatttgactgacaacttacattactccatgtcccactttgtcgttttcatcctgattttgctaccaactaattaagttttgcatggaaggtaggtatggatatgatgatcattacaaacaaacaaagaaatgcaggcaaaattacagtagcatataacaaataaaagtataaacatacaaacaaacaaaaattatttccactcagtttcaaggacgagtcatctttactctattgattatatttatatcactaattttaatgtcatcatgtggtggtggtgtaattatgcaataactcaaaatagtgagtatatgatattgatatacaagtttcaagcaactctaacatgtcactaattcactaatatatgatatcccatgattaaaacctccaagtccaaaaattacaccgaattaatccaatctaattcaattgtgaaaggttggatgtgcaattgtggatgtcaattgtcatattctaattagattggatggtagttatgtatgtgtttttattttaatattctttagttaataatattaaaaatcaagtatctaccataactaatgagaggctagcttgctagctaatctagcctaaagtgatcatttaaagggtattgaggtgtgtaggggtgtaaagacacttctaataaaaaaaaaaattgatattaaaaggcattttgtattttttttaaaaaaaaaaattaatggaagagatattattattaggtctaaaattgagaaagaaacataaaataaagagcattactatgggtatcaaattgtctagctcatgtcgtcttataatttgttatcataatttttattaaattaaaataagtgacactcaatattaaattcttagtgctcttaccatttttaaaaaataaaaaggagaaagggaggaagagatacattgggagagggaatctgtaaaggatatgaaataataaattaa

SEQ ID NO: 79525 - DNA, 2922 bp, Cannabis sativa
  modified_base (971)..(988): a, c, t, g, unknown or other
cttatttagaaaaaaatattgtatttttcaaaatcagtaaaaaaaatagtataattttaaaaggtaaatattttttttgggctcctgggataggtgggccctgtcacaggcctagcccgcctatgctcagggccgggcctgcatgcatgcattagtagtagtgtcccatactatagagcactgaggacactaatcaaattagacaaaagtgagtggaatactatatataaatgtcatactatcctatggacgagtagtttggagtgatctctgagataaaatctctgctgcatattgtctaactatatgttcatctctaaccacaacaaaaatcgatctagatcgttgttgtttgtagctttggatttcttggttttgtgtctggccgggttttgcaggatcaaggggttagggtttgaagctcaagatcgagcttgagaggaagaagacgaagcctcgtctgctagggttagggttgaatcgaaggcatacgatcgttttgggagtgcaactttatgccacaagagtttgtactaaaatgtcttaattgaccattgtttcttttgattggctttaggtggtgtagggtttttcggtatttgaatttcctacaatatatatatgacctactgatcttcattttttaatatgctgacaacatataatattgaatctatatagcatttgttgcttagactcactttcagtctgaggtgttttcaacatgttgtttagtgaaaaaattaattgatgaattgaaagaagcaaacacaacaaaattaaaaagaaaatttataattgtgctatcatatttaaattgatgttcgattttattatgccagtatatgctaattcatcccttggctacatgcatggctacaaaattaaaagtaagaaaaatcttaaaaaaaatacaacttgagaaaacaaacatcagcctcgtaagcctaccatcatcatcatcatcatcnnnnnnnnnnnnnnnnnnatcatcatcatcatcatcataaagtagatgggataatatgtttagcaagattattattgttgttgaaattctgataaaagagcttctcaaaggttttcatgcccactaataaacttccatcattatttggagaaggtataacatatgattttccttcaaacataatcccaccaggtccaacataaataggttgacccaatccaaagtcaacctcataatttatcaatctaacccaactaataatcccaagatttgggtacttatatgtgcgggccccacgtctaatggaatccaaattaggatgaacttccaaatagtcaatatttgatcttaagtaatcattgtccattttcttcacacttcgattgatacaatttacagcataagaaagtggctttgttttgagatcacttaccttagccattgctacagttgcaaataacacattaccaaagtaaccaactggaacttggggcttcaaagcgaatcttccattgactgggataaataaagtactgattttttggttataattatcattatcattatcactatcacgtgcttcacaaacgcatctccaaatatgagctgataaagtcacaaaagtggtagctttttcttctgccaccttggctttaagggtgtttagttgctcttttgtgatgttaaaagtggaagctttaggtacaatattagtagtagtatttaggtcttggtggttgttgttgtggtattcaatgtgattaaatgtgggtttaggtgggtttcgaggtttgagtagtgttcgatctagaaagggtaaaatagtcatttcaagtccacgagtaattctagaccatgattcaataaaatgaaaacatgaagctccatctagtgtatgatggtcaaaaccaaacccaattgataatccaccacatttgaaataagtaacctaaaattaaattaacaataataattcggacttcacaatattagtttttcaactttgaaattaataataaatgtaatcaggttatacaaaatataaaaccacaacaaattaaataataaaataagtaattaattacctgaattaagagcaagggataagaagaaattccaagagaatagtcaacagttggagtgagactccggagctgtggcgtaggagcaaaatcactaaagtcatcgatcacagcggttgtctccgccgtgacaaagaggacacctttttcattgcaatcaatctcagtttgcgaacggtggccttggccacctaatttgtgaacatggacgggccgcactaagcgacccgctatgggataaaaggggacaagaaccttactaagggattgtttgagaatattagcatcaaaaaagttgttattgttattttttgatgatgatccgaagaagtagatgacttgattatgatttgggctgttcatctggtctaatactgagagccaaagccgcaggcgtggagttttctccaatggcttcaccatactcctctccttcactttcattgttaccatcttaatagaaaaatcaattaatgaaatataacagctataatctctcctttatgtctcctttttcttgccctaaattgtgtttgcactatgatacattctttctctatacctaaaggatttaatgtaggttaaatatttatatggaaaatgtttacactacaagaattcccaccaatagcggcaggcctattagcggcggagctcctccgccgctaataatggggctattagcggcggagcccctgcttggccgctattggggggcagaatttatttttttttttaaaatattaatagcggcgggctgtccgccgctaatgccagccgctattactagctaataccccgccgctaataggtgggcgggaaaaatccagctcatattgattcaaactattagcggcggggtattagcgg

SEQ ID NO: 79526 - DNA, 2777 bp, Cannabis sativa
agcccaattacaattggtcaagaaaaagtggaccaaaggtgataaactatatgtttaaattaattattctagagcgcagataataaattttaatgaactttaaaattaaaaaataaataaaaaaaaaaacagtttaaagcagcatggtaaagtgtatttgattttgttctttaaatattttaaaacatttaaaaattctctaattgtggtggtgcaagcaatcaaagatccaaaaatacatcagtagacctttttgctgggaatatcagtaaacttaaattgttgtaattgagcttattagatttgtatttcgtaatgactaatatttgtaacaatattgtgtaacatgttataaaaaaaataataaacacaccccgtggaaaattcaagtaataaagaaaaccttttgccacttctttctattctctctctcttcaaaatgtataacttaagattcacttctaaacaaagtgtttctgctctaaaaccagtaagcaaaatgtaaggtcaaaacctaaataaatgaacaaataataccagtcaaatattacgattagctgacaattgaaagcagaagctgcttctgaagccaaagacatatgatggggtcctaacagatcatttttctctcctcttgcagtgatatagaggcaaagcaaggttagaaaccttagctacgaaattgaattcggacatgattgctcatgttcggattctccacataccagtcctatatccaatagacatcagcacaagctcccacagcatgttaggaatgcttaatgggttcaccttggatccaggaatttcagaccagttcactgatatctcaagcacccggatgccaaaatgtttacatagataaactaattcaacatcaaagcaccacctgtgaaatattcacaatgcaaaaccttaaacaccatcttacgaattcttattctaccgctacatttcgaatttatgcaatatttactacttagaaaataaacagagcaaggacaaggataacacgaaagataaactagatccttaatattcactctgccaataagatgtattaagaaaaatgcccataaaatttgatatttttgcactccaaaatctaaagcagtgaatatttatcaattgtaacatctacaagcaaatataccttctcaaacgaatattactgaaaagtttccttgcagaactccttgtaaacatcttaaaaccacactgattcaaaaagttgtgctcattaggaggattaattaaaactatgaaattaaaggaacaacaagaatacaactgcttgaaaaataaaatatagaaaataacctgtgtatcccgaattccaggaccagctgacaagagaaccacgagatggaaacccttcattaaaaaattgcggtaccacttcctctgaaatattaagtgaaacagttcaagtaataaatatgaataacaagaattaaagtacacataagcatcaagcagcataagactgaactgttgacaaggccttctcctcaagatgagcacgagaaccaaatgcagcaagtgggatatcagctactttaacagttgaatcactcgctgccgaatctccagagttaaattcttttctggcaactgaaaggatctggaaggcagcaagaaacaataaagttatgcactattagtggccaacaagacagacccgacaacaaaattattgagacttgagaataaataaaagaacaaacctgattttcaagtttttccaagtcagtaatctttgttgctccatcagcatccagcattagaagtaattcaccacgtgaatgaagcattccctgttttgcaatgctttcacaaaggcaaaaagcttcaatcaactgatgtcatgcatcaagggaataccatggatccttcaataacatgtaaaagaatgcatattcaagtaaataacttagatcagactcacttttctaatagcttctcccttgccatgatttctgccaagaagaataaccctcacattatctacattgtatttcctcacatattcaaaagctaccctttttgtcccatcagcactaccatcatcaacaatcaccacctgtttaagaaatcatctataagcaaataaagggataaagcaacaaatgttatactatgttctgatttttacaactataattactcatagcttctacatcacagattcaaaaagaaacatattgagccatttgtggtgacccagaaaaagaaggaaacaatatagtacctcaaatgaaaaagatttatcctttgcggcacgttgttgaagataactaaagaaccaaaatatgaagattagttacaatccaatattgtcttaaagacgtaaagcaacaatatgaaatttggaaaccctaagccaaaaaccttccctatgggttgcttggagaatcaatgttagtatgacagcatgaaagaacattctttctgatcaaaaatccagattccatacaatatgaaaaatctgaaaataaacttttaaaaagagatataataataaatattcatacacaacttacttcatcatttcctcaagtgcaacaggaagtctatgctcttcattgaatgcaggaacaatcaaagataagtacttctccgctggatcaaaaacagatgggcaaggaacctacaacagatagaccaaaacgatttcagtatatcacaacccgtaatttaacacagtaagtaaaagcttattttttctccgcattataaatctcaacagaaagaattacaagataaacacactgaat

SEQ ID NO: 79527 - DNA, 2654 bp, Cannabis sativa
aagaaatctgtcaaagtattatataacttgaatactttgtctggaacacaaactgaatcataataatatcgaagcaaaaagaagctgaacaagacaatgtatgagcagttttctgaaatgacatactaggaagaaataaattacaccaaaaattgagattaaagggatcattgtctaaacatgttcgcccatcattgcgagttttaaacatgattctgctttgaggacttcctttcctcacccctcaaacatcaaaagacatttgaaagtagacagaaaattggaattaaggaagttccatgcctactgccctgtaaatcttaatgcactaaacttgataatgactgttgccttgtaagaaggctaatcataatgtaacttaagtgtataatgagtatctctcaggtgaaaagttgccccgatatttttttacgatgtaaagaataattgtgaatcaattttaataggaaattaggaatgtcagaataaaatcattttgtaatgctacataaacgaaatcacctcatctctttttcattataatgagaaactgcattgagaagtggacgagctctcatatcgatactaaactactataaatcatatgttttgccttgtgttctgtttctccctatggcttttctaagcagagattggtatatgttataaaacagtgatctcccaaagaatggctaaagggaagggaatagcagaggaaaattttgcaaaacccacaaatacaaggcaggaagctagaacatgacctgtaattaaccttcagcaaatttattatcaataacagagtcatcaattagaggcaagtttaggtttaagtgcattacaaactatgtctttgttgtcccttttttcagttacgcatgttgaaagtcatgcaacaaaatacttcactccaaaattccccatgctaaaagggatgcgttgcaaccacttcttgtagaggcatgtccaatcttggttagcaacttaaagactaatagtggtcatagatgtcatggcagcgtggactaatatccaagtgctaattaccgtggccatcaaatagtaataccaattcatcatgatctattctcctccacagtttgaacaattaaagagtaatgcaccaaaacaccacacacacacaatgatgtggcacatatattattaatatagcagggtcttctctggtaaaggatatgctaagtcaatttgtgaaagtgcataaataaccccaaatattcaatgctagagtctgctatcaactatcataggtgtcttccttgtatcaactgggaacatatacttgaagttgaagattatgaagaaaaaaactaaggaatgggtaatataaataaatattaagggattcttctgagaatccctctaaccaagatataaaatgcaatgaaatcttttgacagtggcatatgatagaagttaataaaccacacaaccaataattcgaatcatctgcaataagcaagaaaagatattcatttatgactcgatttcaccaagattttgaaagattcaaatgaaaggtcatcgttgagcttcagacggattcagtaacccaaaaaaaaacataaaagattaaaagatttgattcaaagactacaagttacaattgggaaaaggatcgatgaaactaaccattagggtgaaacatttcggaggtaaatcgaactcgtggaggtttttcgggataattattgccgaatgtcaatctcaaactgaaaacgcctcctgaattataaatttccccaattagtattaaatcagccaaaattcacataaaataaataaatcagcactaaaacaataaattaaaattaaatagatctaccttcccagggggtctcatcgggcccaaaaatggtagcactccacacgaaaatattatcatcggacaagggactagcactgcaaccctaaaaacaaaaagaaagaacccaatttaattcaaattcgaaattgaagaaatgttaggttagaagttagaaggagaattacccctgtaggttcgttaatgatggctttaagatctgacatgagccgaagctgcgaagaggaggaggacgccatgggagatctacgaaattcgaagcggtgaaatcgcaattgcaaaaggggctaaggttgtggacaaaaactcgtctgcctatatatatataagcaggagagagagagagagagggggggttgaaatgggtttgtggtgaataagatcgaaagttatgggaatccaaaatatgaaatgtaagggtttcagagagaaaagagaagatggaatcgaaattgatgagctttcttcttttctctctctctgtttgtttggttaattttggttctgtaaatatctttcttcttttgtttttatttaaatatgtaacggtctatttgcttctcttttccatcttttatccgcatcctttcttttcttttcttttctttttttcataataatcctctcttcctatcactttttcttctaaattttatcaataaaaaaaataaggtatatacttgtttaagtatattgtattttgtgttttcatgacaaccatatttagtatcttgtgtttttaataatacttaattgatacctcatatttttaaggctaattagaatttttacccctcaaactttgaca

SEQ ID NO: 79528 - DNA, 5572 bp, Cannabis sativa
  modified_base (4335)..(4337): a, c, t, g, unknown or other
  modified_base (4530)..(4534): a, c, t, g, unknown or other
  modified_base (4827)..(4833): a, c, t, g, unknown or other
tgtaattatattgtaaattaaaaaatttctattttaaatattaattactaaattttctgtgtaagtactaactattttatagaataagacatttagaatgccagcactcatcaccatcttgtgagtttgaataacccaaagttgtgttttgtgttttatcttgagcactttgccattgattaaggactgtagttgctaatgtcacaacctctccagtagatttgttcttgttatcccacaccagatcgtttctgcatttccataaagcccaagcaaccatggaaatcagcattcgctcaccatcgacaaacctggaaaaaatctcatctagccatgaggaaaaagtcccactgaccagtgttggaacacctattcccagtctattccagcagtctttcgaataggaacaagtgatcaacacatgagagatagtttctctctcagcattacagaatggacagagttcattaacctggacgtgtttagtttgtagatgggattttgttggtaaacatccagcagcaaccctccaaagtaaatttttaacctttggtggcacttttaaattccagattttgcgccagaaaccagagctctcatttgtgtgtctctctccattgtcctcttgcaaacttttgtacacactcttgactgagtaatggcctaaattttcaagtctccaataccaagagtctccaatgattcactgactgtgtggatgtaaggatcaaccatacttggaagccaaggattcttaagcacctgaactgtatctccacacccgatacgaacagctgcccctttctttattagatgttgagactcaaaaacgctattacatacaaagcttgtgtttcctccaagttcagcagtcaagaaagatccatttgggtaataccttgccttataaactctactgaccaaagcatttggttttgtcaataatctccatccctgcttgtcaagaagagttaaatcaaagtcatgcgtgttacgatatcccatacctcctactgtcttcggacgacaaagcttgtcccaactcatccaatggatcccccttttcttttttgacgatgaacgccaccaaaactgacacaaaattctctccaactccttgcaagtttctaaaagaagtaagaaaacattcattgcatagttaggtagagcttgtgcaacagtcttgctgagtacttgtttccatactttgacaaaagtttcccttcccagctttgcaccatttgttgcatcttatccttaagatagcctaaaatgactgttttttttttcttccaacaatattaggcaatcccaaataagtagtgttgtcatctgcttcatgaatgtccacccacagatttcatctctaacatctacaacagtattatgactgtagaatatagaagatttatcaaagttgatctgctgtccagatgatttatattttaaaactttatattttaaaatataatataattactagccgaacaattacatgactttatatgcaatgactttcaaacgcacccgaagattttattttattggttttcaattagtttgttcaaatttttgagtttatggtccctaaatccccttctatctcctaatacatatgtgatttttttttattattataatagaaagaaatgctaagaatttttccacaaagtattggttaatactgaaaattagctcaacaacaaatatttatcacgacattgaattctttacaccatgatttgatctaatcaaaatataattgttaaaccgaaaacttatcccggtgatgtggacatcaatgattgacacttgacaagaaagaaaacatcacaaagttgagtagtcctgaatcatagcagtcgacttgggaggggtccttagccctgcacccaggttaacttctggaactctagaatgggtgtttagataccgccaaattgtttccaactcgttatcttttagtattctataccatgaagacatgaaacatctgattccaaggctcgagagctaaaaatacacaaaacaagactttgaaagtcaacccagacatttagggtttcacccagtgcccatgttgacaacccatttctatttttgggaccgtcttaatgtaaatgggccaaactttatactgagacatgaatttgatatgtcacaaatataattgaggcattagaatcaaattcgaagcactttcgtttttgagtacccggacaccagttgttgcatgcacctagcgcttgggcacttccatgcatcaaactgaagaaatatcctgagaatttttttcgtcttcatcaaaaacaaggaaacaagttctttctgggaagaaacagatcaacctggaggccagaagggggacctagttcccaggttgacacttagtgctgggcctagcttccaggttgacattttgtcaacttgggccatttccaaggaatttttttcgagaagtctttcaggaatagtcaccattttcatcaaagattaagatacaagtgtgtcaagaatcaaatagagtcatctaatggctagaaactggacccagcgtgcaagttgacacctggtgctaggcccagcgcccaggctgacattttgtcaacttgggttgtttccaatcatgttcccaaaaaagtgttctaggaatttttttcagaaataacgaagatacaagtaatcttggggagaaaatgagaatcctgagggcctgaaagttgagcccagtgcccaagatgaccttgtgttgggcctagcacccaggttgataatcaacccggtgtgctagtttcgaacatccaaatgcaaattttgctcaaagcattctctctggcatagtaaaaaatggggtaagagaccttgtccttgatttgaagaaccttggaagtattaaaaagacatatcgaaagcttaaagaagagcacccaatgcccaggttgacatatgacctagtgcgttgggttctgcttatctgattctgattttgtctcgagtgttcatctagttttccatagtaaacaagagttatgatctcagacaagtcaaattcacaacttaatattttcactttttcggcaaagtgacttagtcgcgaatcaggtagtttcgagtctctcaattttgtaaaatagtaacatcttcgagaactggtgaaagactttaccaaaacacagaaactagctaagtgatgtcaaaataacacttaggcctcaaaaaatacatcttcaacacgtttttcccttggcccagcgtccagattgacatcatatgtcaacctaggcactggtatcatagcaaccttcaataaaatagccacaactcactcaatactaatctcattgacgcgattcaacttgagttttgaatctatttcaatgctctataaagtcatgtctcacactccaatcacaattttgaagttataaagtccaaattatgtcctcaagatagttacgaatttcaactacaacttacatgaagtgagtcccgcggacgtgactcaagctccaaaaattgtcaaccgacctccagagttaattgcaatattagatcaccatcaactgtcaaaaatagtataaatgtattttttttcatatttttttggaatattttattattattttaataagacctcattctctataaaagaacacctcctctagttcattttttacattcaaaaatgtaaccataaggtcagagcatcactctttagtttttctctctagaatttagagctttcaaacttaactatttttcttgtaatcattctcatgagaataaaatctcaaagtagacgtagctctattactatcgcgacataggaagtgaactactataaattcttatgtgtgctctctattttacttagttacttctaactttgatctcatctatacataagagaaagttggccagatttctccatcaacaacaatgtcctaccaatttacacaattccctccatctttggctagtctttctcttaaagtcccattgcccgatttgagaatgatttgagcatgtattttgaaatagttttgacaggtttggcatggtcaagaatccatgtcatttttgaacaaaaaagtatatttaaagcactaagaatcattttaatcaaaatagtaaaaatctcacatttctgatagtgtaccctttgtgaatgtggctcggacctatcccaaaatatttttctccactagtcacaatgaatttgtactgctaaggcatgaatatgaagattaattttacgttaaatttggttaaaattctccctaattgaaaaattaagaatatttttccttttagggtaaattttaacaagttttnnntttactcttacactcgttagtatttttttaatatctcaccctacacatctcgaaaaattatgaaatttcaaagggatgaagccaagactgttttgccttaatttttttgtttcacacattgagagaaaaagtagttttcaagcactaacaatcattttaatcgaaatgatgaaaatctcacatttttgatagnnnnncccctttgtgaaatgtggcccagatccatcacggaatattttaccccactagtcacaatgaatttgtactactaagatgtgaatataaagatacttttgcgttcaatttggttataatgcctcttgattctaaaatttaaaatatttttcttttcagagtaaattttaacaagtttttctttactcttacactcgttagtgttctctataaatctcaccctacacatctcgaaatatcgtgaaatttcacaggaataaagccaagactgttttgcatcacttttctattggannnnnnnagagaaaaagtagttttcatgcactaacaattattttaatcaaaatagtaaaaatctcatatttttgatagtggtaaccctttgtgaaatgtggcccaaacccatctcgaatattttttttccactagtcacaatgaattcgtactactaagactcaaatatgaagatttctttcgcattaaatttggttaaaatgaccccgtaataagaagatgtaaaatattcttctttccagggaaaaatttaaaaagtttttttcttaatcttacactcgttagtgttctcttaaaatttcaccgtacatatttcgaaaaatcatgaaattttatagggccaaagccaagactattgtgcatcacttttctatcaaacacgttgagagaaaaataagttttcaagcaaaacaaccattttaatcgaaatagtgaaaatctcacaattttgatagtcctacccctctgtaaaatatggcccggactcatctcggaatattttttcgcactcgtcacaatgaattcgtactactaagacgtgaatattaagataaatttcacgttaaatatggttaaaataccccctaattcaaaaattgaaaatatttttcttttcagtgtaaatttgaataagttttttctttactcttacactcgttagtgttctcttaataaatcaccctacatatctcaaaaaattataaaatttcacagggacgaatccaagaccattttgcatcactttt

SEQ ID NO: 79529 - DNA, 2055 bp, Cannabis sativa
aaatcatcttaatagaatcttacattttagactgaagatgttatagcatcctcaccttagcaaaccaaagccactttagccaagctgatgagaggagaagaaagactgtcaaacaaaaaatgagcagtactactccaccaggctaggctaatttgattttaaggttggagctcctacaagtaaacaacaagggtatatacaacatttgaaaaacaacttaatgtcaacaatctctgtataagcaactcaatgtcgaaattttgtactaagcaatacaaaattcctaccctttcccacattgtcttttttttaatacagcctaccagagcattcaagtgagccacaaaagcaacttttcttcttgatatcaccatttgaatcgcgaacctcatctattgtgtaattgtaatggtaagtcaactccttcagtggaggaatattctccgcagcgaaaagcattatgtgagggattctcttgtcctggtgatcatacaggacgttttgggcataaagatttgggttgcaacaatgattgacaaatcttcctatattgccatactcagctgcatcaatggtaaaacttccttcctccgcagcttcgcagggggcagaatgtgtgtcaggctttagagtggaaagtccaccccaaagtgaattgtcattgtagttattcccaatatcaaagaggtactcgtcgttaccagttcgttcttcagcatccttctccttaagaagctctcctatgtattcgcatataaaacttcctgatggaatgaagttcagtgatctcacaccccatcccataagattcgttttgaagacttcaagctggaacttgataccatgttgactcactctattatgacaagaaggagggcacttgcaagaaggaccacactcataaacaaggggcttggcttccacaatagccccattaaagttaaatgggatttcgcctccattcttcacggcacaagagcatttatcagaatctgagcatccagagatacagtcacagccctggggagaaggagggtggtaccaatcaggatatatcaagctagttgtgtatttaaatggtggaggtttgtcatcgtttatggtattcacagcacatattggaattttctccttccctcctgaaatgtcatctacacagacaccttctcttactttaaactttttactcttcttaacttctttccaagcaagctccggttgaccagggattctcttgagctgaaacttgaaaaccaacttaccatgtgaccctatctcttgccaggacttttccaccaaataaagcccatcgtatacataagtcttcgattttccatctgaagactcacctccacggattaccctaacaggattcttttcatcaatactattcttgagagcaagatttccccgttcaagcttctgatcttcaggttctttatctgaattcatcacatttcctccttggccagtgtaaaccaagacatctgaattatccaaatcatcataatagcctccagatgcaacaatacttgttgcaagtatctttccatcatgcttcacataatctattccaccttgagttggtcgatggagaccaataatattaagctccaacctgtactggaactcatcaccaacttcgacaccggggacagctcccaaaattttgcctgtgtttacacatttgcctttgtctttgataatctttgcagctatacaatcgaacctcttcttctgtttctcttgctttgacttagcttcctcttcctgcaaaagcttccgacaaacagcttggaacagacgcaaagtctcccttactttatttcgggtaacagttccactattatcatgatcattactacttgaagtaccataatgaagaggaggaacaaatacatgagcaccacgtgaccttggagccacgtgaaaatcggactcattaagcttgagagaatttttcttgtcctgaataactagctgacctttcccttgaggggaatctggagaaatcatctgtacagactttccttttaagtcattttcatcaaccct

SEQ ID NO: 79530 - DNA, 3978 bp, Cannabis sativa
atttagtaagagtgattataatgtagctataaatatttttttacgataaataagcccccacaaagtaaaaatcctgggtccgtcactgagttcaggggaaagttattatgaaaaatcaacccaaccatattcctctcaaatctcaaaaaagttgtcaaacttcttgttcaattatataataatttcattttaaagtttaacaattacacaaatctctaccaataacactacttctttaacatgcatgcttcaaaagtaagatggaagacaaacctgtctgctaggccttctcgtagtactctcacaatgtgatatttcttcaaggaagagactccacatcccttgactacaccagcaagccaaaaagttgctccacaatgctccccatacttttcacacttcataaattgatccaaaagcctaagaaaacaattgattcccatgcaaaaagattaattcaaaataaacgtgaatcatgtctcaatgaaacagtatattctagcgagctatcaaggtaaaaataatacatagtcgatagataattcaaaaggtcttttttcaataagcaatatatatacatcgatccagttcttatgaaatatcaagcattatcactattttttcccatttaaagtcaaacgaacagatgatttttttttaaaaaaaaagtcataacattccataaagaaaccatgaaagctaagctaaccatgaatgaaagggcaccccactactccatttgagcaactgttttcccactcaacgttacacttgttttttgttcttgcagtcatagtcacatttgttgatgatgcacccatcgcttatctcactgtcgaaggccaccagccccgtcgcagtaaaatgatcgcagggcattgttgtgccccttgcagctccatagggcctccgcgcaagccatgcaacctataggattaatagagaccaagggagcggcagatgcagaatgcaaatcgtaatacttcaaactaagtttaaatcaaattcggtttctgaaaaagaaaaaaaattgagatatttttaataaatgtgttaagtgatttcattttaatggcgatacaaaactccaaggaatacaataaatcttttctcaggtttttgaccttagttgccattagataccaactccataatatatttcttggcattaaatcaaatctaatgttgaattgttttcacgtaaaactcatttctttctttattttatttttcaattagagaaatcaaatcgtaaaacatgatgttgagtctcttccaactaatgagagagaggaaaagaaaaaaaaaacaaaacctttttttatgctagtgaacaactacaaacctaaatccctaccatagatctacaaaactgttcattcagggattgtaattgcaattggtttgtcgatcgatctcttcactgacgaatcacaaagtacaaagaagaattacaataaatgggaatcaagaatcgtagagaatggtctttgatttcatgccgggattgaaaatcacaatataggtttgagagagaagaaaaataaatcttgtccttttgggtttcaatcataatattgggtttgaatctgaataaattattttttaggtttgaagaaagagaagaataagtcaatagcaatattagttttaaatgataataaataacttgtgtgtggttagataactttctttattgtctttgggatacttgggtttaattggtttgagatttaaaaattgtgttttttaaaagagtgtttgggaaacaataatttgagttttgtatgtgaaaagttgtttttaaaaatgtgattgattgtagtgtaattttgtgtttttgagttttaaaaaattagattcgtgattggttgggaatctcaaattaaaaaagtaaaagagtatttaaagagttttagattcaatgaattgaaaacatagaaaatataaaattgttgttttcattttttagcttaaaactcaaaatcatattcaaatttagtttttgaaaatactaaacctatcaagtatttttatgtggacccacattttaaattttcaaaaacataaaattattttcaaatttcaaaccaatcaaagttttttttgtttttgtaatcaaacattctatttttgttcaatgatatattcattgttttcaaaataataataataataattataataaattaacatcgttaatgataacgtttaaaaaaagatcgttaaataaaaaattattgttacataatcaattttaatatataaagaatataaagatatataagagcgcacgtaaaaaaaatatttttatcttattttaaaaaatagggcttaatgaaaaatggaagcttaccactctttctcatatactttcactactctgtctcacctatatacttttactacccacttacattcaattacagagaaaattgatgatcaatgtagttgagtaaatactaacaggtatgttttactttaattttgttatgatataatttctttctctctctctgagtattattattggcataggtattgattgtatggctaataattaaattcatttgggaagctatgattatgtttagactcgagagtttggggtagctattaggttaggtactgattttttagcataaatattgattgcttggttaacgaattcatttagtaagctataatagaaaaggtaaaactctaatgagattacgagatatatgcttctatgataattagttgttttattcattattcttttggtgtaattttgttattgtgaaatctcgcagcacatacatatggatttggacttgtatacaattttcataagtagtgttaaaactatttctaacaacaaatgtatgcaaacttggtgaatgtttgcattatttataagggaaatatctcatagacatgatctaaaaaaatttaaaataattgatgtttattatttaagattacatattttaaaaaaaatataaaagtgattagagtagcaatattgcttttttattttttttattcatttgattggtccttgttatataacattatggagcaagtaacaatttctgttgttctcataacatcatatttaaaattattccatacatgagaacttaaatgatgaaaagttaacagcaatttaaccaacttatcacattaggctttaaactaaatatacttcaattatatgcgtgtgtggtactgtgagttttcattcatgttatagaattgtcattactccaaatgtgatttagaatgaaccatttcatggacaactaattcttttttgtcataatagtgaaactatggatccatacatgcgatacagattagcctcacaagatattgtagaatttttacagacatattgacaaatgaaagtactggaaagaagactcgaggtcctacacaaatgcgtaaaatctgggaaaatcgcgatgatgtgaagataaaaattacatgtaatagttttggacaaccacatgatgaaaatgtagacaaactttcaagctttattggaacaataggacgaaatggaaaaaaatgctccaattaattataaaaattggcataaggtacctgctaaatacaaatatgggatgtgaaaaatcgtacaggtattaattatattttaatttgaaattttaggttacaaatttatgtatttttaatatttatcatatttcattatattttaaatgtgctaaaaattagtgttattattcttgcatgaaaaatttaacattccttttaatgctaagacttgaacttttagattgtttggtaaaaagcttagagagtggaaatgttttcttaaaaatatttattatttagaccacttatcatttgaggaaaaaaaaatataaggaccactactagaaaaacaagttttagtgacacacattgagtaactctaaaactgtttagtgacacttcaccgcgtgtcactaatgagggtgactggaa

SEQ ID NO: 79531 - DNA, 2141 bp, Cannabis sativa
ataaataaaacagaaataaaaaaattgtgaaaaaactcaaaaaaaaaaaaaaaagcaatgattaaaatttctaacaaaataaaaaactaataaaatatccatattgcgccgaagtggggtggttttatcaaacccactgattcccatgcaaattcatctttataaacacccaccaaccccttactcccacgagctctctctcctctctctctctctctctctctctctctttactctttagagcttttcttttttatcagtctcccctgcaactgcactacactagtgttttcaggatgatgatgagaaactaatttagtgggttaaattatatagaaaacaaaaccaataaaacaaaaataaatacatgcgcttattatgatcataaccggtcattttcggtttattgcttctttttctttcatgttatgttgggggctttggttttaacattgtgctttgggctttattgtcatgacaataatacttgtcttcttcttacaaattgaatctttttctcagtgagtatgcatatacacacacatatatgtagatagatacctttgaaggtaaaagtaaaaacagagaagagaaaaatacaaagtttctggtgtttggtgtctggtgcatgcatgtcctgtcgttctatcaagactagtcagtgagactgcttcgtttttgtgtcgattctgagaccaaggattctttcttgctcagagaattaaaggaaaagaagagcgagaaagtcggggaaaaagttgttcttttataaaagaagggggaagatttattgggtttactctgtttctgtcaaaaatggaggttactgagctctagcaaggagaaatttttttcaatggaactttttctagggtgtcttgtttgtttacagagtggttgatttccttattattgtaccacaatcgtttcatccatcattatttaacacaagtaatgagtagtaacagtaaaaaaaaatcccaactttggagctcgaaggtgtcatctatggcggtttcaggttgaaaaggcttgactctttttcattccaggtgagtcttgtgaacttttatttaactcgtttgtgaaagttaaatatgccttaactttattaacttaatttcaaggtatgcttaggaagagatctggagtcacaactacagccactaagcaagctctaatggcggattatacagctcaaccttctcctactgaaaattacagaaaacccattttgtctctctttcgttctccaagccttttcactagtttcacttcttcaaaaggcttctctgaaacagaaaccgtattaagcccaacctccatacttgatagcagtaaacccttctcaaataatctaaaaaaccccttttgctccgagtcaaatattagtaaccccaaatatccagaccgcgaaagcaaacgcccctgggacaaaataggctccaaaggaatcggtctcggaattgtggatgctctcaacaacgagaacccgggtcacaaacaatcgaaacccgagacacgaatggtcctattcgggtcatatctcaagatccaaataccaccttcttcagtactttccccagctgagtccccgaaatctccaggcgatttcggaatcaagactcgaaattcccaactgggttcttctccttttggaaaatcagcaattgggtctacaaattttagggttgaaactcaaaattcgaattcccctcgggtctttactggttctctgcctagtagtacagagatggagctgtcagaggattatacttgtgtaatcacccatggaccaaatcctagaaccacacatatttatgataattgcattgttgaaagccctggtggcactttgggatttacatcaaccaaaaaagatgatcacacaattacctatccttcacagaattttctcagcttttgttatacatgcaagaagaagcttggcccaggaaaagatatttacatgtacaggttggtttttttcctttcccataatattcttcttacctttctttcgtttatttttattgaattatgttcgttcaaaggttctatttaattaattatttatttgtttgctttgattttttaggggtgagaaagctttttgcagtgatgaatgtcgatatgaggag

SEQ ID NO: 79532 - DNA, 2765 bp, Cannabis sativa
  modified_base (2521)..(2525): a, c, t, g, unknown or other
taaataaatttacaaaatatatgtatatattttattaagttgtaattattcttatatagaggtatactttgttaatacgggatttagaaaaagaataactaattacaatttagaggttatttttattaaaaactgggacttgattttttttataacaaattagaggttattctggaatatagtattggtaaatagaagttctactgtagtatataatttcttaagcaattttatatttcttaattatcaattaagttgggttcaatgcatataaacacaattttctctcttcttagtaagtcagtcactttcattgtttttttcttgtgtattattttattgctaattttcttttgaaggaatataataagtccacgtttgggtgtttggtttctatttaaatatcactttttaattttggatttttgtagttttgtggccgaacctttgaacctataaaaaacaatctaaaatcttctatcaaaaaaatttgcatgcgcctaccaacccatcaaaattccatttccattttgtcaataaaaacacttttttaagtaatttgataaatattggtataattatcaaaaaaataaataaaaaacaaaaatttgtgtgcttgtctcatactactcgtttgtttgagtaatttgtggtgtttatattatatttaaagattatttagtatgatataatcgaattattttatatattattttttaacttctttttttagaaatttatgttttaggttgcttcagtagtttctatgtagaattttgtgttgcaaattttgatgggttgatatacgaattttgattgcgatttaggttgctccgttaattgctatatgagtttttatgtgaaatttcgtaaaaaaaaaaaaataaataaataaaattgttttaaagtataaaaatgaaaaaattcctattttatattaccatattaagtatgaggttatcctatttttaagtatgggaaaattattactttgaaataaaattagaagggtaatcttaaatactttcaaacaggtgagttctaaatatttcattcaatcttaatacaatggacttaatatattaatattttttatataactttttacaacactttatcatattctttagccaaacaatataatccaattaagagtaatataactagatatttttattcataattaagcacaattatagtttacagataattatattctccactttattattttaattaatcaaattattctaaacacctcatgctaaataccatttaataattagtagctatgaaggtttaattctataataaagttttgataattaaataaattctatgattattgtgatttattaaaactcttttaatttcattttactaatatatgtattttttatatatattaacttttgattatccttttaatttctcttcaacttttcttttagaagaattaattatcttctactctgttaataaaaagttatgatttttggcggaaattcatgcttattttacggtaaaagaagttataataacaattaaagtgtgtttaatagctttaattatatctagaccactaatttttattcttttaaatcacatcattattctagatctattattcctatttttcatttatgaattaacatttacaattaacaatatttataatactttcaattggttgcccacttgccccaatgtaaattttaatattaattgttatggaatttttacagtattaattgaaaatatactacatggataattaaccctgtaaattaggggtaagcaaaaatcgatttgttcggttttttacaaaaaaaaaaaaaaaaaattaaattcatttttcgattttcatagttataatctgaaaaccaatcgactattatacaaatgtaaaaaaaaaactgattgttttaaaccgaccaaaccgaacttcatttttttaaaacattatacaatgtgcccatcatgattcttatacttttattctcataaaaagtgtccttaacataaaaattagttagaacactaagttagaccaaagatatatttaattatattcctttcttccccaaaagaaatatataatagtaatagataaacactaaagaaaataatatatatataaggtactttttaggtgagagtacgctctcacacataagagcatttttatagcttttaattttaaatttaataattttagtttgtttgcttagagcatctctaatggaggtataaataagtagtaaaaagctaaaatatagtttatttaataaaaagtattctttaatggtatgccaaaaagtgatataaatttggcacataataaattttgtaccaaatttggcacaatatttgctatgatgtaaaatttataccacaataaatgcactattttttcatttatatttatgttatttctattattttattagtatatttaaccatcacattaaattatgaaacatttatattatttttttattgtcttacatattaaaataannnnnaaattgattataaagttattagattttttttttttaataaaacattaattagacactaaattttacatcaaaattttgtaattgtgcattagaccacaaaattaaaatttgatataaatttattacaaaactactttttgtgttaaaaataacctaatttttacatgttgttcttttttttttttttttgagaaaagaactgttattataaattatagagcgtcatttacaacaacagag

SEQ ID NO: 79533 - DNA, 1998 bp, Cannabis sativa
attacataaaaggtataaatgttaactttaccttataaaagtatttttgtaaataaaatatcaatttatattttctatttaataattccaatgttacaagtgcccaaagcaccctttatattttgatatttacaattttttttaaattgaaatcgttggagttgcaaataataataataataactcacattcccaaactttgcccggttttccgttactcagatcatcgagtctccaacaaacaacacgacatgagcagagagtaataacaaaattaccaaaacacccctttaaggtctgttggtatattagagctctgcttcttcttcttccatcttccccaagaggacttctgattttgggttgttgactggagccgagacaaaaactaccatctggtagctactatagagaaatcgaattcaaaatgtgggtccgaagaatttcgcactgaatatataaatatacacgtataaaagggcttcgccgcttcgccccgaaatgggcttgttctgaaatttctattttggtcttcgctatttcgtgatcgaattcgatatgagtgtttcgagaaaatggaagtttgatttgggtttcgtagacgggaatttttttttaaggtgatggtcatattatacgtgatgattcaagactgaaaggtcttttcttttccttcttcgtttccactattttctttttggccattttcaattttagagattgtatatttattcgaaatgggtgatatgtgatcgaactgagtagaaatctttagtgggaattttcttttgttagagaaaaggattgaaattctgtgaatagaaacattgcatgtgtgttttttggtttggtcgatatagtagttttctgccaaaatgtccggtggaacgccggttgccggcggacttatgagacataggcatagccagggttatgcgtctagtggtgatgatcttgaggatgatgcgtgctctaggatgcgatattcaatggagccaactccaagaatttggtcacgaatggagattttggagaacatcctttggcttatttcagcagcctttattgtctactatggtgataggcattccaacttgatataccttctctggcatgatggtcgaatcagaaggtacaattctactttgttcattattttttgtttatgcaactgttgtattgctactaatactattaacaaactaatggttcttttgtttattctttgttgctttggtttattctgcattttctgactggacaagatactattcctcttgtgttgccttatatattatatattttaaacttggagttgacttgattttttcttgttctatatggttcatgttaaatttcaattcatataataaggattccttaggaaataaactggaaaatatcagtggaatggacatgaagaaatgattactgtggaacccacttgactaataatacagtaacttgagccaaactatggcctttcagaagcatttaacactgtggggatttattttcgcatatttgtgatcttgtaatgcaatatatgtttatcttaaggtgaaaaatggttggaacccaaagcataagataacatgctataatagcatagatcaatttcttgaagtggaatgtttttatcttcatattgaactcttgcagattcatttttttcccaatatgttctcctgagttctgctagattgatagtatttgttattggacaattttgtgtaatataaatcttgtatgctcaatgttgctcttcgtggatttactcaatgcttgctctactatttcatcaatgggaagcggttaacattggggatgaggcagatggatagccagaaatttgacttgctccgaagtgttaattcatttttttagtgttttatttgtgtaaagctatgtctgcactctgacatcaaatcaaaattgttaaatgatactaagatccaattttagatgatcgtgtgagacagattcaaggaggtattt

SEQ ID NO: 79534 - DNA, 2772 bp, Cannabis sativa
  modified_base (2677)..(2695): a, c, t, g, unknown or other
ctgggccgttcttgcaagttgtaaaattatgcatggaaagcataaagaacaaggtattcagaagctcacactttcaaagataaccatgtcacaaacattctaaagcttgctttcatatctcagtaaagtatgtcaaagtaattttatcctgatagtgaaatcaactcagctgaaagcagatagtagctagttcaacccaattacataaactaagttgtgataataacaatgtcctacaccgggtatctaactaaactctattatttgtattttgcggtaggcagcctagaagtttctaagtttctatgaaagattctgaatttgaagcataagctgagtacaaattatgagttgtgataatcggataaagattcaaactctaattaaacagcttggatctaataaaagtcaacccagaagttgaagcaattctaaaaagaagtttcagttaaaagatcaaaactattgcggaccataaaaaggtgtaataatgagataaattcccctaccaaataagaataagcaacatctggatcgatgttcgcatcgtcgctgttctgataggagcaagcctctccttcttccagctcagtgtcctccatatcttcccgaagactaccaacaccaaaccctaaccctagccccttcgtcgcatccctgctcccaaccgaaatcatccaaagaaaccctcggtcaagcccccaatccgtccagaatccgaatccaaactcgaagctctacctgtgacccatttgggatagtcacaaacagagcaaaacccagatagaaattgaaccaaaatcatcaaaaatagagccgatcacaaacccagaatcaaattaccaaacatttttattttctttcttaaaaagaaacacaaaaacccccccaacccaaaattaattataataataataaaaccaaatcaagaattagatgaaaaggaaaattcaaaccaaaaaaaaatccaacttttaacgaaatcaaagcttcaatataccctgagaaacctttttggtgaggagtttgatgattgaataggtggaatcaattttagcaaggctttcttctctcttttctctctcgttttcggtgtatacagcagccgcgtttatttccttctttttttaattttattttatatttttaatttttaataatttaatttattaatgattagtattaatactctgttatgttccattttctctctccaaaagttttgtgctcttataaaaattaatttttggtatgttattatttggtaacattacgatatgttactaaattgacacgttttttgggattgcattttagaacttgcccttttggttttctctcccaatattattaacacgctacacacggcgcgtgatttcacttcccatcattttgttttatctcaacatttccatttaaggccccgtttggtatgtatagagtaggattgtattagcttggataaactattttttaaatattttttttataaatggaaatagtactttaaattaaataatatggaataaaaataataattttaaaaattatgtcaataaaaaatattccaatatttttatgatagatataatattattttctaatttaaatcaattactttgtaaataaaacaaaatatataattgtttttgaacaatggaaacaaaaaaaatatataaattttattggaataattacataaagtattatttttgtaaaaaaaattacgtttaaagatttttttatatttttacggtcttttatagaaaaaaaaaaaactataaaagtaacaaatatataacattcaaacaacaataaaaaaaacaataacatataagtaacaaaaaaatcaataataaattaacaaaagtaccacatagtattttctataaataaaatcatatatatcgtaaaagtatttgaaattttgtacaactgtattttataatttttttattatttttatgtatttgtaaaataatctcaattttattttattttatcatacattcaaaaaataacttagaaaaaaattcccaactttggactaaattaactcatccttttgatgggttaataaagtcccatgctcttaggaaaaatttagaaggatagataaaattgtccaatccaaccaaaacttgaaaaattgccaaacataggttagggtaagtttgttcaatcccaagctcatatccaaagctccaaacatgccctaagggttataattatttctttcaaaattttaaaaaattcaaaaaaaaataaattaacacacccaatataaggttctaacagttttattgcacgagtgaattttttattttatcgcgtatgaaatagattatttgaataatacttttaatattataaattattataaatttctcaaaattttaattataagagtttacttttttatggcataaataaataatattatggggttatgagtttttttatttttttttacatttatatgggattttttatgctatatttttgtaaaaaaagatatttgtaaaacaataataagtttcgccagaaaagttagtgacaccgaaaaagtcgtcagaaaagtcaccgaaaaaaatcactgaaaaagttaccaaaagtaaatgtttcaaatataaacaaatatagaaccggttctattatataatgaataaaaataaannnnnnnnnnnnnnnnnnnccggttataattgaaatataaccaattttcatgtaaaaaaaaaaaatataacaaattttataacataatgaataaaa

SEQ ID NO: 79535 - DNA, 2155 bp, Cannabis sativa
atatatatatttagtcattgtttctgagctttcacttcagcagtcttataataacaaaacattttcctgtaactttgctaagatatatgtggtccagattgtcactgaaaaattgttacttatagtcagtctgtttgcgagttctctataaagttcaaaaattaattgcttgtggagccatcacagctgaaattattcttgctccccatcaatattaagtacttaatttgccgcatattaacattaagcacttaaatttcttttggagaatatttgttaatagatgctgtattgggactcttatgtcaattctaaaaaatggagatagtgtggttttctttagatgcatttgtgatctttttgtgaaaatggtatggttgatttgttagtgtaatgggtgatctgtttgtggagcagctcaatggctgactaggactcaatgcgaaatgcgaataaaggttcgtatagggattaaagggtatcagagtaattttcgtttgtttgatacaaggactagaaggttcgatatgcggtaagtttgctgggtttggtgtttactgaatcacattgtaagagctgagctcttgggagagcgcaggtctcttgaacagctggagtactttgtatttcctttgaacaataataatattcctcctatgttcccaccagttctagttattgctttattgtgtttctgcagtttactagcttcagtgtatttttatttgtcaagggtttgttgtctgggatgttttgtttgatactatgtcccacttgatttttttggttcttttggcaggttgaacattggcttaatgaattatgcgaagagttgaatgaacggatttgctctgacttgaaccaaaacagaagaattgcacgcacactgaccctgcatgctacagcttataaggtgctgatatgatatctcccatagccttgttgtttgaaccccttttcttgtcacaatactccccacctcttcagtgatgaatgtagcttgtatttttcatgcatgcataattttgttcctttttaaagaaatgaaattagtcttacaaatcattacaaactagtacatctcatacgcactttacctcctctagtcttattgtaatttttgctttcattattattattgccatctgattcttttttattattgctgtcattttacagtccagtgattcggatgcattaaagaattttccttccaagtcttgtcctctaagatatggagctgctaagatgcaagatgatgccatgaaccttttccaagctggactacgtgaatatttgggatgttacagcaccagagtgcttggaactcaaaacaatggttggagaataactggactttctgtgtcagctagtaaaattgttgaaataccttctgtaagtctcaagttactcttgccatcattgttttctcctaggaatttctgttcctggttgatgtaccccaactaggggctctagtgaataacagaggtaataggcaaaatcggaggaaattgaaattagaaggcaatagaaaacttacggagatctgatatttgaattttgaataagaaaatgagaacacacaagaacatgcagtatgcgagagaccttaactctccaagaactactgctcaattaatcacaatcaacatgctcaccttcttttagagccaaaaagaaaagctccacttgttctacgtgccctccattttatatcactacccatcaagacaattactgatataccccttttattttctatattttatcaatcacgtctcttcctttaactcaaaattcaatactattatctctaatctgtacggatgatgtgtcacttctctgggtgacacgtggaatgttttcaggatctgtgcagaaggtgtttgtttattgagattttcggaaaccaattaattagagtttaaggaaaatataaaacgataaataatagacaagtaatttttacgtggttcgagcattaataatctctagtccacgagtctgttgtattagccttgccggcgagtgtttgaatattacaaatgtttatattataaatattaactccgtattcctattatttctcttctagaagaagaaagttagtaggaatttgggcagaggttctgtaagtatgaagttgttcccc

SEQ ID NO: 79536 - DNA, 2928 bp, Cannabis sativa
  modified_base (2829)..(2834): a, c, t, g, unknown or other
ccatggatttgtagctctaaatttaaatggacaaaatgtcatggcaaggttctgtttttctttttttggtgaatgggataagaaatgtacttgaagattggagggatcctttcattgtttcattagctatccaatgaacccctttagaaccccacttgaataagggttttatttttgggtgggtcagtctctgacctctgtttttagtttggtacaattttaagagtggtgacagagaacactcagttctgacaaatatttgaagctataaagggagaaccaatacttggccaatgaatggtacataattttacttctacaaaaaataccacaactcacattcattcatacataccatctggctgatgttgattgtgtaccaaaaattgaagtttatccatggatgtccacttgagcttgatttttattttttagtgtttgtgtgtactgttgtacaacttaaaaatgaactatttcaagtgttagaagctctttcattgacaaaaaatctacagttgttatctaatggccctataggattgctcttgaatcttgatcagtaaaatagacatcaagtactgacaggttaattgcacaataggtccctcaactgaagtgtaataatgatttggtcacttagcttttaatatttaccaattaaacctatttaattgcaatctgttaggtattaaccatcagcaataaaaaagatatattactttttttttccctcctcatcaagatataccggccaagtgaaaatggaggaggttgagattttttagtacttaaaagtaagtttaactgtaaaaaaaattacgaacccttaataattcatgatgttatgtacataaaatccatgtcaaaattatgttatcagcttgttgtgatttgattgtggattgtaaagtaaagggtttaacagtaaaaaaattaaactcaatagggagaatcgtcacaagttcaataatggagggagcaaatgtgccaccatttttgacttgggacaaaaagaagaatctaacagtctgattttactttcttttttttgcaaaagaatctgaatattggattaagagataacattcaatagtaccatgtgaaaatcagtgatttcagatttgatgaggtacaaaaaatccagaattgacaatagcaaaatgtattctaattggagtatattttgctattgagaatagtaattaccaacattttccaatcaatattttttctcattctattgatttaagactatgttcaaaagtaggattagattgaaaaatataatgtcagagtagatacaagttaatcatttgcggccaacgataaattattaggaaaaaataaattggatgaaagtggtaatttttttttcgttctttctaattattgaattatataaactgaagatagaggatttgataagataaaattatgaaaaaaaaaatcaataggattaagttattccatgctaggggatcattttggttgttggggtgttaatttttttttttttttcattgccccccttattttcacaacaaattaaatcacagaataatttaactttccaaacatgacctaaatgttacttctacatattgcaaattcatttgcttacagaattattagttgtaattaagagtttttatttgcttggatattttgatattatttgaacacttaacattatattttataaataaataaagttcaatcaaattataccccaacatttgaagaaataataataacccaaaaaacatttgaagaaataattagtttcatttatataccaaatgcaaatttatatatataaagattttttttttgtatcattgatagaggccgactcttaccccagtgagccaaatagttgataaaaaaaagacagtgagggaggatgtttcaaaaatcaccttttttttttcgagaaaaaaaaaaagaaaatcaaatttctttgattttaactgttgatattatttccaggagctaattttctatagtacaatattcctcatcatatactcatttccattgtgataaagattccaattaattaaaagtagctttagctaactaagcacattcatactacttgatcaatttatatatgttaccaaaccctacagactggggccacaaaatttatatatataatatagataattagggcctaggcataacaaagaaattaaagtttagctccaagaaaatctatactatagaaataataataaggaaaatgtaatcgacgaccattccaaacagccactttcgttcaatatgtactatagatttatatatattttcaaatattatggaatattatatttgtgattataattgcaaaattgcataacttatccttatctaaaagatatatatataaaaaatctacgatctacgaccattccaatgtttgttatactagaactatcataataacgttgttgattagtctaattctttcacctaaattacaaaacaaaaccagacaaaataataaagttttgtccagctagataaactcattaatgaacaaaataattgaaatgagatgatgtttaagtgtgctttatccataactactagcatagttaagatgatgttcaatatagtaaaaaataataaaaaaaacaattatatatttttcgcttcaaaaataaaaaaaataaattatctctcactaggattggtcaatatatatagttgcctacttttattatgaaggagatgcttcaatcttttggaagttcataattttgtttgattaactatgtaatagttctacttttatttttcaattttcatatatatatatatatnnnnnnatatatatttatatatatttaaatggtgagggattgagctaaatataatatttttttgtgcccaacttagttgtcatttttttaaaaatgaatt

SEQ ID NO: 79537 - DNA, 3470 bp, Cannabis sativa
tcataacataacatgtattaatcatattaattattacgtataatttacttaatccatgatatgaacttgttcttagaaccaataccgctgtcaagaaattaattgtatttttttctaaaaaaaaaacaatccattattgccacataaattgaaagcattaatttaggcctaaattaatataaacgtaagacctgagagacgctgctgatgagttttgaccgtatgggttgtaattaacgacatattgcattggtggaatttgggtattgttcatttgtgcatgctgactttgttggcccctgaaacaaataaccacttatataatcataaatactttttactacatatttatatatatatcattacgtagtgtaaaaattgtgtaatttgaaagtgtctcaatattattggtatatatctaatacttaacatgagtaattagagaacatataccaattatatcccggaggattaatgttttcaactgcacttaagttagcaccaatattgttcatcaccaattgaggagtgaaaatcacttgctgggctgagttatttatctgtctattaaattgatttacaactcccattccaccagtagtattcatcatctgctttaaaataaaaaataaaaattcatcatgacatgtacactaataattttagtaataaataacatcatgatgatcatcatatatattatacatactgtgtttggagagaatattgaattgggtggatagatggacgactgtggttgctgatattgattgttgccgttgacaaagtttccatagtttgtactcatgttgtttgggactaattggttattgttgttcattattgtcccaagttgactaatgtcatttgtacacataaaaattcattactgattattaaatgtaaaataatatattttgacaaatctaaacacttatataatatatgtttaacttactggggtgatacgttttcaggataaacattttggtattgatgatgggatgagtaaatcatattagactcatgatgattagttcgaccaaatgagtgagctattccattcacttgtgcagcagcaacaacctgattctgattctaattaaatttaaaggaacttacaattaaattactgagttatatatttagtgggaataataaaatgatcatataaaaaaaataaagtgtacgtagttatattattattaccgtctgtagaattgggatagttgagagtggtcttgttcctgttctattggaatggtttgggctctggaattgaacattattgttggtgcttggaataactgatcgttgaatgttatttctcatcatcacatgattctcaccgttgataatggatgagttaattacattattattattattattggaccaattatttcctgctgatgaccttacttccgcataatcctacacgataatatatttaattatacagcagtataaccttcatcaaaaaaaatactatattcaacaataacttttaatttattatgaaaaattgaaattttaattcaggccaattataaagagtacctctaaattataattagtagttattcattttttaattttcgtattaacaaaatataattctatataagaataattacattttaaaaatatatatacatacattttataaatttatttatatagaaataataattttattttaaattataatacatatataaatattatatgcacaaaaaataattctattataatatagtattaaagattgtttattggtattgttgttccattgatattttttttgtgtttgatttttaatccagagtaactctatttaagtataacctctcaattaaaatataatttgcttggttttaagtatactattaaatagaaattttactatattaataggtataatgagactttatatatatataattatatgaatgtaataaaatgaattaataccagcaatattggaggatgattttgggatacagtaggtggtggtaacacagaaccagttgagtgttgagagttagagtttggttgctcatcacgatggacattgttaacattgacaatcggaggaaccaagctagtaatgtctccactaatctcaatacttttttcatcatctataatatgtgtcaaagcctctaaattgtggttcattccggtatgttcttgacgcccaccatcacaatttataattccattggcatcatcgccagttttctgtgccaagttatcctgataatcacaacacataaataaataaataaataaatatatggaattaattaataatgttggaagtttatctttcaaactaataacaagtattggagaatattgtctcacatagatttaatgtgaaaatattgagccataattagctttcaattaatttagttggaaccgagctattttgctcctttagttttcagttttaacagtttgttatcttgtatgagctacagttatgtctcattttatttcagatataacttgtactgtaaatgttaaagggagagagagaggtagagtgtgagagagagcttgagagagagtttgagttctttgagattaagaacttgaagggagagtactctgggttgagaagaactgctactattcatttggtgtgagtacgtacagagagcagttacaagaaccagttctagcacctaacaacaaggcactgatcaggtggatcagactgagctaggagactacaagttggctcgagacaggaatagaagggagattagaccacccaaaagatttgtagaagctgacctcatagcatatgctctagttattttgtaatctgaatagataccagaaccaacaacttatgaagaagcagtagcaagcaagtcaagaagaagtggttagctattatagatgatgagatggactcattaagaaagaataagacttggattgtggttcctaaatcctatggttaaaaaataatctcttacaaatggttgttcaggttaaaagaaggcatgacaaaggtgaaccacctaggtacaaagctaggttagtagctaaagacttcacaaaggtggatggaatagattacactgagatattctcacctgtggtaaaatacaagaccattaggatgatgctttctgttgtagcacattatgatttggaagttgaccagttagatgtcaaaactgtattcttgaatagattcctagatgaagagatttatatggagcaatcacatggtttttaggtggaaaataacaagatagaagtggtatgtttactcaaaaggtctttgtatagtttgaagcaatcactaaagcaatggaacaagaggttcaacatgtttgctcaagagattagttttgtaaggtcaaattttgattcttgcttgtactataaggacctggatacaactagcattgcgtttctgatattgtatgtttatgacatgatga

SEQ ID NO: 79538 - DNA, 2111 bp, Cannabis sativa
actcagaaattctcattcactttctatttctcccttcatcttcttcttctttcctcttatctactttatattattttataacaaatacttattaatacaaataatttgtcaattaaaaatgtacaaacttatatatatgccacaaatagaacaaatatgaaaaatattatatatgctacaattacattttacaaaataataataataaatataattaatataattatttgggcttacaaattttatctcacaccagtcactagctttgaagttctaactaaacattgtctacggtgtctacttaacttatgtttctacagatttggatcttccattccctatcttgaatcgctccattatccaaattttgatataatatatgacttgcaattgttaatcataaatatcaaataattcatttattaacacaacccaactcataagtcccataataatacacaaacataaccgcacacttcttagttttcattttagaaatcaatcaaaaacagtagtacaaactggaatggttaagcacattaggaaagaacagagatgtactctgctatgagaaagaaagcttatttaacatgctccagttttcctttccttgacaaaacgcttccaatgtccggtcacttcttcttcaatctgtctatcagtcttcttcttgattgcagtgtcagtattgatcggtgtggcactggtggttggaagatcgtccagatccttcagcactttcaatatgtctgagatcagtctctccaccaagctacggctgaagtcctccctaatcacaacccgaagaacagcgatgtgttcggcgtcggcaggcatggtgtaggctggcacaatccacccaaaccttctcaagctgtctgctatgttgaacacagtgtatttgctactgtctttgagagagaatgccacaacgggcacccctatgtcttttgagactatgtcaaagtgccctgttttctctaatctgttttgtagtatttttgcagttgccatgcagttttccattatgttcttgtaacccttttcaaataacaatgttgttagtgttaggcacacacatgaaaatcagtcatgagaggaaacacaacatctattttaaaatcacttggatggcactaggaaatacctcaaatcccaatcggatgaattggtaatactgagcaatgatttgactagaccctgccaaaaaaaaaaaagtattagaagaggccagtgattgattattaaaaaattcaatagtaaactaaactgctatacctttggagaagttgagggtgaaagtaggttggtcagatccaaggtaattgatatggaaaataaggtcttcaggtaagtcctctttgtccctccacacaacccatccaataccagcatagacaagcccatacttatggccactcacattgatgcttttcaccagaggcaatctgaaatcccattcaatctccggataaaggaacggtgcaacaaaaccgccgctggcggcatctacgtgaatcggggtgtcccaacctgtttccttgttcttgagagtaaggagttcattgacttttttcacatcctcaaactcaccagtcaatgtggagccaagaatggctgcaacacaaatggtgttctcatccaccatctcaactgccttctcaggatccatcacgtaatatccctcttttagtttaacctctttcagctcaacctcaaaataccttgcaaacttctcccaacacacctattgattcccaccacctcaatcaattagcaaaatgtaaagatagatattgctaaacacactatatttgacttaaaatacaatgattttagaaagtcggtttatttaaattggaatgtgagatcacctgaacattggcaccagtgactatattaggcttatcaaagggctttccctctgctttcctcttttgctgccattttctcttgaaagctagaccagcaagcattatggcctctgatgatccaacggttcccacaccaattgcagcttccgtatctcccgtgggagcattaaacaggtgtgcgatcatgttcacacaacgattctaagtacatgatcaaaaagtgtcagtgatgatcaa

SEQ ID NO: 79539 - DNA, 2789 bp, Cannabis sativa
gacacacacacacacaaagaacttaagctagatcctcaaaagtatggaaaactgtgtactaaatttgcttgcactttcttcactgattctgctaccctatggtgttgccaaagctttctacaccatttggtggaaacccaaaagtttagagagaaattttaaacaacagggaatcaaaggcaccctttataggccattggttggggacgtgaaagagtatgtgacaatgataacagaggcatgggacaagcccctcaatctaacccatcaaatcgttccacgtgtcgatccattcactctagctactgtacagaaatatggtaagttcaaccaatatatgcatgtctgtcacatactatttataattttttagaataagagaggcttagctttgatttgcacagggaacatatcagtggtttggtttggaacaacaccaaggctgaccattaaagatccggaattgatgaaagaaattctgtccaacaaacttggccacttcagcaagccttttataagccctgttataagaattttgactagagcaggattgacagttttggatggtgaagagtgggccaggcatagaaggataataaatcctgctttccacttagagagactcaaggttttcatttctcaatttctcatgtctattctaattttaaactaggagtttgagtttctacctagaacaagtgatgttgaaaacaaggtttgtgtgtttttgttataggatatgataccagcttttacagtcagttgtagtaagatgataggagaatggaagagcttggatgttacacatgggacttgtgaagtggatatgtgggttgaatttcaaaaactcactgcagatgtcatttctcgagcagcatttgggagcagctatgaagaagggaagaagatgtttgaacttcaaaaagagttgatattgctaacagtagaagcaatgcagagcatgtacattcctggtttaaggtgaaaattcactcactagatgaaactaattttatttctatttaaagaagaataatcaaatgctttgcttttaactttaaagcttcccactgtataggtttgttcctaccaaaacgaatagaagaagaaaacagttggacaaggagatcacattgatactaaaagaaatagttcagaacaaaatgaatgcaatgaaaacaggacaaaccaaggttgatgacttgctaggcctaatgttacaatccaacaaccagaataatttaccagaacacacaactagcaagaaaagtaatggattgacacttgatgaggtaatagaggagtgcaaacagttctacctggctggccaggaaacaacatcttcctggttaacatggactattatagtcttagcaatgcaccctgaatggcaggaaaaggcaagagatgaaatcctggaagtttgtgggaagaaagaacctagttttgaagctttaagccacctcaagattgtgagtattcacttcaatattttcttctttctaaatcctaaaagctacttatgcaatgcattttaactagttcacaatgcacaaaaaaaatttatgcaggtaacaatgatattgaatgaagtgttaaggctatatccacctgtgattgcccagtatcaacatgcttacaaggaaacaaaaataggtcacatcaccattccagctggggtggatctaaacctacctacgcttcttctacatcacgatcctgcactctggggagatgatgcagaagaattcaaaccggaaagattctctgaaggaatttcgaaggcaggtaaagacaaccagctagcattctttccatttggatggggaccaaggacctgcattggacaaaattttgccatgatagaagcaaagattgcagtggctatgattctacaacacttctcgctggagctttcgtcttcatatactcatgctccttatactgttatgactcttcaaccacaacatggagcccatgttaagttgcaccagctctaagtttgcagttagttttcatttcaagattttgtcaataatgtggtttgtgaatcacaaatgcttgtgtgaaattgtgtagaagttttaatgctatgagaggtccaatattgggtttctcattggtgacaattatgtttgacagtaaggatgatagtattgtcttcttatataaatttactttgatttcaatttccttaaatcaactactcatcataaaaaaacaaaagccaatattagtgaagaagagatataatattttatgaggattcaaatagcatgaaatgcaatctagtgttagaaaaaatgttccaccaataacaaaatgaagaatgatcaaagataaacttatatgagatttgctcttatttttcattttccccttcattaaagcattagtaaacaaacttgacaatccattaagtaaacatcacattttgctagtcatgtaacctcaaaatttgacattcaaattttttgaatgaaaaccactttggttttacattgaaacctctcatatatgctggttgagctacccaacaatgcaacaaggcttctccgcatgattgatagccacaacatcctgagaaaacacacaatccatacctgaggagacatgcatttattagtttagaaaaattaagctaagaaaagaacaataatgatgatgtgtagtgtatataatctttaaagtttcagttgaatactctactcacatcataaagagtattgccattctttagcttgattctgtacacaaacattttacctggcgtttggttggaggtaatg

SEQ ID NO: 79540 - DNA, 2536 bp, Cannabis sativa
atttaatgaatattattagtgtataatatactaaagtatgagagaaaaagagatcaaaatctactaagatcaaaatctactaagatcaaaatctactactccatcatcaatcccatgtatatatttatatataggaatatatgcatgtatgagggttgagcatcataaaagcatacataaatcctggtatttgtaggtttatatttttttttcatcaaagacatcctgcaaatctttgaaaacgaaaaaatatacatcggagaaagttttctttcaacttcgagtgccaccatgtaaggcgaaggaaaaaaaccgaaaaagccacctagtgaacggtcattagcctctaaatcaaatctaagaaaaaatttggtcaagacttctcagcgtgcaaaaggttgattctttcagctttttaacaattgaaaattgccccctttgctcaagacgaacctacaaaaacgaaaagggaaatggtcgaacgttcgtgagtaatgtttcgttatttgtcatgagaaaaagtctagttcgggttttttgaaccttgaaattagaatgatgaagtgccaactgaagagtatccggcagctctcatctctttgagtgtcccggccaaccaatccaagccctcataaagtccatctccacggagtgcacatgtcccttgaatgtgccattttctgtttttgagatcgaagaggccaagtccttcgcatacttccattggtgacattgctcctttctttgttatggaaagagaaaaaccgaaattaggcaaaaattaagagtgtttttctcgaataaacgaaatactagtgcaacataccatgtcttgtttattggcgaacaccaagatgacactgttgagcataaatggatcgctgatgatagcctgaaacagagaaatgaaaactaattaagttagaaacaaacagctaagggaatattttgaattatgatttgttaatgaatcctgaaacctgaaattccgcctttgcttttgtgattctctctcgatccaaggaatcaacaacatatatctgcaaatcgagcaaagaaagaataactctcataaacaaggcatcaagcaagaatactgaaaacactagcaggaatattaccaagccgtctgtgttattgaagtaatgcctccatagaggccttagcttctcttgaccgccaacatcccaaacagtgaatattacgttcttatactgtactttctccacattgaaacctgcaggagaccgaaatatgtttacagagaagttcataaagaacagtagtgtacagtaatcttcgaataggtataaatagcaaaggaaatgatatccaaatgtaagtacgaacgggaactttcccttaacagaaaaaagagaaaagaaaagtcttaaaagagaatcgtgatgctatgaaagaacccaaaatctcaacagtcgaaaagagtaaaaatgagtaatggcacgaatctttttgtaccatcccgcagaaaaggaaggaaataaaaacgagtgaaatcaatgttcggtggtggaaagaaacggcatatagagtaaaatcttaaatatgaaatacaaccacacatcaaaccaagaggggtggctcaaatggttaggttagacatgttgtttgctcccacaatgtccgaggttcgagtctgttctgattaactataattcagaatgggctcaaaatcccaacagtcaaaagagataaaaatgagtaataacacaaatctttttgaactttccaacagaaaaggaaggaaaaaaaacgagtgaaatcagtgttcagtggaatgaaaacaacacaatacgttaaaatcttaaatataagatacaaccacacatatcaaaccaaagggggtggctcaaatggtaaaacatgtcgttccctcccacaaagaccgaggatcaagtccattctcaataaatttataacatactcgaaatcccaacagtcaaaagaagcaaaaatgagtaacggcacaaatcttagtgtaccatccaacataaaaggaagggaaaaaaacaagtgaaaacgacatacactataagatgttaaatataaaaaatataaccacacatatcaaaccaaaaggggtagctaaaatggttagacatgtgattcgctcccacaaagtcagaggttcgagtccgttatgaataactataactgctacaatttcctggtccacagagcctagttcataaacacaagatacaaccacacatttccaacttcaacaactaaaaattgacataccaattgtgggaacagttgacaaaacttctccaatgtgcagcttatacaaaatggtagtcttaccagctgcatccaggcctagcattacaacctaatccaacacaacaaacatgaaacattataagcaaagcaaactaatcaaacactaagagtaaaaacaatactagcttactcaaaggtaataatacatcacaatgctcatcattattacaacctaatccaacataacaaacatgaaacataagcaaaagcaaactaatcaaacactaag

SEQ ID NO: 79541 - DNA, 1930 bp, Cannabis sativa
tgccgcagccaaaaatggatgctccagaagctgactgcagctccaccgctgcgtcgggtctctacggagacacttctggataaaatctcgacccgtttccgacaacctatccggaaaagctggcaactcgtcggagaatccgattcgactcagcgtgtcgacaccgtgatcctcccacgcaggcttcccggtgaccatctcgatgatcgtgcatcccaaggaccatacgtcactctccggcccctgagattccccacgaactacctccggcgccatccatagcgggcttccccgtggcgaaattggagctccggaatcaaacatggagtagtctttacccgacccgaaatccgcgagcttaacaagacccggagcgtgaccgactaagacgtttttgcccttgacgtcgcagtggacaatgcctctggagtgtacatgcttcaatgctgaaaccaagcaccaaattcgagatcgtaaggtcaattcatccacgtcatcatgatcctctgttacagtgccacctggcaagtactctaagtggatgttcctaaacgacgtcgtcttttcgtacgactcgtcgtcgccgaggtactgaaccacataaggagaagaagaagaatatgaaagtgatcggaggatccgaatttcgttctccaaagcctcaagctgactaggaatacaagccatccgatcaacggacttgacggcgaaaacacgaccgtccgatttgtcgactcctaagcttacgttgccgaacgaacctttgcctatacactttcctctgacccaagaaaccgtatcattgttagagtgaagctttgtgactcttcccatttttctctactaagtatcttttgttttggtggtgttgcccttctcttgtaatctagtcctgcctcttttgctgggtccaacttcggtatttatactaactagaaatttcattttttagaaaataagtcatttactttttattcctgggtctgacctggaatttcaaaatggataagctaattattaaaaaaaaaaaaaaaaaaggttcggtgacgttacgggggagctctgtttttttaattcacaaaaacacttggtttgtgttgacgtgaacgggatagtggagcaaagatactgggttttatccttatccatcattctctgttttttgagatttcatctcaaccgttgatattttggacacgtcgaattttatttattcgattaaataaaacgatttgtctttgtcaaagtaatgtactggttctggttatacgaattttgacatgtggtgactagagtaataatcgggtgattcgtcgaatagggaatttaatttcattatttattttaattattattgttattttatttttgtggttgagaaaaaaaaaacaaaaaatatgatactttgtgagggatcgtgggagcaaacttgttatgttcaatacaagatcctaaccttaggattagctgacttataaaaacaatcatgtgtctttatggtacggaacactatgatctctatcctcaaatacttaattaacaataattaagttcattgtatttgattttatggcaactaataagtagttaattcttttttaagtagtattgctcattttatagagggagagcagaaccacaacaataaaggattgcgacagagttcggttaagaccggtatccgaattgaagtggggtccatatcaatcagttgacgtggcgacataaagtaggtccacgtaaggaagagaatagagagtaggaatttgtgtggaattgggaagtgagaagattttgagtgcgtttttttttttcttgcttatgtgtctattgctgacgtgcaccaccagcttccatcaaatatttataatagtatgtgtatttatattttataataatatttaatctcaaataatatatatatatatat

SEQ ID NO: 79542 - DNA, 3437 bp, Cannabis sativa
gagtgtatctgtgcaatagaaagctaagaaataagcatacgaaatggtagcagcgttgggtttctcggcaccactcagcttctcaatcacttctcacaacaaatcctcttctcttcctctttcttcttcttcttcttcttcttccttttccaggtatatcttttctcccccacctctctctatctcttcccatatctacttatagtacataagctcttttgactttctgtagaaacccaaagaggtccgtagtctcttctactttatcctctccctatggaaatttctcaacaactggtaaattttccttctttcccttatccttttttcccctttgcctcacatactatataatttcatttgtacgaaaccaataattgtaaagagcataaattattgcatgcccagttattgttttcagcttaattgttccggggtgcaatttatacgagcatttacaaaagatgcagtttttttttggtgcctttttatgcttttgaattcaatttacaaagtattatttttctgtttctttaattaaatattgtaggattatccagtaagacttctgggtcacctttgctgcttgatgagaagaattttcatggtaccagtacaaggtgcaatacttttgctagtttgagcaatgtctatcatctaatattttaattgcattggagttaatgatatgaatctaggtataacatatttcttaaaaagaaaatgtctgataaaaatatatattcttgctcagttttgtctttttgtatatatatctcattttttttctgcttcctggataataatttagtggatttttcagttaatgattttgggtatataattatgtagttatggtcctatagaagccagaaaaggaaatccacccatgatgccagcagtgatgaccccaggaggacctttggatctcgctactgtgatgtttaggaaccggataatcttcataggccagccagtgaattcacaggtggctcaacgagtcatttcacagcttgtgacactggcaactattgatgaaaatgctgatattctggtgtgtttatacatttccaaattcaaatttactttatcagtcttgcctgtgagtttgacttcctagatagaatgtgatgttgttctgtaatgtgctgcagatgtatttgaattgcccaggtggaagtacatactccgtgttggcaatttatgattgcatgtcttgggtaagattattgatttttattttcttttcaagcatttctatcatagttctttgcagacaggttcaagatttgtcgttatcattttgtttctgtgtgtgattttagttcatgcccctctactaaaaaaaacaaagaaaaaaagaaaggcagttacatacttatcatgaaattcaatgatgtggacacaagcataataaattttcaatgtattatgtacataatatttccttcaaccaggcattttttttacaattagtgtaagcaattttttggcaatgatttgaaggcgaacactgaattgatagagtaatcctttttaattaaatagatgcacacagctgagcgtaatgaaatcaccttattgggagtcgggacccaactgaaatcaagtaataacactcagttaaccttgtaactttttcagaagatagtaaaattctgctataaagatatcagaaaaaagttttgtgcaaaagtttttattacgttcgattatagcgtattgttccatgcttttacttatctgacaaagggctaaggttgaagataagaattacaaaggggtcaaaagtaagcattgttgctaccatgttggacagttcattttaagtcctgaaaaagttttagagcattgctttgtttgatgtggtagatttcgtatttatttattgtggaggggtggattcgaacttgtaacctccattttcaaggagaggaacatgtgatttgatttttaagatatatttacaggacttgaacccatacctgttcacacacacttactccacctcatctaaccactcaagctaaccttaagtggaaaacatgtgacttgatcttgtcatttgtctattacgcatggaacatattcagttcagtttctttctcttttcagaggaaacttagattttgttacaatatgttatgttaccctttaacaattacttttactttcagataaagcctaaggttggcacagtatgttttggcgtagctgcaagccaaggagcacttcttcttgcgggtggtgaaaaggggatgcgctattcaatgcctaatacacgtattatgatacaccagccacaaagtggatgtggggtatgaagtgatattgattgatccttttagttgtcaatttttaattctcttattttctttaatttggttgacagcaaaactactcttcattagaaatccagttatgtaatgaatttggtatgagcaatttactttcacaacaactgtagttgtgattgtatattagctaacttatttctttattcctaaaatgcattgactgattattatttgtagggtcacgtggaagatgtgaggcgccaagttaatgaagcagttcaatctcgacatgtcagttgtttttcttgactcactttatgttgccttttctaattacaataagatgaaatatttttcgcgtacagcctcacattgcagctgatgaattttaaaatttcaattgcttcctttgtgctaacgttgtgaaaaattcacgtcaccattttatggctcgtttgcataggctgtctatatgtctatgttactctcacttcatagtagtgtgagatatcactgtcagattgccgcaaagaataataaagcttttccatttccttttactttgattattctgatagaaatagttgtggcctaaaagctgatcaaagaaacaacggtgtggaatatttaatttagatggatttccatttagctcagtccaaatacatttttcatttagttgacctatataatatttctttctcttcatcaatgcagaaaattgacaaaatgtatgccgcatttactggccaatcaatagagaaagttcaacaatatactgagagggatcgtttcttatctgtttcggaggtaaagctgccaacatctcatttattgtcccttctcgtgatatagatatagatatggatttttatgtttgggttacattgtcattggcattagtgctggctaaaagtcctaagccaacttcagtcttcacctacacatcccaacagttagaaggcagtaatacttatagcagtagtataataataaaaagggataataccaaaatcgctctctttctctcggctaagtactcgtgttcaagcctttcttctcaaaaaactggaagtgtcatctattttctaaaacatgactacaggataccttctatgttttttagtcaaacttctagct

SEQ ID NO: 79543 - DNA, 2302 bp, Cannabis sativa
tgattagttaaattgttgttattagctttaacttaatttctaattacacacttatgtaacttaatttactttttgataaatgtactcaaccatgcagacatagtcaaatttatcaacttttataacatatttatttgacttaccgaccaatcatcattatggtagcttgaggattggtcccaggagaggatatgaaagttgatccatcaacaactcgaagcgaatcaattccaataaccttaaaatcgccatccacaacctttccaacttggcatccgccatgataatgccaaaaagttgtaactgaacttcgacaataatctttcataatcgaaatagttgtttggttggttggcaaagaaggtccatagaacaagaaatctctattgcctttcaaatcattgtacttcattcgatccaatgacttagttttaagcaaatctctaaattttcccatcatgctaacacaacgttcgagatcaatagggttagagaagtagttgaaccgaacatgtggtgtggctttcacgtcagtgttggaagccaaccaaagggaaccctttgataagggtcccgcgacttttccaacgatattcgctacactcaattgtagcggtggaatagctaaagagtagttgtgagggaaaaagcttgaaggtaatgttgtgggagagaatggcaagttataagagagagtttctatgtaatattctttagtaatcccaacaacttgtagaattgatgattctaatgggaatggtgttatgaggttaaggttgttacgaggattatcagccatgaattttccaacattgggttgggagaggactatgggaatatgttgtgatgagaggtatgattttggaccaattccacttagtagcaaaagttgagggctcccaagtgcacctgcacttagtattacttctccttttttgtgtactaatgctttgtgagaccttccttttgaatcagtgtatataactccaatagggtgatgatctgattaatagtcatggatatcaaatattctattatctttccacacattaataatgtaggactctgtaacaagtataataaaaaaaaaattgataagtaaaaaggagacatacttgaagatttagtggaaaagataattctattcacataggcatggattgcaattcgtaaattttttaggtttcccttattgagcaattccacagcgccatgtcttcgccccatgtcatcgaaaatagagccagattgtttagttccaatcttatgttttgtagtgactttgttgtcaggaccaataccaacttctagcaaagcttgtttcaccacagattgccaaattgacaaattggaatatgacactatcttgtttttcacccacttgtaagccttctcaacctcattcatgtcccattccacaccggacttggcaaagaaatcattatcagcttctgagaaaaaaccaccattaaccatgctactccctcctaaaaccctacctcttatattatcgacaccatcctctgaagtgaacctttgcgccggtgtatcaccattatcttcttcaatgaaatttttgagaaatccagacaatgacaagacattggggtgagctttaggggtgtttcctctttcaaggacaaggatcgagtacttttctgataaagttgccgccaaagggcatccggctgtgccacctccgatcacgatgtagttatattcttccactaatggtaggtcaattgcgttgtaaaccgatttcatgtaactaaaatctgcttaattagaacaaatatttgacatttgatgagttgatgagatataaattaattaggatcatatataaaaggcatatatatagaatgataattgattgaaaaaaaataaaaataaataatagactactacacgtaccataatcaactgcgtgaacaagtacttttccatgaaaacaagtttttaataatattagcaaagtaagaagaagtaaggacatttttgttgatatctttgaactttgaagccacaaaaaaatgaagatgatgttggatcgaatgaactgatcaattaaaatgttcaactcttcaagtcacgtattttataggcttcacaaattggtttatgtagagtgaatactaagtttaaaaaccggctacttttgactaagtttcttaattaattaatatgaacataaatgataataataataacttcaacaagtagttctcctacttttactacaaaaaatcttactttaagctacaacaaaatttgtggctagaagtaaaaaagttgtgactaa

SEQ ID NO: 79544 - DNA, 2872 bp, Cannabis sativa
taatctttctcgagggaatgataatacatagcttttatcaattggtatcataaaattactaagagcattgctatttgacggtgcccaacatcccacaccaacaccaatgttgcagccactggtaatggtatgccactcctgtaatacttgacaattgaaggtcacttctagcatttctgtatacttaatcaaagcaaacattgatcttgtagtggcattgccactgttatctatgctgtgttaacatctgatattgaatgttggttgatgcttatgataatttgtgttgctctgttttttggttacctacaaactcttgtatggctgcccatatcgtatactattgtacttagatttgctggggccttgtgtctctgaccttttgagcttatcatggattaagtggtcatcaaagttaatagaatctgttatttataagtagagatttgttaccatctatgactgattttcatatgtagaatagaaaaaacattgaaaatccattccttcatacttagtttgcgttgctcacgtgttaccatctatttctcatctttaggagtttcagcaaaaaaaaaaaaaaagaaaaagaaaaaacaatgactttgtagaatcttaaggtgtttaatatttgaatatatgaagtgtgacacattgttacactcgtttgtaagatataatgttaatcaggcagcttgggaaaatacatgatagtcaaatccctaacaggcaaaaactcccaagaaaaatatatgatagtcaaattcctaacaagcaaaaactggtcagactcattcttaatttagtaatggatttgaggttctgcattctaaattaagctatgacgagaagactttggggtaagtttcctcttagatctcctaaaggaacattttgcactctcctgacccaaagcagcagcatcatcatcatttgtttcactggctttctctgattcaacttccttcttcacactctttgaaacacacccattcctcttatttgggcttacaccctgttcctcttcatcatctatcatgcactttgttgggagctcttctaattttttcaacttctttgtctgtttcgattttgagctatccttcttcatcttccccgttgatttctctttggccccgttactactattctctttaatttgcttacttgaaaccagggacactctaactatgtagatctgcaagtagcatttcagttcattaattcaagacatgactcttgtctagttctaactccacctatcaataataataccttgcaaattagtgacagatttgatcttaccttaaatctagtaggttcaaccagctcaaacacacaggcatcaccatcattcaacttatgctccaaagcaaatgctctccaacccccacttaagccagatcttttgccaatgtagatggcatcaaattcttttccatcttcatcctctaattccatatccacaattgattttggaagataattctcacagaacttagaagggaggcccttaaaaaaataaaaaagttgtatcacattttccatccacctaaagatgagaaatagaaatctaatataaaaatccattcactcaaacttaccaaccaaaagcaactatagacatgagatcgaaccattgatttgacaaaagttggattctcagacttcaaactgctttctagttcctctgcagctttaaaagcagcattcctttcttcataagaagctattatgacttcgtctaatggcctcgcaagatagctaaaacaaatctacaatttcagtaccagaatcatgtaaggaaaaattactaaacaaacccaaccccaccttgcccaggatgatggatttgatcttgatctcttccgtgaagacggaagctctacataaacctgtaatgacagtagcacagctcttaactcttttgaagaacacatatgttcatttaggaccgggtactaaagacagaaaacataaatccaaatcaaatttgtagtcttaagatgtgtgtaggaggttatctctccaatatcacgtaacatgaagaacgcatacacaaaaatcgaaagacaagaacacaaaatttactttgttctgattataataggaatcctccagtccaatccactatgttagcacaagattacaccctagtgaattcctatgttggatctcaagggaaatggtttgaaagctttggtttggttggattactatatcactctagtctcacatcaaagctttcaaaccatttcccttgagatcaagcactcatcaaagctttcaaaccaacccactatgttggacaagaggattggacttgagatcaacgctttcaaatcatttcccttgagatcaagcactcaccaatataaaaagaataaccctcaaaaactcacattggctaacatagtgtgctttgaccaaaggccaaaatagtgtcatatattgcactatccagcgaggtggttgcttctctaccagagggtttagttgacccgttttagaaactttcatcacagcatgcataaataatgaatgcaatcatacaagattgaaccaatacataactaaaatatttcatagagtacatttactgacctcatcacaatatgattgaactgggttgcgtgaccgggaggaccgtctaggctccacagagttacaaatcttcgatctgggttttgaaagatgtcgttgctgcaccataaaagaccaacaacaaaagattacaaacaattttttcttttaaaaaatagagactgaaaacgttgtaaacaaaaacactaccggggacttcttctcagaatttgtaaggtcagataaactttttgtgatctttgcaatacccaaatccttcaaccaccac

SEQ ID NO: 79545 - DNA, 930 bp, Cannabis sativa
gttaaatgatctgagtgattatatgagttactaccactattttacaaaagtaatttactttgcaatgtgtaccaacttaattgcatattttggcatattcctcttatatctttataattatttaatacattttataaattgttttaataaacaaaaaaaatgtatcggcatatcttttttattttttatttttttaaaattgacatatttcttttaaggattgcattatctacatttaaaaagaaaaatagtgccatgataaaaagaaaaaaccataatcccccgtcccccctttcttattgacaaaaaatagtgatttataacaaaatttcaaacgattttatggatttcaatagttaacaaaaagctaattaacacgtacattataatggttctagtaactagtagaaagagctaattaatgaagataaaaccaagaacaaaagatgctaaagttaaaaatgacaatcactcgctgccctgccaaagcaaatggactccaactagctatcaaacccgtgataatatacaataaagttaaacggtagattgttgtctccccacaacacaattaattaccgtaaaagtcccagaaattcgtaaaacctatttttgttggtaaaactcgccaactgtttacctcttttattcgtttttgactgttagaacactcttacttcctattaacagtgtcaaatcgggtttcgacacagtacacgattacgaacacgaattagatgcgagtcgaaaacagattgatacgaaataaaaacgagccaaagatgacacgatacgcttaacactaatttgacatgtttgatatgatttttttaaatataatataataaatattattaataataatataattatatataaatatatatttagtgattcaaagtcaggttaaaaatttaaatttaattttgt

SEQ ID NO: 79546 - DNA, 2947 bp, Cannabis sativa
aatggttattgaaagaagtcttgaatgattatgtttctttagctgtattaataacacaatcaaacaggattaggcatgtcaagagagagttcttgacttgcacaagagggttccaccccaatccacgtggcactagctttgttaaccaaagcataactaactctgcaacatgacttgagtggtatgtttccacttacattgtccttctttaaagttatattgtgatgtgtgtaggttacaatttttcccatttgacattatctgtattgcattgtaactgactacatgagactactagattttcccttgcgacccccttttcgaatcaagaccaaatcctactctaattgtaatttcccctcaaagaggcagttgaattagataagaattttctagtttgatgtgaacatgataggtggaaccgaagaagtttggactccttatgaattggcagcgtgagtacacaccatggaagatatactgatacagctgaagaaagagatggctgcgccacataactggatgttggttcaacctccggaaggtacctacttctagtagcttacatatccatggatcaaattgcattttcaatatgcaaagtatggtttgttatgccgtgtcaatcctgtttagacatacaggggaattcccccaaaagcttctcctatcacctcttcttggtccttctgtttcatcattgtctttttgatcgaattgtgttttaatggatggatgctatctgatttatggggacttttgtgttgtttaactagtatcaattatagcattattattattctaaaatctactgtcttgtccatgttcatctgcaatcggagggtaagaaaatcatatggtttactattgacttttggcctaatgatgacgatgccagaacacatgggagcgttgatgatatcttccatgctgatcttatttcctgaatttagtggaaataaagatatgaaaatggaagaaaaaaactgaagggctgtatccaaatattgtagctgaaatggtggtaagatatttggattcatgacaaggttttggtttaatatggcagaatgtcaccattctcttgctttctctctctctctcaatattttcaaactactggtcttgtaaacttgagagagagcttggtggagatggaaaagtgagacatagacccaattgggtttgcctttggaactactcttggcccctctcattttcatggctgcctttgcaagcaaatgactcgattacagcttaagctgcagccgtcgacaaccttaattaacaaaacaacgcacaaaaagccattgatataaataactataatatatgtttgtatatatatcatggaaacttacttttacacgttttagtagtagtacacccccatgaccgacttagcacaccaaactttattaagtggaattggtctgtctggtgagagggtcaaatctttacgacgctccaaactcaaatatcatttatgttaccatatgatatgactattcctccactaatgtggtccaaagccactctttaatttctgaacttatattgaatagcttaattcaactttcataatcttaatttttttttttttttttttatggtaatagaaaccagtgtaggtttctagatttatctgtttatagtttaatatttccttttttcttatctttttcctataagaaaatcaatcattatttgataatttgggataaaaaatgggaaggttcttttattattattattattatttcgatattgggaaagggatttgaagttggatgtagtattatcaactactaatatgacgagactttgtttagttaatttttttttaatttttaaaattaataacaattaagtttgtcattagtttttgaaaatgatcagttttttaagagtaaaattgatgttttcatatacgttatgcacattttgaatgaaaagaacctaaaatgtgatatataaatagataaaattaaaagaaattacaaattcaactataaattatgacagtcaaatttgctaattagtgttttgagatataatgaatgtcttaacaaactccccaccctaattctccgtcaatcaaatctacataaattactaagacgaaacagccaaactaaacatgtttaaaaattccatttctgacacgttcatcgaaaaagatgggatttgccacacataaaacacaacccaatcattttacctattttctttaaaaaaaaatggtcatcaacaaatttgtaaataaatttatatatttaattttttttgaaagaaagttatatattttatttggcaatgccaaaatagtacgattgattaaaaacataaacttcatttttaaaaattataacaaaaaatgttattattaagcaaaataactcacaataataatttccggatcttgtcataatttggaaaataaaaaaaaaatttacatttgcatttttaagaaatttgtttacaaaagaaatgaatatattattaaaataataataaaaaaaattcctttttggaacaaatattaataataataataaaaaataataataccacattattaacaaaccgcctctttacaagtattcatattatcacccacgtctttctctctcttcctttttcttttctcattattctttctttctcttccttctataaaattttgggtttctgcccttcactctttcgatatcgaaatcaaaatcccctaatttttttttttttttacaggctctcgaattcatttccaaaaggggaaattttttccctttttcttcttcttcttctcctctgaatctggatcgtcctaaaccatgtgtattgctgatccgctgccgcagcttccgcctgagaaatcccaacgacccgttgtgattcgatcggtgtgggagtataacctagagtccgagttcaagttgatacgatc

SEQ ID NO: 79547 - DNA, 1571 bp, Cannabis sativa
ctttagcgtcacccagaacagcgtcggtagcgaatttttccaataccgacgctgaaagcccttaaaaaccgcctctaaagcccaattttgtagtagtgtgttgctaaaatatagcaggatagcatacttgaattgttcttaaaagaaatgtctttccaataagtgctactactttgtcgccagactccttgctagcaaatgtaacaaagcagactgatggaatatgaagaaccttatttgatgtcctggtcttacatagatagtacatattgaagtcacagagcttagtattatgaatgcatttgggacatttcaaaagcaaaggaatacaaaaattatagcctcaaacatatgactttgcttaaacaatattttacactcaccttcaaagcctgaaaattatgaacacggtgagatacagagcctgaaaatattttggaacattagtggcagcatctcaaaaagcttccatgtactcattcgatcaaatttctaagaatcttgggtaagtgaaaacaacaaacataatcgacgtatgaaaattagtaaaaatacctctaatttcaaataaaacaggtagcaaaactctaattaggaattatatcccaccaactaattaagaattattcacacctatattctcaatttaattcatcattattctaaacaggtaacaaaactaacaatttcttttaatatcaaatggaataagaaaataaaaagattgcgtagttagagaaattaaaaccaattgttcctaaaattgagacagaatcaaccaaattcacaatatacagggtaggttatcgctattaatttttgggaaaaaatcaagagctaaacttatcacaattggaaagaggaaagataaaaaaaaaataaagtcgtaacgtggaatcgaaattgccgaaggcatgagatcggaactgttgtcgacgacgcttgaactccattgctgtcgatggaggagaatacaacaacgatcaatgagggaacttcatttatgagaaatcgaacggttaggtaattggagattcatggagaatagaggaatggttaggtgattgaagaatgaaaatgagaacgaaaataaaatcaataagtaaaataaatagaaaaaatagaaacccgccatattttcgcgccctttaatttatgcgactgcattatgtttaattgttttgcagaagcctttaatgcgcctgcattgttttgaaaaattttactggtgcaatacatgcgcctctaaaagatcttttttttttttttttgagaagaaaatgcatttatattaaatgaacattcataatacaaaagcatttaacgggggaggcatttcctccaaccaagaacaaatagagtccgccgagagagcatatttggcaagtagatgagccgccgtattggcagatctgtatacatgaccaatttgtactccagggaagaaggacactagatgcataatgtctgataagagaccatgaaaatctgacactgaagtaataggggtttgcagtcctttggccactacaagagagtcagtctctatgtaatgaacattgagaccatta

SEQ ID NO: 79548 - DNA, 1618 bp, Cannabis sativa
aaccaccttgcccagatgattccttgctacaccagctatgcacatgttaactaagtccactctaacatcacaattcagttttatccaatcctgtggaggagggttccaagtttccctcaagatcggtgtcggagtagtcaagagagaatcatgtaactctgcaaaagaagtacaaatattgtcaatacatttcatcacatctggggggatttattgtgtaccaattcattgcgcgtcctccagatgttgtcaacaacaatcgatgcataaagaaatacatcctcagcacagatccccttatgtctaaggtcccatataaatttaatccaatcccaaacacgaatcccattatcgcacacagggtaaatgccacctgtcctttgtgcacgtggcattttacttaatatttaacaaacaggtacttacagagttctagaagtataacttaggtattattgatgccaaaaattaaacttaggtatttatttacaaccgagagctaaacttagatatttatgccgcaaattactctactaataataaatgttttcaccaaattacactattcaatttagttttccccaagatcacaaaattgtaggttagtttagacaacatgtaaatctgaaaaggatcagataaatgcttaagggcaccagtggtgcatatcaccttcttatgtgtcaatatagctattagttcaactaagtatcaggtcctatataatttaatataatattttttatggagtattgctagccaatcgcaacgtaacatattgagaaagtgttaggtaccactggggcctaataacaatgcactaagtctaaaaaggatcacaatatgtagtagtccttggcaaaatagtattttttttaaattatatttatactttaagatttcttaaatgcactcccatagggaaaatttgagtttgtatgtttaaagtgaaactctaattaaaaaaatttctcttttaccctatataaaaaaatgtgttaattattaccattgttctgagtaagtgagtaggcctaaactcactaattgacaatggcagccatggttgcaattacgtgactacggttgcaattacgagtgaaatcacatcatttaatttcgaaatctatttcaatagccacatcacatgcctatttgtcaagccacatcatcacaaaaaatgccgcagcactttcatgcatgtgtttatgtgatcataatttagggaacaaaagaaaaatcttaaaaactattcaaagagcttttaaaaaaataaaataaaaaccattcaaggggggaaaattaattattaaaaattatttttattttatatacatattttaataatttttataacataaaaatagttttttattaattttattttattattattttttttttaaaaaaattatttaattatttaggtgtgtaaagtacaatatatttcaattcttatttcttatatttaaatttaactgttagattgcgaaaacattgcatatatttgttatacatatactaatatataaaaattaaaaatcttagtaaaaaaataagggtgattctacaatgcactcctttaaaagggatgtactgatgcacccttgacttattt

SEQ ID NO: 79549 - DNA, 1715 bp, Cannabis sativa
atataataatataaaacctaatcactcaactaaatgaaaacactaattagtttaataggatattaaatgttattagatttttaaaaataacaactaatttggattttaatcaaattgagtatttaatatttaacggttaattattattaaatctgtcggttgtcacggatggaatcgattatgatttatgcagtacacagcactatatctttcagttgcatatacttggtcttcttagtatgtacttaattttgaccatatcacctgactttttcaatattattaattacaacacgaaacagctctttaatcgattcttctataaatacagaattattaattgcatgtttcacttaagcataactcaacaaaagtcacaaataattttcaagaaaaacaagaattattactagctttcaagctataccatatataattcttcctctaatggcttcaaataatcacaattttcttatcatgttggcattatttgccataacttgttccatttccttggcttctgatcccaatctccttcaagatttttgtgtcagagattccaacagcccaggtgagtagagtaaaatatatatatactacaggatatttttggtgcatatatatataatatatagtttgatatactcaaaacatgtgtggttcaacccttattatttcagtgctagtgaatgggtttgcatgtaaggatccaaagctggttgatgccaatgatttcttcttcagtgggcttaacaagccaggaaatacatcaaacgtaattggttcgaaagtgactctagtaaacgttgaaaagattcctgggctgaatacattgggcgtgtcagtggcacgtgtggactatgaacctttgggtcttaacccacctcacacacatcctcgagccactgagctgtttacagttataaaaggcacattccaagttggttttgttacatcaaacccagaaaatcgtctcattacaaagatacttcaagagggagatgtgtttgctttcccaaagggtttggttcacttccagagaaatattgggcatggtaagggactggctatttcttctttgagtagccaaaaccctgggattgttactattgcaaatgctgtgtttggatctaatcctgatatccctgctgatattctagctaaggcatttcaaatggataacaatttagttttaaatattcagtcaaagttttaggttacacattattagtctttggatattttttatgatgattggaattctgttttttgatttggtgtagtcaaactgtgttcttcaatcagttattgtacttttttaaaagtttatttataataatatgattgcataatatatgattataatcaagggtggaataattatttgaatttttctatagtccaatagtttatagtattcttgttacatatagatttatataatttggacgtataccgtgcatgtgtttttgtggaatttcgtataatattattaaattaataattaattatcgaaacaattaattctggtaatgcaagagagtattctatgatttttatcaaaaaaaaaaaaaaagagagtattctatgactataaaatatcgaaacagtgacataaatcaataatgacggaaaatataatgattaattagtcaatattttcaataattaacatctcattttttaagagatgaagtgctcttattttgtcaact

SEQ ID NO: 79550 - DNA, 4994 bp, Cannabis sativa
aaaataatttccaacaaattgatcccacaaagacaaatggatctttaccctcaggctaagaagtcaccatttttctcttacaattgatactagccgcatacttaaatagaaaacacattctgagaatgatatcaaaattcgctatgactagctcaacaagatcaacactcaactccctatcatccactttaattggcatatacctaatctaccttttggagataactaatactatgctaggtagtagggttccaaaccctaaatcataactatcacatgacctacctagtttatcaattactcttgcaggaccataagaatgtgtagctccaaagtcaaataataaaaaataaaaggagttgtttatgagaaattgacatgtcacaactgatgggctagcctcaacatcagcttgagtaatgacatacacccgagctggagtgggttttgcctatttctttggtttttctctccttagttaaggatagtccctcttgtagttcccatcagaccacattgaaagaatgccctacctttacactcacccaaattatgcttcttgcaactaggacacttcagggaagtgtaacggccttcaaggccaccctgacgaccaccctgaccttggttcccttagaacatcttgttctgacttgaacctccaaattttgatggagtttttcttttctgttcataagttgaatcaccccacccaacgaaattggaagtaggaggagcaatgaccgcaccaaccacttaagtccttgggtatttccacaactcccttgtttcgaagatccttctctaccatttgggaatagatagtagtgtaatcggtagtgatcattggatcatgtttgatattggaattcagtccatccaagtacttctcttttttactgaagtaagtgggtacaatacctaaggtcaacatggagattctatcgaacttggtggtatactcagtcactgacattgattcctccttaacaaactaagtaaaatctctccttttggtgctacgcattgtctcactataatactttgcattaaacaagtcctagaactcatcctaggtaataactataatagctcgagtgagagacaccaactcttaccaaactagggcatccacctagaactaaaaagtagcgcaggtcacctagtcattaccgatgactcacataaagtttagtattcagttcatagtagttaaccactgctcaactttcaccacatctgggccttccagaaagactagaggtcactgcttctgaaacctttcatacaatgtctccattcagttactagcaataggctattatgctggcaacacttgtgctggaagcataggtacatgaggaggaggtacatctgttggaccctactgcctcagcctttgaatctcttcgtcttgtctctcgattgacttgcattttttttaaacctctactctcaatctggcagagcttgtggtagggtttcattatcactgccataagccctcctacaacatctacctcgcccagacgataagcgggaatttgatttccctgacagccaccagcctcaactatgttaccttaacctctcgtgtttatctgggtgtccattttataggacaagcttgcaaattcataagtcatgtcggccaggtagcgatatagattgtaatttacttaccacatacatcgaaacataaacatgatcttatttttctatcaatctgctaacatgctttctatcattcttttctaatcatccatatctaaataaagctactaaaatatgtaaaggcttactgaaccgtgagtcaaggttatctttaatgatgattgtacatatcttgatggtcttcagagaacaacctggcgacttgatactaaattgtaatgccctactagcttaggcacgttacaatgtttttcttaattattgtactatcctttgctaaccaaagggtttagtgtaaaatctcgtttaaataaattttttaaaaataactataattttactaataaacatattcaatattagaagtttgcaaatcccaagatctcaaatctatttgtcaaagatttacaaaatacagtgcaataaaaagtgtctgcaaaatcgagcccatgttgatatgaagaaccaaactctccaggtctaaccatattgatatgtacaatcttcatgaatctccagactcattggctacttagccttttccttcttgttacctacacatagaaaatataactataagccgacaaactcagtaaaaaaagtataaaacataaacatataactgacctataactaggcacccacacacctaattaccataagtctataagccacatctaattcgtataattgagtctaaaatgttcttaaatatagcatgattgaccataatatcagtctatactcagtactctagtcatatgtgatagcatcaatccatactttaagtacaactagccataataccattggtagtaatagttagtactttcgtaattgccaaatatatatcccattgatatctaggtctacctctatgtacactaatactgctcttactgatgttatctaattggcaaacataaacatgtacgctaaacatgagcatatgtgcatctgttaaatggggtcctgtttggggaaatggttcatctgtttcttgtagaaacgatggaccatttcaatgcaaaaatccaaaaatttgagttttcttctacaattctatcccaaactaaacaaaatttccaaaacatctaataagtacatcgtgaacataatccaaccaataacaacatcatcaaattcttggatcaaaattttccattgttgagcaagttttgaattctaaaactcaagcttgctcaaaccaagcttgctgggggttaggtttcaggaacattcaagattggaatgttgcaacattgggtaggtatgtatgggatattgcaagcaagaatgattgcttgtttgtaaaatagatacataatgtatatttaaaagagcaacaatggtgggggtatgaggctcctattgattgcagttggtactagaggaaacttgtaggtgtcaagaataggctaaaggagcagagatctttgggataggctcattatccataaacataagttcatcttgtggttggctttgtagggaaggctaaatactagggaaagaattgccaagtttgacaccagcatagatagcacctgcctactatgtgggaaggacaaggaaacaattaagcaccttttctttgaatatggatatagcaagaagtgcttgcaagatattaaagtatggttggaacggggattgattgtagaatcactacagaagctgttgcaatgtatcaaaagagccaagcctctttcatcagttcaaaaaagtatgctcaaggcagttatgactagtttagtctatcatgtataagaggctaaaatgatgtattatggaatcaaaaactatggcaaatcaaggtggtagtgaaaagaattcagtgggaaagcaagctaaaatttttggaggttctcccgagcaaaaccaaagaagaagataagcaatggatagtaaatatctaggactactttgtaatgaaaaaatgtaattgcatgatgatgtatatctaatctgtataatgtatagaaaaagtatacatgatgtaaaatgtatttgttgattaagcaatacaagaaccctattcataaaaaaaaaaacatataaaattaacatcaaacactctaacatttactccccaaaacaaactctaatctcctcaaaccataacataaccaaaatcacaattgcacatattaaaacaaagttttttcttataaaattaaagagaaggtgagcttagggttaccttaacttttaccaagcaatccccttctcaaaagcttgctaaaaaccttagagaattggatggaatcggcttgaggttttggtttgttctttgttttttagggccaaacatagaaagagaagggggagagagaatgactttttgtttggttttgtttttaagtccatctatctatccattatttaattaaactaagcttatataatcagaatattctatactaatacataacaatccactaattgaataattcaaaataaagcttaggtaaaattataaaaaagtcctttacttctctactaagtaatctctaaagctagagataaaatagtcataaataactacccctcacccgcccgatattctaaccatccataaatcttggcacactaaatctaagatactaaatagtatttcagtaactctaacggcctaatcgtcgaatttcattgttactagacataaaacataaagatatcaaacttcataaataacatgcttgacacacctagaatttaataaaatctccttaattgagaaaatatttctctaatgccaatctatgacaatatggcttaatttttactaatgcacacataatcaaacacataatttagaatactaataaatgttaattatctgccaagtcatgtctaaatatgcggtcattacatatgtagtctagacatggactcacatggtcaaaaatacttcatctccttcatagatgattactcacactacatgtatttgtacttcataataaaagtgaagcattagatgtcttaagaaatttatagctaaagtagagaaacaatgcaacaagcaaattaagatagtgagattagatagaggtggagagtattatgttgaattgatgattgtcgatcatatgacaaaagacttgcgacctcataaattcaaggatcatgtagagaacatgagacttggttcccttatgtaatttgtacaaataaagtaattattaaagaatctcttattttgatattttttaacatttatgcgcatcttaatttttaatttaaaatttttttagaggaccagaatgaacataaagtttagggttattcatttaagtatattgtcacataaagta

SEQ ID NO: 79551 - DNA, 2620 bp, Cannabis sativa
aatcaagaaaaaaaaataataaaaaaaaaaacttaaacttcacctaaaactaatatttacgtgcctcggcacgtaattcatacctagtatatatacatatatttactcagctagtactattcatccatcatatcacgaatataaaataacaattgtaattaacttatttgcatgttaatttgcatataaaaaattacaagaatgattcaaaatcatatatatatatattgacatttattgtatgaaaaacaaattagagtataattacacagacaaatatgagaaataaatccaattacaaacgtgaccttcactacaacaatagtaggataagcttatactctctctcctatatatataatagagagtcgctttactatttttctccaaaagaaaaaaataatctctgaaaaccctaaagaaacgaaagaaagaaagaaagaaagaaagaaagcttaagcatattctccaatggcgaagtcatcatcatcagactccaaagttattccaatggatgaggagtcatcagaggactcacagtatccaccaaagtcaattttggtttatcttgtggtaatgttaatgatggctctttacctgaacctggtgaccgtgccccgcgttgcagaagaagcagccaaacggcgccatagtagtgctgctcttgctcctcttgcctctgctgcttcgaccatctcaccaccctcatttctctctgctctgatcttcatcgctctcttcttcggattttaggtttccattttagggcttttagggttttgaatgttactgttaaatcttttaattacttctgttaaatcaaaatgattaatgaaattgcatgttatctttgtttagtgatgatcagattggattattaagattattaaacaatataattaatttcactaagatatatatatataatatatattcttgaatagctttataaaaaaaatacagttcttgacataatcaaaaaaccacgtcataatagacttgaactatagtttatcaacatatatacataatgccataattatatatatatatatatatttatatcagattcaaaattgttttacccccatgtgatcaccttcattctgtctttttttattttagttttttttactgtccaattttacaacttcacctctacttatatatattaagtctagttagagatacacaaatatatatatatatatatatatatatatgtatggcggattggtcttctctctaattaactctccttttctaataacccaattatttatgatcaccttttacaaagattttatttttgttttgaatcttttgtagtgagcatgagtttgcatataaaaattacaagaatgattcaaatcagatattgatatttgagttatattagcaatatattgattggaacatatatacatacataaaaggaataatacattattatgttatgtcaatgatttgaagaagcttaatttgtacatacatagctaaataaaaccaaaggaattgaggttgttatgattgtatttattatatgtatgtatatacataacaatagcaataacatgttgaagcaacaataataagagcactttcagaaaagcaatttgtaagccaagtatagatatggtaaaaagagcataaaagaaagattaaaaagtagttgccttaaataaattaaaaaataaaacaaataaaattcattattcctttggtttgtaactagttagtttagtttcattcattcatttattgctttctaatacacaacacctaataagaaatgttaaaagttattacttgtagttaacacttttttcggtattatattattattggtgcaattaagtatcaagtatcatataacttaagaaaatagtttttaaaaaatatcgataaccaatcgtaaaacgctacctataaaaaaaatctaaagttatgatatttaataaattcaacattttcccagcccaatggttttagcaataagataataaattctaagagagagaaatatgttcatataagatgatcaaagcccttacctcatcaccattattattatttaacttgttttggatcaaatcaaacaaaactccaatataacaaatatttgtataaataaatgtagagattttttgatatcattaattaggatttctttgttggatgttaattgatgattatatgctgatgttttcaataaatacaattgattaaaaaagttgtaatgtaatatgatagagtaagcttattattacctaatcaggtaaaaagctttcatagctcaaatgatgaaagaggtttcatcagttacttcttttggtttttggacaagaacatataaattattaactaaagaatgaaaaatgagtttattacttacctacatatataattaatttactaataaatctccatctaatacattatatttatgcatgtatgcaaatttgaagaagtttggacccgtgatgttcgaagtaagctcgtagtagaccatgcctggaaatcggttaatcatgtttgggcccctgctcgtattttcaaaaaggttggtgctaccagggtggctctaattaactgaaatcgctcccagttcggaaagttg

SEQ ID NO: 79552 - DNA, 5533 bp, Cannabis sativa
tctgctgcttctgcatcgatgattggacgtgaaggtgtgatgcccgaccaatgggttcaggtatgctattgagtttacaatgcaattcttatgagttcttactcaacttttagtatccatgttcgaacaaggcttctttgtatttatttctctttttctcatggagttttactcttaatatttcattgttaatccatagccggggtccatgccttcaaaccaatcaagaaagaccttggtattttctgctttttattggtgaaggcttcatgaatatcctcttatttttgacaggatgaacgtgaactaaaaagacagaagaggaagcaatccaatagggagtcagctaggaggtcaagattacgaaagcaggtacagtttcacttgtattttgtccccacttcccaactaacttttggtcaaggtgagaaagattaaataagtaacaaatatctttgcaatttttgtctttttggtttggtgggggtggctaacaagaattaaatgaacaaaaccataaaagagtccaaccttattgcatttgttcctatgagataaaatagtaaaaattaatcattttaaaagtaagtttgtatttcttggttgtaaccaggctgaatgtgaagagctacaagcaagggtggagaccttgagcaacgaaaatcgttcactcagagatgagctgcagaaactttcagaggaatgccaaaaacttacatcagagaatggttctattaaggttaatttccactcaccatagcagcattacagcccacctgctttgaaatttacacaatatggttacttatcattttaataaacaaatttgatttttgtgatcataacaggaagaattatcgcggttgtgcggcccagaagttatagcaaatctcgaccatcatcaaactcgtagtggtgaaagcaacagttaaaaagaaacgaagtcctggctttaattgtcatcatgattagagtagaaatttaattaaaactacggaaaacagtgataatcctggcttcaattgagcatagaacacttatttttcgctactaatttacaaccttttaacaactcccatctttgtaactgtaactttaaattaaattcaaaactgagtttgaacatatttttaagttttgcgattgttatctgtgagggaaaagagagatatataacaaaagacagcaaacaaacaaatattgtaatttcatgttactatgtctcttcttttatatgttttttactctcaatagaaaatttccagtatcctcattatgttttcaaaacaatcgaaaagcaggagctataatatatttctatgtacaaaaaccagactactcatacggcaaagtggtgtttaaaacgacacaggtccatcagcagaagagtgcactaatcttcatgatcagactctatcgccgagactgttgttgtttcactttggacatcttcggttgcattttgttgtggtctatggggttcaggtcctcctttcaaaaaatggtcagctgggttttgtttttaagagatcaaacatgtgtaaactaattagaaaaatgattcttgtccacattgataaattggtacagttgaatacttctatcatatagtactcgtcctcacctgatcctataatcttcaagaagatggttctgaaatattggaattctgctttgtgggcacaaaagagtttgacctgaaaaattcaataccggaaagtacttgtaaactatatattaacctgtatacaacatattaagattaactagggaatcaccaatacagaagggcataccatttcaccatatgcacgacccaaaacttgatcaattctggcttgatgcctcaagaagaatggacgcaggtggttcatgtacagctgcttagctccctggtcaaagaaggggttaatctgatatcggagatagtagaactagaagggcttcgtgtgtggtatgtcagagagggggtatggtaataattctacaaagaaaactgctagaaaagaataaaaatacatacattgcaagttggaagttgaagccagacaagaaatgcaaacttcaggtgatagtacatgggtaccctgcaaattatggaaacgaaatatcaagaatcaatcaaattgtcaaaactaaccatttattaaaatgtcaacttgtgcaccatggatatttgtcatcagtggaaataagctttcttgaaaaagaaattacatttctacaatgacaattttctttaagcaaacctctcatagaaaatatattaagaccagaagcaggaaaactgatagatatatgtgccctatcattgtttgcttcgtattatgtcctatatttgtataataattttacttcaaacagaaaaaccatggtttaaaaatgaagtcccataccaagaaaccagcttatctgaaaaaacttcaacaaggctgaaagaaccataagctgcaataacaaaaacaatagtaatgcaagggaattagacaggagcatgtcataatcagacaatcacatgctttatgtttacacaagactcaaccatataacttcccatagccaaattattaacattttttcaagacagacaatcaagtagaaatggctgaattgaagtgtatctttaaaaaaaaaaaaaaaaaaattccttgctttgatactaacacgctgtagcccagaaatgacatgttttgaatcaaagaggccataacacaacaatatcaagaaacatcagaatttgaaagtgacatgatgcatgtgtagcaactgatcatgctaaaattatgactgagaaaccaacatccatgaaattgattcctgaattaagaaactaaaattcttgttaaatcagaggcaatgggaaaaaaatggctgaggaaaatgactggctttggttctatatctaccacaggctatcaataatagttcctaactaaaacactcaattattccacttataaaagttaccgacaagtgcctgtcattgtttaggtttcttttattcctctagatgacaacacaaatgcacaaatttgtgcaaaaacacttagttcatatttatatgacggctagttcgtactgtaacattgaacgtggcacaaagcaacatgtcaaaagagttcaatgattttttactcagggaaatatttcaaaagagaagaataactttgagatgtttaagatctgtttgaggaatttctcctaaacctgcaataaccaatcattgtacacatttgctgaattcgtacacattgtttcaacggtcagtggattattgttactgtaagctcctgtgtatgtaagccaagtttttgtctgagccaagttaattcatgtattgtgccatctattttacttgttttaagtttaatgaactgtttagatgggttgtgttcttactaaactctagccagtatactatccattaaaactaaaattaacaaagatcagagaaccaacaaataaaatttaaatagaaagagaaacaatatacctgcccaatataaaagccacttttgttgttcatcattatctttattctcaattgccttgaatgtagagtacactggtacagcaatcccaacagagcaactacacaagaaaaaaaaaatggaatgaaaaaaaaggccaaacaaaaaggattataaactcagtcatacttatgtatctcaaagagggcactctcttagttaataaaaattcagagcttaccatgctgttcgaagaacaacgttagatccaagaggacaaaggagtaaacgcaacccaacctgcatcaaaaaaatgatatatatcgaaatcaaaatcaatatgaaaatgtaattaaatgagtagcaacttgcagagcttgctatgaatcaattaatcattggagacaaaaatcaacaaaaaaatcactgttacaccttaaaatacaaggttcagttcagagaattttacgtgattaatagcgaaatcaaacaataataaattaatacggactcatagaacccagaagatcggaagtagtaaatgaaaatggaaaacagaagtatgatttgaaaccctaattaagaggatcagaagaaataaaagggagaagaagattggtactgacctcactggtaaggttggaggccattagagccattatgatttgatttgatttagaattttaatggaaatggcaaattcctctgattaagtttatatatagggacactacacaaacccattaaccgccaatttctttcgctatttccctttccggcgtttttatttttatttttcatttaagaaaaagatatatacggatacggtgcgttttaaataccaaattaatattattttattacaataaatatacaaattttacaaatcattttttttttaaaaaaaatatagttgtatctcaactggaacattactcatgttgaacatttgatctgaaaaaaaaaaaaaaatggtctagcaagattatgagcaactatattaaaagatcatttaataaaaaaataaaaaaaaattatttaaagatataaaagttttacgacaactttctttttataatgaatttcaaatagattggactgctaccaatcaatctaattctcacttttcggtatggttaagttttacaaatcaattttagaaaagggatgtaaagaaaatgaaagaaaataagtaatgggataaattagaaatttctatggtacaccgacttatgaattaggataattttttactttaatacgttatttaagatattctgtgaaattttgataagggtatagcgacataagtatttaaagttttaaatttatgagtaacataaactcaatatttttttttagcggtataagtacttaatgtttataaaactgtaatttttttttaatttcgtcagtacaaacatagttattgttttaaacagggcatataaggcccaaattctaaattattgggtctaaatagaaacatgtagtaccagttacttccaaatgttcttttaataaatttaaaacggagaatgtacttacgaaattaaaagaaaattacaattttacaaacattaagtatgtatcctgctaaaaataaacattagatttatgccacttacaaactagcgtaatgagttattcaatttatcaatcgtctaataagagataaactgacattttgtagagaaaagaaagcaaaaattgataataaaaaataatcaaaccaaatacagaactcaaaatttaattattactaatgtcttaaacagagcatactatcctcaatctttacaccttgtcattgcttgttttctgcccaatctgagttcctctttgatagttgatatcggcccatagcttctataatttcaatttcctcataggctttactttattgtttcatatattgtgtttatatagtatatatttataagttatcgaagaataaggagcaaagctataaataggtgaatttttattaatttagtcagtattttgacaagcttgtaaattgcattataatttgaaatgttcaacaattaatataatttaaa

SEQ ID NO: 79553 - DNA, 3209 bp, Cannabis sativa
  modified_base (290)..(304): a, c, t, g, unknown or other
  modified_base (544)..(544): a, c, t, g, unknown or other
gtcatcttatatcatcaactaataataggatacaaataaaattagttactaatattagaaatttattccaactacactttaaaacttatcttatatataacactgtttatagtgtctcactaatattagtctgacaatatagactacaccaaatactttttctatatatacatatattatttgtgtttatttataatttaataaaataatataataataaaataataatagcttaaaagacattagacttgtgcgtgtttatacactacaaaaaaatttacttttagtcnnnnnnnnnnnnnnnactaaaagtaaaaaaattgtgattaatcataaattaccattcttatattgtgactagaaaacccgtaaataaaagtattagtcacaaaaattacaatttttttgtgtctaaatgtgtttctagttacaatacttgttgtgactaaaattaaattagcgtgagagaggaaatattgagaggtagataaagaggtacaaagaaaagagagagattgggtttgagttttgtaagaagaatctnctgtagatgaagaagattcttgaagaagattcttgggtgttaagtgtgagagttgaaacattttgtgaaaactcttcagagaatctcgtctcgactgtattgtacctattcttgctcaatcaataaagaatgattacgatggtgtttcagaactagagtagagtcatagatcacatcgatttatcgaacttggaccagtatatatcttggtgttgatttctttatttttgcatttattgttttctggttttaatactctgtttgcccttgtttttctgtcgattatttttcttggattgataatcttgtcattgctaatagtgtgattgcctagagtgtcattgataaaattctgtaaatttagtcataattttcccacacggtctcttactcaaaattgttatgttagttgctcgatgtttataagtaatctgttctgaatttagtgtgtgaaacttgtatttgaagtgtaaaagttgtatgttatttggagtttttgctaattttttatttttggtttgtgtatgaatttcccttacttaaattagaatgaatcatcacacacctaactttattcatgattttcatatttattctttcagtaactccattttgatggggagtgatcctaacaattctatatgagaactaataagaaaattatacctaaacgctaaaattagtacaaccaaactttttttttttagaaaaaagaatattttgattaaagaactataataaattattttgtactaaaaatatatttaattatttattatattttaaaaaaatgaaattatttcttttaaacaatgttgttaagggttccatttaggcatggaactatgcattcaaaattatattatctttatagaatattggaaatttaatccttaaaatataaacttaaagcatataacctgtcatcttatatcatcaactaatatggaatacaaataaaatgagttactacggacccagaaatttttctttgtgagggctttttattattaaaaaatatttatacatatattataatcatttttactagatttatttaattttgtggggacttttatactattttagtctataattatcaaattaaaaaaaataatttaattttttaaaagtcaatatttttgttaatgggagctatagccctcacattaaaacaattgggtaatatatactacttaatttatataagctttattattacttagtgttgtactcatttgatatgaaaacaaccttacactgaagacactagtgtaacttttcttggcaacttcttggaactatcatgaagacactagtgtaacttttcttggcaacttcttggaactatcatgaagacactagtgtaacttttcttggcaacttcttggaactttcattaattactatccaaaacaaaaagaaaaagtcacaaagaaaagtcataccatatgaacacagaacaaaaggaattcatggtaataatagcttagctttttgtataattggcaaagatattagacatgtgcctacctataaatttgataggtttctaaactatttaaattgaattacttataaaaaaagatgttgaaaaaaagtacacaataataaaaattagagcatttttattaggcacaacggtgtcaaatattttttataggcggtgcactatggttgattagtaatattctttaaaagttatttttttaagttatgtgaaatctaacatttaattatactaataacagtataacaccagtaagattgttacgcaccaataatgctttttagtatttctttaaaaattaatggttcaaactgacgggctaaaagtttttgtaattgtaattgtaattttaagtagttttactgcccaaaaaaaattactagctccctagttacatacatgacaatttaaatagttgtagggaaaatatggatctttcttataattatatttagccttaaagaaattttacatcattattatttgattgatgagttactaatcaaccaaaataaggaattgaagaggagtgttaattacaattttatattataatatatgtcagagtgttatttttttgaaaaaaattcacagtaatatttgttatagttaaaacattaaccttgtaagtttttatttttattttttatttttttaatagtttatagtatcgaaaacaaatttgaagtttttgaaagcgtgtagtagactgaaatatcaagatctctgtaattatttaaaaattttaaaaatattacaaatttaatattgtaactataaaatatatcaccactcaaacatgtatattttttgacgtaaagattaagaaaaatggaaataagagaataacggtatatattaattgagtattgctatttagcactttatgggtatccaacaccatactgatatgacacatcgtaaatggttaacgattttttatattttttattaaatcaatttgtgtgaaattcaatattaaaatgtattaataacaatatgcaatttcttgtggtatttaacaccttacctcataacatttttcatattaatttgatatgagcgccagtgccccaccatagacgaaagacacaactgaaacatttcctcgcaacttcttggaactattatagtcttccatcttttttagtccta

SEQ ID NO: 79554 - DNA, 3356 bp, Cannabis sativa
caaggagatggcagtggtcaccacctatgaagcaccaaaggagacttgtccaaatatgttccctcgataccaatgagtgcaacacaagtgaaagaaactacttctcaccaaaatgcaagctcaaccgactactgacatctttgtagcacaaattgtggcagtggttggccacaaggaatagggatgaaattttttgtcaaaaatacattttcatcaataagatgtcaaaactaagtgagaaaagtcaccaagtggtgtagaaaccatttggtcgaccactgccacatttttggcacaagtggtggcagtggtcggccaccacataggagtgggagtttctttggtcaaattatatttttaacatccatgtatcaaataaaagtgaaaaaagttacctaaggctctatagccccccttatgcgacaactgccacttttttagaaaaaattgtgccagtgctctcctaagcaattggccaagagtcaatgtgaccaaagtaatattctagcatccatatgactgaaataatcaagaaacaccatccatggctttccataagccatggtcgaccactgccactttttaggccccaactggtggcagtggtctcccgttaggattttagacgtcaaaatgaggttttggaggtcaatgacccccaaaatatgactcaccataaaaaaaacaagtcaaaacacatttggagaggtccaagaacatgcatggacaagagtttccatttggccatgtcagtgcttgcaattgtaataaaatagcacaaactccccttcaataaaactggcataactctctcagtttttatccaaataacttggttcaacttgcattaataagaaattttcaagaaggatctaagtgtgtctcatagtcatagctcaattatgaagttatcaggtctaaaattggcttacaaggcaggctggtacactttactcatgaattgagtagtgtaattatgtgtgggatgttggagaacaatgccacaatgcatgtggcattatgtgtgagcagtgtcaccccaaaacacttttttccaatacttctcaccaatgtcatgaatttcaagcctagaggtgacattctttgtcaccccatttcaaattggtgtttctttagtcgaaaataattatttttccaacgtgggattttggcctagaaattaggagatttttatttattatttgtaagtttttattcaatattgaagggtgatatacaagatttgttagtgagataccccaacatgtgggggatcactaacaaatcctaaagcctatataatgagagtaagaagctgaagtaaagggggatctttttttgggggcttacttgatagatgccaagaacaccaaattatttcctttacctttttcttgagtcttccatacttagtcgacaccaaatctccttgatccaaacactattgatctacacagttaccaagaacagagaccattctctttcgttacttttattagtttattattgccaagaaccttacaaccaccaactttggttagatttatgaatattgagtctcccatgagtcttgtgttcataagtcttgattgagatttcacatagaaatcattttttgtattattgtccacacactcttgagaacataactctagtgtgttggatctaattaataaaagcaaaattagatgtagctccattaccatcgcgatatggggggtgaactactataaatccttggcgtctattttatttattgtgcttttatttagtcaaattaattcatcgcaatcctctttatttttacgatcttcttagatcagttgacgaaaaaccacgcaacggtttagtactttcattgagcgcgttgcggtaaaaagttgactatttttactttgaaaaactcattatttcaacaaaaatggcggatcctttagaaaaaattgacacagaagaaattcaatatccatgtggcgaattacaccttgcaagattgtttgacgaacaaccccaatcttcactaggggcaccacaaccaacaccgggggcaccaatcatggttgtcatggaggaaattgaaaaccttaggcaccaaagcttgaggaaattgatcctcgcattagtgataatagggttgaccttaatcctattgaagagattgaagaaatcgtacaaaatctagaagaaccaaacaaaactgtgaaggttggcaaacacttcaataaagaaatcaaaaagtcccttatccaatttttatgtgacaaccaagatgtctttacgtgggtccattcaggcatggtggggattgatcctaatgtaataacccatgtcctcaacttggataagaacatcccaacaaaaagacaaaaataaaagaggcttcttgatgatacgagatatgttgccttaaaagaagaagtagacaaacttcatgccaacaattttatttgagaggcattctatcctatttgggtggcgaacctagttttggttccaaaactataggggaagtggcacacatgtattgactttacgaatttgaacaaagcatgccccaagaactactttctacttccacgtattgatcaattagtcgatgtcaccgctggacacgaactcatgtcattcatggatgctttttccgactacaaccagattgccatgaatgtcgctgaccaagaacatacaagttttaccaccaccatgtgattatattattacaatgtaatgccattcaaactaaaaaatgctggcaccacttaccggcgacttgttaatagaatgtttgctgatcaaattgggaaaagtatggaggtctacgtggacaacatgctagtgaagactatactagcaaagaatcatgtggaagacttgaaagagtgttttgccattttgagaaagtaccacatgaagctcaatcctttgaagtgctcatttggtatttcatctggaaagtttttgagtttcattatcaaattccaggggcattgaagcaaaattcagaaaagataaaagccctcatggacatgccttcacctcaaagaaataaagatgtacaaagccttactggttgcattgtggcactaaatcagtttgtatcaaagtcaaccgacaaaggccaaccctttttcaacttactttggggtagcaacaaggtggaatggataaaagaatgtgaacaagctttccaagcacttaaaaaaaacttggcagagcccctattttttctaaaccaattattggatagatcttgtatttatacttggccataactgaaacagccattagcgtagccttaacgtgagaagagaaaaatgccaaaaaaccagtgtattatgtgaggaagcgcctcttgg

SEQ ID NO: 79555 - DNA, 1772 bp, Cannabis sativa
  modified_base (787)..(790): a, c, t, g, unknown or other
aacataaccatatagaaataaaaaattgataagattgggcaaaaagcaggcttttcatttatgttttgtatataaaagtatgagcactcctattaagcactagtggtgcttagcatcttctcgacatgtcgcgttgtgattggctgacgatactctctaaaagttattgtattaaactatatgggacccgatacttattggactaacgatattgacatataggagggtgctaggcaccaattgtgccctttaatatttctctttatatatatacatatttttgaagtgatgatggatcccaagaaagtgcatgtcagccagtgaacaatgttcataaatctttaggtaaaattttacaattaatcattgaaatgaacacattcaagagaaagcaattacacaaatttcttactcaattaatgttttgttaatagccaccactctattttataggtcgactccccctcccctctttttttttttttttttttaacccatataatttacaaagcaacaaaataattaaacgagggcagaccaagcaatggaacatcatgattatcaccaatgtttaaaaagatataaaataaaattcaattaaaattatcaaaactaaagaacaattcattatttgttttattcattttcatgatgcatggcgttttagttgcatgcttggggcgtgccacattgctattatatctctcaaacaaggcccagacatgcttctaagttctaacttcagtactaccactttgcaatgccctttattattattattattatnnnnattattattattattatttgatgtctttatcatatatggaaatagaatctgaattagttgaacaaaattatcttatatgtgtgtgtacaatcttcatgtcaaaaatctagagttgagacaaataaaagttgttcagtgtcatgttatgttgtaatgttttcattggtcattaatttccacagctacgtacaatcatcattcctcatcagtcttgctaaaaaaagatgtttaccaaactgaaaacacacacttaatatccaaatcatcattttcttaatgaacagttgaattacatcattcataaatatataattaataattaaatctttccctaatagctagagtttgaaaacttatccatgatagatcatgatggattaattttattgtccaagaaaaatttaaggtcaaacaaatgcaggaaaaggaaagttccgtggctacatagaatagagaagaaaagaaaggaaaagaaaaaccaatcaataaaccctttattagttccttccattccatatggccaaggcctggcatgctaaattaataattaaagaagatccaagcagcactgactcattacatcatatgccacaaccacacccattactggtcaacctatatatattatataaatatatatattgccaatcaaaatttcatataattattgattttctattacccttctctctctctctctctatccatgaaaaattgtagttcgcaaaacagtgttgtgtttttactttctattgaattatttcattattatacctttagaaattaaaactatgttttgtctctttaatgaaatgacatcttaaagttaaatttgaacaaagactcccattttttaacatcaaaacaatttgagaaattttcataaaaaaataaaaattactctgtcaagtcagtaggttcatttatttgctcattagatgaataaaaaaaaagttgctgttaattgtaacagttggcttta

SEQ ID NO: 79556 - DNA, 2104 bp, Cannabis sativa
gatagtacattgtctcagactccttttcgtaaattgttcctcgataacccatgagggtatcctccttaagttcacatgttgcgtgcctgttaagtgtgaattctttgtctaggacttgacattcgatttaacattgaggagcgatgcaggaatcagattaactatccagttttgttcgctctaaataggtggtttaagtgattgatctactttgggcgaggtaatgggcacgatatccataatgggcctttgtgagagtccacgagtctcccttccggaatcatggataacatttacctccaaagcctttgtggctcaggagcagcggaggcttgctacctccctccagttttgggatctcatccaggtctattaactaggttaatctcttggtattatccactgcagtgtcgcaagaatattctggacttttcacattctattggcactgtccacgtggtgaataaccattagtgcatgaaagttagtggtcttttggggcgtgtgtcgcgttgtgttgggaatcgtactgacgtcaggttcatattagcgcttcctcttaggcgaatgtcatcatttatgagggtttcttcgatgttgatgagtgcatttaatgcaccctttggtatttctaaactgttggatcagcgggatttatgttttcctaaatttaatctgagcccttgggtggggggatggagatcgccaactttattataaatattgcccaaagagattgtttggaacttttggccatctctttagattttcaaaattttcagggagagagagagagacttcttaaacccaaaaactcttttccaataaatgtttgacctggcctcccagctttttgaaaaactattacattttccttcacgtttttatccaaacttcagctccttgatcatcgttccagtgacttcttcattggatttttatagggatctctactaattcgctatgagattacacattctccatgccaaagtttcactgatagctggtggtatatgataggatgagctagaccgttcacacttctagaaaaccacatgcaccctctgttaccacatgtaagtacgccatttttcaaaatttttgtattagttttactcgtttaggttgtcttcagggtaaagggttgtagttaatatgccatgagttcagcacttttcttgggttttcttgatcaaaactgtgtgctccaccgtacggggcattttttgcatttgttttaatgagaacatagggacccttagggatatattggattttagagccttgctatgcgtaggtgtttacattaagagtagccctaatgatgtggacatcaatgtttgatacgtagaaggaaagatgacatctcggagttgagtagtcgtgagtcatagtaggtcaacctgggagggttccttagccttgcgcccatgtttacttcgagaactctagaatggaagttcagactttaataacttgaatccaacccactatctttcagtattttgtaacatgaagaccatgagcagcctaatccaagccttgggagctgaaattagagctgaaattatacgaacctgcaacgaacctgcaacttggaatgcaacttggaagccaacctgggcacctagggttttattcggcacccacgttgacattctcaactagggtttcagttttcgggcctgtcttagtgaaaagtggtaaaaacttgcatttgaacatcaattagacataccatagacatatttgaggcattagaattataattagagcgagttgatttttgagcacttggggccctaggaccccgaacatgtaataccctgatacttaggtgcgctagagtgatttttcaattgcagtgccatctttgctaattaaagaaattttgttgaaaatcgtgtcaaattaaaactttagatttgattactaaactttaaaagtttctacccatttatttacaaaagcctggatcccgtaattaaacttttacaaaatattcaaaatatatttagttaggtttcttagcgactacgaaataaaaccccaaatgtccccagaccgaacactccatgtcgtgcctgttggatatattttacca

SEQ ID NO: 79557 - DNA, 2692 bp, Cannabis sativa
aaagaacatttgaaagtaactgatactacatgtttctctctagacccaatgatctagcatctgggtcttgtatgcgccctatttaagacaataacaaactctgtgcagacaaaattagacaaaaaatacaattttataatattgggtacttattctgccaaaaataaatattgtttgccacttataaacttaaaacttttggtacttatttactcttttttgaatgatatagaatttttgggccacttttaaaatcacttgccgatgatgcgacttttaaaatttatcttttcttagagcatctctaaccatgctctctaaatacactttttagctaaaatatggagtgacatttaaaaaaattagctctaattatacaaaaaatggctctctataatagcaaaagaatagagagctctctaaatgtagggaactccttatttttttgctaaacttttttgatagtattttaattaaatttttttttgcttttttattattttaaaattaatgtatatttaataaattaaattataaactattattaaaataattaaatactaactaaaataacaagttataattagaacaataataataaattggttttttattttaattttctaattatgttaactaaaaaataaaaactatgattaaagatgtttttaattaatttataaaagttgtcctaaataaaacgtgaagtagagtgaggtgagatgagatgagaaggtagaatgcccaaattcgtaactcgacgtgtcaaccatgcgttaaagtgccgccactcttttctgagagattggacgaaagccgagttccaaccttcataacaccttatattcctttgcatattctcttttgtggctcaaaacgattagctgtacacaccacatgactcaaaaccgaatcctacgctttttgaactttttctattttttttttttataaaattttctaaatataaatattttataaagaaaataattattcattatctagttatttattcttttgaaaaatagcattgttttacgaaaatattatttatttattattattttttcattctaatttagttgtatttccaacgattaaatgtccaattgaattagagattaataacatttaaaataaaaattaaaaattaagaaaattgtatgatttattttttttagaaagcaactttttgtttgccgtaaacaccacataactcaataccgaatccaacgctcttttctattttttttttcttttgcataaatttttctaaatattaaataaatatttgggtgattctaccattcactccttaaaagggaataatttacaatataaaaataatgttcaaacagtcgattttagtacaaaataaaatagtcacgcgtgcgatataatgtttgaacatagttttcggcatgttaaatttttccaaatttcttaaaattttgcaggatgtcttaaataactgtaacgtacatgaccaattaaaaaattatttcgaatactaaaacaaatataaatgtatcaatatatccatgttaaggaagtgtattatagaattttcttaattattttatgaacaaaataattattaattatctatctatttattcttttggaaacctttatgcaaatattatttttcaccaaactcactttttctttttcttttttttgtttgccacgcacttatatatacagagagagtcacaaacaatccaatcacatgatctctctcaaatttcgtattttctcaattctctttctccacctcctctttctagattaatcctttcatcagttgcaaatggcttctgccgctactgtcagccctgtagggaccgaaaagctctccaacctcaaatctgctgttgctggccttaaccagattaggtacttcttcactatctttcagtttccttcccaactctaatcttcaactttgtcgatccgatccatttcttaaatttgttgaacattcatattggcataagatctgacattcttcgttgttgtagtgacgatgagaaaaatggattcatcaacctcgtttctcgttacctcaggtagattcttagatttaattattttaattttgttttaatgaccaagtgtggcgcatttcgttatttttgtttggtcagtcatagaaaatgttaaaaactacggaaaatggtattctttgtttcgttttgcttatctgtttcactcaaaaatgtcgatttgtaatgttgatgaatcgttgtttgatttttataaaaagtggtgaagccgaacatgttgaatggagtaagatcctgacacctactgatgaggtagtggtaccttatgatagcttggcgcaaatttccgagggtaatcgctatattttggttattattattattatatatgttttttgattaaattattattattattattattattattaattattattatggattcctgtctaacatctgtagtgtgattgtctttataaattcagattcagaagagatcaaggaacttttgaataaacttgttgtgctgaagcttaatggaggtctgggaacaacaatgggctgcacgggtcccaagtatgcagttttatactaaatccaatgctttttaattttttaatgaattttcttcggcatctctaattgttgatcctgtataagatctgatgcaaattgactaa

SEQ ID NO: 79558 - DNA, 1767 bp, Cannabis sativa
tctctctctctctctcttaaagttcgcaactttccggccgccacccgccattttttccggtgaagtggttctttcataaacgtaaaaacatgggtctttttcagtttttgattctctccttatctcttctacctttctccttatttgaacctcttcttgctacttcaactccactactcgacgatgcattgtctcttctcagctttaaagagtctgtaaccgccgaccctttcaacattctggcctcctggaagtggaaccagtcctcctccgaccaccattgtagctggtacggcgttacttgccacccactctctcaaagagtcatttctctcaacctcacggtggactcctctgccgccctaggtgggactttatcggcttcggttgcgaacctcactcaacttcgggttctctcaatccctcatcacaacttttccggcgagatccccacacccatttccaagcttctgcttttggaggttctcgagcttcaaggtaacaactttaccggctacattccgacccacgtgacccgttttcgctctcttcgtctccttaacctgtcttccaatctcttcacgggtccgattccggcgaggttgattggctccgggaagcttactgaaattgatttgtctaataaccaactttccgggagagttgaagtgggtagtaaatcatgtgagtttttgacacatttgaagctctctaacaattttcttactgaacccattccgactgagatctcaaagtgttggaatctgaagacccttttgatcgatgggaatattttagaaggaaagattcctgcccagattggagaactttctgagcttcgtgttcttgatgtttcaaggaacagtttgactgagaaaattcctaaagagctcgccaactgtttgaaactatgtgttcttgtgctcactaacttagttgatgaagacagctcactagacagtgctagaggagaatttaatgcttttgtgggagccattccttttgagctgctattacttcccaccttggagattttgtgggctccaagggctaatcttgccggaagattacctagcacttggactgagtcttgctcactcagagttgtgaatttggggcagaattatatcactggtgttttacctgaaggcatcaagatgtgtaagaacatgacttttttggacttgagttccaacaagttaaagggctatcttcctcttcaactccaagttccatgtatgctttacttcaatatcagcaggaatcaaatatctggttttcttccaaggtttggtaaccatgggagttgtgatactagcatagtcagttctaatgtgaataatcaggatattcttaaggcttatttaggattggggttggataggaatgattggattatccatgattttagttggaatagatttgttggtgcattacctttgttctttgttggagatgagttattggcaacatctaatgatcataacttctcatatagattgttgcttagtaataacaagttcaatgggtcacttcctattgggatggttccccagtgtaatagctttaagggcttctccatcaacttaaatgccaacaaaatatcaggtgaaatttctcatgcattcccagttgattgtctaaggctaacagattttgaagcagcttacaatcagtttggagggtcattttctggtgttgctattagtcatttggttatgctccaacgccttgacttaagaggcaatgcactatctggccctctac

SEQ ID NO: 79559 - DNA, 1790 bp, Cannabis sativa
acatgtacaatcttcatccactcggactcattgttgtttagccttagcttttcccttacctatacatgtaaacaataattgtgagttgacagactcagtaagaaaagcaaaccatattcataaatataactcgaattacaattaggtacccatacacccaagcataatcctatccccgcgtcctacgtaatactgagtctagaacgttcatacgatagtactattaaccgtaatatcaccctatacttggtactctagtcgtaccgatgtgatagcgtcaaacagtacttatgccaaacatacattcatcggtatctaatataactttatgtatattgataccgctattctaatgtaatctaacatgcattcataaacatccacgctaaacatgtattcacatatacatatcattatactaatcttacctcgttttcgaattgatgtgtcggtcaacctgagtggaatcgctgcttgacgatttacaggcccctaagtcacaatatttataaaattgatgagtgacacgctaaatcacttttcggagacttaaaataaaaataaaaaatttccctataaatggataacatggcaataccctaaacattgcaaaaacgcaaaaatctagggtgccctaaactgcctcaactagtagaccggttcccaaccaaaaaattagttttgtggggtcttcttagggatgaaccaaaattttggttcctacaggtccaaactaaaggggtcgaccagtttagtgcaagaaccctaaaaaccttctaaactattcaaatcaacccaaaccatccagagcacctaaacaagtcacaaggaacataattcaagcaactaaaacaggtataagccttagaaatcaattctaccagtaaagggaaaactttgagcttaaaagcttaaaccctgcttaagttccacaacaagatgcaaattcaacctaaaatcactcatgccagtacacaaacaccttagaaaacagatttaaacttaaaaaatttgcacagtggccctaactcagaattcatgcatgaaaacctaacttcaaacttgaaatacaaatagaaaaagggagagaagctaaccttgagctaacccttacttaatctatagaaaccttagttgaatccttaattttctagcttgaagttgaagcaaaagtctagtttttttcttgcctagggtgaggccgaacaagggaaagaaagagaaagaggtgttgaatttttctagcttagtcaattatggttaaatgaaaaactaacttaataaattcactatatccagcttattactattaataagcttacaaaaataaataagtaaattcccactaactaaaacagtactaatctagggtaaaagactaaattaccatttcttaattaggaagcaactaacataattagggataaaatggtcatataccactaacccgataactctcgacattcccaatgcctatttaaattgccccgctattactaaaataccaaaccatatgagaatgtgattctatcgactaaatatcgtgttctactgttaccaggcataaaatataaaaaaaaatatgaaatttcatatataacataaataaaataggaaattttttattaatatacgtaatacacataataataacataaataaccttgattaatttattagtcttccggtaacgtgacacatcatcatctctaccgtaataccaaaaaaatctcataccgaaatctaaaaggaaacctaccatctcgctccatgaatgcgggtcctttgaa

SEQ ID NO: 79560 - DNA, 4113 bp, Cannabis sativa
aataatttttgtcgatttggtcgagttaatccgttgataggccacctttgacttatgtgtatgctcgtaggggtaaaaaggaaaatatgattaacatcacatcagattaggcttttgctgactgttatttgagttttgcttgggtgtgagtgacttaagatacactcggtttagtaataagttgggggaaaatcagtgtggggtgtgaagagttttattttgtattttcagttgtacttggagagaacgaggctctaaaattcctgagaattaatcaaaggcagatctacatctaccattttcttcaatttgaatttgcatttgctctactcttcttcttcttctttttttcttttctggttttgatctcaatttgacagggagttcctatcaaattggtatcagagcaagatcatggggcctaagagggatgcgacgatggaagtagcagatgaacgattggaagctcttcgagccgaggtccaacgggagatggcggaagtgaaattgcaactgggcaaggaggtttcggagactcgggcggaagtgcagcggctaccggagttattgttggctcagatgacccgtttccttgccgcgggtaaaacaccggtagagacaaccctttccagcagcgatcagcaaccccaagagatgcccagaaatgcatcgtcgtcgtcgccgaagccgctcaaaccggcaccgatccacgccctccgaaaatggatttacctgtgttttcatgctccaacccagaaggatggatctatcaggcagagaggtattttcttctttttcgtctaactgaaccacttatgttggaaacagccataatcggcttggatggggatgctttgacctagtttcaatgggaaaatcagagacggccgattacatcatggaccgttctcaagcatatggtattgtagaggtttagatcagctcagattgggtccttgttggaagagttgttgtcagttacacagaccaccactgttcgcgactatagactccgttgggaggcggcggcgtcgagattaccaggggtgccggagtacatcttagaaggcagctttgttaagggccttaaggaaggaattagaggcactcttcacatgttgcaacccatggggttggctcacataatggatacagcccaaaggattgaggagggaagccaactcatgaatgtgactcactcacttcagcccaacaaaccccacttgacacccattaatccgctccgcccaaatcataatgtgtttcacactaagtcactcacggctgccccggttactacaccctctccaaccataatgatgaacaccactggcaaggcccccacaatgcggaggatgaccgaggcagagtatcaagagaaaagagcaaaaggattgtgttttcgttgtgacaagaagtaccatcgtggacatgaatgcgaacagaagtatctacaagtgttactgtttgctgaagaggatgaacccaagccgatcgtggaatcaccaccaccatccccgacagctgaggaagctgaaacgacggaagaaacattagtgacactctcgttaaactcgctagtaggaatttcttcagcccactatgaagttagctggaaaaattgggcagcagccagtcccagtgttaattgacagtgaggctacccataatttcatttctcttgaagtggtagaagccacgggtataccaatatcacagacaaatggctatggcattcttttgggcaccagagataaggtgaaggcagaaggagtttgtgctaatgtgtccttggagttaggggctcttcgagtagtcaccgatttcttgtcgttagaattgggaggagctgatgtgatattgggtattaaatggctggaaacgttggggaatatgcaagtcaattggaggtctatggtaatgaagttcgaaagagatggcacttgggtgactttgcaaggcgatcctagcctttgtaagtctcccatcactctaaaagccatgttctattcggtggagcaaagtggatatggattctgggtccatctctgggctatacatacacaagaagctgaagttgagcagtcgataccggggccagtggctgaattagtagactgatataaggaggtgttcaacatgccttcggggttaccaccggttcgagataaggagcatcgaatcatactaaaggagagagtgggaccaatttcagtttgtccttatcactatgctcaaatctaaaaggatgaaatagagaggatggtgcgagaaacgctaagagcgggcatatgtgtgccaagcacaagtcctttttcgagcacggtattgctagtcaaaaagaaggatggcagctggaggttttgtgttgattaccgggctttgaatagggagaccgtggctgacaaattccctatcccgataattgaagagctactcgatgagttatatggtgccaaggtatttttgaagttggacctcaagtcgagttatcatcagatccgaatggcagcccaagatgtggagaagacggcttttcgtacccacgagggacactacgagttcctcgtaatgccgtttggtctcacaaatgctccatctacgtttcaagctctcatgaatacaattttttgggacttacttcgtcataatgtgctcgtgttcttcgatgacattctagtgtacaacccttctttggaagcacatgtgggtcacctagaggaggtattgaggaggttatagcaacaccagctatacgcgaaccacaataagtgtttgtttgggcaagagagtgtggagtatttggggcatatcatttcagctcagggtgtttcagcagatccaaccaaagtggcagccatgtcccaatggccggtccctcgaactcttaaggagttgagagggttcttgggattgacaggttactaccgaaagtttgtcaaggattatggaacgatagcaagaacacttactgaccagctcaagaaggatgccttcggatggaatgaagatgctcagaatgctttccaaaagttgaaagaagctatgtgctcagtgtcggtgttagctttacccgacttttcttgtcctttcattgtggagacagacgcatcgaggatcggattagaggctgtactcatgcagtgccagcgacctatagcttactttagtcaagccttgtcccctcgcactcaaacaaagtcagtgtacgaacgggagctgatggctattgtgcttgctattcagaagtggcacccttacttactggggcacaagtttgtggtgcgtactgatcaacgcagcctcaaatacctcctggaacaacggttagtggcggaggagcaccgacgatggcttaccaagattatggggtatgactttgagattcagtatcgaccggggcttgagaacaaggcggctgacgcactttccagggtccaaaatgaaaccctcatggccaccattactgtacctaatgtgatctctatacccgatctgcaagactaagtgagggctgaccctatgctctcgaaggtgctccaagacttggaaaaagggctggatgggggcgggtacaccttaatgcaagggattttgcaatttcgcggacgacttgtattaccgtctacctcttcatgcattccattgatactagaggagtatcatggcagcaaggtgggaggacactcgggggtgtttaaaacttttcaacgcctagcaagggacttgtattggtccacaatgcggaaagacatccaaaagtttgtggctgattgtgtagtttgtcagcaaaataagtatctcgctcaatctcccgcggggctactgcaacctctgcccattcctgaacaagtttgggaggatatatccatggattttgtcaaaggacttcctatgtcgcatgggtatgactccatattggcggtgattgatcgcttgaccaagtatgggcatttcatcccacttaggcacacttatatagctgccacggtagctgaagtgtttgttcgagaggttgtcaagcttcatggtttccctcgttccatttgttgcgaaaattattaattactacgcaagtgcacgcaatcaagtagtatactcacgcaagtgagg

SEQ ID NO: 79561 - DNA, 3209 bp, Cannabis sativa
agtgcactgtgaatcaggattcgggaggcagtatatttcctagtgcaacgaaaaacgaatccagctaaatactgagtttgccatgaaaaatgaaggtcgatgataacactcgaggctagcaaaagtagttgagcaggtgtgcgtcggcaagtgattcaagtcccacacatgaattttatcaaatgagagtaccaaacaaaagttactcaaatagtccagaaattgcatttttacacaatgtgcaactatgtgagcaatgttctcatattaggagaaaaaccacagtttttcatgcacatttaaaaccagttgcacttttatatttcaaaaaaaaaaatgcattaacaatttgttggtactttgcatccaacccgggtgttcgggaactcaaaattatgtaagtgagaattattaacagaagataaaagtaacatacctagatctgctgagattagtgcctctccatcataattaggccctcccagaacagttcctgatggagaaataatgacacttcctccagagcatacaactgactctgggttaaggtcctcttctgtgcctgaaaatacatactctggaggtggggggtagtccttcctccgacagaattgattggctgatagcacaaaacagccaccttcaactgcaatgtgtgtcattgatgcttgccacacatccctcgaatcagctgttggtgcacaatatatctcgatccctacaaccaataaagttcccataagttcgaactttattatttgtagcatagtctgaaactctacatgctagtaaactttattttgcaaatagtagacaattatctgcaagaaatcagacaccttcaattcaaatcataccagataataaataaaattattgctgcagagcataacaccaagcatcgaaacacatgaacaaggacgtaaacatgcttagcgaaacaatacagagatgttgtaagctacggagaacttaattatcaacttttacagtaaagataacagactctttatgctagttcatcctcaataattaatggccaggccctgtgaggatatttgactattagtaacccatttgttaacttagcccagcttggtttgagctgtaaacctctcacacaaaacacacacccaaccaattgttccaccttaatctcacaaacagaaagagaatttacaagaatacattgggtcaaaagtattgaacaccagtctttctaacctttggcatacattgctgtccttagaagcggcatcttgttttcccaacaaatagcagcaccaatttttccaattggtgtatcgaaaacaggaattgttgatccatctccgaagccccatatgattctctccaaagctgttggcatgagtttccggtgctttcccaggtaatgaccttgagcatcaaaaaatagtacagtacaatagagtgtatacccatctctttctatcacgcccattaccaaatataccttgtacttcccagccattgcagccaatcggtcaacttcagggcctgcaatatacccaaaaaaattaaggaaaaatctacataccaacaccaagtgactagtgaaaaatttagttctcaaacattatcaagaatgacaccaactaacatataaagatcaactctagcttaaatttaatactgtcaaatgcagagcagaaaattaaaatcttggcttatctggcgacattaagagcaattaaaatccataagtaggccgagtcgctcacaagaggttaagggaaatgtttaacatgttggaaaagatgaaaatatgggcaagtatacaaattatgcagttaagatctttgcttattggaggtgtgatgtaccatgttatctcaattcagtagcaagaaaattaaagaacaatagaacagtgaagaaatgagtaaatatctctgttgagtgttattgaattaaaaggaaaatggttacaagcttagagccctataggacccctgctgtgaataaatattcttaatgcatgcataaaccccataaaccctctcactgcacttaaaagcttgcaactcacccaacaattaccaaagtaccaccaacagagtaaaagaccatattacccttggcccgtagcacccttacctctcctagcttaagtaaaatgcaccttggtcctaacaaggtgaccctgctaaagggcgcctatggtgcctatcagtagcacccttataaaatatgatgtcatatcttgatcactaaaatttattatcgggtctcacttattttactttaataattattaaaaaaaccgctaaccatttacttataggatgccatggtgctaatcactatgtttctgcagtcatatgctcattgaaaacatgttctatgattgaagacttacaatacaaacgagagtaaagctttctttcccaaatttacaattaaatatcaaaagagacatttcgagtacatacattttcaaacaacttgaaattaagcagaaaatactttgcacaaagaaagaactcaccaggaacatcaatggcggaggaatggtacttgcgaaactcctctttgcctttgggcgttcgactcccaatagtaacaccaaaattagaaccacgagggtatccaccaacgaaggcctcaggaaacacaacgagctgagacccatacccagccgcttcggccaacaatctctccgccttatctgacaccaacagagttcacaatccacaatatctcgattaataaaaaaaaaaagaaaaatgctgaattagaaaaaggaagaaaaacctagagtggcgggagtgtcgtagaagatggtggaggcctggacgatggtggcgcgaagtgtgggagcagaggagtcgttgccgccacccatgtctacttcggcgatgataggaacgtcgttaagggaagaagtcgccatttttggtaaggaagaagattgagtggacaaaagtctttgtttatatctttagtattaccacacacacaaaaactaaaccaaaaaaaatccatgaaaatgaaagaactttctttttttcttcttctagaacttcctcccttattctattgatttttttaaatataaataaataaagtcacacttcatccaagcaaaactttacactatgtttggtaggaggcaaaactttacactatgtttggtaggagggagaagtggagggatagagagaagagcaagggcgtacccatatgta

SEQ ID NO: 79562 - DNA, 2226 bp, Cannabis sativa
aagaaacatgattaccacactttgttttcaaaacatccttattgggaaagtagttagccttcaaaactttactacaaagcattttaaaaaaacaccaagcttacaacttcttttacccacagcttgccaaactcttataagaaataattttgattttacagctttctacggccagccaatgagtgactgacacgtaagatatgttatggtgcggcggcacacacagaattaataaaagaaaaaaaaaagattttgattttgattttctcattttccatttctccgaaagtgaaacagtgttgttgttgtgagatcagagcagagcaaagcccctaaaaatggaagcagagatggaagagaagatcaccaaaacggtgcgttccattcttcaacaatccaacatggatgacgtcactgagtacaaggttcgaaaacaagcctccgaccaactcaacctcgacctctccaaacctccttacaaggctttcgttaagaaagttgttcaatctttcctagaagaacaacaacaacaagaagaagaagaagaaggacaagaagaacagcagaccggtgatggggagtacgatgatgaaggcaatctaattgtttgcaaggtttgatttttttatgtggggttctgtttgtttctcgagaaaattagtgggaaaacttaaaggtttgatttttatgcataattagaaaatgggttctttttggttccagttatcagagaagaggaaggtgacagttcaggattttcgagggaaaactttggtgtctattagggaatactttaagaaagatggaaaggagcttcctacttctaaaggtactatttttattttttctcttttgaaattttccactttttgatatgataatatgactggatttggattgttctagctagctagttgagaggtgaaaagggtgttattgatatggttgtttggtttaatggctctgaaatttatgtagatttcttatactagcttattactatgtttagttattatttagtatcaaactacaactactttaggtgtgtaaaattaagtcaagggtacttctagtaatgctattatgaaaattagacttgtcatgacaataaatgaattatgaatttgaaaattatttcattagttatgattatgtggaacaagttttgatgatatcaatggctacaaagttcttgtaaagaggtaaaaatgaggaaccttttgactaattagttgtagaaagtagttaggtgagatgctaaggctgcaaactgataagaaccggttgccaaattactcaaaccagtagccgaacacacccgaacacagcagcagaaaagacagcaaaacagtagagaattgtatattgaatatgtgagaaaaccaattacaaactattggagcctttcggcccctttgatgcaaagagttttactcaattcattgcataccatttctcactcaaatacccttttttatatattatatgctagcacaccatactaatcccattgcctaacaaaatggtggagccaaaccacttgagagaaaacattttgtgtttttgatacaagtaatggttacttcggtggattttcaaaagttatccgatgagtagtgtagctgttcttgttcttgtgagatattgtgaatcattttctgatcatgctctacttttgcatggattgcttgaatacattttcaaaagttgtccgatcgattaccaatgcttgattgtattgttttgtttcgttttgttacagggatcagtttgacagaagaacaatggtcaaccttttacaaaaatgtacctgctatagagaaagccattagtaaaatggaatcaaggatcatgtgagactgtgatctagccattaaattagtgaagctatctcgaaatgtaacttgtacttcttatctacttgttgtggctttgtcaatttaatgcagtaacttatgactgtagtagtgtatcttaatacatgggatagaacaacaaccattgttgaaatgaacttttgtgatgtttctatctagctctgcaaaacaaactctaccatgcattgtttggtcttaatctgttcaagctgtttcatttgtggaatgagttgatagaacatcactttttgaactgatgtcaaagttatctttcaaatttaaatgggaaaatgggatttattgtagaagagttttgagactgaattgtgagaagttgtattgaaaatca

SEQ ID NO: 79563 - DNA, 4604 bp, Cannabis sativa
tgcatttatgtccaattaaagttgaataaaagataagcctaattttaacatattctgtcatatagctatgttgtcacaacaccactacagtatattgtggaccatgtacttgaatggacaagtcaactacactcctcactcctcaatcgttttcagttttggttaaaatatttaatttggaatacaatcccttatgctacagtagaatatcaatattcgtctccaattgcagtggttgagttttattcttctccaaaggtcaattcatcacaaacagtgccacagtggaatgagagaaattatggttttcttaagttgagatgatttttctttttctttttcttttttgctgtgtggtgtaaaatgacaaataaaaaatatatatacttagtcatctttcagtgctaaaaatttgcaagtctgccatgtaacaatacagatagcaagaacagaagttaaagaaaaaccaaaacattactatgtttattatggtgttagcttgtaaatcatccttacattcatgataaatgagtactttaacataatacataggaagcataagatgtttatttagattgatctaaacataatgaaccaatcataaggcccaactttgaattattttggtttgggatggtatgataagatgaaactgcataggtcaaaacttccactcatttacagtgatcgatgtagccccatccacgtttgctttaacattttgtacaagatgcaatggcatatttgttaaggtcaagtctttcaaggttgttaggtggtttagcccttctacttgcttcatatttgggcagcgtctgatctctagctctctaagatgggacattgctccttcctctatcttccattcttccaattcttcaagcatccaaagtttcagaacaagaagttctggaaaatcaccacaaatacattccatttttctacctgaatatgagctaccaaaaagcctgaggatgtttaattgaggaagttttcctagcaatgttatcgattcttcgtctagttgggatccagacaaagtaagaattttcaagtttggtgggaattgaaatatttcattagctgctaattttggcaaaactccaagcaaatacaagtcagtgagcttgtggtgcagagccatgttaaccaacttgagatctgaaggttgaccaaattcatcaattgatctcaacttcaaagattgaagatcagtaagttttgaaatccaatcagctatggcctgaattcttgttgaatggcatgtcaatcccaattttctgaggccaaccaatttgctcagccaattcacaacaaggcttgtactccctacagatagcccccataaggtctgcaagttggttagagagccacgaggccgtttctgaactgacacatcgaaatgaacctcattcatgtacagatgtctaagatttttggccttccaaattgaagtagacaaagtagttatattggtgtgcttgacatccaaagtctccaagtacactagaccaccaactgaatcagtaagtgaatctaggaaagtccatctcaagccaagatatcttagctgcaaaagttttccaagggactccggtagcctaggcttataaacaccttcaagatcgagcactctgagcaacccgaatccacgcttagcagtaaccttatcaagaaagatgcctacttcatgtgcaggagtatctcttctcctggtattgaaagatatgtatgaaagaagatgttggttgtgaaaatccgaagaaggatagttcttcatatcaacatactccacaagccgacgaacatgaaactttggtgaagtgactgaattatattcagagtacttatgaacaaaaaaaaggccaagagccatggctttggctgagaatacatcataaagaatacctggaattcgacaagtcttggggcgtccatcagattttctccttgttacctctatcatgtttttattgacaagttctttgaaatagtcttctgctagatcttcaggtgtttgagaagaccccgaatccggtatcaccaatccctctgcaatccatagccgaaacaatcttcttattgggatctcaaatgctctaggaaagagccccatataaagatagcatggtcttatccttggaagaaggttttgatagcttaaagtcaacctataagagaaactagattgatggttttgatcatcacctgaactaacatgatcatcaatcaatttcaacagttcatggtaatcagaactcttggctggtaacaaactacaaagcttggtaactgctagaggtgaaccatcacacttcctcaaaacattgttcctgaaatatgtcaactccaaatcattaaatctatcttcattccatctcatatttttcaagaacagtgcccaaacatcttcatcactaagccggttaagttgaataagctcacagccctgatcaaccctcgaactcccacgccatgctacttcattatcacacgttgtcaacaaaattctgctaccacttttggtgtctgggaagacatgttttacttcatcccataactgagttgaccagacattatccatgactatcagatatctgttttcctccagaattgtagcaagactccttctcaagttgttatagttttcctccgacacaacttttgcttcattcatactcatagcttgtttgcatatgtcaatcaacaaatctctaacactaaaacttgttggcacataaatccataccatgacatggaaatgctccttaatatctggtctattgtatacggtcttagccagagttgtcttcccagagcctacaataccgacaattgaaatgacacgaagttgacatccaagatcgtcagaccgaagcatctgagcaactagagcctcttcttctttgtcaagaccaataacacttgataccatgctagtgtcaagggaactgctatagcaagaagccgtgtcacttgaaagattttcttcaatgtcttggccagaggttgagagcgtgagctcctctaaggacttgttccagaagttgatgaaagaaagcctgacctttttcatcccatccatcaagaatttttggctccacactgagctgaggcggaggaaagggcgcattggacctttttgtctatgaataagcattgttcttgtggtgaggaaaatatcagtgatattgtccaccataaagcaatcttgtagaactctatactcgaatttgggaacctttttatccattttgtgtttgtgagctgagtctctgaaccttcttaaatattcatggaggtcattggttgcccatctaacttctcgtcttagccttgggtgaacaaacaggtgctgagctagtagatcactcagtttctctgtcactacagaaacttgtatgtctacgtctatggagtgttgatccatctgttttgttttgtttcctcccctaaatgaaattaacacaataagaggatttaaacttcaaattaatgacaacctagatattcaataatgtagaatacagcacagacctccattattctcttcttatagcattatttattatattaaattaaccagacaagattaatagtaaatttcaactctcatactgaactccttcgtaataatgcacatcaaagattgaagaagagactattgaaatcacaagacaacaaaatgaatagaagtaaagactttgcttaaatcttcttacacgtgttatatatatgcatttaaacatacaaatacaagataaaattatttcaaattatgatcaaagttcatatatttatattaaaaaaaaaattacctttctctgcgagtgtttgatcaagttcgcatctttgaacagtgatcggagattgaatttaaattaggggcttatatgcggagtgaagtaataagaaagtagaagaaacataatacataaaaaagatggggtgggtgggtggacctaaagactaaagagagttttaacgaatatgcttgctaagttggtattctaggaatcgaaagagactctggtcctagccctaggcttcttccacactctcttctcagtctcatggaggacgtgatgggttcaatctcaacactccaaaactcataattaatcagagattaacaattgatagaactcaacagccaaaaatgagtagtggagttgcaaacgtaagagtaaaatgtttaaccattacaataaattataaaacagatatggtgagcttttttctaatctcagtatcatattggtttaaaagaaaaaggcaaaatcttgttttcatttatcatcttactgaagatcgaaccgttacttaaataggttcgtatgatcggaaaagcaaaaggttcgtacggtcccgcttcaagtttttagtttttacccgagcttagttggctcctttctattccacatttataactgatttagttattttagtaatcctttccttttttgttaatgagtggtagttgttttgtgattgttttaatattttttttaaaaattattacattaaaatataggagagtaataattaattggaccagtaatagcgatagacatcaatgctttttaatatttttatttttaaaa

SEQ ID NO: 79564 - DNA, 1673 bp, Cannabis sativa
tgaataatctggatgggcataaaacccaacaagtttatcaaagtcatgacaaatggaaactggaattctgaaacaggacattgcataagaaggaattgcttggataatcgctttaataagtatctcttttccagttttggagaaaaatttattgttccaaacattaagcttagcactagattttgaaggaggtaatggaaagaagatttcttagacctaccaaaacactgagggactcccaagtatttagaaacaaaaggtctattatcaatgccaagagtattgtaaaaaaattctttatggtaaggattaatattaggagaaaagagaatggaagatttagagaaattgaccgattgacctgtagccttattataaagtaagagaatatcctaaatagctctacaattataattagtgacagtggtgaacaaaagactgtcatcagcaaagagaagatggaaaatagaaggacaaatggaatagtgtacattccaccaaaccaacgccatttcattccaatgtgataccatacatttcttataatttttggtttataaccttataacctttatttaaatacaattgcttcccaagtgtaacaaccacaaaatctaacctataatgactatattttttattatattttttgagatgaaacgtctatctttaatttgattacgaaatatggtaatatttttgaagtaactagatcaattattattacttcaagtaaacatcgaatgtttcattacttgaagaaaacgtcgattgttttccttgtgagatataagattacactaaagaaaatcttaatgccaagcattcttaaatataatttaactcataaaattgttgtgacaaatttagtacaagaataaatgacaaagatatatacttttcaggctcaaggaaaagtgaggggagaatttcccatgtggagtttgattgattttctagtatttacccttagtagttaaaccgaaaccaaagggaaatagaggatcatagtgcttgtcaccaacattcattggaagttggtctacagttttgaaccatgtcctagcaagcttcccagtgaatccataatcaccaaacaaaacatcagcaacaccttggccttctgttcccggaagccatgctgcaacgagcgcatcaacagtagcaacatagggctcgatcacaacagggcgaccagaaacaacaacaacgacacatttaactgccccacaaacatttttcattgtgcttggaccaggctcagctattgtcaggttcaagctgtcaccagctgtttctgcatacggaggctcgcccacaacaacaatagcatagtcgaatttgtttgatttgacaaagtctgcttcaggtgtttcactgtatacaacttgagtggtgggatcaactgtgttcttcactgcattgaggattgtggtacctgtttggtgaaaaaatagttgtcacacacatactttgatttgatatacaaactacataaatcaatgcttcattttcaaagaataaaagaataaaagattttctgtctgtagtttggattcttattaatctttttatctttattactgtgttagaatttaaaataaaatgaatgatgttccatctcaaaaccaattggcaataggagtttctatcccatttatcttatatatggt

SEQ ID NO: 79565 - DNA, 4676 bp, Cannabis sativa
  modified_base (4621)..(4624): a, c, t, g, unknown or other
ggcataaaacccaacaaaaagaagtatatttattgtgatgcaatatatcatattgtggtataaatatccataaccttttattatgtgataaatttgaattaacttttgatacattgcataaagcaaatattttacaagataagttatattttaataatgtgaattgctaaaatgtattatcggtatcccctcttcggtgtcatactactattggtgtaattaagtatcggatctcatataaattaagaaaatagtttttaaagaatatcgctaaccaattgtgggacaccaactattaaaggtgtcgggcattactgatacccaatgtcaatgctctttaataataaatcaccaatctctatctccattgaagatgttctagaataaagataagcgtttgaagaggagtactaattataactttctattacaagctcttagtcaattttcacgcccgaaatcatatgtcagaatatttttttagagctttttcttcatagtgatattcattatagttatagtatcatctttgtaaatttttgaaaaattctaatagtttacagtactgaaaatagagtttctaatatttcagtctaccacgtgtgtttataaaaatttcaaacttatttttgacactataaattattcgaaattttctaaaaatttactaaaatgatcttgtaactaaaacaaacaccactatgaaaaaaattaaaataatattccaacatgtatttttaggtatgaaagtcgactaagagattatgataagatactacatttaaaataacttgtcttgtgtcaagtttgtgggtaatgtacttatattatttatatttaaatacagattgaatttattttattttctttttcttttttttttgaaaaatgattcatatgatttgatgagtacgtagtacgtattcggtagattatataaataatatcatctttacacgataaagaaaaagtttattaatataaataaatattgttatagtttgttaagacaaaaagaaaataatgaggttctcatgaattaaatgacaaatttagccattggtttaccagtttactacaaatacaaaacattgatcttatttataatcactttcatataaataaatgcaaaatattgcgacgtagatatttaagtttaatttttagttacaaataaatacttaaattataattctcaaacttctataaaatattaagtgttaagtcaatattcatgtgtcatttctttattgatatatttaaattattttttaaataaaaaataaaaatttaataacttaaatcaataaaaaaatttcatatagctaatttgataattttaaaaaatataacgtaccatcaaaaattaaaattaaatatttttctacaatctaaatatttatgtgaaaaattaatggaaaaataaagaaaataaaatcacaaagctaagtagtaattaagtactagtactactaccagtaccctgagcctcaggttgaggtggttagggttcttttttcctttttccaaattattttattttatatttttctcctattctgttctgctcacttaattctctctctctctctctctctctctctccttttttaactgctacaaacactgtccaaggacaacaagtccatcaatttatcaaacacatgaccaatatgggctccattaatggcagattttccagagttgaggtaggtactaaaccgcaaccttcatatctctaaagtctcttccttttcactatataattgcaaacactatctgggtttcatcttaaaagcttcaaaaacatgttcttcacatcattttagttcaaagtctcagtctttatagtatctcactcgagacatatagtttctggttttctctacacaagctactgtttgactgtgttcaattgggtttcttgtgatttcaagaaagtaaaaatgtgcattttgcttcttgtttaaaactcacatgtatgagttgggttttttgatctgtacaagaagcaaaggaaaatgattgtttaaacctttgtttttgagatctaacaaaagtggtgatgaatttagattgccactattattatcataaaatgtcttggattcattctcaaacaaggcagaaatatggtatattgacaagctctcctttatccccaatggtgccctcttcttcatcttcattaccatataatagtaattaccaaaagccaccaactcaatcctcttcctcttcttcttcatcctcatcaagtagtaaaataagcccagcaatcatattcatcataattattctagctattatttttttcatatctggtctcctccacttgcttgttagatttctcatgaagagaaggtcttcaacaatatctgaatcgaataggtatcctgagatgtctagctctgatgcttttcaaaggcagttacaacagctctttcatcttcatgattcagggcttgatcaagcttttatagatgctctccctgtattcctttacaaagagataatgggtcttaaagagccatttgattgtgcagtttgtttgtgtgaattttcagaacaagacaagttgagattacttccactttgtagtcatgcttttcacattgactgtatagacacatggttactgtctaattcaacttgtcctctttgtagaggtaccttatatacacctggaattggcattaatgagaacccagtttttgattttcaattagatccaagggaagaagatggttcttcaacaaacacaggaaatggggttctttccattagtcaaaagtctgctgaaaatgatattcaaaagagggtcttttcagtgagacttgggaaatttagatccataaatgatggggttgaacttcaagaaggaggaggagaaggagaaagagtacaaagagaaaagggtgaaactagtagtagcaatttggatgcaaggagatgttattcaatggggtcataccaatatgtgcttgatgattcagaattacaagttgctttacaacacaaaagaggaggaggtgttggtggtaatggtggtagtaatagcttaagaattccaaaagggagaagtggaacaagtagaaattgcttaattgatggagatgaaaatgggaagaagattaacattggaagcaaaggtgatagcttttcagtttccaaaatctggcaatggtctaaaaaaggaaaatttccaacttcttcagaaacccaattgagcactactattactactaccactacttcttctgttcatgctgatttaccatgaatgaaccatcagatttctcaggagtacatgttgaaggtattcactttgtttagtactattctttgttactattaagaaaaaaaaaagtcctttttctcaaaacatttttttaaaaggtttgctttctctctaatttagttactaatcactagaatactaccactcaatgtaacttctttgtatcatgttttcttttgagtaaaaaaacttttatggcaagtgggcaatgtactttatctttttctataaaattccatgcagtagtatatagtaagtttctcattcttttctccaaacttagcatattatccttttttttccttactcattgtatctaattccaaaaattgtatgtcatgtgcaacttttgtaacttcttcctctataagttgttgctcatgtttgtgagtgtaagtaagattggaattttgattaacttattcgatgtttgtttgttacattaaacaaagaaaaacttttattgacttgctagttttcaatcaatgtaaaagattgattactatggagagagtcatatcataatgttactttttggctgtgttgggcttctctagaattttgcttttttgtttttattttctttttttttttccatggaatcccaatattgggtaggacataatggtgggatcctaaaaaggggttagagggactctagtgatgaagagccatgagaagttgtcaatagacagtggaaagtggggtcatattgtaagaatgtgttccctattttttcagtgtcacatctctattagaaacgttttccaacacttattaatactaatatacctctcttcacaaccagaaaccattccttctataatcacacttgtaataacattgcaatgtgaaaagattaagcttaagcagtatgactattactcatttagattaggactgcatgcaaattagtatttgacttgtggcactaaagttaaaaggcttaaattttgaattgatggtaatgatgggcaattttaaccacacaaaaaaaaaaaatatatcaaatgacagactagtgaaagaatgaggttaagagataatgatgcatacataatttaatttatatatgataagacgaaatttaataaattaagggaccaccataggttggagggagttgagggggttttgggaagagggactgttttgttttttcatatagttgttgctgatgacacataacctgccctaataagataagaagaattgctgtaaactcccaaaaaaaaaaatatcaagttttgtattggtagttggtgagtatggagatcacaataattccaattttttatttaatacatatatatatatatnnnnatatatatatatatattaccaaatgcactatgtgatgatgtgagaaaaaaga

SEQ ID NO: 79566 - DNA, 5369 bp, Cannabis sativa
  modified_base (4024)..(4029): a, c, t, g, unknown or other
aatattgtgtctcatatgctcaaacaaatactaagcaacaaaagaaagaaattaaattgattcaaaacttcccttccctatcagttattgtcaaaggttgtaataaaagtaagtaatagagaggggtctctctctctaattaatttcttacttttgtgtcatcattcatcattattattattattaaccaaagcttgttcagaacagagcgttacaaataataataacagttttctcatttataataatatcagaataggttatatcagctagggaagtaagtagggctacatgtaacacagcaacaaacttcattactatacatttagccccatttttaaagggtacattttcaggaagactgtgatgtgaaaagggccaaaaagttcttctaaataggcctaaccaaggctaagctatggttggtactaactatatacacataatccaattattcaatgtactatactatactatactattgggagataaatagtacagacctcaatgttaataaaaattttgtccaattctgtcaatacagactctgttagtgttttaagtagagtactataacacaaactacactcttcaatactatagattagcctcgtttaaagggtacatttaaactcttatgatgagagagagagagtcaaatgatggattatgtatatgagaaatgctaaaaaacacaccatcctagttgttttatcgtcattagtatcattaagtatcggaccctatttatgaatatcgctaaccaatcataggacaccatctctaaatggtactaagcaccacaggtgcccaaaaacaatactctctaatgtgcatatataggtctaaacaaggctaagctatggttggttggtttgtactaactatatatacataatccaattattcaatgtactatactaaagatacaattattaagagttactatatatacaataataataaacaaattttgtttattttttttattttttttctagagctatgtggtccatttgtctttttggcaataaatcctaaagcaggccactaatatggttggttcagaagacaactaacctggaagtccggatgttagaccacagaaacagaagcagaagaccacatttgaaagctgaaatccagttccctgtttgactgcaaaacctcacagtggagagagtcagtcaatcagtccccccctcctcctcatcctcctcctcctcttccatcaaggcctttactacattcaacaataatttactgacttacttccaaaaggggtactcaaacaacctctagtaactcctaaagattcctctacataaggtaaattccttctcctttaaccacatatacaaataaaataccaaatgcagaagaagaagaagaagaagaaaggctaataaaccagaaagaagacaaagttatggagatgtctaactccaactccaattcttcagagaaggaaatcaaagctcaaacaactaaaagagttcttaaggagaagagagcaaggttgtacattatcaaacgttgtattttcatgctgctatgttggaaggatcgtggagattgatacatacacacaaacacacactcactcacacataatcatggtaaagatgataatgctctttttgtttagtaatagtttgtctctcttttcttagtggtttatttttacatacttgtaagaaacttttactatttgtagcacaaatcaaactttctttgttcattttctttaatgcaatggttttgagtaatactctctaactttgaactcaatatattcaagcaaaagtagataatgccataaattttcttgagcatagttagtactattgtgtctttaactcataagccaatcaaaattaagaaacaccctgaaaataataataataatttatttaaagctatgagaagttaattgggtaggccatggccttgaggttagtaatgaactcataaacttgttcagatatgaataagaacattgttcaaacttgaattgcaaaacaatattaagcttatttgaagaaaaacatactttaattagttatgaaaattttacataatcaaaaccaacataccccaaaagaaaaattactaataaagattaaaaaaaaaatcatttttttattattgttattacacattcacaaatatatatatatataataaaagcaaatcaatttccctaattccacaaaccctaatcgagtaattaacaactggtttcagaattgagaaataccgaagaccaattcaaacagggagcttggaaacgtcgtcgtgttggacctgggtctgttctgttacggataaaggagggttctttaccgaattggcttcttctttttcttctccgtcgtcgtcttcttcttcttcttcgtcgtcgtcggtggtgacgttgacgcaggagaatcgttcgagagaggagaagaaggcggaggagacggtggagccgacccaggtggctaccagatccagcttctcctttgccacgatactgttgttagcgtcttcttccattggagaggttcgcaaaaatcgagaaaagggaatttgaaattgaaaccagataaaatgaaagatcgaatctttaagacgtgtagagttttggggattgattcgtaattaatgtttaattgagggttttatttgaaatattagattgacttaatagttacaatgtgataagattgggtttcgcatttaaaaaatcttaaataactacaatgtatataattatataaagattcgaactaaattttctttttctagatactgaaatagataaagttacattatagaattttctgataaaattatggttatgtttattgagaaaaattcaataatacactcttaaaagagatacattaatgtaatcctattggtttagtattcaaaataactttttagtcaaattttttcgtaagttatagttatttaagacttcttgtaaaattttaagaaatttagagaaatttaaaacattaaaaatagggttcaaacagtgtgttacatgcatgtctattttattacatacacatgtaaaatggactgttgtttatttttttgaataactcatatcatcaagtatacccattttgaattttattacaatcaagtaatcagttgctgcctatatattttgtggtaacaaaaatatattgttttaaggtatatcaatctacgacacgagccgataacagttatataccacatgtgtctacgttcttgaaggcactcctctctttcaagaggattcgcggcatgtcaagctttagtaaggttcttcgctttacatcgaattaaatcacatgttccaccgttttggtggcctttatcaatttctttgagtttcattattgcgaacgttactactggcaagatacttaatgtgtttatttatttctttgaactaagataaatatgttttatttagttttctcttaagaggtaaattttgcattatcatattttttttaatgttttaaatctattattcgcattatatatatttgtttaaaacttataaccaaaaattattaacaaaatgaaacaattaataattcaatcagcaacaactttaccatggaagccaaggacgaacatattttttgcatccattactaaaacaaaataatcttatagtatatacatttggtattaataataatatcaaaatctaataaaaaaaaatgtaattgatattagcaatattgccatttacaataatagagtgagagattgaaaaaaaataatgaaattagcaattcatatatacatgaattggcaaatatttcgttttcttttttcttgaatatacaaaataataatgtaaaaaatgaatcaaaaatacttttatcaacattgctacttacaacaaaatacttttatagttcttgtttttttcttttctctattaatttcaataagggctcgtttgaaacgtcgtattaggtcgtattgtattgtattatattgaattatattttatacaatatttttnnnnnnaactatatgtggtattaactttttagacacctaaatatataatattttaatataaattaaagtttagcatagtattatataaaaatataatatataatccaatacaatacgacctaatagaacattccaaacgagccctaaaggtattgccacaccactctactatagttactgtagtagtgtttggtttgataatggtatgggcttttagccttgctttcggttgggtgatcggtgaaaaatcaatttacttatggcacttctaagtggttagcatggttacctattattgtgttcaaatttaggggattctcaaattgttattagccatatggcttctgattcattttctttagattgttctttatattgttggtcgtgttatttccttttattcttgtttgaataatatagttatcattgcccaatattcttttgtgacatctttagctgatagtcattgatatgtttgatttgtcgttagttcactcaagttaaaaatttaatatttttcacacttttttaatactttaaagttgagggcttagtggttctttcattagagatactattgggatttcttttttttattattgtaaacgacttggttggcttattattattttgttaagtccactcgttgaacgatatcatcatgtaataaatattgttcgatttacctattaataaatattttagtttttctttcaaaaaaaacaaagagtgagaaattaaaaatcaaaataaaagtatatgttgaaattaataatgaaaaagcaataataattaattcatagaatcaatccattaatcccttcctaatctaaagttacatctcatctaaaaatcctagccaagtatctaaaactaaaatattcactaaacacattaactctctattaaaaaaaatatttattaattctctgatccaattcttcattcaggtcgaatctacgattttcagctcaccagcagatagcacaaataaaaacaatttcggagctacattattatttacatatcgacctaaatttaattattttttatgtgttttatgattgtttcgcaaaaaatttaattaaacaaaatataataaaaataaataaattctacctataattttacgtttataaatttacaatttagaggaattccaatccatgtgggaatttatttagttggtaaatagttaattaacgtcctatagactatagagtagaaaattatcttacttcaccaaaggcaaatcgtttatagaaaataggtcatacattttccttcttttttttttttttttttttgaaagaaaacgaaaatattctattaaatttaaaaaacac

SEQ ID NO: 79567 - DNA, 1555 bp, Cannabis sativa
ggtctagaagaatctcatattcactataccatttgttatagttggaagatcactgcttctgctagtcaatataatgaatcaatcttttaaagagatagttgaacatatatatacgttgtctactctcacatgataagtatgatagaaactaagataatgtttcataaaagtatgcaattaatccatattaatagcatgtttatctattaaaatttatacttaatttaaatcgaggatatccttaaaaattaatgataattctgcaacatcagttcacttaattgatattttgcctttgaatatgtaattgtatgaacacttctcaatattaatgttcaatgtgagaaccattttagagcaatatgaaggtttggtgtgcaataaataaacatcttttcctaatttgattaatgaatacttagttaattagtatacttgcaatgattattttcaagcacatagcaaaccatatttatagaagcagagcttaattgatcagtacaaagatagaaaaagcttcaactagagcaccaatttttttaggtaaattaagtcattacaactaaaaaaagaaaaggagagcgtacattattaattaacaaagcatttgggttttattttctcattttccagggacaaagtttgtggcataggcccaagcattgttggttactggatcagcaagatgatcaaagaggttctcaactggacctttgccagtaacaatggcctgaacaaagaacccaaacattgaaaacatagccaaccttccattcttgagttccttaaccttcaactcagcaaaagcatctgggtcatcagcaaggcccaatgggtcaaaagctccaccagggtagattgggtctaagccctcaccaagtgggcctccaccaactctgtaaccctcaacaaagcccattagaacaacttgggtagcccaaatggctaagatgctctgagcatggacaaggttggggttgccaaggtaatcgagcccaccttctgagaagatctgtgaaccggccttgaaccacactgcctcaccaaacttgacaccgttcttggatagaatctctgggaaaacacagccaagtgccccaagcatagcccatctactgtggatgacctcaagttcacggtttctagcgaatgtttctgggtcagctgataatccagctgtgtcccatccatagtcacctggaaattcaccattcaggtatgatggaatttgttctgagaatgggcccaagtactttggacgatctgggccatacctgttcaaagtgtatgatgtagtaattagagttgaaaaaagatgtaatgataattctatgtgaaatgtgcaatggaataagtcctaaaattggattatcttgcaggcctggcccatggaataactgggcataggcccaaacctccttacttgggcccaaaggttaactaagactttattttgttgataccctctggtttagatttttgacattatatactaatgatgaaattacaaacatttatttggaaaaatgtcccatttaatttagacaccataaag

SEQ ID NO: 79568 - DNA, 3925 bp, Cannabis sativa
ttgtgaattggggtaggaagctgacaacagaatcaatcaagtagtaatgagtaatgagaaagagtaaagacgaggaaagaaacttcttttggtacaaataaataaagataaaaaattgacttacatggctgagagagtaggaatgagatggtatggggttgagatgagaagcccatgaaggaggggaatatggcttcttggtgaggaaatccaaacccatttgtgaaactaagtgtgacattgaatattgagatggtgaagaagttggctcgagtgattgacaagagaggaatctgcagaaaatgcagtagagtggatgtgctgcttgtgcttctaaggaaaggaattcacaaatacatttatcaagtattctcactctttttctcctagttttatgtggtccctttaatgaacatatgacctagaatcaaaattacacaaataattattatacacccaccctaagtgtcatagtcagcttgtagggctaattttgtgtggaaaattaaagaagagaaaagcacgtatcaattttcaatttattgagtgaccaagagaaatagaactcaaacacccaacaaagaacaatggaagaaaaatcaaaaaatttagaccatttctcgatttgtgtcatccttgtgcaggggtcatgttatcgttccaattttattggatgtccccgaagagactccaccaaagaacaatgagtacttcatgagtacaattcgaagtgctcaacaatttctatctgtaaggttatttgccctctgtttgagtaagttggctctctaccatttgtgttttctttttcgattttaaagctcgacatcatgatcttttggtgattctatcgttgttatgtggttttaagctcaacctagatggttccacacctctcctatcttggaggaagtcatgggtcaatgcctccctccccaaaccccattaggatagaaatatataaactatgtaatgataaattataataattgaaaaagaaaaattatggttgagattgttattgtaaagggaagaaaacaaagagcgtgttgattatattcaaatttaagaacaatcaaaatcttcattcattacgagtaaagacattattgctaatacactaaactctataatatgttctacattataatcaatagcatagagtcatgtaagtctctacttcaagtttctattgggcccaaggctggtcggccctaagtattggtaggctaagcccgcgcctaagacccacttattttaggagcctaaataaaaaaaaatacaattaaaaaatatacatattttttttaataatttttaaaaataccaaatatctttatagtaaggaccaaaaaatttttttgactatgatccatttcaactcagggccaaccctaattaggccttcccccacgactaacgtgttttgtcaagctaccaaaaagatctcttcaactatttaatcccatagttacacagttttagaatgaggaaattagactctatatcctttttatattgtcctcttttatactctctatgtgactcccttatgtcaacgtattttaggtacaatacgtaaatttagttaattgataaataaaagaggtattttccctttcagaatcatcacactttaactttgtctgagaatataggattgcatatagaaactatctatttttattatgtaagagtagcaaagttgatagtgattttgcttaaaatggattttgttgtgtcattttctcactaaattactcctaatttccaaattctattgggtaaaaaaacaatcaaacaagaattggtctgaaaaactcactgtcatttcgaagtgatctctcagtagccgtccatcaactccttcctacagatatctgcacaattcctaaccctatatataatttgcttacaaaaaagcttataaatgcatcaaatttcaaaattttctcggttgccaaacagaacatagtagtgtaagagaatttcaagagaaaaaccacaaaaacaaatgaaattacatacctaagagctggaaagaggaaagggttattgaggaacttagatgaaggaagaatgaagataatggtaatgagggcctcctcctcctcctcctccttcttctcccccgctgccaccaccggcacgacgatgacgtaagtgagaatcatccattgaagcgccattgccgtcggtcggagtcggagttggatccaaattcgaatgatttctctcactttgagggaatataccaattttggtttttttttagctattacaattgttgccgatgaattttaatatttatcaaattatcttttttctaaattttttaaagtcgttaaaaaaaaatttcgaactattaaaattattgtatttaatgacttttattcaattttactaacgaaagtctgatgcaaattaaagtttgagagcacgatttgatatattttaaagtttatgtaacatattttggtagatatcaaaattcgagagcataatttagtagaattggacacatttttttaaatctaataatctcgatagcttgagggatttttaacggcctaaaaagtttgtaacatgatttgatacatattaaaatttagatagaattttttttttaattagtctttattattattattaaatctaagtaagaatttgtgtttcccgaacatgtcattgagattgttggattcaataatttttctttaaattctgcttctactagtatcgtttgtggcctaattatacttcgtgtatcggaaatatcagaaatattattatggctaatgtcatttgattaatgaaatatttctactcctcgactcttccttaaaattttgttttcttggagagattgtgttttttagaggctatttatcattttataattaattataaaattaatattatgagaaatctcaacaggttccatttttccaatttgcttgaaattcatctttcaacattaatgaactattagcacatgttgtgtgatataatggtaaaaattgtctttatcattctttatttggattgagagttcgaaatctaccttcttggcttagccctttgaaggctagctactgtaagtggtgtcatcagtgtgatgagactgatgacccaatataaatagactgaggtatataatctctataagtgacacgtgatccccgagattgtcaaaatgaccgaaagagtggggaaagagtggggaagagatctccaccacataatcccctcttagattatcaaaaaaataacattaatgaactataataatagtaataataataagaaaacatagaacgcattttatttagaatgcataagtgtggaaacatatgtgcaaacattacgctctattagttaaaaatatggtacacaaccattttctgcagaaattttcttagaacattttcccgataccatcctctcgcggaacagattcagggacgtccattcgacgccaatttcccaccaatgaatccatctgctcgaccttatcgtacaagccgagcaacccgccggtgtgtacgaagagaatcttcctcccttcccattttctcggattcgagttcatgtctttcaacaatgcataaacagctttcccactagaaaataagaaaataatgttccatttatcttctcatcgcggaaaggaaaaaaagaaggaaaagaaaaaggattcgtacaaacctataaacggggtcaagaacaacaccggttgttgcagcaatgtccttaacaaatttaagctcttcaggagtactaatcgcgtatcccatacctttggcctgtccgaaaacatgatcgaaaggctaaaaccgagactctaaaacaatttcgatataaattttagttcttagttcgaaagagacacttacatctcgtatgttaacaatatcacgcgagt

SEQ ID NO: 79569 - DNA, 6877 bp, Cannabis sativa
ttattttgtgttatttattttcatgcattatgttattttgtttatatttgagacatctacatcttgtcactttttcagttactttttccaacgacggtgactttttcgacgatagtgactttttcgataactttccaacgacactaacttttttggcgatttttccagcacggtgacttttctggtaaaatttattattatttacaaatatggaattttattttttttttacaaaaatatagcataaaaaaacttatataaattaaaaaaaaaacacaaaaaaaccccataaacccttgacattaattatttatgccatacaaaattaatctcttatacttttccttattgtaatttctactatgggaaatccatgtgtatgtgtagattaaagaaaattcataaaacaaaaagaaaatcagaacaccagcctgcgtattgcggcgaggacaatggacaatcgacaatggacgctgctggtctgccaccgcaccgcaccgcagtcaacaccaccggatgctgaaattaccctcaaaggtcacttcaattcaagatttacttccatttcttaattcctctttcactcagatttattgacatcgatgcattgcaagagattttgttggatatctttaattgaactctattgattgttgttggtcaattcttagtggttaatgttgaacggatcataaatacagagaaagatttagactttgaagaatttgatacgaaatgatgtcgaaattgcagaaagccatggtcttttcccttccaaaacctaatccatttgctttgcaacgttaccttcttctacttagctcgcaagggacagagacaactgttgagattgaaccccgcaaacaaatacaacagcaatctgattacgagacgacccagcaggacataactcaggtgagaaagattctccataaaaggttattctcttcaaccgaagaagtagctcaagatcttaataggtgtggtttaactttatcagatagtatagtacaacacttcttaatgcgattcagcaatgaatggatcttggcttttgattttttcaactgggcacaaactcaaactgattataagcattccccagaatcatataatttaatggttgatatattggggaaagctaagaagttcgagcttttgtgggatttgattgatgaaatgaagagtttgggggatggttacatttcgtttctcacaatgacaaaggtcattaggaggcttgtaagagctaacatgtttaaggaagccatggatgtttttaggggaattgagagatttgggataagcaaagacacttcaatgttgaacattcttatggattcatttgttaatagtgatagtgttgagcatgcccaacaagttttattggagtttaaggattcattacctgtgaatacacaaactttcaacattttaatacaggggtggtgtaaagctggtaaggttggtattgctaggaagattatggaggaaatggagagacatgggtgtcaacccaatgctctttcttacacttgtttagctagattttactgtgacaaaaaggattttcgaaaacttaatggtattctgaatgaaatgaagatcaaagattgtaccccaactgttgctacatacaccactttgatgtgtcttttagggaagtcgaaacagattaatgaagctttggagatttacaagagaatgaacgagagtgattgtgctcccgaaacttcttctttcaactctttgattttcatccttggcaaagctggaaggttgaaagatgcagaagaggtgtttaatgatatgccaaagaaaggagctatgccagatgaggttaccttcaatactttgattttttgttattgtgatcatttgcaagaggagaaagctctgaagttgcttcagaaaatggaggacataggtttcaaaccagacctcaagacttacgcggcgttgttaaagatgagctgcagtaagaagaggatgaaattgatttactttctgctaaaccatatgtataacaacaacataagtattgatgtttcaatatattctgttctgattagcgggctttgcaagagcgaaagagttgaacatgcttgcgctttctttaaggaaatgatttcaaaggaatttcttcctcaggacggcttgtatgataggttgagagaagcacttgaggccaagaatatggttgaagaaaaagaaaagattgagaagttgatgttgatggcaaagaagagaagaacagtttcttaattagtctaattgttcaagaaaatagtttttgtttttttttttagtgtagagctctaatactgatctgtaatatttattgcttttagtttttccattttagtggatgaagaaatggagaatggcatttttggtactccttgtattgttcagctgtaatgtcatgggacttatagtgtaagtgccataaaatagtatacaacactaatgaataataatagtacaaccagcttttaaataagactgctgggctaacaaattagctattttattcgtagatcgcttaacaaaatgaaaagaaatatttaataattcaaataacaataatttagactcatgaattaaaatatcaaaatcatacggactttactctctattgcatgcactacattgatacaattagtttctgtcataacattgttccatccatgggatttcatccagctcagaggttcctttattcatactgcctctgcaatctctggattgatagtacctggtttggaagcatgaaaagcttcaatgaaagtacttccatgatctctagcaacaaagtcatacccgaagctatttgattgattgaagagagctccatctacgttaactttgatcatagcataacttggtttagtccactgctcctctttctcacaagcaacaagatttttatgagaaagattacaagaagaattttgagcagaatcctttgatccatagtaagttttgcaaatgagatcgccttatcaatcacaggtctaaaacttcgccaaaaaagatcatttcgacatctcaaagacttcaacaaagcataacagctgcttcttttttatcatgcttccctctttatttgtttaaaaaaaaaaatcaaaacaagtgagtttaaccattgtagtactgaaagtgaaggaacccatcatagactttaaactaataaaaagatgtgataatgggcagttcttaaaagttctattcaagtcaacacatttcagcaaacaatcttcttgacagttctaccagtgtaaggtcaagttttgtagatttgcaaaaaaaactcatcgaaatagaaaaacaatcatcataaacaaatcccattcttaagcagagtaggcatgaatgttcattagcctaaatacaagcaattaacaaagataacaaacaagacagtcatttatacttattaaaactcataaatgttccattctattagatgaaatgtctttaaagaaggagaaatccacagcaaagaatccttcaactctaattccctttcttgattgcattgaataaaaactcgaatattctcccaattaaccaaaggagaacgacatactctcttcatgtattctggaaagataagaaccttcatgtacagaattaagaaaatgtattaagatattaaatatatggtaaatagcctaacaaattaataatataaacttgtaataaacaaaacatacctcaggtgaatcaacatgcaggcttatcatgttccatggacaattgagatttgaaaaaaaattcatcaaactaagaaaccaattttcgtcatagttctctggctcgtcaagaattatgaatgttccattcaacaaattggatgactccaccattgatatactaatattgatatagccattgtgccaaaatgattctaattttggagctgattcaattacaacaataatttcatcttgactcaaccaaatcaacttgaaagtttttaagtgttgattcgagattttgatgtgctttaaccccaccttatgactatattccaaagctaaattctcaaggagaggaaggtttgaaataacatattctactaatgacgactcgctcattcgccaatcaaaattcaaagtgagatttgtgattgccttgcatactgagaaatttactttgtcaaagtaaacatcttctagtaccaaagattcaagatttaatgcttcaatttgccccaccataaccttaggttggtgaatttccaagaacttgaggcttaaactacatatgttaagctcgcgattagtacttaaagcacaacaatgtaactgcaaattctcaagggaaggagagcccaacaacagtttatctaccacatcattatcaggaagatgaacactttccaatgacaatgatttcaaagatggaaaactaaatgagtaatgagaatccaacctcaccttactcaacttcaacatagtcaaatatgctgcattgactaatactgttttaggtaagcagtaccaaccattagtgaaatttatacttatctccttaaatttattctcaactgcgaaagctaaccatttatctatgcgatcatcttgactagtatcataccaatacatcttaagcttaaaactagtgatgagtgaatagctcattaaagacattcctcttttgtgatgtttcaaaaaattgtctacaaaattgcagaactttttagtgtctgataatgtaagatcagagaaagagagagtgaggactgaataccagatgagtttccaacgctttgaaaggagcattgttggaaccaaatccttactagtgggaagaaaagagaggatgtgtgtaatgattgcatcaggtagtttcgaaatcctgtcctcctcttgagtcaatttaactcttttttcagccatgaaagttggtaattatggattgaagactgtaacagcaaagagaagaacacaagaaaaaaaaaacagggaagtgaaagtgatcatctattaattaaaaatgtagagagtagagtggttgattgaagcttacttgttggtatgagtttagattgaatttgaagaagaatccttcaatctctcaacaactttaacaagtatttaaaatggaagtcctaagtggagggatggagaatccatttgtttaatcctccaaaatctctactttcattgtttttctttagttacaattattccctactaaaatattattagaaaacaattgtaaagactaaagtataattttttaagtaaataattatatcacttgggaacatggtgttaagtccttgacagtgagcttaatcttttcaagcacctcttcactcagtgctttggctatttggatggtaaggaccaaagggtcgcctagggggtatcttagcgtcatcttccataaaagtgtgtctcactttcatactttggtcccctttttcgtctctaagagcatctccaaggatacactaaatttagtgttatactatcattaaatttagtatcaaaaagtattttcactccaactacaatattaaaaattacactaaaaaatattctttattattatattaattttttaataaaataaaaaaataatatcatattaattaataaaaattaccacaatagttatatttaaaagagtcacgcaatagaaagtttaaattttattttcggcatattaaatttttcaaaattttacaacatgtcctaaataactaatgtacacaaccataaaaaaaaaagactaaataaatatctcgaatgcaccacttttaaagaagtgcactttttggcgtattagatttttttaaaatttttaaaattttgaaaaatatcttaaataactataatatacaatactatataaaaaaaatagactaaaaaaatcgatcgggtgccaaaataaataagagtagattcgtacattacttttaaaaatgtgcattgcaaaattttctaaaaaataattcttaattttataaatataataatataaatatataaatattaattaaattatataaaaaatatatatatatgtcgtgactacagtgcacaacatatatgtcatgcactagacaaaactttaaaatgctggcagaaatactgtctccttggaagaaaatcacagcatatataaagttttgtcgtgtcttggacatgctcttaaggtccttgcatatctttctcgagaaccttatattaagaaaatttaattatttaaccattatttaattattatttttttatcaagaaagaatgaatcttcattaatcacaaataaaaatacaatcagtatttttattattccatatatagtaagtgactactactatgacagccgaaatagcttcaatctttgatctcacgtttcaaccctggatcaccaacggagaaaaagagcaattaaaaaagagatgctcgtgattcttctcatcaacaccacaaaccggacaaagtaagctctccaaatgtatgccaatctcgttcaagtggtctctagtaagcaacttagtattaactacttgcgagaaaataaatttatgtttaggaatactcatcttatactaaacataatgatgatacttaactcgtttaagaggaaaagaatttatagcctgaatccaaacattaattcataatactcaaagtttcaaaaaaaaaaaacaaaaaaattattttaaataaaaaattttgacctttcttaatgtttgggaatagtcatcttattctaaacataatgatgatacttaactcgtttaagaggaaaattatttatagcgtgtcgacaacatgtcgataatggtcatccctgacctttcttagcaggatatcgacatagcatcgatatactatcgataaactgtcgataa

SEQ ID NO: 79570 - DNA, 3175 bp, Cannabis sativa
  modified_base (80)..(95): a, c, t, g, unknown or other
ggtcctatttgtactattttagaatatacagggttcattttgtcatttaacaaaatacagggtccaattagtaacttttnnnnnnnnnnnnnnnnaaaatagtatttacccatatatatttaacattgcaaataattcgcatagcatacttttattagtggtaaagttctgaagtaaaataccaatttgttattcaaaaattggagtaatgaaaatcaaagtattagttttgatgtagatatttttagtttagtattcaaattaaaaatgttgttggaaatattatagatcacatcgagtaatttaaaatgatggatattggtggcaatcacattaggatgaagatcaccctataaagtgaagtatacatgcaaagaacgtcaaatagcaaatattttcataaggcagcaagtaatagaaggcgtaataaccatatttcaaaacttaaaaatgcgattaggagaacgggttagctgatgttgttgtgcagtattttacgaatttattctcaactgctaatacggattgtagggaggtcatagattgtattgatcatgtggttcctgagttggctaacatggaatccacaaagcctgtttctgaggaggaggtgaggactgccatgtttcaaatgcatcccgataagagcctgtggccagatggtatgaccccgaccttctatcagaggtgttggaatattgtgaaaaaagatgtggtgaattttgttcagagattctttgttaccggtgtctttgatgaatcttgtagtgatgcaaatgtggttttaattcctaagaagaaggggcttgagacaatgaaagacttgcgtccaatagctctttgtaatgtgttatacaagattgtcacaaaggttatgaccaatcgaatgaaattgtttatggactctattgttgcggactctcaaagtgcttttatccggagacgacttatttctgataacattatggtctcctttgaggtactccacaatctcaaacgaaagcgtcaaggaaaggtcggttgtatggcataactgaacatgagtaagacgaatgatcgtattgagtggaattttttggaagcagttcttaggaaacggggctttgttgaagcctgggtgcgacttattatgcaatgtgtttcaactgctaattacaaggttattcatggtttccacgagatgggacctattgttccaactaggggcatcagacaaggggatcctccgtctccctatttgtttatactctgtgctaaggcctatctgctttgttgaggaagtacgaacgatatgggtggatccatggttgcaaggtggctaatggtgcaccacaggtttctcatatgctttttgctgatgacagctacttatattgtcaagctttagaagatgaggctcagcgaattcaagagttgttgacgaaatttgaaatggcttcaggatgtgaatttatcaaagtcatccattttttttagtactaatacctctaccacggtcagaaatgcaattagccagcgacttcagatgaacatcgccaccgaagacaacttttatctaggtctcccaaataccatgtctcgtaaaaaaactgttgtactcggttatcttaaagaaagagtctgaaaaagccttcaaagttgggaaggcaagttcctttcaagggctggcaaggaggttttggtgaagactgtgcctcaagcgcttccaagttatgctatgagcgtctttttgctccctaaggaaattagtcgaagcattgaaagcatgatggcgagttattggtggcagtcaaacaaggatagtggaaaggggatacattggttgtcatgggatacactttgcaaacataagaagggggtggcatgggctttcggaatttgcgtgattttaacatggctatgttgggtaaacaagggtggaggctcctcacaagacctaatgccttggtaagtcgagtttttaaggctaggtactttccccagggtgattttctttcaacttcgcttggctcgaatccgagctttgtttggaggagtatattggaatctcaagaattagtgcagaaaggagtttgttggtgtattgggtcgggtattagcattccaatcctaagctctccttggctgccagatgaagttaatccctatgttatttcaaaccacccagccctttcgaatgccacggtaagcaacttactcacacttgatggttctagtttggatgtggaggtaattgacgacctctttgttgacaaagacaagcattttatcatgtccattccgctgcaagtgaataatatggaagatcattatgtttggtctaaggagacttcgagcttttacactgtgaagagtgcatataatttactccaaaagcttaaagggggatggtatgataataatgatactaatatctggggtaaactttggaatttaaagttgcctcccaagattaaaaatttgatgtggcgtgcggcagtgggttgccttctgactatgatttaactccggagcaagcatgtggaggtaagccccctctgtcccctttgtcgtgttgataatgagactataacatagtgtttagtcacttgcaatgtgattaaaacttgctggaatagagtggggattggcactataaatgcatcaggttcctccttctttgactggtgcaactcgattttcagcaagataaatgcagaaaaaaatctcttgtggctgttgtgtgttgtccatttggagtgcttgcaatgaagttgtttggaaaggaaagtcgacccgtgttgatgacattgttgggtttgctaaacactaccttaatcaatagaataatgcttaaaattctgtccttggctcatcatattcggatgatcagattcatgatgttgcagagcattggtcccctccacttgctaatagaattaaagttaatgtagacgcaactttgtttgatgatggtcgatgatttggtttgggcatggtggcaagagatgataaaggctggttggttgagggccgaaccatctttgtatatcgaaaacggtggagccaatcttggctgaagctatttctgtcaaggaagctctcacatggataaagagaaagcagtggcatcatgtgactgtggagagtgattgtcttggggttgtgcaagcattacgtagttctatttgtatga

SEQ ID NO: 79571 - DNA, 3107 bp, Cannabis sativa
  modified_base (507)..(514): a, c, t, g, unknown or other
caataacaccaccacctcaaatagggtacaaattacaaaagctcacaaaacataagatggttaattgattaattagtgcataattaattaggcaaaaaaaatggttaaggtaatgaaactaattaattaatagccataaaaaacaaacaaaaagcaagatatacttgttttttccaaaaaaataaataataagtggcttatttatgattttttattttcaaaacaaaattaatttttaaaaagtgtactagcattaaattttgggtctaattaagaactatacctacaattggtactatatgcatatttgtggttattataaatgtaggtcaccctatttaggtacggagaaatcttaattcttacattatcatatatacatttttttttttttaatttgtcaaattaaatctaatacaggtaaccaaaaatcacccatttttgttacaaattaacaaccatacacactatatacacaaaaatctttttcttttttctttttttttnnnnnnnnaaaaataaaataaaataaaacttcctttgtaataatcgaaattcagcaaaaagaaattgtcacttaaacataaaaatgtaattaccctccattaattatcacaaaccaatcaaaatgtaattttaatcatatagcactcttttttcttaaatatattttgagtaattaatggaagacactatattgtaattaattttagctcaagattcaaagtttgtgtaatgacctcacttaaaattacaagattttttcatttataattttataattaattttttatttatttataaaaacagcataatttcaaaatagaaatatcttttataaaataaaataaaaaatctaaaaaaacataaaaattaaaaaatcttgtatacataatattttccttataattattaattaataattaaatttaattatactagtaattttgtatgaaatatatgagtgcctaacattattgtgcaaaaataataattaaaaaaaaagattacaagatatatgcatgttttgtaaatgttagctaataataataaagtgttaattttttcatttatacaagtattttttattttatttatagtgtactaatataatgtgaatgtagagtgctgtacagtataatcacaactcacacaacaatttaaatcgcaatctaacttaaattgtaattcagattgcaacttcatttgcaatccaaattacaacccaactcaatttgcaaatcatatcacaattcacgcagcaaccctaattaaaaaaaatcagctctatcgtctctggctttgatctccaaatttggtgcgcatgtgagatccaccatgggaactcaaagctccattgctggtacgtcttcttcattgctcaagcaatttttccctaccccgatctcaccgtcaacttgattttgacaaaggaacatcctctcacgattgctccgataagttctataaatttgtgttgcttcttgctctcgcttcgaggacagtggaagagaaatgggaaagataaaataatgtaaatggcttttgatgaaggagaatattaaaataagaaaaaaataataattaaaaggaggtaaaatatatatatatatatatatatgtttaaatgtagaaataaaaaaatgagaatataaaaataaaaacaaaacaaacatataaatagataaaattatataaaattccgtattcaagtaattctccgaataataataataatatagtataaccatattattatcatgtataaattaatatttaagaattgtatgttgaaataattaatcatttcaaccggaaaaaatgattgaaagaactaaattatttgtaaaaaaatataataataatattttgtaccaagtgctttatagaaattactaattgaaatttatattctgttaaataaaaatttagacttaaaatggtacaaaatagagtctcatcttaatttttatcaaattaaaatttaataacaacctaaccttaagtgtttttaccatattgattacatttttttcatcttctgacttcaagttgcttatatatattaaaaaaataaattactaaaaattaaatttagagtctattttgtactattttaaaaaatataatatttaaattatcatttaacaaaataattaaaatctaatatatcggtaacttttacaaaacacattatcaaaaatagtattaatcaaaaatactttaattttgtcttttttttttttaattcttccttcgtacaatcatatttataaaaaataataaactaaaattcctaaaatcaatttatttattgatgtttcattatcttcttatctctagtttctacacttttcttttttttaaggaaaaaagaaagaaagaaatggtgttactaatcgtgggaatacaaagaacatgagtattcatgtgattaggtcagcctccacgtaaacataccaaaaattgtctctcaaagccatttagacaaccacaagtttcaattcaagaagttttcattcaacttagcattaatttgtatacttgatgagaaagagaaaataaataaataaaatttagttagatgggaaaacttggtgtctttttgtgtctttgtataggtcaccatctaataaaagttatcatttttatttgttttaatctattattcattcttatcattaattgcaacatatatagttatatttgtagttataagttatataggtgaaatgttaaaaagtataagtggtgcttaatactgttttacgtgtcaatatcgctattggtgaaattaaatatcgcgtaataatgtttagcgagtattgcttactgttggataaacttccacttacagtactatcttctcattaagctcgatttaagaaattacaagataaatacagtggccttaggccttattacaaacttaaacagtcctaacagaattcagttagaatggactgtgacaggtcagcgatccacacctaacatccttctctaactaactaaagacaaaagctatatatacatgcctcttcttcaagctcgggtggttgagaagactctccaagaactagttacaggtttgagagagagagagagag

SEQ ID NO: 79572 - DNA, 2711 bp, Cannabis sativa
cacttgataaatagccatagttctgcgtagtgcaacacaattaaggttaatagaattttggaaaattatacaatgtacaatttaaaaagggtgtacggatgtatttctatttattttttgtattcgaaataatttttttggtcaattttttttgttattattatgtatattataattatttaagatattttacaaaattttgaaaaatcagaaaaatataacatgccgaaaataagatccaaacactgtgttgcacgtgtgatgactattttattttatatgcgtgtgaaatagaaatagattgtttgaacacttttttctatattgtaaattattttaattttttcaaaaatttataaaatatcttaaataattataacgtacacgagtatgaaaaaaatatattaaaaaattattttagatgctaaaataggcaaaaggtgcatcaatacattttttttaaggggtgcatcgtataaacatcctaaaacttattttgcattataaaagtaatttttgaagaaaaaaaaattaaaaagaaattgttaaaaaacattattgaatgttggtacctaacaccattctgctattagtataattaagtatcgggtctcatataacttaagaaaatagaaaaaatattgataactaatcataaggcgccacttataaaaagtattgaacactactagtacccaataacaatacttgttaaaaaatgagtcagttcactatccaacgcccaaccaccattactatttatatattgtgaggaatggaggatgggaagtaatcacgtgcggtgatcatcatagttgaaacattaataatccaatgatgaaagtttggtaaaggaacaaagtcatcttcattcttcaccacacaaatcaaacatacataataaatacatttaatgttggtaactatagccaagtatttccccacccacctacaaaaaatatgtaattatccatgttaattaacttataccaaaaatgatataacatatttaagtgatgtcgggtatcattagtgtggtatttttcactataaaaaatcttacttttagtcctaactaaaagtttattaaaaaaaaattatgactaaataacaaagtttctgatattagcactaaaagatccgtgactaaaaatattaattaacaaaatacaatttactctgattaaatatgtttttagtcacaatattaattgtaactaaaattaaattaatgacaatttgtatctaaatattatgttttacttataaataactttttgctatagctaaaagtcaaatttaatcacaaaaaatttatatttttgactaaaatattattactaaaaatagttctttttagtgcttgaaataaaaatgtccataaatattgctaacccccattcctagctaccaagaggattactataatcttagtactacacttattatataaatatacatatatattgtgctatatatatctacaaaactacattattttgatacaatataagttagtagatacaacaatggttgcagcaatagagtctcatgtgggtgtagttgcattccccttcggctcacacgctgcaccgctcctcgctatcatccgtcacttggctgcagcctcggcccctaacactattttctcttttttcaacacttctcaatccaatcacactattttcactaccacaaacactaccactaatggtagtggcggtgattgtggtagcgaattgaatatcaagccatatgaggtatggcatggtgtccctgagggacacatcttcactagagggcatcaggagcccattgagctcttcatgaaagctgcgcctcagagcttgaggcgcagcattgataaggccgtggccgagattgggaaggaggtgacttgtttggtcactgatgctttcttttggtttggtggtgatttggctcatgagatgggtgtgtcttgggtgccattttggactgctgggccttgtgcactctctgctcatctttacactgatcttattaggcatcaaggtttgtatctatatacatatatatatataatacatgtgctatttgatttatactttgttactcttctattttttcttttgttatgtacttagatatattatattgttgtattattattagtgtgatttaatattaaattttacatattttagaattattttttcttacattttaattttatttacttctttttaattttatttttttttttttggcaaaatttctttaagtttactcttgcaaatttgagggatcagttaaatattatcgttaagtaccaactggatgactactatattgatttcaagatttactatcacatatacacatgtgtacacaatagtcatccagttggtatttaacagtaatatttatttggcatctcaaatttacaaagaaaagtatacttaagcgggtttttttacaaaaacaaaaataaaggagttaagtgtccaaaattaaacgtaagaaaatttcaccgccaattactcttttaattaagagtaatattaaacacacattcaaattactgatgtgtatttaatttttgccttatatttttttagtgatatcctattaattttaattagttggttaaaattgtacattattgtgtgtaagaaaattgtacataatttgagtatgtatgaatcattaaccatattggtaaggtgtta

SEQ ID NO: 79573 - DNA, 2547 bp, Cannabis sativa
tgtaagagacaaagagcttaagattgagagtgtaagtagtcaagttgagaatcatggtgttgagagttataatttggagttttaatcttttgtttggaactctaagttgatcacaacatatcatggtgtttgtctcatccaatgtattcttacattgagatttgatacacaacaatgaacctagtattacaattaaccaacatatagtaaaatctctaaatacatttgggaccgaataaactatattttaattgagaggttattatactacatagaagcacactacaaaaaaaaaaaaatatatcaaaaaacaccaaaatatatctaatataacaacaacaataataaataatttttaatactatatcatcataaaaaattattatgagtaaatataatatttatatatttattgcaatttaaaataaaattatttattctacataaataaatttattaactatatatatatatttttaaaaaaagatataattatttttatattttttaatgtgggatttagaaaatgtataactaattataatttagaggttatttttatttataacttactcaaattaaaacgtcatttttttttattttaaattagaggttattattgaatagagtatttttaaataaagatttaactatatttttttatgataagattttaataattaaataattaatgttatatgattgaaatctataataataataataataaaaataaataaacttcttctcctagaatcaaagaatcaagattggtataagataaagcacaaaaagaaaaataataaagatagttggaattaatttatttaattacttctttgcaagtttggcatttgtaccctaaccaacaaacactttggactttttccatgtacaaatcatttcaatgcactttattgaaacttatgcataccaaaactaaagaggaatcacatatagtaacaatccaacaaaataacaagaaattccactcattctttctcatcacaaaaataccctaaatcaaagaaattataaaagaaataatccagaatgagaaaattattattaatattaagatcacaagttttataaacaaataaatatgggcacaaaaggggtaaaattagcaactcaaaatccaaattacaaattattgactgcataatgtacaaaagtacgtatgctcacaaatttattaggaataatcaattccttttttgaaaaataaactttgaaaaaaaacaaaaaaaaccaatcatgttatgaaaaataaataaatgtaacacgtgtctgatacggcggtgtgatttgaaggtctatcgagtaaggatatgtgacaaattatacgctcaaacattaaagtaacgtgacaattttttaatcagtcacatttttttaaaatactgtcacatcactgtatgtaatatttgagtgcacataagtacatatcacatttctcaatctcccataggatagatggtgtaataagtttggataaaagacataccaagagccaaaaatgcagccagaaatgtgacaatagtccaaggagtactaaaatgatcattcaaaacttgagcaatccaagtcaagcatttgttgtgatagtgcttctctatttcatttatcacattctcatacacctcatggtttggaacaaggaatttgcccatctcattaaaaagttttgcaacttctttgtcacaaccaagaaggttgtgaaggatatgagaagatctcaactctttcacgtcgtttggataatcaatgagcgagtctaggaaacttatgtatgatgacacttcgtacttggtcttggtattgtctggacacatttcgtaggcgattaggtttaagaatttaggagccatcgagtcatcaactgtgatcggtggcaattctaggtcagctgtgaagagacccgaagagaatcttatgtctttcaaagagctactcttgctcggatttaagtttattcctgcggccttaagatccatcacactacgaaaagtctgttgtttttgctcgtcttcgtttttctctgtaacacacaacaataattgtaaatttttagaacaaatgtttaaaaaatatataaattaaatataggaaggtatatagagtaagaaatatagggcttcatctcaaacttaatgagtgattagtgaagtaataacttatgatattagatattgaatttttattttttttattatactgtgagactctttaatgtttatttggtacaccgtattaaatcatattgtattaattcatattattagtatgtaaactttgatttatatcaaaatcttatctaatttatatgcacatactaatactaaacacaatactatataaaaaatgatatttgtaatgtactatataatataatatgtaatatggtataccaaactaattctaactaaaaaaatactgttttttttggtaaatcaaatgagtatattatcacagaaacatcaatacaacctaaccacaatcaaaatacctacattaatcatttattatattatatactataaa

SEQ ID NO: 79574 - DNA, 2030 bp, Cannabis sativa
ttttttcaggtcagccaattttaggactctttgcctgttgatagatttgttgttatgtagtgtaatacatttattttattatgcatgtatcttattttgtattttattggggggtctactgtattaatgctgtactcaaaagtcttcaatatatcaatattgttccaggtttaagacttcactgtcagataattttgttgatgctcctcacttggtaattttgaaggaggcattgttgagagcaatcaacgacatagatgcaatttttaccaaggcatgttatatttgttgcagaatcgttttgcatagtatgtcatgctttttctgttgtattgacttcaatccaatcgaatcatgaaggaagcatctagaaagaatctggagtctggttcaacagccacagtcattctattagcagatggtcaacttttagttgctaatattggagactcgaaagcctttctgtgctctgaaaaatttcagtcacctgcagaagctaaaggtcatactttggctaaagatcagttcattcttttttcctgaacaaatgttgcttatactttactatgtcatgatgcatttcaataagagtaacttatcctggtatagttttttcttgcttgttttgaaaaatgatagtgttgtggagattattcattttttttttggtgcttttgaactgcagccacttatttaaagttatataggcaagaaagacgtaatggtgctatttcacatgtaagaaatggtgtaaactctaggtccccttcctccagtggatcattgcatttttctgtgaaagaattaacaagagatcatcatcccaacagagatgatgaaagatttcgggttgaaaatgctggtggctatgttcttgaatggggtggtgtgcctcgagtcaatggtcagctggctatttctcgggcaattggtgatgtttccttcaagaggtgaggctcaaagttgtggactaatatctcttaccatttccatccttctccttatgttcccaatgtcatgtttcataacagtgtttgctgtcaaaggaaagaatggtcaattttgtacatcttgcatttatcatccatccattttatttaatttatgacagaatactcattcagttttatgctaatctcacatcagctatggtgttatatccgcaccagaatggacagattggcaaccactgactacaaatgatagctatctggtcgctgcatctgatggaatttttgagaaattaagcttacaagacgtttgtgacttgttatgggaagtacgaagtcatggcccccgtagatcagagctatcttcttcatgttcctactcattagctgactgcatagtaaacaccgcatttgaaaagggcagtatggataatgtggcagctgttgttgttccattagaaaacaaagaaggagagaaaggttcccctgcatcagggttacagaattccatgtatgatttctcaggtgtgtccctgcttttacatctttctgacttttgtttgctgttcaaagcaatttttgatgagtcatatttttatgttgtaccataattaaacattactctttttagataatatacattccttattacatttttgtcatcttttccagtcaatgagatcagatctgagatagttcatgtgaagcctgctcatccagttatgaccaagtttgagaggttattggtaagtttgacaacataagatttcttggtttatttattatcagaagatgttcttattatgttcatgtattagctgtagagatctattttccagttggatacattacagttttttacttaatagatttagtagtatctcacaatgctatttgagtcccgttggagttaatactgacactttctgttttcatgtggtctttatggggataattttgtgttggtaaatgtcaatggtagtaccatttagggatcttgacagtaatcgatgatccacccaaatttttaattattactttttttatcgtgattagtgtttaatcactagaaatattcca

SEQ ID NO: 79575 - DNA, 1676 bp, Cannabis sativa
atatatatagttaatttgacttgatttgtttaatttaattaattaatattatgtacagatgaactcggacacaaatacggttcgtgacgagcttgacttcgagttcttggggaacagaacagggcagccttacacggttcagaccaatatctacgcccacggcaagggtgacagagaacaaagggttaacctttggttcgaccctgctgcagcctttcacacttactcaattctctggaaccatcatcatattgtgtaagtacataaatacatatatatagcaaaagggaatatcaaatatgtacaatttaatcatttatttatatgttgatacagattctacgtggatgatgtgccaataagagtgtacaaaaacaatgaagcaaagggaattccatacccaacgaggcaaccaatgggggtgtactcaacactttgggaagctgatgattgggccactagaggtggacttgagaagattgattggagcaaagccccattcttggcttactacagagactttgatattgaaggatgtggtgttcctggcccagctaattgcgctgctaaccgagccaattggtgggaaggcactgcttaccaggcacttactgcccttgagtatagaaggtacaaatgggtccgtatgaaccacatgatttacgattactgtaccgataaatcccggaacccggtacctccaccagagtgtgtcgccggctactagatcaactctcttccaattcctacattataacactcataatatatacttcaaaaaaaaaaaaatgttgttgttattgtttgaaaagaagaaatttgaaaagtccgtacgtatacgttacatggaactgggccccttttgtacactactaccctccttattgcatgttctttattaagggtatataagggaattacatatgaccatgtgtcatgtattgcagcctaataagttttaattattgttcaaatagggaggtgcttatatttggtggggaaagaaatttaattaagcaaatgtcaatatgtttctacttttgtggctctgtaatgtgtatgtttatttcttcattaagcattatttgtgctaataaattctgttttgagtgtatatgcttgctttgtgtgtggtatatattataaattataattggaagaatttatatggtttctaaaaaaggatgttaaaggaaagaaagaaaatgattgaattttgattttgtttgttgtggtttataatataaatttatatatatatgtacatacacatttggtcctcagatcaggactctgttcctatcattaatatacaatacaagtaaatatattgaacatttgtttaatcgttggcagaagcatattcatgtggtctatatatagagtggatgtagtgaagtgggcaactcaatctgccctataataagttccataaaaccgggtcccaggtcgaagttagagaatgatcaatgatgtcggtagctgttatttgcacgtgtgataataaataaataaatatagctgttatatatacattcatcaaatatatatatattgggatattcatcgttaaaccatctgaactttacggtttgtaacaattaaccacaaaaactgaaattttagcgactaaactatctaaatcctggttccgttttgctctgcacacctccgtc

SEQ ID NO: 79576 - DNA, 4074 bp, Cannabis sativa
gatgatgaacctcaactaatcagaatggctactaataacttaactctgttggaagctgagtaaaaaaattcttacgatattcattgtgatcgatctgtgtagttgttaccactctttgcatgctgtcaaaaaatgagtagaaaaattgtgtgaacacaataaacatgttgcctcataccaccagacaaacgtgcttgtgttatttaagatgacagtaaatattgttgtagtaaacaaagtataacattaagctaacatgtttatttcatatcatcaccaattattattaaagagaatttgatttaagttagcaagtatttaaatcttctttatatactgcccccccaacaagtgaaatgaacaaaaagatggattatatgccataatgaatggaaggaacagacttacatatctatgtaaacctcaatgagaaacctcactttgccaatagaaacctgtaatgtacaaaatttaaatttgattatactaggaacttttcttaatgctaactttaatgtgtcatggagtcagattttatatcaatagtttaaatatttaagcaatgtacctagtctaactatttcaatatttatagcccagttgcagcaacaaatgacgatagctgcgacctcgtgctagtcgttgccaccggtaccgaaccatcttctgataactcatttgaatccgctctaggacaagcctgtgatcaatcagtagggatgcatttaatacttccgaaataactctattcaaaaaataaaaaaatatttccgcaataacttcaatacttaaaagttcaaacaaaagaagacttaccatctaacaagacacctctcaattcctcttgatacagggcgaatgaaagatggatctcgttggctatagagcaaaccaaccttcaaaaataaaagggaaaaaatactcattcttctggaaaaagaccatagagaactagctaattgcttggtttagaagaataaatatggaaagcacatcttctagtttcggtattaaacttaagtatgtgcaaaagaagagatcaaacataagatactcaagttaatcccataattgtgattgaaaaatctggatcttgatgaacatttaaattaagcgtgcagatccctgcaaattaaaattatataaacagcattgggatgataaaatccatgaggcaaaactcatcaaagagtagaagtgcacctctattaatgcagcagcacaaggatcttcaaagatttccaggctccaatcagccatataattaagctgcaacaagtagggaaaaaatattagaaaagaaaggccaagagagcacataaaaataataatacttatatttatagtgtcatactatagaagattgtaatgcatggctttttttcgtgttttgtattaatgactacaattcctttgtttcacacaaaactcattctctaaataaataagaatgagaatggaagtaggagagattccctacaacaattggaattcgggtagaaataggtgagattttatctgatataggtcactgcaaatttgataataaaagaatccattgattttgatggagtagaagcaaaaagaagggagagaacaaaaaacgtaagactagagacatcaaaaaaattaggtacattagtaacttaaatcaaccaccattagtttctagaaggacatatacaatagaaaccaaagacaacataccccgaaatcagccttgactagagacatcaaaaaatccatcagctgaatctttgcccactcaaaccgcatagtggcatcattcttttgtggaggatgcctccaaggcgcaccaaaccgtaatttatcttccgaaatttttccacttcgggcatcagcagcaaacttctgcagcaattccaatgctctatccatagcaggattcaccacatttagctaagagtaattgacatagagttgaagaattaaaacattagtagttggaatattttctaaatttttatttctaatagtatttattatactaatttttaaataatatttttatgcagatgagagtagagagaaaagagaaaaagataattatttttaacttacttgcaaataggctaaatatgaatctacaatatcctcaaatgacatagctctgtcgcccattatcctataattcaagaaaacacaggtaaaattttataagcagcatagcaccagagcttgttataaaatgtccacacagtagctaggaagcagagaaaaagaaaaaaaagaaaaaaaacagcttctgtattgtgaaatgaggattcatacaatttaggtgggggaaaaaacaagaggaaggcgctctaacagacagagtagggcagtagccttcaagtttagacaaatctagagaaactgtctatctgtggtaacaaagtctcaagtcctacttccacatttatcaatactatctgagaataaaggaaactgaaaaattcttacttcgaatggtgattactttgtttaagagcatatagctcaaaaagatgtcgtggatttggaccgagcacctctgcaattattctccactacaattttaacaaaaacattaatggcaattaaatgccacatttttggttaagaataacattaagatatgaagtacatataccattatacaaattatatgtacgaacaaccataatcatcagcaaaatgattagtagctaatgtcttttgtctactagcttgattcagaaaaagttggacttgaagtccacataatgatagacccccaatccattttactaatgttgtgcttgataaaactagttaaatacacttagcagtagttgaaattgtcaagcatacgattttcccccaccaaaaaaaaagtacgagcactcattatagtcgttgactgtatttgcaatgttggttaattgacagacttttcaggaatttgatgtatgtcgttatagcataacggtctagttgaaaattgcaatgataggaatcccaagttagttagccttgggaatgtgagggaggttttggaactgaggagtctgggaatgaataggtgactatactttagctctgctaggggagcttatcaggttccttgaactacctactgattatcctaaaacagtttttttcccatactaaatggttccatcacactataattgtttacctctgaattactgaaataatcatcaaccatatgcatatgagcttcttgggtagtccatccaaaattctgaaaattaaagaagaaaaaaaagttaatgtactggaattcaagaaagacatggtaccccaaccttttaatcttttatatcaaacattcagctatatcaattctagaaacttgtacacttgaatcacgctgccatcaatatattgtgatggagtgtatccattgtacaaattaagcttaagtcaaataacgaaaatgaaatattcaaatgttcttattcatcctgcttaccagtatcacacaataatttaaattattcaataattaaatcattgcatacataacttaagataaatttatgcaaatggaaaagaaaaattagcataggcacacatgcaagcaaataaaacacaacaactagtaaagacttccaaataacgtacctcgcgggagataaatatgtctataaatccgaaatccaaaaaagctcgatacgaatagtaactgaggcataatagaataaaaattaaaatcccacataaatttcagaaaaaaaattatcgcagataaatcatttaaactgaattatcacagataatgtacataggagtcatgttatgtactgaagacttgttaagattgttttcagaaattaagcaccactagcacataacactattccataaataacaccaacatcattaaaagagggaaataaatatattttcctatattataaatctataacttgtcaatttaatcaagtgaaggagaaaattttaagtagaagcaccagcaccgaatgagtgtgatctaaagttcaaattatgatgtatattggtattgtgttgtgccattccccctagataaaaaattataatttataaaggagaaatgccatgaga

SEQ ID NO: 79577 - DNA, 1417 bp, Cannabis sativa
ttcctgtgtctatgtctatgctatcatctcgctccggtcccacttggtcttcaaattatatttttacccttctattcttcatttcgtttcctcttacctgaagcaaaaggaatccgaaaaggaaaaaaaaaaagtgaaatttaatttttttttttgataaagaaaagtgaaatttaaatttaattgctcctttcccttcttctcttatctattttcttatcgattaagaataagagaccatgccacctcagacccacaatattctctcctcatttttcttcatcgtcgccgtcgccgtcgttaatttaacattgacggcggcggcgactgcaacaagctccggcgaccttccggcatttcgagaggcacctgcatttcgaaacggcagggaatgtcccaaaacgacatggtcttcagctttggagaagaactcctacaacccttccttaatccacatcgctatgactctcgatgcaacctaccttcgcggctccgttgctggcgtcttctccgtcctccaacacgcttcgtgcccggagaatattgtcttccacttcatcgccacgcatcgacgcgccgaactcaggcgagtcattgccgccacgttcccgtacctgagcttccacctctaccacttcgacaccaacctggtccgtggaaagatctcttactcaatccgacgcgccctcgatcagccgctgaactacgcgcggatctacttcgccaacctcttacccgccggtgttcgccgcatcatttacttcgattctgatctaattgttgtggatgacgtggcaaagctttggggcatcaatttaggccgccacgtggtcggagcaccagagtactgccacgccaacttcacaaactatttcacccaaaaattctggtcaaacccggcctttacggcgtcgtttcggggaagaaaaccctgttatttcaacacgggggtgatggtgatcgatttagggagatggcgtgaaggcaagtatacggagaaggtagagcactggatgcgggtccagaaacggtaccggatctacgagctgggatccttgcctccgtttctactggttttcgccggcgacgttgagagagtggagcacaggtggaaccaacatgggcttgggggtgacaatctggtgggtctttgtagagacctacatcctgggcatgtgagtctactccattggagcggaaaagggaagccatggctgagattggactctaaaaggccatgtccgttggatagtttgtgggctccgtacgatctgttccgtcactcttcgttgttctcagacagctgaggttgagaaaagagaggaatggaatgtgaatctcaatcgtgtcgttgttccgtcactccgtcgtttgatattcctttttacttttgttacgacgtcgtttcgttgaaact

SEQ ID NO: 79578 - DNA, 1139 bp, Cannabis sativa
gtcgaaacccgttttgctacctttattaaaaagtcacacattaaaatttaactagagctcaattttatttaggattgatgagtaatatgtattcagattagagacactattaaattattacatgaatctatatgtagtgtgtattgttttattttgttgtattttttattgcaatattttttaacttgcgtttattaattgtttttattttgattggtgaagaatggacagagtaacagaattatatactcttctttttttttttttttgacaaaataacctcaaagaatatcacctaagagcaaagagttcaacttggaggagagctaaaaatatcattaatccaaaacattagccaatacactatttctaatacaagaaaaaaatccagggcaccaaactgtatttgtagtaattgttgaagcaaatctagcaaataaatgagttactacattatcagttatgggacaaaaagtaaatctaacaataaaattgttacaaaaaatcagtaggtatatacttacttacctctttgatctagcaatattttgataaattaattgtacatcaatttacctaattttattgaaatttgagtattttattatacaagttccattcaacctataaaaaatggcaagttcatataggtccacacgtgctatgataaaatagatatttttaagagaaaatataaacattctttaagagaaagttaatttgtttaccttacttttagccaatgacaataagtcaattaaaacgattaaaaataattaaataacaataataataataataatgatgataaagataaagcaaagagaacaccaaggttgttatagaggtttggtcccgtaatgatggtaatagcctactctctttttatttgtattgacttgtgagaagaaatacaagaagttcttgatctctctaaagctcttacaatgaattgtgagtatttctctcttgaatctatgattcttttctcagtgatttttctcgtgccactgaatatgaaatgtctctactattcagaggaaagaattacatcaaaataattttctaaagctaataagaattaaaacaggaaacttttttatgtttcttaaataaatacaacaaaatgagaaactaag

SEQ ID NO: 79579 - DNA, 1119 bp, Cannabis sativa
aaaccgtagaaaccgcaccgcactattttttgcggtgcgatttttacggttttttagttttacggtgcaagtgcaggtgcagtttgggaaatcgaaaaaaccgcatgtgcaggtggatttgaaaaaatggataaaaccgcaccacccgcaccgcgaacaccaggtaccaattttttacttctttacaattaccattcattctagaacaattataagataagagtgtgaatcagataaggtcccacaattggggtctacaataatataagattgttgttaagataataataaaatgtttttttttttccaattattttttagaaatgaattctcattcaaatacaaaatctaacaaagcaaactattgttttgcttcgttgcaacagggcataatttatgaatgatatgatgataaatattactctaaatacctaagacaatagtgactgttatctcttctctgcaacagcattagccattttctgctctatcatatgcattagacttgtgcttaggtgcaaatgtgaaatcttccggaactttgccaagtaacatttctgaaatcctaatctgcaaaatgtgacaacaacaaaaagatgatgatgattaacagtctgataccctaaaaaagaaataaagaataatggtcataaggtatctttataatttgcaaatgggtgtaaaatggtatcatgctactaatgcgaatataccgatttggtaccatagcttatgtatagtataatagggtatccgatgatcattattagaacataagatactaatcctgtatttcgttaagaaagatacttaatagataatatacccaatccgctgcagaatcagaagccatcagtgtctcaaggtcattacggccgaagtaggatggctgtctccagttcagtcgttgcgggatgacctcaagaagaccaacgggtacgtatctacatgtgtagctaagccattctagaaggaaacgcctagttgtctccacacctgaagaattttatgataaagcttgggtagttaatttcataacaaataataactttgacagagagctctatgttgacatgtgtatgtaggttgaaaaaatcgaaccttttgtgtctgaacccc

SEQ ID NO: 79580 - DNA, 2198 bp, Cannabis sativa
cttccgatctttattattattattattattattattattattattaatccctaatttatatttgttatttttttatggaggaaattagaggagtaattttgtggtcacctctctataattattaactagtcatcattattattatgaataaaaatttgtactgtgctttttgtctccatacaattcttttctttcttaattaagaaagcaaattatagtctagcttaatttgtataattattaattatttgtaattgatgttgtgacaataattaattactaattcatccaatgcaatttataaacaagaacatctcaactcaattcccccaatatatatatatatatatatataatatttctatataaaatactatataattaaagaggccccattaagcaatcaaggctttatagtatataattgtaataattataagatgaaaaaagatacaataaaaagtatgataaatttatggcttaaattataagtttttttttgttcattgacttgatcatattttatatagcatgccaagctaaagagaatgttacttagtagtagaacatatatatatatatatataaatatttatattgactaaatcattacaaaatataattatattgtcatgccttaagaatgataatgttggtaaacttataatgatatataatgttagaattacaaattagaaaaatttataaggcactatttttttagggacatttctaattttataaggattattagataaattataattcaaattttattatacaattgtgcatatatattttagttataacacatgatttacatgtgttttttttcttcttaaaaatgaagtcaaatatttggttgtatgtatttttttttcacctgttgtaaatatactctaacataatttttgatatcataaattattcaaaattttataaaaataaataattattttcaaatgtcgagaacttagatgtctcgctcaatcggtagtaataaatatgacaccctcccatactataattgcttcctatataaataatattagtgtatgtgaatatattaaccatagtacatagaggtagaaccttttggtgaaactttgttttctttttctacaaattcttgcacttaaatcaatcataaaaaatcattgagaaaaataaaataataaaaatcaagacaatgaatggaagcaatttgaagagacactagagatccacatttgtctcatttaattgggtgggaataatgaaattgattgatatgagttgtacttatttattataactttgggaccaaattttgatccatacattttaatgatattggaccttttttagggcatagaaatatcttaatcaattttgctttggtgttgttattcttaattttatatagtgtttatataaaggagtctattatactaatctctttgaattgtcttagtcaagtacttaataatctttataaaattatcaattcattggtggaaaaattagagccattgtttctataatcatccaatgaaaaaaaagtatgaatattaattaattagggtgcgtttggtacgtaacacttttttaatttattttttattctttaaattagaaaaataaaaatattttctaaaatcatgttctataaaattattttcacttcttaatttttcaattaatcaaaattaaaaaaaaaatcactttcaaaattttttaaataatttttttagtcaatattttggactccaaccccaacctagaccttggaacccgaacctggacctcgacctcgatcccgatccaaaccctgacctggactcagacccaaacaccgacctggactcaaaccaagaccttgacctcgaactggatttggacccgatcctggacctagaccccgacccggcccgacctagactcggaccacgacctggacctagacccctaactcggaccaagaccccaactcagacccttgacccggaccccaaccctcgccccagtcgtaattctgacctcgtgcccgggcccagacccgtacccgacttaaataaaatcaacaaataaaatgaaatttaccgaaaatacttttgttttttatttttaaaattgaaaaataaaagtggttatagaacacatttttgtttttcaaaaataaaattttaaaaacaaaacttttaattatatttttatga

SEQ ID NO: 79581 - DNA, 1570 bp, Cannabis sativa
cccacttagctaaagagtgagccaccatattacaatctctattcacaaaatgaattcctattcaatctttaaggagccaactggaaaaaatctccatcaaaggcactccccaatccgcccgaggagtggtcttcgactgaagctggtgaatggcagtgctgctgtctgaagctaaaacgaatggtgtcgccttcattctgtgcaccagttgcagcccaattttaattgctgacatttcagcaaccagaacagaggcaatgccatgcttaaattctatttcagcaacaactaacctgcctccttcatctctgattacagctgcaatgctaaaacccggttggccatgacttactgcagcatcacaattgagcatataagttccttccttaggagctacccacctgtccctcttcttcattgtcttcatgatcttattttgagtaccccctgcagcatgctagaaatgtattcaagagcccaaggagtccaattttccattggaattttcttattttgaaaaattctttgattccttctgttccaaaccatccaactcatccctagaaatatctcaaattcctctcttgagcagttttttctcatgtaaattaggaattcaaccatgtccttcatcaaaccgagatctctaggaaataggtgccagaaactggtttctttccacacacttttcaacattggacagttccaaatggtgtgcccaattgtctccacatggttccaacaccccgaacaaattctatcaattttgatccctcactttaacaactcacttttagtaggaatccagttgtggcaaactcgccacacaaagttcttcactttcggagttaacttcgagtgccaaactgtcttccaccaacttctcactatctctttgtttgatgtttccgctgtttgtttctcaagttaagttagtgcatacccgctagctaccgtgtactcaccattgattgtgtagtgccaaagaaggtcgtcttccccacacactcttcgggtttgaatccccgaaatccaagggatgtcatcttcgtgaatcttatcttcaagagccactaaattccattccccattatcattcataagagagttaacataggtattgggggacacctttgccggggctcgaagaagaaaaggagctcctctaggaatccaatgatcctcattaatcttaaccttactaccatccatcacacgccaacgcagcccctttaaaagcagttcacgaccccaaataatacctcgccacacattggaacaccaagtgcctaaaccagccttcaagaagtcagaattaggataataaagagcctttaaaacctgagcaaacaagctgtccggtttagtaacgagtttccaaccttgttttgcgagaagggcttggttgaagtcctccaaattactgaaacccatacccccagaccatttatctatgcataatttctcccaatctccccaatgaattcgatgcttagtctccgaagaaccccaccagaaacgagttataagcgcttggatttctcgaatcaaacccttcgtcattctaaaa

SEQ ID NO: 79582 - DNA, 1267 bp, Cannabis sativa
atcatatttcatggtcttaatttgataatttctttagaccttgtaaaaatgtactgatgtttcagagtaaaagaaaacatctaatattgaaatctgtaaaatgctttttctgatttaagtgttatattcttctttcagattgatggtataactataggttccttggatgatattcctggtgatgctgtcagttcattcttcagatcgataaggaacacactcgattttgattttgaagatgagaatgaaggttggttttgggatcaaaacatagtattcttctgtgattttataccatatatcttacttctctcgtctcctataaacgcaggtcgttggacatccaccgagcctccttctctttatatatttattaattgcagcacgcgtgaactcggtacaatagagaagtatgtggtatgtttccatgattccattccgtggtgaaaatattgtttggatctctgtttctattctttctctaatctaaatatgtgaatgtctgcaggaaaagtttgccatgtcaaccccaacacttctatttaatcttgaactcgagacattacggtaaaatctttaaaaaggtcttgattgaatgactcttatttcttttactgtttcagtataacaaactgtgaactttgcagtgctgacttgggtcttctgggatttccacccaaagatctgcattaccgatttctttctcaattcattccagtgttctacattcgaattagagaatactcaaaggtacatgcgtctgtctcttcccttaatcttatgtctcagctcagtattaatatccatttgtgttcttgatttctaagacaatagcagtgtccccttatattgttaactacaatggagcactgtttcgccaataccccggtacataactacgaggaaaatttaatgctttatttgcatactattgttgtcagttcttttgaatcttttcttcaatattgttcagggccatggcaagtaatgcttaaacaaaccgacagttcttttgcttgtgtggctgagagtactacacgattcactctaggcgaagtaaatatttgtctccaactccaatctgcatttcctctgttcatttctagatattcagaagctatttggcttcgtataacttaaaaaatattttcagtttttaagaatagaaaacaaattttaaaaactaataaagtgcgtctggccaaatttttcaaaaatagttttttgaaaaatcgagttatacaaagctagaaagcaggaaacatca

SEQ ID NO: 79583 - DNA, 3660 bp, Cannabis sativa
tctataggtgagcaaaaatgaccataaacatattccagtggtacaccatggtccccagatcaaataagtgaactaaaagattcatagctgcactaccttatatgttgtgcagttgcttggtcaatttatgaattgaatgaagccattggaacctagtcagaataagttggtgacctaccaaggttgaggttggcaagacgaggcagaggtaagtctatataccaattaaggctccaatctgacaatatatacctaaaaattatgattcagaaactattctctaagcaaaacaggacaaaatctccttatctatgggaagtgaattagcaacttcatatacgaatggaacccctttgcaaaacctttaaagtttaaacactttagcctttgacctaccaaaggctttgttctaaacttgagaaaacttgtaattaagaggaaagagacgactacattaaaccatcaacatgatgatccaaggattattccatttattgctgtcattatcttacttctaaatgatcctaagaagatacttacatgtatgttaatatgaacccaaatcttaaaagaacaaggctctcactcactcactcaaaacaatggcagaatcggatttcaaacacttgtactaaacattaggcaaggatattgaggaagtaaattcaaagagttaatgtatttctgattttcctccattgaaaaagggggtttaaacagacacgaaaaatgtcaccttatttcattactataccaaaaccccaactttcaactgctacatttgattatagggagtacaagattttgttaaagctaacaatatatggattttccaattgagccaagaattacatttcttacacaggctattaataatgaaaatcctcgtcaactaaatgatacaccatagtcaaacccaaacctgaacagcaataaaatcttcacaagaatcagacacaacccggtcaacgagaagaatagaggtcattcagatctcttagacaaatgcctccataggtagcgaccactagccatatccacacaggtccaaaatccagtctccatagctgagcgaacctacataaaaacaatcacaaaattcatcaaaaagtttgaaactttcacaaaacccagaaacaaaaaacaatcaattaaagctggaaaagaaaaaattaatcaattggggtttggggtggaaccttggagaatcggttaaccgaagaagtcgacgaatttgacaaatgggttttgtctgactcatcaagatcgtggtgggtttcctcgccggcaggggataatgcttcgtgctgtgacttgaggtttcggaggacaaagaaaccggcgagagttgccgaaaggaatatcagaattattctcagaggacacatttcttcctatctctctctctcaccagaaattgagaaacgtgtgttagaaagagaagggagaaaaacaagtaagaaaaaggagaaaggttgcagttgaagtttttgacaaaaatggtttaggaataatatatgacaaagaaaatcaaataataataatgcaaaggttttttgggagcatacgatggctgcctttgacctaacacatttgacaatgtctgaaccattatccattctctaattatttattacaatgttttcggtgaaattgtgtacctaatctttagtggtatatagtatttgtatatacccttatgtcttctataattttatttattttttattttttaggtgggttttcttttttatatatattgattttgggtcgaattgtttgtgcacaacacatcctcctaaataaaattctagaataaaagaagtctactatggtgctctctacgttggctcccatttattttcaagccatctcacaattgagttgactaacgatgtgtaagataagtcttgattttggatttaccaaacaaatgaccacaaatttattgctcttaccataatttaagagtgctcatgaactgtttgtttaagtaatgctaattaagtagtgttgatgaaaataagtgactacaattcaaaaatacgtaatcaccacatggcactgattattatattgaatatattcccatagggtgtcaagtgtttcttacacaaaagttaaaaacgaatacacaaatcgaaaaaccaaaggcggctgcttaagggcacgctgcctagcattttgttatataaaatattactgtagtaatttaatatcgaaatttatttaaataaaaattataaaaaattgttaattaattataagataaaatattaaatgacacataatacttatataaagtataatattattattattattagtgtaaacacaataaaaataaaaattatagaagactattaattataagacaccgtgatgaacacattgacacgttggtacccaaaacaataatctttatttatggaccataagcaaagaaaactaactcgccaatgaaacaggcaagttttgtaatttaaaaagaaaagttgggaaaaatatgctgggagtgaaaaatcaatttttttttcaacaaaacatgattcaaacttataaagaagaactacgctacactaaattaaagattgtcctgtgtttttagtctgcagttaaccttgaatggtgtttgtaaaaactggattaatcgattttgttaattgatgtgtgtgtttgtttttttttaggaagggattaattgatgtgttaacatcatacatttataaatgtaactaccaaccataatttaagttaatatgatttttatgaattattaacttttaaagataagagtaatatacataccaaaaaccaaaaaacaactattccaatttggcagctcccgcagccgtcttgaaagaaaacgatagaccccattataatattatttgtgtgatgaacatactttttcaggccagttcaaacgtcaatttctgaaatcattgtcattcttgttatatcaacataattactcactgcacaaaccacaagcttcaagacctatattttcatgacacaccccacattaataaatgattttttttttttaaggttgagatgaacagtggataaatatccttataagtctaaaaaaaatttctacccaagttaaactttctataatctagtatgaaaaattacacctgggatttgtcaagcttagaaatcaagtagtagtcctctgcagctctgaatatcaaccattccagctaaattttgtagcttattatttcctcttttcttgtataatgattctcaagttctttactcgaacatgcccaaaaaatcaaaagcctgtaaacttgaaaatagaagcaatactataaatataaaccatccaaaatgttagattgctatagaaaattaatttaaaagtaaccaattttgagatgatatagattttttaagaggctagtgtgagagagtgatttgggaaaacaaactccatgaaccaaagatttacctgagaagattagagtttggcataacgagaaatctttgcaagtacagttctcaaacttcggataccagctccagattttgagcttaccatcatctgaaattataatcaaaccagagaatttagattgcttactattatgatgtgcataccaaagtataattaaaacaaaaatgatctttgtaccaggggttgaa

SEQ ID NO: 79584 - DNA, 2803 bp, Cannabis sativa
atttcatacctgctgggggacaaaatggaaagtcaaagtaagggtacttgtcactgcaattggtaaatcattacaacgagttaaaaaagagcaagaatcacaaaaactaggcgattagttctaagtattcagatttcggtgatgaactttttctcagcaacaaaacatctaatttaacaatttctttgagctatgtttgacaaccaagaaaatgaaggaaaaatctcaaacagttaataagctaaagatactcgaaatcttttacaatgatgaagtaaaattaatcattccttatttcaaccgagtacttttgtttttcttttatttcttgtctctctcttttcctttcattttctcaggaaccaaacaaattaaagaaccacaaaactcaagtactaaactcaaattaataaagaatttaaacaagagagtgatgattaaactgtaccaacgattttcaagagaacgaagtctgttggcgaaaatgggaatcttatatccttggtagatctttccacgcggtggaccaacgggatgaagtgttgagaattttcttgaagaaattacgagaggtagtaacatcgccattaaaaccaacagactcaccaataccatagtccttttatttctaaaacccaataccatagtcattactcgctccaacgccatggattctagaaagaaagagagagaacaagagtttgtatcgtttgaatgaaggcatgaaaaggtgttactgtgttcaaagaattaagaaaatcgctatttatattatttggtttcttgaaaggttgtttgttattttccaagatggcgggaaaatcagttagagactggtaagagtgacagttagtattttaggaaaacagaatcaactcacattattccaatacaaaattttatcacaccagtattctgttactgttggtccacgtccaaagaaaagtcccttactgaccaataaaccatgccaaatatagcttagaaggatcaacctcaccatatggcaaggctatcaataggaatggcaatttgagcgtttttttgcaggcccgggcccggcccggcggaacaacgatagcccgattgatttgagtttttatcggaccgggccaaaatgctatcgggtcgtgtcgggccgggtctgtgacgggtcgggtcggcccgattgacactcttagctatcaacctactcatattaagaagaaattacattttttataaattttcatgcctttacataaataggatttttattctaaaatatagaaaaatgaagtaagagtaaccgttagagggtttatgctgttttttttttaaaaaaaaattctcataattttttttttttttttttaaaaagacatatttttacaaactcataatttagaaaccataaaaataaaaattccctcattattaaactacgcgaattattgtttattgctgactacttttgaaaactataataatagttgtcttgcagtatcactctcttagagttttgttggatctttattaaaatacggaattttcacaccacatgaaatttttcattttttcctttgaggttctgttttgttttctacgacaatatattttcaaaaaaaaattcttgtggtagtacttttataaaagttaattcaaattctaatatttttatgagttttccttaaaataataaatagtatttttaaaaatcactaaaaagtatgtgtattttaaaaagattttttaagacacttgtgttgggtgggctggccctgactccaagttagctaatgtaacttgcattgttgtgagatctcttgaaattatgctttgggtttagacaccacatattgatattgtagctagtagttgttgttattgttatggttgtgttatgattcatgaatctctaaccatgcatttttttttttcataatctgtatggttgtgacatttcaatatgaaccatcttgaaatagtatatgcaacttgcaccttctattatagtatagaacttaaatagcgagtgcattatttttgtttcaaagcatctatagatattacaatttatatatatagtatatttattgtacttatagtaattatttgggtaaatattattttaaaaagttattaattggactatttgttttgttaaataacaaaatggatcgtattttttacaattatacaaataaaacctgagcttaatttttaacaattttattgtttaatttaacaaactttaagataatttttaacacgaacagatacagaaaatgtaactagttttttcataacatctctaaatcggataattatgaagttttattttgacaaaaaatcaatttagggtcttatttttaattttaaaaaatacaaagtccattttattatttaacaaaatagatggtcaaattaataactttgcaaaatacaaagtgcaaaatagtattttttttttttttgaaacaattcttacattaacaaacatcattacagagaattcggcacatcaaacaacacatataaaagcaaaaattttgaatagtatttaccctaactatttttacaaaattttgaatgatttataagcatttaaaatagtgctcacatataaaagccaaaactaagtacataataacttcattataaaatcaattgttagtgtattataattctttcttaaaaacagacataaaaccgaatttaaaataaaataaatttaattatataacccatcacccattttacacttggtaccttcaaaagcataagaacctttcccttttattacaatattacaagactaccc

SEQ ID NO: 79585 - DNA, 3118 bp, Cannabis sativa
  modified_base (963)..(964): a, c, t, g, unknown or other
ttcccagtcgcacgttttcgattcttggattcagattgttgggatatcttccgaggtcttccttgacccgccatggctccaacgatctgaagttaagtaaaaccctagcaaagctccgttttcactttctaagctttagaaaggaaaaaaatccttaagcaatttaaaaagtgagatgttaaggtgcaaaatatatattctacactaaattattgaaaaatatatactgaaatgatgcaatagttggagatggtctaagtgttgactaaactcattaatgtcagcatataaaaaagttgggatttaactactaaaaaaaatagggacctaaatgatatacatagtaaagtttggggacctcaggtccataatttagtggagacattaacaaaaataattatttgttaaatatttactccaaagatagaaaaatatattattttttttgttcaattaattatttttttttatttttctcggaaaagaagatgaaattaaataaaaagttataaaaaaagaagtaaaaaagagttaacaacaaagagtgttaactcccttaaagaaagaaaacacaaaattactcaacacataacatattgttgtgacagaagtagaataaatgtaactttaggtatttgacttgtaaaaattatatatatataagtgtatgaaattgaaaatataaatatttatgttgcgaattctctcgattaaaattaaatatcatattatattgattgaaattattggaattaattgtttcacatggatttaatgtaaaaatattagagcatatataagaacataggttactccacttattaccaattaattttgagatgaaactctataattctcaacttaatattagagctataccaattgattttgagatgaaattcataattctcaatacaaatttatcaaaaactaaaatcatattatgtatatttatatatatanntatatatatatatatgatatatgacattattcccatagaagtggaggatcagattatgatcccaataaattataaaaaagatattgttcattattaggtattttaaaaggagtatcattatcagtatatattaaacaatattcatatgcatgtgaagtagtttagtaatactattattatgtctttttttggacatgttcaaagaggtttgattatagctcttaataacttgtactttttactaacctatcttacctttaatcttcttctttaatttcacttttcatttatattaatcaatcatcaacctttctgtttaataccagatctacacttaattaataataattaataatactaaacatttcagattaattaaatgacaaatactttgtattctctaatttattattatattttactgcacaatcagattttgcatttcaagttgtcttctcattccctgtaaatagcatagatttaattttattaaataataataaaactattataattttaactcttaacaattcaatgtttctaagttagatctaaataatctcttcaaaatctataacaaaattacattttttaaatattgcatataaaaaaggttatatcttgttcaactagttagattcatcaaatttacttcttatagaaataataaaaaaaaaaggttcatttattgcaacactagtttttcttttggtgaatttgttgcaaaaggatatcaaatttctgccattgccatttgccaaaatcattcatagaatctacccatgaaaataaaaaagtgcaaagctaaaaagttttaaatggggtccaattagaccaatatgtacttctaaaagatatatatactcaattataacacatatacacaaaaaccatattgaaaaacacccaatttggagaaaagacttatggaatcaccattcttatttattattctatatttatttttctttttaaaaagaagcaaagttgtgagagtttgataagctatataaggttgatgttgagtaaatgaggctggcattaatagataggcacatgggagattgcaacatgtgatggtgatgttataacttggtgtgaacaaaaacactaaacacacacatatgagggtggctcacttccaccatatatatatacatttaagtattatttggtgagagatgaatatatattttttataggttaattagaatattttagattcagaattaaaaggtcttatggtggcgtttggttggaggtaatgaaatagaatagaatggaaagaaaataatttttattttgttcttttatttagaatgatctttctactattttagtagaatgactatttcattttaaaaaaggaaggaaagatcattccaatgtaacaaaaaaaaatataatgatttttttattaatttttttatgcattttaaattttatttcattccattcctattccgattctcattcttatttctatatttaatcatttttttacaaataggtgtctaatgtggacaaacgtttgggaggatgatagaatttaataatctcaataatttttaaaaaaatacagaaaatatataaaaaaaaaaaatagtatattttgttttgtttatatatgtatttggatcacttctacatttgttagattaattgttggattgagaactatttctaatcataactcaaaagtacattaaactaaatttaatatacaataaaaaatgagatgttttttgttttctcataggaaaagggacaaaatacaatacctaatatatgtatttatatattatggtcacatggggggagttcatgcaatgcaagttgtttagttttgttggtcattttctcaaagttcacgtgtagtcttagacataggaatctaaagtggatcaagagaatgaaaccaagcatcattcatggctagctatagctacggctacatacatgggccacttcactttaataaggccaaattctttaatataatatcttgaaaaagaatagaaaatttagcttgggctccttttggtgcttctttatattggatgggctcttggaaaacttcttcaaatgtttttgagaatagtatttttctagtcctaatataataagtgatacattcaataaatgaaaaggata

SEQ ID NO: 79586 - DNA, 922 bp, Cannabis sativa
aaaaagagaagaaaggccaatcaattaaacacccattatctaaatgaaaatgggtaaaggcctcccctaaaatttcttggtaaggtccttaccggacccatcgcttccagaaatctgtttttccagacaactcgaagtgataggtcgagaacctagggaaaagttaccagaataaattttaaagcataaatccaaaaattacagccccttggagtcctaacaactccaaatgggtgtgaagagaatacataggcctaatattcaattaaaaattcatcttgcctagtttttccctaattccagaatcctctaagcatgtaaatgtctacggaagtgcaaacaatcatacttaaactattcatacaaaatcaacacttctagggcacacaaaattttcacataattttaccctagaaataaaactctatgggcaacattttaccactaaaatatgcgagacatcctagatcaagcttgaactttgcatttctatctcatatacaaaattgcatatagtcaacagagcgtcaggatgcatacttgttgtatttgtcataaagtttttcgttgaaatctggccaagaatgctgaacttagttgattacatgattgtagcaggcctgagcgtcgatgtttttattggtctgggagtggaaggatttgaggtacaacggctctgcttctagaaaagggtctgaatgtaggtttagaaaaatttgaatcaagtagttgaagacttcttgcattcactgttggagacgacggtgggaaataagttttctggaaaataggatgttcttgcttgaaaattcaaaaatgaggagtttgaaaatctaaggtgatgaaaaagaagaaatgacttgggcaaatctatttatacttcagtcaagatctttgtgatgtgaaatggacggtccagatt

SEQ ID NO: 79587 - DNA, 3238 bp, Cannabis sativa
acaaatatttaattactcacaaactgaaatccagtgtcattgagtattcctatcccagctgaagcaaagtttgcaccaactagtagcctttctccagtgagctccggactcaagtatggcaatgtgggctctgacccaatttgctcacctatttattcaagttaatagatatatacacaaatcagagatacatacatatatatgtatacttagataattaaagagaaaattaatgagagatttactgataaggtcaggcatgttgaggccattagagaaacggccagtgggtctatgggtagggtagtcaatcccataaggaggagagtcagctcttgctgtggtggctaaataattgttattgccattgtccacaagagaatctccaaacacaaagaaagctcttgcctcagcttgttgttgcccaaaactcattacaagtacaagtagtagtactagtagtatagaagaagcaatatgatgatttgaagaagagttctccatttgagatatatataactagtacacaaaactttactagagaaatataatactagctagtactcaattaggaagggatgagagtttatgtgaaatagttcatgagggggttggatttatatagtgctgatcttactagcctagttggtctaggcctattactgtgtacgtagatatgtcatatattaaatgacctttgttctacttctaccactcactgagataagatcaggtaatatatctctatataatattaagggtcctttcttttaccaaaaacttaaagcccaagtacgcaatgtaataaagacaatagggtctcaagagtcaagagtacgtaaaataatggagcatttttccttgtttttcttcttgtttttggcacactgtaataataacttctcttcttatacttgccattaatattatatctcaactatagttcatgttgagatatgtatagcatatttttaacttaaacgattaattatttttaaagaataaataggatttgtcatccttatttaactatcaccattgaagagttttgtaatatgaattatagaaattattacaaatatatatccatttctgtaaataattttgctcatttctataaataatttattaatttggtataagagtttagacaaaaaataaaaatataaataatatttaatagcccttctgcaactatatatacgtgagactccatgatcacataagcaaacgtactattttgaaaaaaaggagtagactataattaaagaatgataattgcaacgatttttaatagtatatattgggaaattttcgcaacatttaaagttaaaaaaaaaataaaattaattaagaaaaaaaattaagtatgcttatatacttgaaattatcatgttacattgttttctgttaacgtctgttattttctcattcaagtaaaatttacactttaaatacatcaatttaaaaccttctaaagtgatcgaattagttttaactcattataattaataacatatttaaatgtgggggtggatatttatgaggccttctctcctgggtgaagattaagtttactgctgccaaccttttacagcttttatgaatcgttgtatatttgtgaaacaatgatgtgacagtttgagtaataatatgcatgtttttttttaatggaaagtaataattaatatatacgcagtttctcaccgagagtaaatatttgtaaaagttattaattagatcataaaatacactttatatattttaaaaaggtaaaaatatagtattttgagttccatttttactaattttattttttaatataattaattttaagtcaatttctaaccgaacataaatagaaaatgtaataaatattttcatagattattattaagttttattttgataaatatttttactaattttattttttaatataaccaactttaagacaatttctaacccgaacataaataaaaaatgtaataaatattgtcatagattattattaagttttattttgacaaaatatcaatttagggtcctatttgtacaatattagaaaatacatagtctattttgtcatgtaacaaaatagaagatccaattagtaacttttataaaatataaaatccaaaatagtatttaccctctcactaataaaataaaaattataatcagttgagactagctaagtggcataatcataacaaagtgcgtgtgtgttgaaagtctagaattggtgtttaaattatgtattataaatatataacgcttaaaaataaaaaaaaaattacaaccacatatatttattaagttatattacatttatcctcataaagtgtagtcgcaagttagaatctgccttataaatgtaggaaaagaaaaaggaaaaaagaaaaaaaaaaaaaaaaggttatagctgcaatagctatttgattaatttttgagttaatatagcattaatagttgtcctgtggctgcatatacatagaagtataccgctatgaaaggtaaaatatcaatacaaatgtcagggaatccttttataaataattcatttgttcaatcaagtagtaatatctcgctataaagtcaccacactccctcaacatgtgtataataataaaatatcataaatattattaacaatatttatgttttgggtggcatgtatctgttcccagaaattttgtttttttttttgttttttgtttttttttttcatatatatttgtgtatgttgtaattagtttaaaaaatttataaatttttaaaacattctgaataatttacaatatgtttgactaattacttattatgggaataaaaaaaaacagtcgctcgtacaaaaaatatataaattttattttcgacattgtaaactattcagaattttttgaaaatttatataaatagtcttaaataactataccatatatcatatatgatcgtaaaaagaaaattaaactaagaagttttctttggtgccgaaataaacagagagtctactgaaacaaccatttaaggggatatatattgtaaacttaccctatcttataattactcttgactttgagttgagtgtttagtttatatataatatatgtatatatactagtaaaaagttacgtgcgagacacgtatgctaaattttctgctaattttttttatgttattaaaaagtgatacaattaaaaattaaaaaaaaatatattattagttattaggttca

SEQ ID NO: 79588 - DNA, 1217 bp, Cannabis sativa
ggtgtaaggacccaatggaggcttgaagcggggacgttacacccacagaataatattatggctagcaatgcttgaaagacttcagagaaaataaaggcttttccgattttagttatgttaagatcagagttgtttggtttgtggtctcggtagtactgtggagcatctttctttgagtgtcattatagtcaaagatgtctacattaaagaatggctgggatggaaattttcaaatgtaactacttgttgaggtggatagataaatttgttttgtcatcttttcgaaagcaagtgtttttgccatgaccaccgctgcagtggtctattaaacatggaaggttagaaatttattattgtgggaatcaaaggtgactaatatacctacagttatatactatataaagcaaaacataaaaaaatagattattaatgattttattaaagaaactcaaataacaggatagattatcaatgattttagtctgaacaattataaataggaatttttgtttgtatttagtggtgttcactgttcaggcctttatttatgagggcgctgctgttagttttgtaaatgagttttgatgcaatacaatttctactgccgatttagaaaataataataataataataataatgcttcattttctattcaaaaaatattaataacaataagaaataataggtagaagtcatcatcatcgatattccactcattacactttgcccagattgcctcaaatatgtatggccaataattttcctttttttttttggctatattaataaatatagatataattgagcatgtttaattgattggaatcaataatgtaataaaatcaaagggaccattataatgtttagtttgggtttttaacttttataatagaactactaaacaattcacggagaaagcggatgtttaaaattttttaaattacatatataaaataaattataatttttatttaataacaattaagtaataaattgtatcaaattttaatctaaactaattctattgtaataggcattacactaattctatgaattttagagtgacatataatcgcctcatatctctcttttatatatctattctatatagagtgtggctatgtaacagaatatcttattacttaacagaatattctttattaattttataatattattatatatttaaaaataaaaattatataaatattttata

SEQ ID NO: 79589 - DNA, 1893 bp, Cannabis sativa
  modified_base (1844)..(1844): a, c, t, g, unknown or other
atgagaaaacaaagaaagggaaaggaatttcatagaaactgccatgtcatcactattgtgctttcctttatttatatatattgatattgatactataaaaatgagtttgaattaatttttaatatattatattatataaaaaattaaatttacacctctcttaatttacagaaaaaaaaaagtttaccctctttaactttaatcctaagtccgccactatttctccaaaaataggcagatggctactctaactctatagtagatttttgtataaaataatcgtgatatatttctcaaactacagaaaacagaaaacacttatcaaaaaaccaaaagtgatgttctacttagaaagttatacgtatttaatctaacaaaactttcttcaaaaaaaaaaaagaatttaaaaatatattaacaatgcatcatagatttcttttttcttttctggcaaacaatgcaatatagttttgatattacattattacaataaagatgttattaacttttggaacacaaatatttgaaaaagaaatcttgattcctaataacatatcacgttactaattagaatatgaaaaaaagaatatattgtatatatataaaaaaaatataattatttaatcatgaagaatttaattcttgtgggtccactactgaatgagggtcggaagcttcttcttattttttaaggctaaaaggagggaagcttgttcaggaatacaaattcccaagtcatatttaacaattttaaaattgtattattgtttctttcgaaaaaaaattgcattattataattttatttctgtaaagaattttataatgctctgaatatattaaatagttttatttttttattctattaaagatataaaatagatattggaaatggaattaagcttttgtctgattcctattctatagtattttatgtttgggaaaacacgctatatctggaacaagaatgtatttatttatttaatttgaatgaaatgtatttattttatttcaacttgttggagattaatgtcgctggtttttacgggatatggttggtcctaaggagtgtgtttttttgccttaattttgtaaaataaatgtagaggacggcattggtggaatcttattccaaaaatttatgagttccaatgtgcttctagccaattagactttgtaatgtgtaaatgttgctatgactatataacaaatactatttgttagatttttggtttgattatttttgaaaaattttaagtatttttgtctctgattatttgaatactaataatgctacgattgattttgagtgtgttaatcataagtgtagagttaaaagtaagtttggagcttttcccctcacattggaatgtctaagacatatgattgtgttgaatgatattttcttctttgcctcatggacaagttgggttttcatgagaggtggatgtctttagtttatgcttgtatttcatctatggagtattcttttaccttaatggtggagtgtgtcatattgtgcttagcaggaggctcatgtaaggtgattccatcactacaaaaaccacttttagaggcggttttttaagccttttagcatcggttttagcaaaattcgctaccgacgctgataagagcgatgctgtaggattgaaaacaaccgacgctattaagtatcctatgacgtcggttattaactaggaaccgacgccataagagtaaatatagcgtcggttcctagctaataaccgacgccatatatactcgtaggaaccgacgccaaaagccataaagggttattttttttcagttaatttaatttaatttaatttatttaaattatatntttattaatttatatattattttatttaatttaaatttaaattagatat

SEQ ID NO: 79590 - DNA, 1997 bp, Cannabis sativa
taacaaagtttataacatttttttttaattataactaaaacgtgtaaatttatgacaatttacacttttgtaaataatatctacaatggatattttcataaatacctcaaaataataaaaaaattacaaaaaacataatcgatagtttttttttttaatatttttacaaattaaacatttttatatatataaaaatataaatagttattttcctgttattttcacaacaatattatgttgttttatatatttatattgtatattgtttacaagttgctttcttgagcttctataaaaatataatttaactaaaaaaattacaaaaaaagtaaaaaaaaaagtctaaaaaaatgtacaaaacaaatacaagtttaagtattttgtgttaaaaattttatttttatataaaaaatggcaattctataaaatttttgtatctttttgtatataagaaaaactagaaaacaattagccgctcttcgcgcaattgttttaatttatttcttaaaaaacttatattttataaaatgaaaaataatatttattcgtgcatatgtatttatattttcaataaaattgatttctataattaattaattttattttaaacaaattaaaagaaaaattatattttatgtaactttttcagaatatttcttgaatgaaaattgattcaattaatttcaacaattgtaattttaaattaaaaattaataattgaaaaaataatagaatttcaaattaaagaaatgtgaaaatctgtaaatatttttttcctttaaaaatgagaaattagttcttaatattttttaattaattaatatcgattaaataaatgaaaataagtcaaagggcggttgattttaaaaaatataagataaaaaaattaatgaatataataaaaatgataataaatatttaaaaaaaattaattttaatatataaaaaaattgattgatgtgttacgtgtttactggtggaacctttatggatttaattgtctaattttgtgagctctttatttgagacctttcggctttgtgacttttaataaaattattttattttttttatatgggtgtactcttaacgtgtattaaatgagtaatattagaaaattttaagtttttatgattaatttttctatttaagtagaaaattttctcatttttacattatatgagttgagattggtccattcactgaaaaaaataataaaatttttttttttggaaaaaaggcaataaaaaaagttgaattcgactttaatattttacatataaacatattttttatatactgttaaaaagagatatttttttatattttttttgtaattaagtacctaagttaagcataaaaatttaaatttctctttttattattccatatatatattgaaacatgagaataatttcataaactaatttttttttgggaaaaaactaaaaattatttaaaaaagtctttattttaaaaagtagaatacatatttggatctggctcagtaacactataaatattaaaacataactagttaattactcaaattaatagagtcattatcattataaatagtatttatttttttccttttccgtcatcattttcattttcattgttgaagtttcctttcactgatcaaataagcattttctcataatacatcatttctacacatctttactctctagtcatccaaaaccgataccaccaccgtatgtattccctcaatataattataataattaaaataattattaacccccatgattgtattgttttatagcatgtgtttttattacttattttgccaccaactttttcttgcttatatagggcattacttcatattaaaaaaaacaaaaaaactcattgacaaaatcaaataagatctagaaaagaaaatcaaattggaccaagactaatcaaagtgaattcaaattataaaatacatatgcataacatggtccaagaataaataattaaataatttt

SEQ ID NO: 79591 - DNA, 3361 bp, Cannabis sativa
tgaccatggttctttaaccctggtttagggtgaaaaagctttaactccaaaaactttttttatacgaacagaaatttgattttttattttttttttctagaaaattttaaaatttagaactgtgataaaaatatttaaaaaataaaataataaaggctaacagaattttagagaaacatttatgcgaaggcctatgataatggaactggagaagcaacagtagactttttccaaagtttaagcctatacagcttgtatccagttgctccagacctccagtataataataattgcaaacgttgaaaatatgagtggaaaaaaattaatacctttcgaattttaaggagtagaatgaaatatatctttaataatttgataaccaataagattataagtctcaaattttgaagccaaaccccaataatagaataaatttatcaagaatgtctttaaactaggatttattttatatgtatgctcatgcagaaaaccttggaagttgatcaactaaaaaatgcttacagttgaaagttctcgtgacatattttgggagaattacttaggcaatagaattaagagattaatcaccaacaattggcagaatgatttaatttcaattacacattcttaataagatagacaatggtatcgtaattatatttaatcatcgaatgtaatcttattaaatttcaacgttccaaaccctgaattgattccacacattcttgcataatcacagatactatacgggaccagctaaaaactcacttttcacaatagaagaaagaaaagtatacgaatagtatacaagccataaaggaaagactacatccttcttaaattatctaacctcgcctgtaaatcactgtctatgccaccgtcatcgggccccgctgctgctgtttccgcttgagcaactttggccttagcagctggtgcagcaacagttgctgagggtgcattaacaagctgcacattgtaataagaataacatcatttttggtacattcaaatttcagtaacaacatacagatacaccggtgacagattgtttgttgtctataaaatgaaagataatagttaaaaaaatacctcttggttaacatcaataccaatctcatcgagcacctggtttaccaactcatcagtttcctcctcttcctcatccccttccaaagcatcatcgattgcatcagccatcacttcagatactaactccatcttctcattctgcctctcaaactcttgcataattttctgtagtgatggcaggttcatttgtctattcatttggcccattgcctttgtcacacctttcattgcctctcccattgcttgtgtggatttcaaagtctgaaaatagaagtacatgtattaatcaacagttaagaagttaacaaaagctatacctcaaggaccaataagaaaacagatattgcattatttagattatgctcaaattccaattgacagtactcttactattcttcaccagttagaaattagcaatatagggtcttatattcacagttcagaactaccggagaaaataattctttcgatgtttgtcacagtttaaattaataaaattcacaaactaaatattacctggattctaagagatactccctgaagttgtgatttgagcttgtaaaacttttcaatctgatgtcttgttctaaccaggtcttttgccataactttcacagctccctgaaacaaaactaaactgcatcaaaataaagttggatgtccgaagattaaaaatgtctccatgaaacctaaaatgaataagatccacaaagggccggttgaaatcacacaccatttgcccttgcttagcacttttctttatctcttgaattaatttcttctcttggttttgaagaccttgtctctccctttctatttctctgattgatttgtccagcattctcttgttttcccgcagaagttctgacattataatcatatatgtttaatctcagcttaagaataaatacttttcacagagtatttatatactcataataatgccaattctagattaaacatttgggtgttcaggaaacaatatataataaaacataaaacacatatagaatgcttcagactcaacaagaccaactaagatcctcaagcataggcatggacattaaaaactccattctctagctgccaatacaagtaaacgttgtggcacaatgcaatgcattgaggaaaatccacattaacatataaactaaggcttcttgagaaaaattaacaaataaaatggatgctaggtctcaattctacgacaactacagtccaattgaggaaagaacaaaaaaaatacaatttagtttttaacaacaaaccatcatcttagcgtgaaaagccctaaacacccaagtgaaccatttagcagaactcaaagtaagaataaaaatttacatatccataacggaagtaaaattattttccgtgctcgtctagtagactactcccaatcaaattccaacaaaaccatatacaagaatctaaacctaaatcaaataataattcacttcaacgattcatctcaattatcacaggataaacaaaaacttaacgatttgaagaaataaaaccctagcaataaaaaaaccgtggtccaatagtaaaatcacagaactaacctgcgggagtttttcgctttccaaagagaaaactcatgacgctagatcaaacagtcgaaaaacaatctgaattagaaactcagctgggatcggattggatcgagtagtcgtcttctatctggtttgtacagaaatacaaagaaagaaagaaaggaggaaaggttttgatcgtcccaactcttacgcgttgtatccaactggttgaggaatagaatcaacgacgaaccctctaccttaacacgtggcgtgcatctggtaggtagggcccatctgatcgttaaacttagcgcgctcactctctgtttctttttgtccgtttaagcaacaagtcttagatttgggccttagaaaaatgagtgaatcctcacaatgggcctttagaaagcccagtctgcgaaaaaagatgttgttttgctctttttacagtcatgataacttaccgttacctagaagtatttgaattggtaaacttattgtatctcacttcttattcataacatttatgtaggttcttcaaaatgttatgttttaattttgttttcgtaataaaaaagtaagaattcattcgaaatacacacattgaaaaagttaaaatatatttatcgtacaacaaacgttacccaaagaaaatattattctctctgttagaaatggggagggagagagggaacagcatataaataaacaaaatcagtgaaaat

SEQ ID NO: 79592 - DNA, 2014 bp, Cannabis sativa
  modified_base (1947)..(1952): a, c, t, g, unknown or other
tgtataaaaatgtttaatttaatgggggccggcccggcccaaagtatttttgtaattttttttccttttttgtatttttttgcttttttccctaatatataccattttttagagagaaaaagaagattaaaagttcttaaaaaggaataaccaagagttaatgttaaataaataaaagagaaactcttcccatttgtaaaataaaataaaaaaatttgatgcaatatttacatttacgaaagttggaaaaaattatttattttatattatacaaccatgagttgaggaaatccgagcgacggatgtggagataacggagacaaaggcggaacactgaaaacccctttaaggtcagagtcccaagccgtccaatttgacggcgttaacggaatatccctcaagtaactgagagagttatcctccgcttctgtgaactttatcttcttctctatcacaactggtttcgcttctgtttcttcctcttcttgacggcgtcgtttcatctcaataaccttaacggtaacattctcctctctctcgtcacacttgccagcttccaatggaaaattaagtatggcttttgagccacgcagcttaaaggcggctctgtcataggctttagcggcttcaatagcggtttcaaatgtacccagccaaaccctggagccttttcggttcgggtcacggatctcggctgcgaacttgccccacggcctttgccggacccctcgataatgcttcttctcctcatgaaccacggccggtttctgaacctgaacagccggcttcggagccccgaattggatccattgcgctggggtcttggccgggagcgaaatcttcaacgacctttttcggctcgagggagagctcgaatcggtcgatttaggattagaaatttggggtttcgactcgaattcaaatgaattgcagctcgcttcagagtttgaacgtctgagatcaaaaactcgaggcttcgattcgaattcaaacgaattattattactattgttattattattatcattactcatatttaaaattttaggggttgtgagatcgaccacttcaggtttcgattcaaacccagagaaatcagagcccaagtaatcggagacttggatcagagattcagatgaagaagttgaacaatcaccaaaagggaagttactcaaaggagaagaaaggtcaccaagaagatgttgtttaatgaactgaagctttgaaaattcgtcgatgttagccatggatgatgaaactgacctcaaactgttatttttttctagagagagagaatgtgaaaatgaattggtttgattgagtggaagataagagtgaagaaaggggtatttatagagagagaaggcgcgagtttcatgggataaggaaggagagtgagaggaagtatcgttgcttgcacacttttcaaagagtcatatcaacttttactaaatactgtcactttcgtaattatttcttgctttgttgtcccttgcaccgttggattaaattcaaaattatacatctacggctgaaatttgattctttggatatggtaataagatgacataatagtggtcagtcattcattttgctactgtagtgttatggttcggcgttgcttcctaaatatccacgtttgggattaaaggctttaaatattacttaaatagtcaaatccttagaatcggtaaaaacaaattgtctggttttgacaaatcttgtacgtaataatacattttttaaacgaaaaaatgttaattccaaattctttatttatttattactgtagaactttatctttgtattattttattaatttttaaaatttttacatcaaaaattcaatttactcaatttattacaaaaaaatccctacacgcttatatcatcatttttaccttttctatttgttttattacaattataccacttacacatcaattnnnnnnatgcagccacacacgtcattgattgatgacttatatcaatcacaccttacatcattcactta

SEQ ID NO: 79593 - DNA, 4724 bp, Cannabis sativa
  modified_base (1833)..(1834): a, c, t, g, unknown or other
ttctttcttttcgttctgtttacatggtatcagagcttcctcttttttttttcttttctttcttcttctgatttcttcatcctcgttcactcaagctttcgttcatggctgaaaatggaggttcgtctcaaaattctagtgttaatcttcctcgctccgctcctgtaactttctctcattccctttcggttagattagatgagcacaattatcttccttggaagcatcaagtctttgcagccataaaaggaagtcgacttcaacatcatcttgattccactcgaactcctcccaaatttcgctccaatgaagatcgacagaacaatcggacctctccagaatacgaaagttgggatcaacaagatagcatattggtttcttggttactttcatccatgtccgaaaagattctcacgaggatggttggttgtgaatctgctgcacagatctgggaaactcttcgagtctattatacagcattgaacagggcaaacattggcaagtacaaaactcaactaaggaactcaaagatgcagggttctctcaacgattttctattaaagatcaagagccttgttgatcttcttgcttccattggtcatccaatgtcagctcaagatcatattgaggcaatctttaatggactttcaagtgaatacaatgtgtttgtgacctcggtaaataccagacttgatacttacacagttgcaaaaatagaggctttgctcatggctcaagaagtcagacttgaaaaagattctactgagctggatatggccaaaccagaagccaatttggctcacaccaagccttacacaggtggtcgaggtatgttctcaaatcctcattactcatcttccagtccttctcaatataatgccatgttcaggggttattatccacaacatggaccacctggtacatttgctgcaacccaccctccacctggttttacatccaatcacaaccatgctcaaactcgtggaccccatcctggtcgtggccaatttccacagagcaaaggaccaaatgtggctaccagaggacaatactctgcttggggacaaaagactcagtgtcaattatgtggaaaaatgggtcatacggtccaaaagtgcttctataggtttgataaaaccttcactggtccagaaacatttcaaggattctcaggcagtgcaaaccttgctgaatgctctcatctttatgcttctcctgatgttgttcaagatagcagctggtatccggattcaggggccactcatcatctcacccccaatcctcaaaatttgatctactcatctgattatgcaggagatcaacaaatacatatgggagatggatctggtcttaacatccaaaatattggtaaatcctttatcctttctccttttcattctcaacaacttgtattaaacaacttgttgcatgtgcctaatataaccaagaatttacttagtgtgtcccaatttgcccaagataactctgtttattttgaatttcatccctcttactgttgtgtcaaagatcaggtcagtcagaggaccttgctggttgggaggcttgaccaaggtctctacaaattcgattatatccagcttcaaaatcttgctaccaatagatgtactctctcaccatccgagtcttcttctgttttcaatttcaaagatcaatgtaatagtacaactataccaccaatcaattctcaattctctctttggcacaatagactagggcatcacactgccaagattgtacaaagtgctttgtcatcttgtaatatcaaaataagcaataaaactgatgtcaatttttctgatctttgtgctgcannttgtttaggcaaacatcataaatttccctttccaaattcaactactgaatacactgaacctttacaactgctgcactcagatctatggggccctgctcctatagtgtcttctagtggatacaaatactacattagttttattgatgcttattctaggcacacctggatttatatgttgagaaccaaatgtgaggccttaccaacctttatcacttttaaagcccaagttgagttacaacttggttataagattaaaaagcttcaatctgattggggtggggaatatcaagccttcacaaacctcttaaatgagcatgggattattcataagttgtcttgtcctcacacacatgaacaaaatggtgtggctgaacgcaaacatagacacatagtggaaagtgggttaacacttttagctcattcttcactacctttaaaattttgggatgaggcatatcgcactgcagtctttttaataaatagaatgcctacaccaaaattaaatcttagcacccctttagaggttctcttcaatgtcaaacctgattatcatatgctaagagtctttggttgcttatgttaccccaatcttaggccatataacaaagttaaattgaactataggtccacaccatgtgtcttccttggatatagtttgtctcacaaaggatacaaatgtttatccaaagaaggtagggtctatatctcacgtgatgtattgtttgatgaagcaatttttccttatcaaaaagctgcctttgcatctcagaattctcagtccactcctctgtcatcaggtactttatcttttcccacacatatcacaacctttggtccaatagttccccctataaccaatcaaacagtaaccaacatacatagaccacctactgttgtacctgctcctcaacccgtgccctcttctgtcaacatcatacctgtccaactccctactgctacagtaggcatgccagctgcatcacccatccctcctcagccacacaatgttcctacaacggatactataccagttgctaccacagttaatccacctactgttgcccctacttcgaatgaccagcctactatacatcccaatgcagtgcaaaatcagcatccaatgtgtacacggtccaagtcaggcataagaaaaccacgggtattaatggcttcactttaccccaaaacagtcaaagttgctatgcaaaatgaaaaatggcttaaagccatggatgttgaacatcttgctttaaaaagaaacaagacttggatccttgttaatcttcctgaaggaagagaacccataggttgcaaatgggtttatagaatcaaagaagatgaaaatggcaatgtcattcaattcaaagcaaggtttgttgcaaagggttatcatcaacaaccagggtatgattttaatgaaacttttagccctgtcatcaaaccagttaccatcagaatagtattaactattgctcttacaaaaggatgggttgtaagacaattagatgtcaataatgcttttctcaatggtgacctacatgaagagatatatatggttcaaccacctggttttgttgatcaatcagctcctcacaaagtgtgcaaactacaaaaggcaatttatggattgaagcaagccccaagggcctggtttgaaaaactatcttctgtcttgatatctcagggttttgtctcggctaaaaccgatccttctttgtttgttaagattaattcatcatatgttttgtatgtcctaatatatgttgatgatatcttaattactggatctaatgatgttcaagttaatgacttgataaccaggttacatgcctcatttgcactcaaagatcttggtgttttgaactacttccttggcattaaagctttacctacagctactggtgttttactctcacagaagaaatatattcaagaacttctctgtaaagctgaaatgcaaggagccaagactcataacactcccatgaacagtggcctaaaactatccaactatggcagtgatcctgttactgatccaaccttttatcggtcaatagtgggagcattacagtatgccacaatcacaagaccagacatagcttttagtgttaataaagtgtgtcaatatatgcataatcctcttcaatctcactgggttgctgtaaagagaattctaaggtacttggctggaactttagactatggtctcaagctgaacaaagtctccaatcttcaacttcaagcatactgtgatgcagattgggcagctgatcctgatgatagaaggtccactactggtttttgtgtcttcttggtgagaatttaatttcctggcagtccaagaagcaaccaacaatctcaaggtcttccactgaggctgagtttagaagcctagcagcagtagtttctgaacttacttgggttcaatctctgttagttgagcttcatgttcctcctacaatcactccaatggtgtggtgtgacaacataagttcagttatgcttgcctctaacccaatacttcatgctcgaacaaaacatatagagattgatctatattttgttcgagacaaggttctcaacaaacaactccaagtgcagcatgtaccaaccgaacaccagcttgctgactgtcttaccaaaccaatatcaagcagcaggttctctattcttcgcaacaaacttagtgtctcttgtccagaggacacttcgtttgaggggggctgtcaagagaacatcagttagttgttatttctgttattggttgtaactgatttggctgttataacagctcactttatttttccctatgctgtatataaatcaatgtaaccttctctaaatcaatatacagaattgcatttctttctttcttttcgttctgtttaca

SEQ ID NO: 79594 - DNA, 2192 bp, Cannabis sativa
cacagaagtacagaaattattccgttttcataacagacttcacatacacatccacatgagctatgtattttgcatttctactatttattagttactaacaataatttatgattattaaaactgatgacgtgttatgctgttggagacctatcaagtgtggctagcaagtagacattcagtaaatgtagcaattacattttttctacacatagaaatgaaaacaaaccacttaccacgaacacgtccattagatcttatatgaacatcctctggcagaaacttctcaagaatatctcgaagaacagcctgtacaaagatcaaagtggtaaaaattttgacaataaaaattaaatttgtctacaactttcaattgaaggtttcatctacaaaagaagaaattgtagaagtcattaaatggaaatattatttgcttttctaaaggacttaaactatctgcattttaatcattatatattaagatatttaagaaaataatacgaaatcctgttaagaattaatgagtcaaataacagacaaattggattacagtaatactattcaaaaataaatcaccagaacattaatgtaggaaagataacgagaaactagtgtgtgtaacgttatagaggtatataccccaagccgaaacgctgtccctttgctccgacaatcttcagccagtatcttagtagctttcaatgcctcatccatactagctccagaagcaatcaccgcacaaacaatggccccagctgaggaaccagctaatggagtgctttcctggatcaaaagcatagcttgatatgagaaaaagtcataattcaaaatcttgaaagaaaaaataaaacttttattagaaattagagaggggaaagaggtaagtaaaatacgcatgcattgatgtacaccacattgttaaccacatgaaagagggtatcaccacttcaagcacacaaaccagtgacaaacatcatgactgggaccactgggtttccaataaaaaattacactaatggttttatcaaatgctcacactctccaagtaataagaggaaatggatagttggatacactattttaacatggcaattcttaagtgaataacaaaataattactgattaatgattacataacatattctgcaagaaatcatcaaaaatgattaacaaaatcaccaaaatccaaatccaatttttcacagcagagtctaaacttccaatacgcacaaatcaaaactaaagccagttacaacaaatgcgttgagacaataattgtatagagtaaaagatctcaagcacaatgagcatcaacgaaaagaaaattctaacagcaatgtaatgatatatacttggcatagacagacaaaacaaaacctaaacaaaacatcataaattttaaacgaatctcaaatagataaaagagctgtcgaaaacaaaaataaacaaaaagaaaattaaaagggtatccgctgatacaaactcattatcccctaaaatgtcagagacattaagaaattttttgtgaaaataaagctcaaagaaattcagaaacttgttgactatattgagaaaaagaatcaatttttttggtacgaaaatgcgaaattcagtcgaggtaaacaccaaaagagaaaaaccaccttaatgtacccattctctatgagaaactgagcaaccccaaggtggtaagggaagagaagtcctgcggcggagaagctaaacccgggactggtaaccacgcggcgttgcttctcagcctcgacgtccatcacgctctgctcccacacaacatcaggctcaatttcatcctctatgaccgccccaatcctctccttcttactccgaaccacactgccatagttttcgaacatagcaaccgaggccagctcctcgccatttggtccacggctgggcttgttaatgaggcgcgaagccaatcccaagaagagatccccggtggcgacagcaaaggactttctgacaggcggcggcggaggcaatggtgacggagaaggcgatgactcatcggtgccgggggtcggggatgggttggggttggaagcagagcggaaggtcagggtacgtggggaggtgcgagaagggagggtgagggtgtgactgtgagtgaatttagggttaggattgtgggaagagaaaagagagtgagagtgaaactgaaggagagatgagag

SEQ ID NO: 79595 - DNA, 1220 bp, Cannabis sativa
cctatttgtacaattttaaaaaactcagagtctaatttgttatttaacaaaataaaagatccatttaataacttttacaaaatacaaaatccaaaatagtattcacccttattatttatagatgaattataatatgataaattgattaatataggtgaagttcttggaggtaagtcatttcctccaccctatttagctccaaattcagaagatgaagcagttaagaggggaattaattatgcatctggagcctcaggaatactcgaccaaactggacaattatttgtaagccacccattttaattcctaaaaaaaattaattatataccattttattttattttttattataatatatatctcatatatttttttactaattacataataactatatatatatatatatatatgtatatagattggaagagtgccattgcgtgaacaagtgaagtattttgaggaaactaaaatgcaaatggtgaataaaataggagacaatcgtaccaataatttattgaaaaaggcaatattttcaataacaattgggtccaatgatgtactcaattatttccaaccatcaataccattttttggtcatcatcaccataacagcatcacttcactcatcttccaagatttcatgttatctaacttgactctacaattaaaggtacaatctttattattaattatttacctacagtttttcgagctacgtggcactagactgagtcaaatttttatgtatagagattgcaggagttgggaggtagaaaatttgtagtggttggaattggaccattaggatgtataccatttattcgagcccttaatttattgccaagtggaaaatgttctgaagaagtgaatgaattgattaaagggtacaataataaactaaatggagtacttgatcagcttaacaaggatttggctccacaaactatctttgtctatgcaaattcctatgatatcttcctcaatattattcaaaatcatcaacattacggtaattaattattcttattatcattaatttacttatataaataaattatgggcagtgacaaaaaaaaaaaaatgaatgtacatctatgctctatttttattttcattttttatgtgatagtttatatagtaattattgaagatattttataaattttgtataagttcaaaatactttaccgttgccaaaatattattatttaaatagt

SEQ ID NO: 79596 - DNA, 1853 bp, Cannabis sativa
tttgtaaaattaataaattatcttgtagttgtaactacactacaaagagaaaaaaaaaacccttgtaattctaaattaaattatacaatatgtactgcaaaatattaaaattacatataaaagtaattaaaaaaatcattactcaataatttttcatttatatataaatgagaatgaagatgtgagatgaataactagaaataattgtttggcatattgatcatctttaattatgaggtaccctaagatgtctaacacattagaatatcgtcattgcatgtgatttagtatcaagtcttttataattaattaaaattaaaatatgtgtgagactcgatatttatttgaacaacaaattcacatctaatattaaagtttttattagtattcttcacatatatatatatgtagtatatataaaaggaggaaaagcacattctaactataatagaatatatagttaatattaaagctctctcctaaactaagtcatgtataataatctaatttatagtacttgtacttgcagcaatatatatatatataagtataattatgtgagaccatttgaatgaaagtacttataaaattgtgctctgatatggtaacatgcaaagaactaggaatatatgtgcatgcatgcatgttgatgaggatcaatgttttttcaaattttcaaatgttgacaaacgatattatgctattcataacctaatataatattgaattaaacataaatttatatatacatacacacatatatatacttaaaacagttgtctctctttctctctcttgcctttttctatctcaaaggaaagtgttgacaaattaaattcatatacttaaataccactcctaatgataacaagctagtattataaatatatgataatattgccaatgctaattattagtagcaaacatattaagatttacccatcacatgagtaaatcctctcaattatactatttttccctttcctcttcttgaaatcttgatcatctatatttatctatatgtttcttgctatacctttacacttcttatcatgcatgaagagagagagagagagttattaagagtaaaatgcaagcaaaggcacacaattctagagagagagagagatgtaaattggtggtggtggggtattatttatttatgtgataagtctataaaactcttttggtgcatgacaaaacatggggcctacccatcttctccacccaaaagaaaatgaagcacttttttttttttttctacttttttctttttggttaggaagggtccccaagatggatatggggctggaaaaagtgattttccatttcagattatatattgaaagcttttttttttttgggtgggtgcaaaaaatatgataaattgagttgtgtacattggaacatggttcagtggacctgatcgacccaacaatggtagggtcttatagtgcttctcttaaccctaattttaatttgtgttctagctttctcttcatcttttatcgatccaaaaaaaaagtaaaagaaaaaagtaaaaaataaaatgtaagaagggcttcttcatcatcataacatgtatagctaaggagacaagaaaacagcaagtgagttttgtgtagccattgactcctcctaattctgcctccatcataagcccattaattatattatattatattatatatatatatttgtatgtatgagagagagatgtatgaactttgaattgtgctatatcaagccttggatgctttcaattgtgaaacccttttgtgtaaaaatgtcaaccttgtgaaatctaaaagtcaatagctagcttttatctctataatctttttcttttctct

SEQ ID NO: 79597 - DNA, 2483 bp, Cannabis sativa
  modified_base (1758)..(1767): a, c, t, g, unknown or other
aaaaaaaaaaaaagctactgtctaaaaaaaaaaaaaaaaaaaaaaagccaggagcaagaaactattaatctaagactatatgatcagacaaaaacaattatataaaattcatttaatacgctatattagatcgtattatattaataatattataattaaattattttgtatattatattttttatataatattatgttaaattttataatttatattaaaatattatatatttatgtgatatgagttaataacaaatatactaatatataaaaatatgacaaaataattaggaaatttgaaagaccaagagagcattttgtggtgttcgtgcggtgagagttgccttttaggcacacgaagttgaagattgaaactcataataatcattaataccataaatatggttgggttgggtgagaaacattttaaaaaacaaacacactatttgattttctctaaaactagtagttgaagatgccccctttgaaaaagaagaacaaaaaattatagccattatttatttacatatttggaaccttatacaatataaatgtataaatataattgaacccttccaaaggcagggattttggattctccaaatatgaccatagccatgtgcaaggataccccatcttccctttttcttttatttactaattataaaaatggccaaaacaaacagccaaaatgtctcctgcctaattactttctttcccatatttgagctccatgagcatctcacctcaccctattaatattcatattaattttttcttattcgggagatcaagttgaagatcgacacgtggtagtaaagtaagctcattatccgattatcacacattaaagaaatccataacttaaaattaaaacaaatctagtttggtcaatatggggttagagccaaaggggtccacgtgcatgttatggaaaatggggtacatcccccccaatcctttacattagaaattagtaccctacttgttaggatttaaggatcataacatttatttttcattgttcaatgttttttaaccaaacatatctccaatcaaatcttacgacattataaactctcttctattattattaaccaaatttgcctaatttgttttcttcctcttcaaattaattttgctattcggacaaatttggatgaagatttggagaatatttgcaggatttaagggaagggtaaatctgagaattcatatttatttgtttataatttaataattaataaaaaaatatatcttgtatatcatctacggctacgtacagaacaaagcagagcattgtatttgttttgtattgtagttgaatttcgagtttcgagactaggggacccaactgtaaatgatgacatggcaacaattctatggacgggttaaagttatttgcatggtaatccaacactatcgttatcccacgtcagtggtagtgtctgacgtggcaccgacctttggcattggcattcgggagaggcatgccaagtgggtccttgtttttgaggactgtatccacttactttgttgattgggccacataagcacgtagaaacaaacgaacaagtagttgggtgggagttatttttaaattaataatttctcggtataaatatttaaatttaatttttaattataaataaatagttaagtttaatttttaacaataataatatttaagttatatttttggaactttataaggaactcaagtcatcatccaagtattatttttttattggtatattnnnnnnnnnntttttaaaaaaaataaaaattcatgatatgaactaatcaaggattgtcacatgacaatttacttaatatttacctacagagtttcagaaatataatttcagtattattaccgctaaaaattaaatttaggtatttatttgcaactgggagttaagtatttatatcgcaaattactcttttagaattgagaaaggctaattgtgggtgtaatatcgttattagtaaaatttaatatcgagtctcagtacttattttaatttaataaagactataaataagcgagcttggcacacttgggctaaaacaaactgctaacttatcaaagttgacaaattgacttgaagttgctccataacaacttatatcagatatcactaagtcagttgtttctactaatcctaactgtttctcctatttatcctcattcggttatttcagtttagatgtgtcagataggttagttaatttagttgagtcggttggttcttgtcctggtgctttgtatttgttaaattgggttgatgtgtcacccctgcttttcctcggtatatatagccttgtaagttgttcttttccattcattcaataatacaatttcattctgccttttctcttttcgcattatggtatcagagcgggaaaggaatgctttcccttgatcgagcatgtcctttcgcaacctctcgccgtgttcccatctccggcgacgcccttgt

SEQ ID NO: 79598 - DNA, 4077 bp, Cannabis sativa
aaaaaaaaaaaaaacaaaatcccacaatttatttattttgttacctaacatttcctttttattttttattttgaaaggaatgttacttaacattaaaattgaattgtattttttcccaccaactaatgaacatccttaagtccaaacagtccctaacaaattacaatcactatcatgtaaattcattgatgctactaataattattttattcatcatttcttacctactattttcaaatttagaataatgcaaaaaatattaaataaaagaagacaagttcttgggtgaggttattttttattgcaaaagtgtgcactcttgaaaaatgagatgattgtaccaataaactttttttattattatttttttatttttgatatttgaatagatttttttatttaatttttttgttaaatcatactttgtaaatatttaacatatttagtaaaatttttaaaattttaaaataaattatcatgctcaaaataaagttcaagtactttattctatgcatacttcttttattttatagtgtgaaatataatgtttgaaatatattttttatgttataaattagtttacatttattataaattcaaaagatgtcttaaacaattaaatgataaatcaatcatataaaaaaaattaaattataaatattcatatatcatattggtgtacttttttttattcatgtatataaaaaaaatattaaattataatttttttaggttaattaagattttttacataaattttgaaattaattgatttatgaatttttgtctaattttattattgtgacaattgcttaaattatactctgaatacatattttactaatgtgatgattgttattataaaatcattattttttttaatatatcatatttttgagctaatctatttatatttatatattgtagttttaaatttattgtattgtatcatattatatttaagttcatactttctatatcatatcatatcgtacttaaacacatattattttttatatcgaatggtgctcgtgtctctggtactcgtgctcgtcaaaaaatccaacccatatccagagcactatcccaacttaaaataagtaccaaatagtaccacatttttttatcgagaaaaagaaaataaagagaaaaagcaacaaataattataattttttagttgaagatgttggattttccaaccaacacgtcagcctaaattaacgccacgtgttacgctcagaagcaaagaagcaaatttcagacccaactctcttctctagcgatcaaaatcccgaaaatacccttgagcataagatgatgatccgtttctgcatctgatgcggtttttgtcttcgtttctcacaaaggtatattctctccctttggtttcgattctctctctctacaaaatcgccaaccttaaatgcctctcttatttctctacgttttctcccacttcttcgtaccactcctataatctctcaggtgattcaattttttcttttatcctttcgaattatataaatttttgtgtatttgacagtttttgtttggtgaaatttttcgcggcttcatttccattgtttttgttgatgatttcgtaatttggttttgttgatttgatgaatgaaggcatttttgattttaagtcaatgtgtggttgtttttttcgttgaatttttagattttgagaggtagtttgatgtaaagttcggtttttttctgttgaatcgaagttatttggggcattggttattccgatttgtttttaattgaaagctccctctctctatctctctctatttatagaactaagcagtacatggaagaacatcaatctgtttaatatacgttgtagtacatacatagagcttggggtcttatcttatgtagtggaatccatttttagtagttttattattacattgatagcattgttcacagttacacatacattgacattgtcacattgcttacttcaatttgttgtgttataatcacagttgtggtttattacctgcttattgctataaagaagatatcaatcaaatataacattccaatttaagggttgtgtgcgtgtgtgggaggtattagagtgtcctacgttggacccttggtttaaatttttagtaggaggattgtggtttgattccaaagatgggaatgtaatagttttaattgggttaagctttttattttattatatgtattactaacaaaagttctgttgtcattgctttaaccttctaatcagatatattgttttcttatgttgatgactatgaatattttgatgattccatggtatgttggtttattattagttgttagttgtcatcataactttttaactgaacaagaacttttagagttttttactttgtatttttcatggtacgtgaatggtcggggctttcaatcattgctgaaccttttttttttcctttctgcatagctggcgatgatggtcgtgctactttagcttgttgaaaacatcatgcatgtgtactcgtgatctttgatttggaatggaaaagcaagtctaacatggaatagacatattcgactcagtttaaagatatatactttaataggattttttagattattgtcatctacgatagtgttctgtgccggaatatttatttgtcaagtaccggaagtcgtccctatataattatggaggttctagaccgaccccaagggcaaaagcagatgttaggtcgcaaaattgtctctagtgcgtctcaaaaagatatatggcatgctgtggaagagggctccttggctgatgtggatactgcattagcactgatgaagaagaatggggttaatattaatgcaagaagtgtatttggactaactcctcttcatattgcgacttggagaaatcatattcccatcgttaaaaggcttcttgcagctggtgctgattcagatgctagggtttgtcactttgcccaatggattacattattgcttatttatcttaaagggaatgtgtagatttcttttgctttagtaaaggtatcacatttattgggatgtcggtattacatggagaacttgtaaattggatagttttgcgggaaggtgtcttgtcttatgcaatatgtcttatcacatatttcaggatggggagtcaggatggagtagccttcaccgggcactccattttggtcatctagctgtggcaagtgtccttctgcagtctggggcttctattactttggaggattctaaatctcgaataccagttgatctcttatctgggcctttatcacaggttgtcggaagtgggcgtaattcaggcatgctttaccatcctttgcatgttttaagggatattactgttttgtttctgaatactattgtgaataaatcaagttgttgtcattgtgttcagtagtgactgaggtcttcagttggggaagtggtgttaactatcaacttggaactggaaatgcacatctacagaagttgccttgcaaggttgactcgcttcatgactcactgatcaagctggtttctgcttccaagtttcatagtgttgcagtgactgctcgaggtgaagtcttcacttggggatttggtagagggggccggcttgggcaacccgactttgatatacacaggtagatgatgcttatacattgtttgtatatgctattagtttactgataatgtattgttcatttggttctgtcattcaatgatgtagtaggtcacactatccattggttgtactggaagtatttgaactatgtccctcttgtctttcacttttctttccatgtatatataattgtaacaaaatcaatctggaatttgttcttatatacaacatgttgatgcatgaacaatgttcactgtgtgatttttttatttgttggaataaaggtgaatgtgtaattattctgacttgtacacggaagaatctttgatagaaacaaacctaattttattttcttactaaattctatataatttgatgtagattgtcagccatatgctattgttgaggttaaagaaagtaatgtctgaaattttaagctgtggctgtttacctttct

SEQ ID NO: 79599 - DNA, 4453 bp, Cannabis sativa
tctttttttttttttccttttcttatatatagttaagaaaacatttaagttaaagtgtcatttttgttctcttattgtatgacatttctcaatgttttattgtaattttttaacaaaaatataaaatttattaggtattgttttgtgtttgtaaaataatttaaaattgtgatattcatatttataatttttttttttcaagattgaaattgaattgtttttctacaatgaccaaattttataaatctattaatgaaagattgagataattaattttggaattgacagaaatatataaggaataaagttatgtcccacatagaatactgagtttaaaattcaaattcaagtgtactatttttatttaataaccatatattaatttaataaaatatattcaatgtattaaagctaaagcgtaaactaatttatgtaaacattatattaagcacatatttagtaatttatttatttttaataatatattcaattgtgatcctatgtatacttttattcattaattattaatattaattaactaataacttcaattaaataatatttatttaatttcgacttaaaatctaaataataaattaataattactaaatatataacatataaattttcacaaataaaacatcactcttgtacaaataaattaacaattttagtatttataaaaataatacttatatctaaatcaacaattttattatttatagaagtaataaattataaggaattttaatttatacttttataaatgaaaaaacaacttttataaaaataaaaacaatataatttcaaaataaaattacagaacttcaaaataaaaacagttttataaaaataaaaatagtataaaaaatgtaaaaaataaaaaaataataataaaaaatatcttatacattataattctcctaaattaaattatataatgggagttggtagtgctaataaaaaaaaataataagtttgtttacactccaactccaacaacactaaataatttatctcaaaaaaaaaaaacaacactaaataatttattgaggttttaatttatattatctttcttaacctaaactaaactttttttaaaaagataaaaaataaataaactaaaaaataataatatctatttatatatatatatatatatgatttccccaaatagaacagagcaaatcaactgaactgatttgaaaaaccctaatttagggcattcagaattcgaattcaataaccttaagaacgaagaagaagaagacctacgaattcatcaattccatccatggggaatagaaaagagcgtcgtcgcgcagctatgtccaacactggccgcagagtcaagctcgacctctttgcggaaccctctggtacatattctatatctatatacacacacctatattgattttatatgtttaaacgtatatgaatgagaaacccctttggaaaatttgaattgaatctcttaaagattcaatttttaactagtttttttatttacgatttgattggctgaataggggatttgggtggctccaacaatgcacataatgatgataagaatgatgatgatggagttggagttggagataacaaacatggtgctgggttacccaattcaccatcttcttcaggtgggttccgtgtcactttgtagagtgggacatatcacatttgtgctctctcaacatttatgttggtgatgaaaatttggaaacttttgtagaattctacaatacaatacaatacaaggacacacattgttatgttgttttgccacaagaatttttgttttcttcagacttgtactacaatactactctaggtggctttggctatggtcttgagctgagatcatatacactgtcagatcagatcagatcaggtccgggccctgccactgttgaatttgtgtcctttttggcagcatcaaagcattttggagaattctgctgggaattttttatatcggttcgtatgtctcttgctttcatttggttttgttcgtggctgactctctgttttcgtgtgtcacaggttgcttatgatgtgatgagtaaatgctgaaatcattttttatttcttaatttagaaatactaggaaactttggttgtcatagtatttgaaactgtgtcacgaatttaatcgaatataactgtgtgtatggtatatgtagtgtctcatttgttagtgtttgttttgtcttcaggtcagcaaccggaaaatccattgctcttactggggcagtatagtgacgatgatgatcgggaggatgagaaacttgatgaggctgctgtggaaagttccttggttgaaaataacaatgaggtaatatagcgaatttaacgaatgactggcttagttttcctgtttcagttcaatatgacttacctcattctctctcttactataaacaggttaagggatcgaatggagaaggttgtttagatatggatgctaacaaacatgaatctgataaaacctctagctctcttgatgttaaccacaacctcgacgacacagatagaaaagaaagtgatgatacagcctcgactgccttaggcaagggtgatacagcctcaactgccttaggaaaggatttggaaactggacagatctttgcccctgtaacatctgatttacaaccaagtggagatgtgagttctggttggcagatggtactgcatgaggaaagtaatcggtattattattggaacacaataactggagaaacctcatgggaaataccgggagtattggctcaggcatctgagttggccaataatcatgcatcggccatcactaatgaaagaaccgaaaatgcttttgttggtatgcatgaccccagcttgagtataggtccgacatttgatggtgtttcagctgcaacacatattgaaggttcacaactggttgattggagtgtagcaaagaatgaggctcagaatgatacaaattgtggtaatgatgtcgtaaatgcttcatctgtcaatgatactttaggtgaaggtagttctatgaaagatgtttatgacaagttggtatatggtatgatggacactgaaggtcatggttctggaatggacctttctacttctcttatcgaacgcagtgagtctttgatagagaaatttaagacagttaaagggtaagctttgttcatactgtgaatgccctttgttcttcaatattgtaatgtttttttccttatatattttcgtgttttctaattggtaagtatcattttcaggtctgacagcaaaatgcaaagtattgactgcatctccaggtgtattttggaagttgagattagactttctgatattaaagcactttcatcttttggttcttctctgcatgaattttgggtacattctgaaagacgaattaaacaactcgaggattatattagtggtgaactttccaatatcagtacgcaaacacagattgataacaagattcaagaaagctctgaagctgatatcggtacacatacacatcttgatgacaagattgaagaaagctccgaagctgatgtatctacaatggttaacacatcagcaatatcatctaaagatcacgatgctacaaatgccattacttgcgtacatgtagctactactactgatgaacaagtaaataatggggcagcctgtcctgaggaattaaatccgaagcaagggtcacttgctgcagaagatgacgacatggatgttgacatggaggttgatgatgcttctgcaggcaatactgccactgtcgatgcatcagttgtgaaggagtctgccgtgcaaccaattcagcagaccattcagcctgcagggtacacatctctagtcccaggcgatgtgtttagtgttccacctcccccagatgaagagtggattcccccacctccaccagataacgagcaaattcctccacccccaccagacgagccacctctgcccatatatcctttacctccatcatatcccgagacagcgccaactccatatgcggaacaatacaatttatcttatccaaactccaattatgaatattacgggcaagcagctacagaagtcccgggcagtaacttttatgggcaggcagtggcaccagtctattacgatgctgttcctgttccaaatacatatgctgaaactcctcaaatcccagctgttgcttattatgattacgattctagtgttcctcctgcccctggggttagtagtgtagagtcctctcaacttcccagggagcctgctttgattggctatggaactctcgtttctaatcatgttggatctatgcattccttagttgaagcaaacggcaattcattgccatctgcagatgatagcaacagctctgctgttgttggtgagattggtatggcatctctggaggttccttccactaaagcttccaccgaagctcccattgtttctgcaaaa

SEQ ID NO: 79600 - DNA, 4217 bp, Cannabis sativa
ttcagttcaaatatcggaagttacctaaagtctgctttaattgcggttttctcgctcatgatagtagtatgtgtacaaagcctcgagctcatgcctaccctccggtcggaaatgctgttcctttatacggaccatggattaaagctacggtgccgataaggaattgttttgacaataaaggcccaattctgatttgtgaaggtgaccgaccgatgtcacagcagggaatttcgaatgttcaggccgatagtacggaaaaagttatcgtgcatggtactagtgatggtgtgacggccactacgtgtacgacggatacggagattcctcctacaaatcgaatgacagctgcaacaaacgaaaggaggacacctggcaagaaggttggtgggggaaatgtggaaaacgtgacccatcctatgaataaattgggtattaatcctgatgatagtaatgtgatcctaagtatgatgccccatgttgggccagtagcggcccaaatgcttgaaataccccatcaagaggtttgcaaatctagaaccccacacttacaccccgagcccattatcgttactgggcccattgaagagattgaggggctggaaaaggtggccctgtccaacgaaaaatttgagtttgggcctaatgggaacaaggacccttggttccacacaaaggacataaccactttagtggggtctggttcaagctcaaagaaacgcaaggcaacagggagtgttgcacctttgataatccagaaccaggggaatgctactgggggtcgatcattcacgatggggagtgcgcctcctcgagcaaagccaagcaattcaaagaaacccgggaatcgcaaaaaatcgtgctcaaaaaatggtggagaacaagatcagaaaatccagaaaagcaaggatatcacgggtatggccactaactccatctctgaattgggggatatgtttattgaagttaaaattgatcagaattttcaagtgggcgaggaggcggcccttatcaagccccccaccgtaccatgattgccttatcatggaattgccgaggtcttgctagacctgcggcaatccaagctcttggagtttggattaataaatggaaggtggattgtgtttttttgatggaaacaaaaattggggaagatcagatgcggcggttgtgtagaagacttcagtttgattatgggagctacattggctcgacaggcatagcagggggtttctgccttctatggaagactgggattaatatcaggattttgagcaaattcgaatcagggttctgctgcttggtttcggacaatgcaacccaaaatccctggcatctctttgctttatatggaacaccatacatggaaaaaaggaaggatttctgggacgatatggcgagttgtattaatcagtgtaatggaccctgggcagtcatgggggatttgaacgtgattctagcaaaggaagataaaatgggaggaagagcatttgcctatcgtgatggttcaattctgagaaacttcatgtttgagacagggggagttgaccttggctttagtggctgtaagtacacatggcaaaacaaaagaagcacagggcatctggttcgggagagaattgatcgggttatagtggacacgggttggatgtctctatgcccttctgggggtgtccacaatctcccgatagtgagttctgatcatggggctataattttcaattcgcatgctttcaaaccaaaaggaaaaccaccttttaggttcttcgatgcttggcttacggattcgtccagtgcggaggtcattaaagaggcttggaacgatgtgactgagaacggggatggaacgactttgaatatgaagctgataaatactcaaaaggcccttcgcaggtggagtaagaacgtttttggtgatacggaattacgacttcaacaaatgaacctggaactccaatcccttcaatccagggaagagaatgatctggatattgaagcggaaaggagggtccaacaagcaattcttgaattatggaatcgaaaagaatctatgtggaaacaacgttctcgggagatatggctaaaacagggagacaggaactcagcttttttccatgcctccactatggttcgtagaaagagaaatcatatttggaaccttaagaattcacaaggtcaactttgctcgaaggagtttgagaaggggagaattttgatggaacatttccaggaaatttacaaaactaatggtgctgatcaatttgacgggttggaggaattaattcaggcctctgtttctatggaggagaatatgatgcttgcgagcgtccctgatatggaggagatcaaatcccacgtctttagtatgcacccacttaaagctccaggtccggatgggttttcggggtgtttttaccgaaagtgctgggatgtaattggaatcgatgttgttaattgtgtgcagaagtttttctcttcaggggttttaagccatggtctgaatcacagtttcatatgcctcatccctaaatgttccaacccagatagtgtcgatcggtttcgtccgatagcactatgtaactttgtttacaaaattatagctcgaattcttgctcaaagactcagagtgatactggacagattgatagcgccaactcaatcggctttcctcccgggtagatggatagccgagtcgaccatgctaactcaagaaattataggggtcattaaaaagaagaaagggaaagggggtcttatggctcttaaggtggacatgaacaaggcttacgatcgaatggaatggcgctttcttgaaagagtccttcaactatttgggttcagttctacctttactaatctgattatgtcttgtgtcactacggtatcctatgccattctcttaaatggacggccgctcagaaagttttatccgggaaggggattgaggcaaggggatcctttgtccccttatttgtttctcatttgcaacgaagtgttttctagattgcttcatcttgaacaacacaagggtcttttacatggcattcgggtgactcgaaatgcccctgatatttcgcatcttatgtttgctgacgatgccattctcttcctcagagccaatttacatgaagtggagactcttgctcgatgtatcagtagatatgaaacctggtctggccaagtttgcagtaagccaaaatcgggcctcttgttttctagtaattgtcaatcgtggttgaaggaggagatacaaaggacactgggggttgacaaggtacttgattctgaaagacacttgggtaatcccctcctttttggacgcagcaagaggcgggacttcaattttattaagacaaaactttgtgagcgtcttgagggatggagattaaaacacttatccaaggcgggcagaatgacgttcatcaattctgttgctctttcgatcccctcttacaccatgtctacctttaaaattcctcggacatcctgtaatgagcttgactcgattgtgcgcagattctggtggacagggtctgttgattctaaacggtttttggccactaagtcctggtctgctttgtgccagccgaagcagagaggagggcttggatttcgccgatttgaagatatcaatgattctctcttatcaaaacttgcttggcaactagcttcaaatgataacagaccatggtgcgaagctatgaaggcgaaatattaccccagggagagcttttggagtgttaccgaaaagaatgttgatagtttcgtttggaagggaatcctgaatgctcgatcttgtgtagctgaaggggcatgctcagttattgtaaacggcgaaagcatcgatgtttggtggcaaccttggattccatggttggaatacgctgaatttcgtatgcttatggaaacaattagaggaagggcgccttttttacgcaatgtggcggatttgatgtaccgtaacacgagaagctggaatcatggttttttgtgctttgtctttggcaatgaaattggaactaagattgggggaattcaaattgtgaagaacggtgtagaggactttgtagtgtggaagaactcaacttcgggtcacttttctgttaagggagcgtattgggctgctcaagctggtcgttttaatgaaactaataagttgtggggttggatttggaagtccagcattcatcctcgtttgagcatgatgctttggagagttt

SEQ ID NO: 79601 - DNA, 1604 bp, Cannabis sativa
gccaataagataattggtaaacctctcttgtccactaagaaaatgcttgtgaactaaagagagaaccccaccacttgtattaaaaccaactcaacctcacattcatcaacaacaaaattctagaaaataacacaagagctcaaataatccatggctgaaagaaactaaacaaagaaaaggatggtaagaagaaaagaaaaacaagaatatattcaccattacaaagaagaaaaaaaatgaaagaaaagaaggaaagattcaatctttaagtatgatattgataatggctgcagctacttcagaaaggtcatgtagaagagtgttcttctcagccaaaggagacttgtcagaacctgaaaatgtcttctcacaagcttgggcttgcttggctgcatctgatataccatagttggcaaaaccaaagtggcctccagtcaaagcatcaatgacctgaggaagactgtatttcacaactgggatatagagttcagcacagtaagcaagagatttctctaaattttcatctggggcttgcttaagcaaagctctaatgaaatttaaagtgtcacttgcttttgagagaacagtatcaaccattatgtgggcaagtcctcttagatcagaatcagagctttctgggttggatttaagggtagagacacagagatcataatggggtgtttttttacaggtttgctcaatcaaatcattgccttcatttaaaggaagaacatagcagtaatgggatttgagtagaatgaaaagggtaatatggaaaagaagtaaggagattgaattcttcttcattctttttcttttattggatttgaaatgaaatagtttgtaagtgatgattcttaaatggcttgaagttgggtttttatataggggtttggagatcatctttagctaagaaaaatggaaacttttttatttatataaataaaatatttttataattttgttggaagtcaaatcattaggatcacatgtttgcatttggttatagtgttgttgttgtcttttgctaggtgttcttggtctggaaaattgttaaaaacatttgtttggctctcaagaaaaagaaaaggaactcaaaagaaaatcatgtgaacgaagaataaataaattatgtgacttttaatgggattattatggaccaaaaagaaaggacactaaagcaaaaccacaaatgtaaagaaatgaaaaactatgagctataaaaacacaaaaagggtaaaaaaagaatgcttcatttttttaatttttttatttgtgtggtcttataaaaatactgacaaaatggagtcttcaagaacacgtacggaactatttttagtgtttcaaagaatttctcttctttatttgcaaccaatctgtgttctcacacaatacaacattacccttgggcatttgcttaatcataacactaatgatatttgcacacacacctaagtcatttaaataaaaatgattatttaaaattacttgttaatgttaagtgtgtcaagtttgtgtttacacatgcggattattaaagtatctaatatgaggtgacacataagttaaatattaccattaaatattatgatgaccactgtata

SEQ ID NO: 79602 - DNA, 1013 bp, Cannabis sativa
ggcggaatagataatttgtttttaatttgaaataaacaaaagaaatcaaatactgaaatcaaataaatttttaggaacactggtaaaattattcttagtgaaactgtcacatttatttggaaagtataaatctgattacaaatctacatttaagtgtgtaaatgagcgatagagatcttgaattttatgatttataaatattttatagttgttggagatgttatttagacatccaagtgtttagatatgttacaaaatgacatgagagaagatttgaagcgttttggcgacgtgtaaccaaatctgaaaattgccacaaacaacatatcgtagcactttcacagcttcgtcttttggggtattttatgagttctttgagtgttgcaatatctcaagtagccaaaaatcatcccattaacctcatgaacacaataaactcaaataaagtttataacctttgttctaaaagagaatttttccctagggataagcatattttacaaggtttctatgattcaacgtacattgtatcaagtgcacaataagttattgtactgtgaattaggcaatgaatacaaagaagtcacaaatttatgaactaatacgatattgtcaaatcgaagcatatttttgtctgaataatgatatttataaaagacttggtgacaagttagtacacacgacaaagcctcataatttgggccatctgtgataacacaattctaatcttaactgtccaaatctatcatcaactattaatcatatatttattaaaaatatgttttggaaagggaatttttcataattacctcaaaaagacaaaaattatagatctacagtattttaaaacttttttatggatattttctttaataaaaatacggacattatttatacgttgttttcaaaataatgtaattttgatgttgaattgacgctacattattgttttttgtaaacaaggaaaaagaagtttcattttaggtatgtttttgtaaaattcctttttgata

SEQ ID NO: 79603 - DNA, 1477 bp, Cannabis sativa
tttatttttaaataataataaagagatttcaagataaaaaaaaaatgatcaaattttaaatccatataaaatggtacaaaatttcaaatgacacacaaaatcaatccaaataatacaatgtcagtccaaaattctaaagaggttatttacctcataaattttttaaaaaaatggtaattataccataaaattcaataatgcactaaaatctaaagccatacaaaggaggtcattcaccccttatttattaaagtatcacaaagatcatcctgaaactacgtgttacttgattcatataaaatgatacgttagttgctataactaagtgcggtcgctaaaaggtcattcatcttgaaattttttcaaattttgtaatgacaaaaaattcctaaaaatgatcatatatcaaaattcttgtattcaaatactaaaatatcatattctgaattacaagtggcttgattcttcataaaaaaaaaagtaatgtaaacaactcatttaactaaaatgattgagtttagccgcaattttaaattcagcttaatattcttaaaatttaccttaattatttaatatcatcgtaattagaattaaaatgtatttctattaaataaaagaattgtaattaaaagattattctagtcttggattgatggaatataaaatcaataaacttttataatatgaatttcacataatatgacattgtgtttaatattttaaatgtgaaatttttgctttaatataagtgtacatctttacacatctaatacaatgatagtaaaagagaggcctaaaacacaatattatgtatttaatctgtaaaaaatatagtatttaagtttatataattaaaaacatacggtattatgcggcaaatttccttgttagttattacattacattttattttaataattgacaattaaaaattgtatattagtttacaactttataaaaccatacatttgtactcaaaaagcatcttcttttcctctaccactcaagaatggacaagctaactatacaaagaatcaccccaactttcctatttctcttcatcttcatcgtcaaaaccctcgccaccgctaccaaatccgactacgaattcgatcataagggccaaattttctcgagaaacttgtctcgtaaaaagctcggcctccataaagcagagaaggtgagccacctccacttctacttccacgacgtcgttgtgggccgaaatccgaccaccctagtcgtggccgaaggaaaagcaatgaaaaattcatcgacggggttcggtttcgtggtgatgatggatgacccattgacagttgggccagagctaaggtcgaagcaagttggaagagcccaaggtatgtatgggtcggcttcacaatctgagtggggtcttttgatggttttgaactatgtttttactgaggggaagtataatgggagcactctcagtattttgggacgaaacgctgtt

SEQ ID NO: 79604 - DNA, 1942 bp, Cannabis sativa
tcgttgtagtatagtggtaagtattcccgcctgtcacgcgggtgacccgggttcgatccccggcaacggcgcttatcctcctttttagagaaaattttatttaaaaaatgtgcactacgtaactttgttccttctgcaaaacactttcgttgttgcgtaatatggaagaagacggtagccagagaacccacgccaaactccattctaattctaatcttcaaaacttcaatgtacgaccacagatttcggaccgcacaagaaaatgaagggaaaggttctattttctgataacaaagaaaatgctttccctactaaattctcctccgccggccccggcgaagtcaagccggaaaacgtttccgtcgcgtcttttcgacgacgtgcgttaagcaggactagcattcatatacttgcattggacggtgtcgttaatgtaaattcccttttcaccttagctctcttcctcggacttaattggtacccaacgttcgatccccaaaccacactcattgacgttgccgatttggcttgctctgccggctccgatgtcactgagggcctcatcacctaccacgtgtactccttcagctcattccttttctcgagcctcatcgctctgaccctgaaacaggcgattacgatcagcgaaggcagtggacctggtgatcttgagggttttcacctagggcacgtgaaccgggtggctttgagattggggatgatggtttcggctattgggtcggttttcggatgtgggtttttgatgctggctttggtggatttggttcagatcaaattggggattttggcttgtgggagtgtctatacgtttgctgcggttgttcctttggttattttggtccctgtggcgctaatcgtctatgttgctcttgtgcttcatgccttcactcgctaaaggatgtcataatgattgttgcggtgagttctgtaaaattagaagctttctttcaatatcttttttaatgcaagttattttgatattgtatatacatgtttaagttccagtgatttgaagtcaacgaataacaaagtgaaagtttagaataataataataataaaaaaaaaattgtaaatgataattggaattgattgttcttcatttgatttatgatcatcttcttggtttagaaagtaagaagttacacctaagacctggctgaattttgttaattgctattgcttattgatgactagtgccatacgtgatacagttggcttgctttggagtaaagcttatctgacactgatcagaacttgcaagaatttaattcggattaaactaaccattggaatttgatataatattaacttagtggtttagatttagaatctagtagagctgcattattttattgttcactgttgggtgatggtacattacatttaacttctctagtataatatacttattttcatcggaattgtttcatccatgggtgtgagcctgaaacagcggctggaaatgtgtttaacgcggtatatagtatattatatactaaacatagtagaggtttaagtaggtcaaatagagcttctaagtcaaaatgcataaactttgctgctcaagcaagttacattgttctttataaacaattaatcattgagattatcaatatatagagtcttgagatcaagaaaaaaagaattgtgagatttgacaccgttctgtgtcaaaacaattcatgacatttcatctaatctcctttaagctttctctgaagtcattctcttatttcatactgagaatagaataaggttgctcggttttgttcccaagatttcaccatcaaaatttagtttgtctttcgaatatcatttttatgcttctttgcccacacttccatggcaaaggagcaagcttctatggttagtttccgtcggctctattgcattattttcttgttttgttcattctcattc

SEQ ID NO: 79605 - DNA, 2209 bp, Cannabis sativa
atatatatatattaattaatgcttaaggtaagctacttactgttgcccaacttcttctactttttgttctgttttttttatggaacaaaggttcaacttcttctacttgaggttcaagtatatgtaaacatatttgtataaaaaaaaaagtatatgtaaacatatatggttacattcatgaatatatatatgccactgccacacataaatacagttcttatatatacaagaatacaatatgtgtaatatgtaaaatcattagaccctcttacctaaatcctttcaaatttgtaccattaatcaataataatttcatttcaaatggattgtcttttcacaaattgttatgtcataattaagttcccaaaactgctactttgtcctgcctttttgctttgggtaaattttttaattttgggcggcttcagcttgtcgacaaatgggcacttgagtaatttcaacaatgagcgatgaggtggctgacaatgattggttaagttgtatagtaaaaaggaaacatggagttgtgctgtgctgacacaaacattgaaaagcaacattatttagcccatcgagggatcttcccaattcattggagaatcaattccctgttcatttaattttatgcagttccctttgtaataggaagagttaagagagagagagaacaaattgcactttctatttggtcattctcttgtgaagcctgtaaagctgagaagacaatgcttatacactccctttggtcaatctcttgttgggtttcttgtgtcttcccaatttgcttatacacatgggtatattgtccagttcaagttacctgcttgctttcatgggtaaacaatgaaaacgacaaaaataaaataaaataaaatatcccaacttaaatgtttttttttcgcctttactgttaaatggtttttttttttccacatgttgcgttgatttggttactttgctcttgttagtatcgttttccttcaatgaaagtgatgatgcctttatttttacttttccagtgatgggtaatgccagaggtggaaaagatggagaaggtccatcgagaactaaaagctttgaagatgctgatgtattagaatctgaaccagatggggtgttctcagattccatggccatggctggctcaacttctcacaaccaaagtgggttccacccttatgtcttgttcagtcatcgtcctgtgagttctttcttctgttgagggttgaaatataatattattgcctttcttttataccaatttcgcagcttttcagattcatcatggttttgttgtactgttttattttttggaagactagaccaagattgagaaacccattttctgtcagatggctaagcttaatttttttgatgttctcattagaattgtgagtatatatgggacacttttcaattgtgaatgaattttagaaagaaaataagaaagttccatcaaatctgtgtttgtttacatctgtttacatccctttcttatctgctatttctggcatgcatcttgacatgtggtggtgaaattcaatgacccttttgaataaagtacttagatgttacttctaaattacatgatatagagggaatttgaaagggtgagtggtgactattcattatattaactgcagtcctattgccattggttatgtctgtttgcctcaaaagctcctcttatttactttacatctgtatttcagaaccctttagaaccccatcaaatgcctggccagcatatccttcctcagaatggagcttttcttcaacatttaatgtctagtcatgttatttccaatggaaatttgactcgcgtgaagctatcttggagttgtggtgccaagcaagtagctgtaatgggatcgtgggacaactggcaaaccaggtacataagattgtagaagtgggtttaattcattgaccaagttccttttgttttgttttgttttttccctctcttagattaattttatttgaaaaatgtaccacttttcagagagattttgcagggtacaggaaatggtttctttgttgtaaagacactcccaccaggtgaatatcattacctgtttatagttgatggctatttgaggtgtgctccagacttgccatggatctgtgatgattcagggaatgcttacaatattttggatttgcaggtaatcttttataacttttataatgtttctcactggtcagt

SEQ ID NO: 79606 - DNA, 559 bp, Cannabis sativa
cacaaagtatattctcacattaatgttgtaaccccaaatcccaattaaatgacaacaaataatgttacataataacaaacaaaagcataaactagttgctaataaaaacgactgcgttttgtttttgttgcgaagtcgtattgatttgctaaactcaaaagttttgcttttggtgtccaggaagattggtcatttcacgggactcatcactagtggaagtcccaaactcactgctcggatattcctggctagtcaaagccatttttctaaaccttttcatgtcagcattatatgcactcgcatcatagtctgagctctcactcgatgtgtaaattgagctatagcctggtctcacaccttcgttcaaatcatccagcgaaacatctccttctagggcccgaacaatctgttttcaccaaaaaccccaaaaccaaaccaaacatgtctgtgttagagtctcacattattaatgtgtaaaaagataataccgtataccaatttcattaccaattggttagcttattaggttcttaattttattttttttactttctttcta

SEQ ID NO: 79607 - DNA, 1911 bp, Cannabis sativa
ttttttggtcctgcccaaaaatttacaataacaagctagaactacaagcactataaaagggtacatccgttttacaaaatataaattcagatagcaaggtagaacattatctatctaaaacaaacaagttaaaaattagtacatgcatcatcctaatgtcaatgtataactaagctaagagtactaattagtattctgatcttcacacaaacaaaacacactcttgtttaagtccttttctccattggccctctctagcataataaatccaaactttcagcacaatattttcccccttctctaccaactcaaacacacaaacatctccttcttttaaattattgtccattgcaaatttactccatccatagcttagttccctacaagagggctgatcacgtcgcggaaggcactgtatgcgccacttctgtgtctcgttgccatgaacaacaagatgaacaaatccacaacactggttcatattcttctgagtatacattgcaggcacatgctgttcaagtcaagaggaacaaaaagtttagtacaaaaaagtaaccaaatagaagaaaatccaaagcgaaacatgtattgtttgttaaccttaccacagacttatgtagagtatttttcttcctcaggatgaccatgaaagaaggattttcatattcacgcatgctggcaatagtggctgctttctcagtttccttgattatcttataataggaatttggattagtaacagggaaacctcttggaagaatcagatttgtattttcttcatggtttaggaaaaagttctcttctttttccattttagctgagcttctaggaacattggcataacccgattgttccaccggtgtctcctcttctgttttaacagctcgactagcttttgtacaatcaatggaagctgcattagttctgaaaatcttattagaccgctcagttttcgggttagacaaaggggtttgaactctcttgaaaacttgcttgtctccaagtttgttgacaattcttgttttggaagaagagtgaggaagttgaaggtggatctcattatcaagattaggatccacaaagttgctactcagatcattcaggggaatgggatagtcaatttcagtaaaagtgttgttcaatatacaaacatggaattttgattctccttcatatctaaatatcaagagatttccataagagatggaataaaagttgacaaattcctgccaaccatgtttgaaccaaatcttattgtcaactttctctaatctcacttcccaaaactgaccacttggaactataagcttggcaactgcaaacagttcattgcctaatttctttgtaaactttgttgggagcatcttcaagtgccaaacaaagaaacaagaattagactttctttggtcaaatttacacacattatcaagataatacaccactcttggaagttaagactgtttgggaactaatattcctatttataagagcacaattaattgatctgtgttttgcgtatagttgaaggaaaaagctttatttacctaacaacgaactagttatgaagaacacatatatgtaaacatacaactaatattgagagattttcaaaccaagatgcttcacaaaatagagaaaagaaccaaacctggagaaataaagagaataaaaacagagagtgaaaacacaagaataccattttatgttggttggcatagtgggagtgaagcattaaggtgaagaaatggagcggttgttctggctgaggagcagttgttcggcggtgagaaatagtcggagatggaaggtgggtcgtcggacgattcggattcatgattgggttttgaagttagatgaagaaactataaatatagcattggattattagtatagagagatttgcattggaaa

SEQ ID NO: 79608 - DNA, 2069 bp, Cannabis sativa
  modified_base (74)..(110): a, c, t, g, unknown or other
  modified_base (1822)..(1840): a, c, t, g, unknown or other
gcaatcactgtaagatttctgatactcttatgtgtttaatttcatatcattttagaagttcatatttaggttgnnnnnnnnnnnnnnnnnnnnnnnnnnnnnnnnnnnnngtaaaataatttccaacataccatgctttagaaaagaacaacacttggacaatggttaaacttcctcctaacaaggaacctatcgggtgtaaatgggttcttaaagtgaagtacaataaagatggaagtgttgatagacataaagccagacttgtggctaagggatatcatcaacaaattggttttgattactctcaaacgttcagtcccgtagtaaagccaattacgattagagtggttattacaattgctttcaccaaaggatggaaaatcaggcaattagatgtcaataatgcatttctcaatggagacatgcaagaagagatttatatgacacaaccaccagggtttgtggatccatgtttccctgaccatgtttgcaagttaaacaaggttatatatggtctcaaataagcaccgagggcttggttcataaaactgtccactgctcttactggttttagttttatttcctctcaagtcgatcattctctcttcgctagaatcactttatcatgctgcatttatattctggtatatgttgatgacatacttgtcattggcagtgatgacacagctgtttctaatctgattgcagagctaaattcagcctttgctcttaaagacctcgggtgtgttgactactttcttggcattcaagtgacaaaaacagaacacgttctcttactctctcaaacaaaatatttacaagacttattatgcaaggctgatatgcaaaacgtcaacacacaaaacacaccaatgaatagtggtctcaaattatcaaactatgggagtgaaccggttaaagatgcaaccttatacaggtccatagttggagctcttcaatatgcaacaataacaagacctgagctcgcattttctgtcaacaaagtatgccaattcatgtattcacctctgcaaagtcattggatggctgtgaaatggatccttaggtacatagcaggtaccttagactatggcctccacatcacaccagcaccagattttggtcttgaagttttctgtgataccgattaggcctcagaccctgatgataggaggtctaccacaggctattgcatttactttggaggaaacttagttgcctggaaatcacaaaaacaagtgaccatttctcggtcttcaacagaggcagaattgagaagcatggccaatgttgtatccgagttatcctggcttcaatctctactaaaggatcttcatgtcaaagaaactggtgtgtcttctgtttggtgcgacaatcaaagcacggttttactcacagcaaaccctgtactccatgctcgcactaaacacatcgagatcgatctttacttcgttagggataaggtgctacagcagcaaattcaagtcaaacatctacctgctgcagctcaaattgctgactgcctcaccaaatcaatttctagcagcagctttactgtttcaaggtccaaactcaatgtggtctcaaaggccaccttgagtttgcagggggctgttaaggacaatggttaaagactgttattgtgttagttaggagttagttacttctgtttgttttcggttgtaattatcttctttctctttcatgagtcttgtatataaaccattgtactctattttcaattcaatgaaacagtgattcccttctttcattctgttctctctttgcatcataacagtgactaaaagtaaaaaaattgtgnnnnnnnnnnnnnnnnnnntcctatgttgtgactaaaaagtctgtggctaaaggtattagtcacaaaaatcacaatttgtcgtgactaaatatgttttcagccaccatacttattgtggctaaaactaaattaatgataacttgcatctaaatactattatttaataataagtgacccaatcgggagatgtttcagcttatattcctactaatgtaatttcgattacagatggacaaatattcttatc

SEQ ID NO: 79609 - DNA, 1828 bp, Cannabis sativa
tatgactaaatggttgtcacaaaaataacagatttttgcagtggaaaaagggcatagtgacggtccactcatctattcatctttttgatcaatggtcccttcattcatcacgagacacttattatttttctaatgtaattttttagattttaatttgactaaatgtatttgcatcatcaaaaacaattattgaaagtagtggatttctgaccgggaaaccagaaagaaatatatcttggcctctgttggtgggtgtctccgttgtttaatattttttaattatgtattgagcatgacataacacacttcctaggtttcaattcatagacatgcacctaaaatgcacgtgcgtgcacacacatctgaggactatgtccatgtattttttttactaatgcacctctgtttatttatatggggtttactgattcattttttcatgaagcaaggtcattatcatcaatggacaaaatttaggtacccgtaataaagaataaatttttaggccatatcaaaaagtataatttgactagtgaactaactctctagtgacactttcaccaatttactcttgctatctctttggtcccaagtaaaggatgtttaaccaaaagagtgaaaactcacaagtctcacaagagatagtgtttatgaatgagcacatgagagtctcacattaccagctcagatcagatacttgtctttcgtatatgtgttcgttatgcacgtgcactagacacgtgtctgaatgcagagtgtgagaagtgtaaccgcaagtaaggattgaagttgccaatatggactgttatggattattatcagaaagggctttgcaagttgatgcagtgtgatgttagaagaagccgatcgaggaggatggccatgctggctggccaatagacaagtggtacatttttgaatgttccacgcttgcacccataaaatttgtgaaactctattattaaggtgccatctgtaccttccattaagctcagtcattgcttctagtactaacatctatacctctcttcatattgccattttaacagggtatattatatgtacagtgacgggtaatttttgatctatagagggttttattttaaataaaaattattataatttttaagaatttttttactattttgttatataattatttaattaaaaagatatatttatatatttattgtttttttactggaggctacaacccccacaccatatattaatatccaacattatttgtccttgattataccatttctaaaattgatagtttttgtcatgacgtaaaagtcgaaaaaaatccataaattcaatcagttactcatgaaaagtatgtggatactagtagaccattctaaaattaaaattttaagtttaagtaacagtacttttttttttttcttttcattgtttagtacgtggtatagatatcatattatattaatattatgtaagaaagaaaattttgtattgtatttattattaccactctaaatttaatataataggaatagtattatttaatacacaataaataatttgtattagtgtgggttccaaatttaatttcatctgattaagataatggaccagtgctagacttaaaatttaaagtgagagagcgtaatttttttttttttaaagcaataatagaaataaatttataaagaaaaaaaggtactgttagtgggatttaatcctttaacctctaacgtacgtataatctagttccaaacttattattaatttattatgtctataaatatcatcatttattacaaatatacgttgtaactaactaaaatatatatatatatat

SEQ ID NO: 79610 - DNA, 1566 bp, Cannabis sativa
aatatttataatactatagtggtgactttacatacatcccatcttaaatcacgatatctatactaatgtatgccttaaatcaccgaatcttggtatatataacagaattagttttaacgaaagtacttctaatttcaatttccgtacgcatgtgaggtacaatagagttgatacgacttaattataatttggttgagtaaaatggatcctgttattgtaaattgaaagtaatatttagtatctttaaagaaagaagtggtagccatgagtgttacatctgttactcaatgtccaaattaaacagcccatcaagtcaggttatgtcacgtgctttgtggtttgcaaactaagcaaaccgatctcttttacggttcatgtttatatacctatattgatatggatacaacttttgcgtattttaattttttacggctctatattctttgatcaaatcatagttcattttaatattttcttccgctaacaacataaataagaaccttttttttcttcctgatttacaaataattgtacacgtaattgggaaacctggggaaaaggttttcaagataagggatcaattacaaatctgtacttttttagatttttttttttataaatatttaaagtgtctggagaagattagaacttaataaggtaactagcttaccctatcaaatattttataacattatttacgacataattgacttacaccctttcctttctttttctcacctcctatgccaatggggtgccggtgggttaggctagtgtgaattgggcgtattttcttaaagtgtcatttctaattcggcatttccaatttatgtttctttttattttctataaaatgtattttattcctataaaataatataaatattaaattaaaaatatattatatatagcatttaatctacaaaatattaattagtttaaactttaagatgaataaaatgacatgtttaagaattaagtttcctttgatattcgtttgtggaagatcatagaaaataatactatagttttgggatagtgatggaaaataattaattaattagaagagtatgtgcttgaatagaattgtaaaattcattaagtcatgtaagaaattgcaaaatctattattgtagaaatcaaaatttttgtttggtactcacaagtgcagggaatgtgaggttggaattttgtgatttcatctggtagagcctttcaattttgtgaagtatgtgctgacgagattatgatgaccaagtgttgtaggctgatgagaagttatttcaatgaataaatatgatttttttttttccttttcaattaaactattcttattactaattgctacacagctacttgtataaataaattgaaaaatgaaaactatagtttaaagtttaattaaatatatatatataactaaaatatatattttttttccagatccaaatctgcccatgtaaatatacatatatttatatgattagtcttactctcacaattgtgttcgtattgtgtcgagacccatatattgcaggtatgtgctcgactcgaagataacttatt

SEQ ID NO: 79611 - DNA, 1930 bp, Cannabis sativa
tttaatgataatgctgaataggcatccttgctttcttttgaattgattttttcatttaatctttaatctctaaaatatgtccttagtacagtttatgttgctttaaacgttttttcatctcagtccatcttgggaaagctagttgttcttaagttggcaatgtctagctttgaatgctaatggactcagatgcattcactcctaatgttttgttgttcctcatgttttgtggagtttcagaatcatcggagttgatacaattttgtgcatcattcaatcttgatcacaaaaaatgtccttagtcagcttatgctgcgtcaaactttttatcatctccgtccatcttggcaaagctagtagttctttagttggcaatgtctagctttgaatgctattggactcagatgcattcgctcctaatgttttgttgcttctcatgttttgtggagcttcagaatcattggagttgatacatttttgtgcatcagcaaccaaatcatgagtaactttcactaattgtgattttttgtagcagaaacttgctgtatggaataagtttacaagttttagtccatcttggcaaagctaataagcctaacaggcaatgattagctttgaatgctatttaatggacttatatcaaatgtctctcgaaactgtcctgtgctttcaataattgtcgagatgcggatcagtagagatgaaacattataatttagtatgattgcatgtgtgtgcatctacattcattgatttcaaaatacttgcacatccatgttgctactagttgtgcattttcagttttaataccttattgccatatgtcaagccatgcattttgtcccaattttgtggagtcccatctttttctacattaggcaaatctagtgttgcctagcctactttattttcttgcttaaaatgaatcatatatttatgatttgcatgcctttatgcagccgaattgtatgtgaacggagaaatcgttcaaaggtcaccagaaaggcaaaggagggtggagccacagccccagagagcccaagacaggccaagatacaacgacagaacccgatacgtgcgccgcaaggaaaataaccagtgatggaacaaatagaaagctagttgtgtagatattcatggaagaaaaacagagtcctagttttcctgtgtttcaggagattgatcaaatatagaggagatcatctggggaaattatgcttgtgggtgacggaattatgtatgggcatgaaatcttaatgtgttgttgtcttctgtactgtgatacactgtaatcgaaagcatgtgttgttaatggtattaactttggaggctttaaaattgattattatatagtaaacttattgaactatttgtagtttttaacaaaatgttactcaatacttaggtttataatcttattgaacaatgcaataatgtctttatttgttatttgtttttttttttttttttggtgtaattgttgattgtgaggcaacatagcattggcattatgaagatcctgcattcattgttttgttaaaaatggtagaatgctcgatataaggttttctttatcctatctagacaggtgaaagaattaataagagagttatgtcaaaaaagaatagagttaattggggcaaatttgtatattatttcctttttgtattgccaaaacaacttttgtggccataattaagaaaaaaaaaaaaaagaaattaggagttaaaaaaaaaaaaagcaaaaataataagccacccgaatcccttgccacatttcccactctacatcaagactaacactaattaggagttaattagttgaatcatgtataattttagaaggtatcgtattaaatttcttatttttcttggcaaattatttggtgaataccttacccttaaattgtttttctctaactattgttttt

SEQ ID NO: 79612 - DNA, 1695 bp, Cannabis sativa
acccatccctatggaaaatgacacagtatacccctgaataataacaaaaacaaataatgacaaggtgaattttcaagtgaaaagatttaaatgtgtcaaaaaaaagaaagaaagatgcattgtgtgtttttgttataccagtatggctataagtaccaacataggagtgagctcatgtaactggttctggtgcagaccctgatcaaaaaattacaatacaatagaatatgaaacatgtttctataaaagagtaattggtaaaaatagacataatattatattatatttttaggtttaatataatgttatacaatacaatacgatctaatacagcgtaccaaacagtttgaggacaaaccttaaataagaatgacaagccaagaagaaaggtactaaaagacattccagctgcagaaatctgaaaatgtaattggccaaaaccccaacttagttgttaatttattcatcataatctctacatttttttacaacttaaatgacaccaaattcatatcattaatcataccattagaagtggtctccttcctaatctatctgttaatagaacacccaatgcagcaccaggaatctgcaattgaatgagttgttatttatgtaactaactgagtttctcttccaaaacttgttttcaagttatatattttaaagatttaagtacctgaataatagcaattgatatagtcccaataccaagaggaacacctacacaaaaaatcagtatcatgtttatagagaatgctaaaatgtagtttatttaattgattttgaacaaggttttttttttgagttaccagcttttgtgaaaatagagcctgaataaaaggctagtgcattgcttcccccaaattgttgcagcacagctagcccaataccaacctgaccccaaatttttcaaacataaatatgttaaaaaatgtttctaaaattgttatttgaaatgctttgacaaactcattttatggttatagtaacttacaatgagtggataagtatattttggttggaacaaatctagaagtcttgctgagtcttgctcaatggcttctgtataggtctgtcatatcataagaaagccttttatatcatttcaatgtatatttttaaggagtatttgcggcataagtacctgaagttttgagttcttaagtagcatagacttacccaatgttaataaaactgtaattttttcgttcagttctggcaattcagactccattagtgtcttaaacttgtaactagacttaatttttaatctattgaaagaagatttggaagaaactgatactacatgtttcagtcttgactcaatgacttagaatctggaccttacatgtatccaatttaaaacacaaatactaaggaaatttgacgaaaattacagctttactgcattgggtacttatgccgcaaatgtttcttttcttagttttggcgattgagaagttagtaaagagaggatagaaaatcaccttgatttcaagtgcttctgggtaaatatcagcattctttcccctaagatactgaagactattttcaagatctttatttctaccaacttttgcctatacaaaaaaaatcacaaaaaatcatgaacaacaagttttgatgaatcattttctctcaactatttgtatttgtatttgtatataatctttaccagccatctaggagact

SEQ ID NO: 79613 - DNA, 2782 bp, Cannabis sativa
  modified_base (2682)..(2689): a, c, t, g, unknown or other
aaaaaaaggatgtttgacttagcccaatatgagaagcccaattacgatagcaaatccagaactaaagtaatatattagggctttatctaaatcatagcacatcggagactagagagagtaggaattccgttgaagtagttgctctgcttaattcgtaatttacaattttctttatagatttttgtaaaaggatgtttccccttgattcttcaaagaagttatcttttaatcgtttaattagcgaaggagatttggtaataacttatgagaggcatgacaatatgaaagctgtgaaagtatgtgaaggttcaacacttcagaatcgatttggtgtttttaaacattcagattggattggtaagccttttgggaccaaagtgttcagcaacaagggtgggtttatttatttgttggctccaactcctgagttatggactttggttctaagccacagaacccagatcctttacattgcagatattagctttgttattatgtttttggaactagttcctggctgtgtggttcttgagtccggaactggaagtgggtctttatctacttcacttggaagggcagtagctccgactggacatgtctatacttttgatttccacgaacaaagggcagcctcggctaggtaatcaatgttattatgtgcttgccagatttcttagtgtagaattttgttcaatgaacttgtgatatgactaaatgcctacttgcatttggttttaagatttgactaagctgtcaaataactgaaatatgttggtaatgaatgttgtgcttgatagattttgttccctgaactttgtgaaatatgtacagggaagattttgagaagacaggattaagcagtttggttactgttggagtaagagacattcaaggtgaaggatttccaaatgagttttcagggatggctgatgctgtctttcttgacttacctcagccctggctcgccataccatcagtagcgaaaatgttgagacatgatgggattgtatgctccttctccccgtgcatcgagcaggttcaacgatcctgtgaaactttaagatcaaacttcacaggtaagggtaattaattttagtgcattgctattaggcaccagtaatgcattaggtggaactcgatatttagttgaaccaatagcaatagtgacacatagtagggtattaggcaccactggtgcccttttgcatttctcttaatttaattgttacattggtggtttgtgttgcaattcattgctttgcttacttaattgacacaatgtttatatgtgtggatgcagatataaggacatttgaggtactccttcgcacatatgaagttcgagaagttaaaatggatagctaccatggggaggaggagggggatgaaggtgtttctgttggggctcctccatgtaaaaggagacagagatcaaatgattcaagcaatttgtcagaaaatcaaaggtcttccataccaatggctaggccatgtatggaggctaaaggccacacaggttatttgacctttgctagactcagatgtctttcataaacattgttcgactcttttagattaattctatgatttcaaaaaatttgtttcctcttgatatcaaaatgctttttttttagtcaagaaactattggtcaaatcatataagatgtgtgaaagtagattaaataatagagaaatatagataaaaagaaaatttagtttttcttttcttgtataagggtaactgcgatttaggttggtttgttggttgttacttgaattgttatatttatttttcgtaaaaatacaagaacaactactttatagcgtaaaaatgaaaaaatctctatttataatggttataaatttatgaaattgcaaacatgagaattctcattaaaattgattgtaattcatcattttttctcttgaaatttgaggtccaaagaagaagtgcttatgttttaaggaaaacaaactagagataattacataagacattatttttttttttttgtaaaaaattatattcttacttttattttttattttttttatttttttatttttacaattttctataaaaacaacaaaaaaacttaatgaaaataatatttaaataacatcaaaataacaacaaaaaataacgtataaagaataaaaaatcaacaacaaattaacaagagtacaacataaaataattgtattttttgtaaataaaaccaaaaaaattgtaaaaatgtttaaaattttgtgaaatcgtattttttaattttttttgttgtttttatgtatttgtgaaataattccaacaaactaacccatcttatattaagaatctattgcatcataaataattttttaccctataggtatttactcttgagttttgacacaaataagatagtgcctctcgaatagggctgaacatcggttggtttggtcggttttttttttttaatatataaaaattcaaaatttggtttttggtctggattggtgcaatctgaaaaccaaccgaccaattcagaacctatttaaaagctgatcgttttgaaccttggtttggtcggtttaaaccgcccaaccgaacttattttttttatttttatttttttttaaaaaaaaatgatccaatttactttataaatatattattgtacattttacaactataaacatacnnnnnnnntgttcaaaaactaattatcttattcttttaattttaatattgataaaaaaataatatataatttttatttattattagtaactataatacatg

SEQ ID NO: 79614 - DNA, 2456 bp, Cannabis sativa
cagataacgatcaagggttgagttgggaaatctcctggtgtatgcctcagcatcaactttcgtggtcatgctgtcttaaccattttaggtatttatttattaatttcaataataatagttaaaaataacaactaatccaaactggatgactcacgaaagtgtaagaaaaatataaaagaccacgttttgatcaacatttgatgctataattttctagtgaaatacataaatatacttatcttttgaatggaaaatacttcatatatatatatatataaattctactattatatattaaaagtttgttgtaacttagtagtgtgccaacataatatttaatgttatttcttaatcatagaacacactttaattaattttttatttggcaattgaatttttttatacattaactatagaaagacaaaaattaacagtggatctacttatttggttttctacataaaaaaacaaaaaataaaatttttaaaaaactatgatttatcaaaaatctaattttaccttaaaacaaataaaacaaaattgctgcaatgtcttttacatgaattttcttttacggtgaaatgttaaggctatttttcataaacaatagaaaaattattgaataaaatactgaacattaaactataacgagaaaatatttttgttaaatatttatttattgtatataataataaagttttttttttttgagaaattatcttatatattaatttttaatttttttatttttaaatttatggttttaggttgctctagtaatttttatataggttattgtatggattttagttgcaatttaagttattccgttagttactttatgagtttctatatgaatttctgtagaaatacaaataaaaaactacatacaagtataaaaattaaaaattctatttttttagatttaatcacacaaagtagtctttatttaattactaaaattttatcatagagttaatacttggtagctacttaataaattttattttgtggtacatgttgcttaaacatttttagaataataattgtgacacatttaaattttacaaattattatatacaatttattttaattatacaattaaaatagatgtacttaattatctatgattaaaattaaggacaaaatagttttttaccccaaattatagaacttataaactcttacccctgaattattttgcttggcaaaaatactctcgaactataatatttgtagacttttaccccttttatctaaaaaattaacggttttctaacatgtcagttataaaatagatattttatggtattttttttattaattaatcatttttaaattttaaaatgtaagttagaactattttcaaactaaaaaagtaatacgaacttagtttaaatttcttttttaaaaaaaaaaataaaaaaaaaatgtaacttagaatcaaataaatacaaacacagataatcatatctaacatttattcaagaaattaaaacacttttttctagtaaaaaaaaatagagaaaaaggattatgataattattgaatttggatttattttttgtattttatttcttttgtgtttctttaatattgatttaaatatgagaaataggtgtgttttgttggtaatgatttggatttgagaaataagttacggtgctctttctcatggcatgaaattagatttgaaatggtctttctctttctcacacacttactggagaataaggcgtctagctccgtcggatagagaaggagacggacgatgctctattgggtggtcaatggtacaatggtgttccgatgagagagagagcgcgaagtttttttttcttgatagagtttaagtgacaaagaaatctagataaaaaaaaatgttggatgaataaaagtgtgacacatatgcaatgtgttcatgtagacaatacttaaaaattctaatatgacaattaacaataaaaagtaaataaaaataaagaattgctaacaaaatataaatttaaaagattttagggttaaaatattaattttaagaattagttgcaagtgtaataatttaagaaattttgctgcaatttaaatttaattgtaagaaaaattgaagaccaatcaaaacagggctactcattattatgtgcagaaggtaatggtatgattggttagaaaatagaacacttatttataatattttccaagcaaaaaagaaaacaaaaagacaatcgtggtggcgttgatggataaggacaaagacaatgaaatcaattaagggaccccaaaagacatcttctttcaccgtgtttccatgaaattaaagtaactttttttttttaattcaaaaaattaaagaaacttagaacatgtttgtattgttttctgtgttttgttttcaaaaaaaatatttttagaaatgagaacaaaaaatagtttttgaagtttttaaaaataagt

SEQ ID NO: 79615 - DNA, 3458 bp, Cannabis sativa
  modified_base (526)..(526): a, c, t, g, unknown or other
gagaaaatgataagctggcttgggattttggccatgtattgggagaagaagaggagaaagataaacaaacatgatactaacaagagaggttttgagtatgtgtagggtgcagccatggtgtcagcctggacagtctggaatgagtaagttctttctcttcttcttgttcttagtactatttgattaaggaagaaagacgaagaagaaacgtaatgtgatcatcacatgttgggggatatactagaagttgcactaagtaacaagttttgggccaatatttggcggtgtatttttttatcttctaattaaactttgaatattgaaaggagtattctttcctttgccagcttacatcttggtattgctgtcaatcccctgaagttagctaaagtatataactatatatttatatatttatatgtataaagttagtcatgatagactcgctagctcaagtgacaataggtgagtgtgtgttggaggtcctgagttcgagttttcggtaaaacatgattgtaatatatanacgcttaaataaaaaaaaaaataataataaaaaaaaaaaagatactgttgtaaaaatttttacggacacatctcaaaaaatgactttgtgattatttataattgtactatacaaaatataaaataagtgaaaataaattaagtaaaataataatgtaaaattttgtaaaaataaatgaattataataattagtgatattataataaattaaaaaaataatatttaatgtaagttaaattttacataatattagattttatgttaaatttaatataatttttaatacatactaaatttaaaatacattttatagtatcttaacaccttttttttatcactcaccgttagagatgatgtaagatttgtaaacgtttcaaattgacctacaaataaagtaatataaagatttgactatgctataactctttatatttatttttttcgttggtggttttcgaatgaagtgaacatttaagatcttaatgtgtaaagttaaagggatctcttggatcacaaacttcttgaatcggctaccctttgattgaactacaagcaatttgatgctaaaagtccgagcagtattgaagagatcacatggtttctgaaattagcaaaatctcattgatatttagtaagtattggaaatgggctctattgtttattaaattttgttatagctatcaattgatatatgggacttaaaacaggcatttaattatccttaagatctggttctcattaatgagaaagagtgaaatttatgaataacataagtacttaatttattctatcattagttcataaagctttgattatgattgcttaaacgtttttcgtcttcttattttctaatgaataacattcttctaaattgcacatttcattccatacatataatttttgtttcgttttaaaaatataatataaatattcaaaaataaaataaaatagtagtgacgagtgctaatgatatttctttttctttttcttttttttttgcaaatattatggtatgtgaacaactccaagggagaaccagttcatattgtcccttggacttgtgggctttccaagtccgtactagtagtactcttttagttttagcttgtttgtggtaaatattttgattggaaattgggatttggaacaaactttcattctaagttaccaagctttctagtcaaatggagcccaaaaccaataactgaactatgctgtgaactagtaggcctagcttaggcccagttaaatatgctgtgaattgggaagcaaacaacccttttctttctgctgctttaaagggtttgactatggcctattaaagagcatatgtgaaggtatataatatattcaggtacttttaaacaagactttagctggcaaaaataattataacaaatgaattgcatctttttcttgtgtctaatagttcctatctaggaaacttgaattacagcgcattttacaacactaacttataatataaaattatatactaagcaaatgaatagaaacccttaccaataaataagaatgaaaacagagcaagctaaattatttgtatcacagagagagtcacatacttctaacacagccaaatttgctgcgccattctaagatcactagtgtggcaccataatgagccagagcacccatgaccacaaaaacatggaagatttgatgactatgtcctgccaagtcaaaccaaccaggtttcaatctctctggaattctactaacataaaaaccagtcccagttaagtagaaaaaagccatggctaactcataagatagtatatggtttctccttggattgtcccagtttacaacaagggcatggattgttgggacaatgccaaatagtcccatggaagagaagagaagggctcgaaaaccgcggaattttccttctgagagtctcggtgagagcaatgtgatgatggtgaaaatccccatggctgttatcccaccaagatagcccaagtgccagtttgagtcacagtggaaaatgtagtagattggagggaaaaatgaggtgatgatcatggtggtgattccaacatagtcaattcttaatagaaagatgttcatagagtgagagtgacatgagaataggtggcatatactgcttgagaggagacaaaacattgaacctgataagaaaacaaagaatggccattgttctactgtgctataattattgccaaaaagtgttgtactgttgttgtattctgttcctgctgatgatatttgcttcaaatctaccagttttgttgtcccctgaaagtgttggaatggtgagtttttgccttaggtgggaattcagaaattaaaattttcatattagtagtgattggatggtaggaaagttgaaattattaccattgagatattgttggaaacatttgcttctgtactaattggtagagacctgcaccaacatttgaaaagaaagttccaaaaacgttaagaacttcctaaaagagactaactacagcatcaccactactatgtgtttgtttggtagtgctttaagaatgataaaggcttttcttgaagatatgaagaacaattacacctttcagctaacttctaaaaaaaacagtcgagaaataaaataaaaaatggtaccgaacaagctatgcataaatgaaacaacacaaagaacatgaacttttagagctatggtaagtcacacacacaacattgttcccttcttttgttcttacaaagctattacatattttctgttaattttctcttttttgcaaccaaacagaatccgttaaaggttaaaggttagttaactgagaaatttaaaaggaaaaacagagtttaactcacaaagagtcaatatttatttgttaaatatcaaaagtaaagaagtgaagttgaatgccaaaaggggaacatactatctatatataaaatt

SEQ ID NO: 79616 - DNA, 3614 bp, Cannabis sativa
  modified_base (66)..(68): a, c, t, g, unknown or other
  modified_base (3541)..(3543): a, c, t, g, unknown or other
aatgattatcactacattgaatattattaattttaaaattatgatattaaaaaaaattaaaaactnnnataaaattaacatacgtgacttgcacgtaacatctatccatctaatatatattaacaattcaagaatgtcatggataataagataatttaaaaatatatatacataacattgaatatgtttaactgaattatataaaataagaataaaaattgagagccctgcttcccataaattaagattaagatatctattttcaaaaggctgatattaaaaataaaaaattagtagcaacttaagcaaacggacatcccatattcgttatttcgttatttcgttattcttcaattgtctcttttgttctttactactttatttatttatttattttctttatttgaaagggctctttactagtttcactttaagcctttgctccctacatttattttccacctccaacataaaatgagctttttattaaaaatgtttcgaattatttgcaagatgtttcgaattatttgtcaacatctacagcctcctattatttttattaaaaataaataaataaataaataaaggttgtttggaataattaattagtgtcggtaccctattatccttcaatatatatttaatttctagatagtactataatataattatcttatccactcacaatctaacatttgtgatactatatcatatagaaattctcaaataaaattatagaaatttaacatgaattcaataataatatcattcattcaaaattgaaactatgtagttttttattctttattagaactatttagtatgcagttataattattcgataacaaacactattagttagaaactttcaaaaaaaaaaaacatagtgaagttatagaaatttagttagaaattatgaaaataacaaactttcaaatatataataatatttttgaaattatagaaatttaacataaattcaaaattaatatcatttattccgaattgaaattatatagtcttttattcattactaaaactatatagtattcagttctaattattggataacaaacatttagttagaaattttcaaaatgttattaaattgaacaaaaaaaaaacagaaacaataaatatccttaatttgcatcagaaataccatcaatttatacataccctatactttgaaattatatacattatatataatattaaaaaaaaatatttattagttaattattttgaattatgataacaaaaaaaaatctaatttcaaacccatgctaaatcttttaaaaaaaaattaagataaccaaaatctctctaactaactagaggaagaaaataattaaaaaaaaaacaccaatgattaaaccacaaatattttgaactctgcaaaaccacaaatttcatgtcatgtcatgtgattaaaaaaaatcaatataaagccaaaatttatttcactcaaagaaaagtccaatgagtacccatcttccacacacacatatacacacatgtgtattatttaacactatgactatatataactttttaaaaataataataaaaaagaagagctatgtatatatataggtttagaataagagagaaatgaaaataagagtaaatgtgactttatctttttgtagcagaatacctttctatcaaagttttgtgaaccaaccatttatccttatgtgaacatcttaaacaaaacatatatgctataacccaagaatccgtttctattaagcaacctttgctccaagtgattctataattccttctctctatctttcagtctttcatatgtgtatgtaaataaatataaatatacatataaaaagctatatgtatatgtatatgtatagtttgtttcctcttagtctgcatgagcctatttgaacacaacaacaatgccaaaaacaaaggccataacacatgcagatcttgctccaagcaatggatgcactaatttggggagcaaacttggtgtcttcctaataatcttaactattctatgtggtttgttatgtttcattctgtgtctaatttcagaggccacacgttcagaggtgtagtactaaatcattccttgttctttttcattgtggaaaacagatactgaaaaataattctgaaatctttgttttgtttgcagatgacatggatagacacaggtagagaaggcaataataactatgaatgtgtatatagtggaagtgggaaaacacctttgctttgtgctgtggttgcttttgtgggattagctattgccatgatgattgagcacatattcatgttgattgcagtcagtaagcttccaccttctgctttggccacattggacccagattttggctctgcaaagaatttgacatgccaagcaggattcttctttgtcaccacttggtaagtaaaactaaaagtcacttcactttctctttcagtcataacatcaaacagttttgaatcttatttcatcataacatcaaaagcaataggaaagtacccaaaatatgaattttaattgtcatataacttgaaagccctcttttttttcttcttcttatttctgtttcaatcaaacagatcaaactttctcacaacttaataagtgtaactctatatcattatcatcaaactaacacctacaaaaatattcaattttcaatgagtcattatatcaaacagttaaggaacataatttcatcatgataaccaaacttacccaaaaacccattttcaggatttgttttgctgttggggaaatcttgttactgattggattaagcattgaatctgggcatttgaagaattggtataaaccaagagccagttgccttgtaatcagagaagggttattctctgcagctggagttcttgctttgacatcagtttttcttgctgctggattgtacttgacggctttgaaggcacaaaagattgcccaacaacatgaaaatgtcagaagacagattcttgagacgtctgcactctatgcatccccaccaacatcaccaaccattcatcccattactgccattgacagagagaatcccatattaatcagagatggccccattgatcacactagtgcttttgtttttcctttatcttatagcaaagacccaaatttagtgtagaaacagaattgagaatcagaattgaagtacatatttctgtacataatttttatgttactccaaagggctcttgttcttgtgtgaattctcttcatttttttttttttttaacaaaattttactattttttacatttcatatggtttgataaagaataattatgatttttttccagtagagttttgccactgaacttcttttctgataaaaattctttccaaattattcaaatggttacattttgctcaattttcaaaatcatttgctttgcttatctactagaattatccaaatttaatttattagcattaaatatataaatattatttgttagcatgtatatatacagtactttcacggaatgtattccgtggtatattagatgggtctcnnngtacattaaatgagtgtcaggtacgttctactttttaatcctaattacccctagatcataagtccctcatc

SEQ ID NO: 79617 - DNA, 1841 bp, Cannabis sativa
  modified_base (1816)..(1816): a, c, t, g, unknown or other
agatgcatcttatattttcttacttctgtatgtggatgatatcctcatagaaaggaacatcaagaatgagattgctaaagtgaaagatgagttgaatatagagtttgaaatgaaaggcttaggggctgtaagtcgaatcttaggatgagagattaagagatatagggaaaagaagagtctatttatgtctcaagagatataactagagaaggttctgaagaaatttggcatgtctgatgtcaaacctgtgtctactcccttatcccaacaattttaactcagcatggatcaagctcctgatgcagatgtagagaaggaaagtatggatggcatcccatatggaaataaagcggagtcactcatgtatgcgatggtttgtaccagacaagtcatagcatattatgttagcttaatgagtagatggccaaccctggtaaagcacactgggcagctctaaagttgatacttaggtacatcaaaggttcacttaggagaagtttagtgtctggtggagctactaatactctgaaaaagtcagctgtactcgaagggtttgtggactctgattatgctggatgtttggactttagaaaatccctaacatggtatgttgttttactgcatttggcactgcaattagtttgaaggctaacttacaaaaggtggtaactttttcaactatagaggtagagtacattattgctttgaaagaagcaatttaaaaggaacttcagttaagaggaatagctaaggaatcgaagatccaagagtaagttatcacaatcaattgtgataggcaaagtgttattcacatgtcgaagaatcaagtcaaccgcgaaagaacaaagcatgtggatgcgaagttacattttgtcatagatgttattactgaaggtgctattgtgatgaagaaaattttaaaaaaagcataactgcttcagacatgattacaaattttttttccaaacaacaagttttattaatatttggaccaaatttgtttccgtactgtttttattatgtggtttgggttgaggataaaggtacgttctcatgatagggaatggaaatattgggtaaatgtattaggagtactgtattcttttattttctctttcaattaaatttcttttagtccaagacactcatgcctagagagagagggacgagatctgtgttagaaatttctttgtgggatgttgatagtggcaaggcatcgaaacttggagctggagatggatccagatgcatggaaaggggattggaaagtatggagcgcttctggtcattcaactatatattacgggtatataagtgtgatttgtatcttttttcagtttgtggattttactctgtttgtgtaaaattcggttgaaataagttgctggtttgttttgtttgtgatgtactgttgagatttgtgaggttgtgtctatggttctagtaggtattatatggttcatgtgcatttgtgttaaaaattttcttcttccatagaagtgttaaattttaatccttatcctaaaattaactacccatctttctgtttattgagaatcccacgatctcatttcacttcttgttataatttttgatttagataatgatacgattcaagttagggtagtttctctcattctgtaccactaaatggtttctacccacgattcctcaaatttatcagccaactaggcgaccccatgaaccctcgatcacatgattcggtaaatgacccccattatctgttaatttaaccatctataaatgttgggttttatgccctaaataaaactctttacaatctaattagttatcnatataagaaatttgaagtgatttat

SEQ ID NO: 79618 - DNA, 1990 bp, Cannabis sativa
atgattttgcaggaaatgggtactcgtaatttggtcacacttaacaccgtagctaaagttatgagaagatttgctggttctgggaagtgggaaaatgcagtcaaggtgtttgatgaaatgggtacgtacggattggagaagagcactgaatccatgaacttgttgcttgatactctttgcaaagcatgtaaagtggagcaagctcgtgggatttttttggagttgaaaccacatatattgccaaatgctcactcttttaatatactcattcatggttggtgcaaaattcgtagggttgaggaggcttattggacaatccaggagatgaaaggtcatggctgccgtccttgtgtcattagctactcaactataatcaagtcttattgtggccaacagaaatttgacaatgcctatgaaatgctcgacgaaatgagagttgaagggtgtccaccaaatattgttacttatactactgtcatgagttctctggccaagtcagagaagtttgatgaagctttacagatagccaagagaatgaaatcagatgagtgtaagttagatacactgttttataattctatgatccatattcttggaaggactggcagagtaagagatgctgtgctagtttttgaaactgaaatgcctaatacaagtgttgaacctaatacttcgacctataatacaatgattgctatgttttgttaccataatcaagaacagaaggccttgaatctccttgcaaagatggaaacttctggggtttgtaagcctgatgttcagacatactatccattgcttaaatcttgctttagaaatggcaaaacagatgattgtttaaagaaattgttggatgacatggtgaacagacatcatcttagctttgatatgtcaacttatacacttttagttcatggactctgtcgagcaaataaatgtgagtgggcttacctcctctttgaggagatgattggtcaaggactgatgccaagatataagacatgtcgtttgcttttggaagagctcaaacagaagtacatgtatgatgctgctgggaagattgaagacttcataaaaaagatgtaaaacatctaaaaagaaaggataacaacatgcaaaggtttgttttattgtgataagaaaacagtctcttttatttttatttctcaattttcatgtttctgcaaatcaatgatgaaatgttctgttatggccttaagctttctgatgttgattagttagtaaatctgaaatatgacaaatatctcaattgtggttgactgaagagtacctttagatctatagacaaacatgggaactgagattatgtcattattatttttctgtctattcattaatagattctgaagctagattcaagacctgttcgagataatatgatacttttatatgcacatttctgatgcagagtcacatgtttgtgtctacagttcatttgtattatcaagaaaactactcagattatgagaatcattctcgtgatccaatagtaagtgaggacagattaggtaagaccaaaaaactagtccaagaacaagatccacttggtctcctaatatcttacctttccatgaaccatgccatgtgctagatggtccacttttatgatttgttaaatcattgttaaagattttatgacttctgtaataatatctctttgaagaccattgcttcccattatgtagagcccaagtcttcttctcatatattaatccctaatgaagctttgaatggtttaaagacactttatgtggagttatatacagttactagcaaaagtttggtgctttttttacacttgaaaaacccactgatttatcatttggatttgtaacacacactagtatatataaatatatatttattggggtgccatatgtatttagtgtacatcttaaataatgatggaacgttgaaaacaaggactagtgtaccaatgaaatttatttgaggcttcagtcattaaata

SEQ ID NO: 79619 - DNA, 1421 bp, Cannabis sativa
  modified_base (1227)..(1228): a, c, t, g, unknown or other
attctcaaaggtaaatgaggacattcacacaacactatgactacccacaacatacaaggggtctcggggggtcaccccgagatgacaattgacgccccctcaggttgggtctcaggggtgtcacccccaagtgttagcttctattcccgaaggtggtcaacgaccgtgtcacaccttaggagaccctcatcgccaacgactagttatcaaatgttcaaatcccacaagaagctcaaagatagttataaacccacgaaaaataacaggatattatcataaaaatcagatttcaactacctccgaaaaatcaaggagacagttgagatagctccgcattggtcgcatctcctgaagtgaaaagcatcgaccttttttccctatagccctggaaggggatccgcaattttgagcacttaaagaagaaaaaaaaacactctgttattctttgcatttaggaacctgttattgacttttgtaactctcatcaataaaatataaagagagtaggctattactaattacaactctttaaatttcgctgtctttcattatatttattgcaaatttcgatatcattaattacatttattattacgattttaatttaaatctcatttattacgactctgcgtcggttgattaaaaatcacgtcaacaattagtaaaagaaaataaaaaattaataaattagctacctaattaagaaaactccatattttaatttttaatgtgttttcactccatcaaaatttcatatcattagaataaataaaaagaaaatagaagaagaaatcatgtaattcagtgagactacaataacttaattattcattatttgttataataataataataataacaataaattggtatatttttctgtgtattaattaatattataattagcctgcaaaattagaaatagtgttccctatatttgaatacaatgacaaatatgcagttaggcagtattcaatctagtctatctaaatctcttgactattcatttagtttcagatacccattatctccaatttttattattatataataaaaatattaataattaaaataaaaaaatacttcatttttcattttttttttaaatatataagattcaattcatattattccaaacaaaacaattattttcacggatttctgcctgtcaataaatctgtgggagacataccaaaaccaccaaagtatttattattattattattnntattattattattattatttaaagctaaagactgcagttagagtaaaagaaccgatttgcaatttctcacctacctattctaaaaattcataattggatcctgattgattgaacttaatgaaactttctaaaaatttagacaaagtattattttttggtattttttatcctttttacagttagataatttttt

SEQ ID NO: 79620 - DNA, 2087 bp, Cannabis sativa
caattgacataggagggtgctagacaccacggatgccttttagcatttctcatgatcggcaaattctcatttagattgggtagtagtaggaagaagaatatgctttgatagcattttgacggtgcgttcataaatattatatttcttgattttatattatttttttaaaaaaaacatataacaactctagtctaataagtaagtctccaagctatatcataatttatttcatttttgttttggggctcgatggtaatggtaaacgtgatgaggttctcacagttcatcacaaggcaaatttgctaccacttgatctattatatcttggcctttagttgcaacttttatgcttcttttattattattttcatatcttttgcttgagaaaacatcggcagcacttgttgaaatggaaaattacagcgacctataatgcctacgtacattgtatattgtagtattcttctgagaaagagttataatgttatttataaagccaataccattactgcgtgaaatcttggcaccttgcaaaagtgttattagtaattttcataattgtcaaattaaaatatgtgattcctaattatttaattaacatcagtaaaaatgtaatattttatgatagtgtttagcaccactcattaaagcttttcacagattagtttagtcagaatttttatttattttttttatttaaatcaaaccagtattgctattttttttaaaaaaaaaaaaatagaacaaaaccaaactaattaaatgccaaaccaatctatttaagaacatattggtttgatttgaataatttttatttcataattgttcaaaagaaaaaattaagtatatatttttcatttttattattatttctttttttttttcttttcttatactaatttttaaagtttataatacataaaaaaatacaaaaaaaaatacatattgtacgtaaagattgttcccaaatattggcattgcataaaaaaacatactacgttcatataaaaaaaattaaagtggcgtttaattggaggtaatgaaataaaatggaatagaaaggaatcaatttttatttttattactttgtttggttgcatataaaaatattgaaatgttattcctggaatggtctttccactattttggtagaatgactattctattttaaaatagaagaaaagaccatttcaatgaatgatgagaaaaaatttaataatttttttatcaatttttttatgcattttaaattttattcttccatatatatattcttattcccattcgtattcttatgatttcattcctccaaatcaaacgcgaccgaagtgaattgatttggtttggtttgagctactggcgagaattcttaaccgtcactagaaaatcataaacagctggtcgaaaccattttcactgaatttattttgtccagtttcataggattcggttcgattgaatgttcagaaccattataaattatgaacaaccctaccagccatttatctttctcaaaagggtgcacttgacctgcctacatgttataccatttgcagatacaattaatctaaactcctttcattaatgtattattataatgctaattaagctagctagctatacataataaatatcatgtcaccatctatatatacacacacacaacatacacgcattttgctttttgtgtcatcgattcgatggtaataaataaaaaaatttagaatgatggtgtggccactatgatatatttgattatgaaacatgcatgtagttatggataagttttcagattcatagatgagaaagatgtggaaaagagagaagagtaagagaaatttaattggatgattaattcggcgcaataaacaaatagagttaattaaagcactcatccttaatttaaacaaggtcaattatctaaacatccattaactgtcacaaataattttataaaaatactatttttttttatacatataaaataaccataaaataaccaaacagaataatttaaaataatagtagaacaattaaaaaaaacaaccgtcgaacaacagtgcaaatttaacacagtacaaaatata

SEQ ID NO: 79621 - DNA, 2650 bp, Cannabis sativa
atttttatgggtatcatttagctcgatctagacaatgtaaatagaagttatttttttatggttttttatttttcttgttgtcttttgaggaatctctcgaatcatccctcctttcctagccggtgtgggctagtttttcattagaagtggtagtcgtggtgtttgtggttgcattgctcgtgcgaaccacatttcttacccctgtttctcttatacttggttgggtttgaaactttcccaaaatcagccacatcgatcccatacatacacttttattatttgctccgttcgaaaaagataatgaaatgtaaccaaaagttttgttaattaaagcaatattgacagagcatccacctcacacacctcggtatgattattctactaaacaattcagatattcatatttcttattggtaaacgttcttcccaccatttaacagtaaagataaaacgtaaaaaaatacatgagaatgtgagatgattcgataacattgtgcatgcaaataataataataataatgtaagttcaacaagtacattaaaacaaccaaataataatgataataataataatatatataagttcaacaattacataaaaacaacacaccatgcccttgatttggaaccttatcagctctgcattggggcaagatgcaaatttattaataatatatttttgtcttttttctaaatttaatatttgttgtgtcttccttaattctttgtttccaatataatatataaatacagtgtcttaatgctcgaacagagaaatattaaaaagtattattggtgccagcactttcttcaatgttatgctgttattagtataattatgtattaaatctcatatcatatttttttaaaaaaaaaatgtgttaaatctcatataattttaaaacaaataacttttaaataatatagctaactaattataagatgcaaaatataaaaagtattaggtaatactagtgcccaattgtaatgctcaataaaaatactaaaaaatattagcattctccaaggtattttaatattattaatgtaattaaatataaaatttcatatgatttaatataattatttttataaaatatggtaaatgaatctcaaagtatcacatttaagtagtattagacgaatactaattaacaatgctcattataaacacaataagtcttcccatattattttttaattgattatttaagagatatatatttatttatttgagtgtattagagtggatgtgatcttcccctctcacatgaaacaaacataaaaaagaagacataagtgaacagtagagtacacgtgttttggggattaaaaagtggcttcttttattttatatcgagaagtttagatcccatgcaaataattggtcacgtgaggtgcactacaattccatggtttcattggaaaggaccaacgatccttaaagaaacaaaaagaaagaagaaaaattgtccattaatttctagcatcttctttattttattttattttaattgaataaaaaaaatagatactaaattataacaaatgaccttaaattataggcttatttgtactaaactatacatattttggtaagttagttttcaaactttattttttgagaaattaatttgtaaactatatatgtattggcaacttggtcttcaaactttatattttgataaattaattctcaaacttttatttctttaacaacattaagttcccgacatttttattatttattttagttactttaatttatgtttctgtgttaaatttaaataattttttttaattttaatactttgagagaaataattagattaatattaatattttaatactttaatttattatattcatatacattaataataagaagaaaaaaagataaatactaggagacacataatagctagagagaattttaacctctcacatttttatattttagcatttatagtatatttattgttgatttatgaatacgtagtattataattttaataagaaaaagaacaattgaaaatgcttaaataataatatttttttttataaactacaaaagtaaattatattttaaaatttatttttaacttatgttacgcactacccaatgttccttataaaggcttcataatgaacaattgtatcaatcagcaagggtcaagagcctatgtcaccaaacacttatagaaagcctatgtaccctaccaaatagacaagcatgccctattatttaaatttggaaacttgtgcaaataatactcatacaattaggataatggtaaccttttttacaatctcatgaggctataaataccccaattacattttgagaaaggaattggaaaaaatggactgtaaagaactactacattaataacaatgactcgtgtaaggctcattaatgccctaaccacgtaaaaaaatctttcatatttaatttcttctaatcattataacaggtctaattaatagttgccaaaaacctagatcaatattttggtaatttcattgagagctgtaagaagctttccatagaaacaatatcataaataaagtcttggtacgatagtgttgaccaaaaaccacactcatcgaccacatccacctaaagtgttagaaattattttaccaagat

SEQ ID NO: 79622 - DNA, 2314 bp, Cannabis sativa
cttccattgttataaaatctctaacagtttctatggctattaatctgcagatagaagggggggtggattttcacaaagataactctttgttggtaaagggtttgatggacaaaacattcccgtcttggaggtctcacttctcttttgccaaactctatgatctgttactttgctttgattgttcggttagctggatttctcgtcttttaaataatgctgcgcatactctttctcgatggggcctgtcccattcttgtaacggtttattgcgtttttgggaggtgagtccccatgtgctcaccaaactttgtgttttatcttaatgaattgcagtttcttagcaaaaaaaaaaaccctcaaagctattataattaattcttctttcactctcttcgataatatctcctttcctttaaaaacagagcttttaaaagaacccgtcgctcaatatttaacacattattatacaaatgaatgtgataaaaaaatgtttgatagtttttacttgtaacttgtctgtctattgttcacaattaaggaaaagtgtgtatgtttcatatccgattcaacacaacattatccgattcaatatctcatcatcagtcataaaaaactaaatacagctcagcattactaaccactaagtttgaatgtgcatggcatatgtgttgttatccttttcatgtattaattaaagataaagacaaattaaaaaaaaaaagctcatttagaactttgaggccaaatctattatcaattaaagagccaaaatgaaagataggagatattataaatttataatatatatataaaaaaaatagtgaagggtggcatatgatgaaagtcacgtcttactctcatctcatcttctggagaaattgattaaaattacgataggattaggaaccgtgcaatgcaagaaaacttttggggtgaatgatacaaaagtggatcacgtgtcacatgtttggtatagtgtggcgggtcctgttcttcgacacgtggactagagtagacaacgggtcatctcaaaatgcctgtgttatatggctactctactcctgtcctgcttcccttaacacaatcaccaagaactttttcttttttcttttttcttgaaggttacttcttttagagtggaatatatgaaattgtactttcaacaggactggatattccatacctacaccaacccatatatagtcctttctcaataaatgtttagtcttcctctttctcatcatggagtccttaattatacttttcccattggataataaatcctttgttacgtatcaacaatgagtggaaaatgtaaaacagatacacggactataactaaactaaattaatatcttataaaacttgttttatattaattgatccgtatcgaaagcattgaccatgcatcaatctctcccttcattttaaaatttgtaaattaatcacttttcacttaccctcttttgtcttcaattgtatgatacaaaaaaacatcaccaaatcatacccactcctcatttcttacttaattgtttttcttttttggtttaattacttgattgttaaataatcaacattatggatggggagatccagtagaatagtacgtagtagtatagtacaatagtaacctcacacacatacattatttttcaaaaacaaaaggaaaaactaatatttgtatgtcacaatggacaattatttttatttattttcagaaaagtatgcatgatataacatatatgtatgtattaattttaatcttaattccaattctacgtattgggatattcaaatttatctcagggtctgaaagaacagacggaggcagaaaattgagtaacgtcaataagcaaaaaaagactaaacaatttaagaggggccgtcctttaattaagtaaaagtatttatacaaaaatactgtatatattttcgctaatgataatatgaattttgagcatttggcattattattaattgctattattccattatttatggacaattgggggcagagttttgatgtgaaacccagaaccacaagaagacataacgccagactatgattgtcgttgactatgtaggctcaaataattcttatccaattttccatgaaaataataataggcaatatttgggtttgagggtcccatattaaacaaaaatctaaaggaaaaattgaaattaaactgattcgcgtacgatgcgtgtgacatcgtgtctgcaagaggcagaatcccatgtaaccatgcaagtcttaatcacatgcatctgactaatcatcactacacatagcgatgagctgtcatat

SEQ ID NO: 79623 - DNA, 1650 bp, Cannabis sativa
attcaaattaataaatagaaaagatgataacgtaaaagtattaaaacatctgatctaataaattattatctcatatatatatcatattatattgcatatctacaagcatacttaagggcgagaagttggtgatgctcttggttttgtgtaaggtctttattattattatttttttgaaggaacgaaagttcattaaactaagagcgaaaagtgagaatcacattgaggatttccctccccttaaaatatcagctactaggctagagactctagcacttctagccagtttgtccactgtggtaataagactatgcttaatgtaaaaaaaaaattacaggtaataaaaaacttaaacaagtctaaaacggcaagagaaatatgaagacacccccaatcaggtgcacaattgtgcaaggtctttaagagagaaagattaggcgacgagcgaagaaggaattgctagcctgttgtctttcaaatagtaattcttcctttaatttatttgtagctttctttcttttttaaagactcttgctttccctttgtatttatctatttgaactattcatttccttagaattctttttggtgtcgtaaaacacaatctatttcctactttcttgctgaaaatatatataaaaaaaaacacatttagtcatttggatttctgaaagaaaataaacttacaagaaaaatcataaacttggtcttcagttcattataatgttaatttaaatttttaggcattttattcgtattgaatttttaaatgtcttggtcatttgttgttatataaggctttcaacaaagaaggaagaaaaattatgtatttgaacttgaaattgattatattttctacaaaaagaaagggatttaggattatttaagtccatttatggtgctcttgaagccattgagtcaagtttaatggtatgatattccaaattagggaaaaagtacaagaaagaaaatgtttgtggtgcttaatgtgtaggaagtggtaattactcaagtttctcaatttaaaaaaatatatttgagaaaagtactcatcaaatgcatttgttgtaataatttttgtgcaattaatcagcaaagtgaaagtcgtgggcattaaaggccctggtgtaagtgaaccattgaggattcacagaatcaataaggtcattttgggttatatcatcacaaagagacacctctattaatttgagttcgggagacgaaacatgccaatgtctaatgtttcaaattaactttctatcagccatgtagagcagaaaataaaaattaaaaaaggtcacaactcagcaacaagaatagtttgagggaatatttagcatcaataataatttagagaaaaaatatcaaactatttattcttataatagtttaagttgtatcatgactataaagttaatgtgagtatgaacatgaactccttattccaatccggaaaccggggctgacagcatccgcatgcttaaaatcttaatcctgttccggtccccaaccgttatacctttattctacaatgattccatttcgcgcttcgcaaagtctttaatgatgcgtctgtaatagcctatgtgtcccaaaaaagaacgcactacgcccagccacattttgagtagatgagattaggatgaaagg

SEQ ID NO: 79624 - DNA, 1450 bp, Cannabis sativa
ttaaccaagtttgagttcttgaactcaaagcttgctcaacaatggttggtttgtctttagaggtttgatgttgtgatttctggttaaattatgtctattgtggtgtaaatatgtgttctggaaggtttggcaagatttggggtagaattgaagcagattgaattttggtgttttgtgctactaaatggcccactgtttctacagaaacggtgaaccgtttccccaagcatgagcccaataaactgttcaccgtttggggatccaactcaccagttgggatgattttcaaggacctcgatttttgtattttctcaacatttagggtttttcattctatttatcgataaggaaacttcttattttaagttaaagtctcaaaagtgatcttgagtgtcacttatcaattttacgcgattgtgacttagggccactaatcgttgagcagcagtttccactcaggttggccaacacacttgattatggaattgaggtaagattagtataatatatgcacatatgtacatgttcagcatgcatgtttcaatagccatcaaattagtatatcagggtattagtagagtgtacatcgagttgtactgagataccgacaaatatatgctaagcttttagaaagtacaaactaatgctaccaatgcctgtacgcctagagtactgagtgcatgtggtattataattagttgtactttagtcaagaactttcgtgactcaattttagacttgtgagtaggtgtatgtgcacctagttatagattggttatatatttatgtgttatattttttttaccgagtttgtcaacttacatatatgttttctttgtgtaggtaagggcaagttaaagattgaacaacagtgagtgtagagctagatgaagattgtagatatccaaacggttagacctagagtgttcaggtctatggaacggcatgacttagattttattagtcgcgaagcgtcacattttggttttattttattttgttgtatttgaaaaatagattgggattctagattatgtgaacttatatatattagcaaggtttataattattttaaaagttctatttaattacttttgcaataaactatttgattagtaaaggttagtacaataattaagaaaattactgtaatgcgcctaaactagtatggcgttacagaaagtggattttgagagggagtaaaaataagttattacaaccataaataaattaaattaaaaaaaaagttgtcacaaggataattttgtaaaataattagtttgaggcataagaaaaaaatatattgttttttgttgataaatttcaaataggggtgtgcaaaaaagcatccgattcatttataaccgactgattcaataaaatcagatatccaatcataattgattggattgaatataaattttgaaaaatccaattggatcaactcatt

SEQ ID NO: 79625 - DNA, 9403 bp, Cannabis sativa
atttcactatagcataattaacacccacttctcagatttcgtatcaaaatcataaataattaattgatggccagataattaaaagaaataagtaggaatgaaatataatacatagaaaattagaaaaaaattaaatcacattaaaccataaattgatgtcaaacaatatccatcaatacccgaataaactgtttagctactcataatcattataaataattgataacaactaattaagaacatgaaaaataaagtagaagaaaaaactcttcgagaaaataatgttgaaagtgtctagagctgccttctacctctaatttttgtactcccaaagttatcaactgaaaagtgttgaaaaaaggcatttatatagctaaaaaaagataaagtaaacctaatttttgcaatttaaaagaggctggccgcggctggtagtgtcgtggcccttgaagcacgatttttggcagcgagcttcctactgcgttgattgataatattttggccataactctttgaatattgcttgtaattagacgattcaatatgttttggaaagataaaagagagatctagaacttctattcacaacatttttcctcaaagtgaacacatcatagtcaaaaatttgattgaagatttagacttaattttcgatcacaaacagagtgtgttgagcatccaaaacttaattttttttaccaatgatattctagaactccaaatccatggaattcatcatattcatctcatttaacatatttttttctcattttcaattcacattatgaattttaccatttaaacctgaaacaagtagaaaacaagcataattctgtacaaaatgaatataataagtttcagcgcacctctaaacactttataaaatataccgaaaactagcctatcacttgtcgattgtcttattagacaatgacaaaggtatataaatgtcgggattgggcatcatgattgtcttattaggcaacaatagatgagtagatgtcgggttagggcatcaaagttgtcttattaggcaataacaaaaatgattactttatgttagatatacttgtcttattagacaagtacttgtgtattatggtttaattatattattttgattggttatctgtttgatatgtatttatatttacttttcttgctgagtctatgtgacttacgggtgctttgtagtgcaggtaagggtaaaagaaaactagggtagtcacgagatgattgtcttcttcgacaaatgtacatatcgacttattcgacttgtatggtcgagttgtcggaagatattttgtgatgcacctgatgtgtattatgacttacttttgtatacagccctttagtaaaatttttgtaataggggattccccaaataaatttttagtgatgtcatcctgttcattgctaggattttgttttggtaaagtttttactattatcatagattttattaattgttaacttattattacaaaactatgtttcaaaaccacacacttagcgtccttaagaattagagcttttcaagaaaagttgccgatttcgcaccatatgagaagatgattactgagcttctgaaagttggcaaggataagcatgcactaaaagtagtaaagaggaagctcataacccacaagagggcgaagaagaagcatgaggagatgcccaaagttctccgcaagatgaggtaatttcgaatgaacttgattattagaataattctctaaggatttctctacttgtttcttcagttgagttagtttttagccttataacattgaatttattttaatcacactattattgggaaattgataactctgttgtggttgtttttggctctctgtaattgaatttgtaacatggttcaactatccattatgtagtgtaaagattgatttgtttttatgtttgcttgcagatctggtggagttactgagaagaaaaaattataattcttttcaagttgtatttgggttatccttagaatccaagttcctttgagattttgatacgaggcagacttcattaaaatatttgttagttaaagcgagacattaattctagaaattatgtaatgtgacctttagttttggttttgtagtgtttttttgacaattatgtgtggccaagtttggttatagttttgaatttacacaatgtctttataattatcaattgtgtctctaaactctagttaacgaatcttacgttagttttaactaaacaaactattaatgttcaacatttcaagtgcatcacccaaaaaaaaaaaaacatttcaaagtgtcgagagactgttactccagtttgcgttgtggattacaagttcacatcattccaatttcaaatgagccaattttaaacttttattatgtttaagagcttctactatgatattatatagtgtggctttaccaaactcaatttgtgagacgtgagaaactgttccaagcctcaaaaacatgttggaaattgttcaagcacattcattcgaaactaaaaatgaaaactaccatggctcctagacaaaaaaacgtaatcaataatcataaattggctattgtttagtgaaagctcttgtgtttgaaaaaggtccatgttaaaatagcttaaacaaatatttcttgaaaatatttatctacctacctattattctctaccattgcatttagttgactggtagttttgaaactctctatactcttatcatgaacttaccatttcatctaatggtcttttagtcatggagaattccacaaaaacactcccagaagcccaagaagacaatgatgatcatgatcatgattcacccacttccacagaaatctctacaaatcttcttcatgctgagcctgaatatcttcatctacctaagttgttggccatggaagaaagtttgaatcttcttcagcatgaaagaaatgaggcagtcactcgctattcggattcaatcaaattcattgctgaactttccagcgaaagggattctcttcagaacagaattcgagaggttgaagctgtcacaagagagaaggaagccgatttcgcaataagaatggatgaggaagtgagtgaaagaaaaaagcttggaaaggaaattgaaatttacagggagagaattgaagacatggaaatgaagagagagcaaagcaatgagattttgtttaaatgctttgagtctcttcgatcggtgaatgtgagtttggaaaggatcataaataatgtggatggagaaaaaactgatgataaagatgtcaagttctctaaatgcataaatgagagtgatttcatgtgtttggaattggaattgaatgaggaactattggctgttacaaggctcactttggaggctgaagaaaaggtgaatgaattcaaagaattgagaaataaggagaagagggagttggagaatagtgtggtgagtttgacagaggagaatagagataccaacagtttgctgagagcagccttgttggagaaggaagctgtagagaagaggttgaaggtaaatagcgagcagaagagagttgcccttttgcagattgcagaacgaggtttgcagcgtgttggtttcgggtttatgatgggaagtgggaatgttgagcaatcactagagagtttttcaggaacaaagtcagatagtagtgagtgtgaagaagaggttgttagcctggtatgtactaagactaccttactgaaagttaattaattaagaatggccaacaccaatttcattagcctataactgtaactagatgattggcctttgagaattggttaagtggtgaaactatttattactgtcattttgaaattttcttaataggcatcaactgtagagaggataatgaagaatttacggctcgaaatcactaagttgaggcgatctttggaagaatctaggtatactctttctagaatgtgactgaaaaaaaaaactaagaacagttttatctgttctaataattccctcctttgagtttataacatcagctaaacggccaggtcagacaccgagcggttgcagagtcttacggacaaacaagctcaaactattgaagaaaacaagttatacatgaaggagttggaggaaagagaaagggtgctgactcaaaatgtagttccttgactgatcaaaatatgttatggttattttgctctacattcatcaaacatgttcttttctataccatactaacttgtttctcattttctatgtctggaaaaaaaaaggttgaggaattcctgttggaaattaaggaaattgaagcagaggtaactagatggagagaagcttgtgaattagaagttgaggttgggaaaactgagattcatgaacgcgacaaagtggtaaaattccattcctttctttgttagtattcacttagatgattactcagtcatagagaaccataaagattaattgtttgaaactgtgtaatagattggcattctgaaacaagagttagagaaaacaaaggcttctttggacatatcaaatggcaaactaaagctgaaagaagaacttgctgctgcagccatggctgctcaggctgcagcagagaagtcgttacagctagctgacagcagatctgcagggctccgtgaaaggatagaagagttgtccagacaactagaagaagcagaaactcgagagcgacatagtcatagggtgagacatatatgctggccatggcaaattctcaaagcccatgcagctaatgtaaataacaacagagtgcgagatgcacgacgcatgataccacaaatgcaagcatttcatcattaaaatcttacaattcatattgtattttcgttcaagatccatctttaattatgtcagtacctccttttatttattcaattttaccattgtctcatcctccctcccatcagtaacacaattgctttatagtactgtaaagaagaaattaacacaaattttactgaaacacttgttcaaactgagcatatgatgcattagatacataaatgtgtaaatagttcagaccaattttgtaaacacatggtatacaatagtaagtaaatacatggcaaccatattgcctcgatctcttttgtgataaagaaaatctgatactcttttcttgcattctcttttcaactggttaatcgaagagccttccaacttcttgtttcatcatgaacttgatctgaagcaaaaacatcaacttagatataaatatatttttaaataaattcctacagattaaaacaaaatttagtgagttatgtatgtataaaaatacctgcttagctgtaagtccaatatctttcaagtcatcaatctgaaacaaatattagcatttagtgttacctcatcgaagggcttagcatattagaattatgcacaactgaagcacttacattcttgaacggctctggagattcttgacgaagttcaagaatatatgatgatcgcttctctccaattccctaaaaaatatatgcatttgtgtaaattatgagaatgagaatgagatttatataaatatatatatataattaattaaaaaaacacacagcatacctttaattttttcaattcctccctgatgataggaaaaacacataaaagaaaacaacaatatcagttacaacattcttgtactacaaattttgctagtaattatgaattaagattatatatgcggttagaaactcaatttgagtacttacttgtcagctgtatttagaactcttaaacattctttaacaacagaattctgcacaaggaaacaacattaaactaaattacttccggaatcttcaagaaataaatgataactacataaaagaatagctgttgaattgaatgttgtggtttatattatttacattatatgaaaatgattgattgatgaaaatatcaagtcataccagttttctgaaaacatcttaaagaggcaactattctttggaaaatataagccaatgtatgtaaaataacacatttggtttaaaaatatataatgaaactttcatatccctagctaggagagagaggtaagtattataagttataactgatctgaaaaagaaaaaaaaaaattcatagactaatttttatgtataatataacagtctaaaaaacatattagattaattaattagcggtaaaacaatatttttgttaacaagagtagtatattatgcctaacataccttcacatcagaattgtgcacactgaatgtttgccacgggctatcgatgtttttgacatcctttgtactatgttcaacaaatggagtagttggctccacaagctccgttgggagtaaagcacgagataaagcatcatttgtttctattctcctcgcagaaaatggagttcctgaatttaatgcctttagagtatttgatagttcccgtaatcttacacttaatggtggtgatttattctgatcaaccatggaaatattattttctctcacaaagacttgacctgtaatgtaacaatgaatgaaataactcaaatcacataaattaacaaattaagaacaactctcaactaggattcacatcatataatcaaaccttctttgacaagtgtgtttgtgctgctatgttcctctggttgatcctcaccatgctcagcaacaggcttgccctgcaaaaaataacagtgttgctggattaagctactgaacataaattgaacccaaaaaataaaaatgtgacctcaccttttcttcctcttttatggtttcactactagtgctgccatgaacactcagaccatgttcttctggttgatcctcaccatgcacaacaacaggcttcacctgcaaaaagagatagcagtgttgctggattaatctattgaacttaaattaaaccgaaaaaataaaaatgtgactcaccttttcctcttttatgatttcagtacttgtaatactttccagcactaaattttcctgcattaatatatttcactaagtcaggaaaaaaaacgaactttgccactttttgttaagagctcaaataacaaaaaagcatcaaataccttgtcagaaggagtcagctgacttgcatcgtcaaaaagtttccttcaaacaaatgagtaattttttttagatatggatgtcaattgtataggaaagaaaattttaacatatatatattattttgcttgaaattgaaataaaattttgacataccttccctcaaaggatttaccgccatttgctttcttttcggaaagtggcactctgtagctaagttgtttctttgtagtagcataaacagtcttaggtatttggcttttcttcgataaagacgtcactgattttgttaagctacaaactttcttggttgattctacaagagcaccattgatcttttgacaagtgcgagaggccaacttcaccatagatatggagtcttggcaatataaggggttctacaatattttcagaacaaaaaaaaaaatatgtcatatgaacatattacaggctaaagtaaagaccatatatcacaagagagactcaccaaacaagcgatcatcaaaactttgtttacccctcctaaagaatcttgcagtattcgtgttagtttgctttcacgataggggacatgactttcattgccacccaatgcatgtaaaacatttgaaaaagcatatatagattgattaatcttagtttgctcgacagaattgaggccatcattgccctttctccgaacatcctcataacctgaaaaaggtaaattcaaccaagatataaacttttattcaataaaacataagaaaattgttctgaaaacaataatgcaatgtggtttaaagacactaccagctaattcaacaaaattcatcttgctagtttgaagagtatctagattttcattgggagatgatacatgaactatcaaacccttgtggcttctacgaggaagctcagatggtatcttttgtgttggtttacgcgaattgaaaccaacacataacttttgaaaatctgaaattgatttcacaggtacctgaaaattggataacataaaatgcccccccaaaaaaaaaacagtaagaaggatgataattattgatgctatcatatttcatagccaacaagaaacaacaccaaataccttagaaagacctttaagttgaatttttcctagcttatcttccaatacaaaaactgccgactgctttgtatccaaaagatcacaaacacgatcttgctgaacctcatagaatgatatagcgacagtattaccatttaactccgccaatgaaagaaattcgttcattgcaagtgctgccaatccaggtttatcacaagaacccttcaaaatacaatggttgtttcagtaaaagtatatttgatttcaaaggaaagcaatactaatttgtaaataaaaatagtgattgacatgaacccacctgaatcacacaagtttttcctgtgtttttcgctccataggcaaccacagtggcattgcaaccactaaaaactcctgaaattagaggctttacttcccgtgaaaaaattagctcgttgtcttcattttgctcatagcaatagtccaattcgtaggaatccttacgactgcagtggcccaaaaaacgataatttcttgttaaatcaaatataaactaatcttatctcaaaaaaaaaaaatatatataaactaatcttatatcagcctaatatacataaactaatctattggaaggattaggagaacataaaaaaaaaaaattctaaacctaatttctcctcaattttccctaattttctcggaaaccaaaaagacgataaattttctcgttctcttcatgaattcacaacaaatcaaaagaaaattcaagagtaccttgctgattgatcaccgaaagaaatagtgacagtctcagaagcttcaccgttgggttttttcacagatatccaagaaaggtcggtagataattcagcttccttatcggttaagcccctgagtttggctacgactcgaatctttcttgatgggttaaaacccatggttgtgttgatggaggtttccgtgagattgtaggaggaagaagaggttggagctcagatgtttgagttgttgaagtgactgaagaagcttcaaatttcaattagaatgatttcaatgaagagaattcttgcagagtacgattgatcaatttgataagagagatagatgaatgaatgaaaagtagccgttagggatttcggagggattttcaaatctttattacgctccattgaaggtaagtaagaggtgaacgttagtgaaaaaacaggtaactaaaccttaatgggccagtaccagcccaaattcggcccaattccaaactcatccaatgatgtcctaattcatagttgtctcttctcatagttgtatgtctataca

SEQ ID NO: 79626 - DNA, 2300 bp, Cannabis sativa
  modified_base (1091)..(1093): a, c, t, g, unknown or other
  modified_base (1912)..(1919): a, c, t, g, unknown or other
  modified_base (2064)..(2072): a, c, t, g, unknown or other
gggggaaaaattattaattagccatatgtttatatatacaaaatactaagttaaactcaacttttttttttgtcgaaaaatatttttttttaatttttttttcagcttatgtaaaccccaactcatatatataatgaaaaataagagattttcttcattacataaaaaaaactaagcataaaaacttaaattttcataatattatctataaataggtaatactcattaaaagtccacccatatatatttatataaaaataaaaatatgacattattcattaagaacataagtagtatttgtaaaaagagaaatatatgtaccgtacgtgtgaataatttccttgggaatttttcatgtgtatagctttggaaccgcgacgtttgcatttataataaactgatgaattcgaataaaaatatgggtccactacaattgactttacagttttgtctgaaagaggaaggaggcataatatatattaattttacttttgtatatgcaaccctaataatccattcaaattaaactttgataactcgataagaaatacaaattgaaaaatctgacaaaaatgtatcttacaattcatttagcatttctcttagtaaaaaaggcagaatctatatagtgatgttacgtggatagaaaaggaagataataaaggggtacatacaaaaaaaaaaaaataatataaatagatcatccttcttcaatgtgaaccacgaaaaacttggattcactcaactacttggtgtggagtataatatgtagtagtagtatatagtttcaattaaaaacattatacatatataacagtacgtataattataattatatatataatatatatggctagagatagggaccctcttgtggttggtagagttataggagatgttttggagccatttacaagctgtgtctctcttagagtgttttatggtagtaaggaggtcaacaatggttctgagtttaaaccttcacaaattgtcaaccaacctcgtgtcgacattggtggccaagacttaaggaccttttacactttggtacgtacgtgtatatacaattaactaattaatatatatatatnnntatatatttatatatgtgtgtgattaactcatcaaaactgaataattattaatacaggttatggttgaccctgatgctcctagcccaagtgaccccaatctaaaggagtatttgcattggtaattaattaatactatttttgcattgctaatatacatatatatactcttccaaaaatatataacatatatatttcatcatctcatgaccatcaatagtatgtgcatgtaaatatatattaatttgtatatgtatttaactttagttattagtaaagtagttaaaaaagtacgtatattaatgacatattttataatattattacttcgatttgtgcatatatgcacatcttgtacgcactacatatgatatacgacgtatataatggcattttttatttttttgctaaataattagtaatttattatcaatattaatataattaattaccctcaaatttgttttcttcttattctttttaattaagccacgatcgaaattcaattgccaatttaaaacaaacaaaaaagctattgttaaatgttttcgtacatgtatacgaatgggtgcacttttaatgggtattacccattcatggatagtattatgaaaatttaagtttttatgcttagtttttctatctaattaaaaaaatctttcatttttacattatatgagttgagattatttcatcagttgaaaaaaaaaaattaagaaaaaagttttttggcagaaaaaaattgaatttgacttaagtattttgtatataaatatattttttgatatagtgtaaaaataatattttttgatatttttttnnnnnnnnagttaaattaagtatagaaattcaaatttctctttttattattcgtcgttggatcaaaatctaatagtttaataattttaaaattaatatttatagttaaattgtttagtaaccatcaataggtaatacccattaagaagtgttnnnnnnnnntatatatatatatatttatatcacaatcaacaaattttattaaaaaaaatttagcaaacaatatttatctacctatttcaagtttaatacctacctataataatcatagtatagtaaaaaataaacttacctttatattttcatatagaaagtttttttttttcatcctaataatatatatataaaaaaaaactatttttattaatgtatttaagtttttaatatgaa

SEQ ID NO: 79627 - DNA, 2256 bp, Cannabis sativa
ttttttttttttttaaattaggttggttgcacttaaattttagtaacccgaactttagattgggatagaaaatatataggataaaccgcacaaaccgaccgatgtacagccctaataggttgcctaatatactatcaccttctacttaagtctagaatataatttacattaacttaaatgacataatgggaatatcatctataaaagttagtatatcttaaagaatatagaaacgaaagtaaaaattaaaacatgtataataaagtgggtatacaaaataatttactgtataactaatacttaactttaatttttaattataaataaatatttagtttatatttttagaactcttatttaattattaaatgaaattattattcatgtttcattttttattagtatatttacaccatttttttaattaaaatttaataacttagactaatcaagaattaccacgtgacaatgtacttacagaaatttcaaaattataacttaggtattattactataaaaaaattaaatttaagtatttatttacaatcaaaaattaaatttaaatattcatattgcaaattacttaaataaatataaagaagatattttattcaattagtcctcaattatgccatttattataatttagtcgtctttttttttttttcctttttgaaaatttataatttagtctttaaatttcaactttaattcaataatgattgaaatttattaaaaaacaaaaaataaaattcttaatttttaattcatggcaattaacatgtcaacatgtgaatgtgtataggaaaagaaaagtgattatctcatggaagagatgtcaagcttgattggtctcttttctcttttgttataatggaaactattgcaaagatgaaatcttgctcccactttcaaaaggaagatcgagaagatgaatgaatccaaaccacggccttacaaagttgtctctagagtcttttgaaaatctgaaatcatttgacgatagagtaaactaccttcgcttttcatggagcaaacggttagaatttaagataagaataatgagattctatctcaaaactaattggcaatgggaggaatagcctatctatcttatatattctattatatttccacacattagcaatgtgaaattctcgagattccatctcaaaactaattggcaatgtgaggagtagtacatggatcttatgtatggtatttatgttctacacattatcaatgtgagactgtctaacacaaacagagtttagtagtcagactgataattaactgttagaaagaaatacagaaaaaaatgttagagatattgaacgtatttattcgttgtgatgattttatcaaattttatcctattttaacatactaactgtttctgtcatgggttaacctccatataagctacataatcattgaggttatggtatcgaaccaaccaaacaaagaaaaaataagttccaaaatcccttccaaaaaaaatttagatgtctaatctttttaaaattttcttattatttggtactaaacatatgaaaaccatacattttgaatgaaaatttaagttttatttattacaaaggatttttttttttgacaaaaattattgcatagggcctaattgctcttgataaagaaaaggacttaattgctcaaattgaaatttgaggtccaaactgtaataagtggtaaaattcagggaccaaaaacaccaaatatcctataaaagaaaaaaccccacgcttagtttctgataccatccaacgcctccgattgaaagctcgttgccaataacatcaaacggcccagaataatactttttattccacaataatatatatatttttgtggaaaaaagagagcctttttactctttattagtgttattattttaatttaattttttttttatttatttattttgtttatagtaagacggggttgagccaaaggcagcaaattttgaagaaccctatttcttgcttttgagctctgaaagttcaccaaatcgttatgaaaggaacgaaacgtttagccgtatcggaatccagacctgctgccggtgccaccaatgattcagtcgttaagtttctctctcttttttgacattattatattattaatctttgtttcttcactaaatggtaatggaaattcagtttggtgattctctcttttgagttttgaagtatttacaatttcattattcaagaaaattggtttcggtatctacagcca

SEQ ID NO: 79628 - DNA, 2150 bp, Cannabis sativa
tatatatatataaagtattgttatgttattaatatgagtatagtattgggtcatttgattagatgcgaatggatatacattggaaaataatgagaaggtaagtggaaaattcctgccctttcacaccttcaatggataaccccacgcgcaatcatccccaccaccctcccacaccttccacctttcaactaattatatttaacaatttaaaaatcatactataatatagagtattattaattgctataatctttattaactaaaataagtaggatcttatattgaattgtatcaatagtttaatttaatataagagcgaagtaagaaaattgatgtgtatttaaattatattataccttataaggatgctagacatcatgagtgttctttaatatttctctataatataaggtacttctataatttaacctatgtatcatttattgttcgacatttcagaaaaaatttaatctattttttatagtcatatacgttatagtcagtgacagactcactactaataaaagtgtgggggttatagaaaaaaaaattgcattgaaaatattaaatactttttaatttgataattatactaccaaaaaaaaaaaaaaccctacaaaattaaataaagtagacttagacattttttctatgataactaagtcctcacatagcaaaaattttaggtccgcttactatagttatttaagatatattcttgagaaatttaaaataatttataatatagaaacaatgtttaaagaatttatttcacactcgtataaaataaaagagttacgtatgtaatagattgtttgaatttatttttagcgtgttacatttttttgaattttaaaatttttaaatgactgtcttaaataaccataacgtagagaactataataaaataaattaaagtagagaattttaaaatttttgaaactttgacctctaacatatatataatttcattaaaccaaacttactttagcttaatattgggatgaaattccataatttttatatgtaagagaagtgttatttattaagatttaaagaaaaaaaaaaagttaagattttaccgctatcaatttacaattttttttaagattgaagtatctatatcaattgctctatctagatttgtaatatgttatcaataggcatttttttttccttgtgtaacatcaataagcatattctaatgtaaattattgagagatttatatgtttttcttttattctcattttgtcacatcctaaaatggtttgattttcttaaaaaattaacaacttataacaaaaagaaatgaatgaaattaattctagactaatgtagaagcaacaatcaaaacaataaataaataacaaagaaagagtggaaaaggtgaaagacacgcgcctgggttggaaggtatctttggtgttacgaatgataagtgatgcgaggagatgacgtcatgcatgttacgtcatgtttaccaattgttgtttgccacatggtgtttttaaattaattagtgttcaagttgtccttaattataattattatcatctaattttaccttattttatgcaaatttgtcgttttctttgttttcaaacagttcccacatgagctgtcatccacccaaataaataactcaatttatttaatttcttttttcttttttcttcttcttcttcatcacatttttatctttgctttgttcataatttatagccaaattttcatgatttttgctcattaatttcatgtgaatttgatcagatgaaaacttataatatataaatgttcagagagtaagaattatttgcaaaatctaaaaaaagaaaataataaactctataggtttttatcataatttcctgcatatatttgaaccatttcttttttttttttttttaataataatattcagccatttttcttttacttttttttttttttgttggtttatttagaaaataatgtggtaataattaaacttgaaatttgagataaatttattttattttctggagtgttcattattatagtatgatcagtttcatttcatctttggtgcaaatacaatatattatctttgaacacagtttatattattagaatctaactaagcatcaatgaaattatcttcattattgtt

SEQ ID NO: 79629 - DNA, 4750 bp, Cannabis sativa
aaattttgttgtgactaaaagttagattttttatagtgttggtcaatatatttaataatcaaataaaattttatttatttatatatctagtaataataaatttgttttactttaattgtctcttgtataaatataaaaacatgaaccagttgggtcggcttagaatttttaattatttagtttcgaaccctttatattcacaattttgtttgtagtcatcataacttattagctagctacagatataattgatctttctctttcctagttccaatcgaaataacatagaaaataaatcaaaatttcctcaatatatataattacaaaaatgtataaatttgattttagaaaatatattaacaataattgtatttaaagactattcttcttaattatgacaggtaattattctttgttgtaagatttattgacaaagatttaagattgttactaatattattaatggtaatttttttgagtaatatttagttaacttggtttactccgacagctaaagacaaatcttggcatctaaattacgtatatacaattacacaacatatacacatataccatagtgtatatcgcaactgttttataatttaattaatttattattttttaatatgaaatttgttttgagctgtaatttatatgagataatcacatatttgtgtatattagctaggttattattaatttatttatatatatattggtatagctagggtttccatatgtatatatattatgtatagttgaaattaatatatgtatgtagagaatatgggttggaataataatgataataatgggtcatcatcttcatcagatgggaaagaacgtcttcgttggacacaagatctccatgatcgctttgttaacgcagtcactaagcttggcggtcctgacagttagtatatatatatatatattatatatgatatatatgtgtatttatatgtgtcttataatatatatgtatgtatgactatttcatgcatataatacaggggcaacaccgaagggtatattgaaggctatgggggtttctgggttgaccatttaccatgttaaaagtcacttacaggttctctctctttttctataatatatatactgtatatttatatatgtgtatgtatatgtttgtactagttaggaattaatcaactcatatatatattaccgtgtgtcgttttgtgtataaaaattattccattcaccaaaatttctatgcgtacatatgtatatatgtatgtataatatgtgtatatataacagtatattactacagttgatacacacatatatattatgatcaatttactttattcttgatctagaaatcaatataattaaaataattttttccttttgttaaaataaaaaagcttttgcaattacgtacgtacgtacggaaaatatacaaagtagggtttttttttttttttcttattatatggaagtatagtagattatattaggtggtaatttgttttggaaatataagcattactatttgacataccatactaatataatatttaataattattagctagcatttctctagaaaacattataccttcaattccaattatatacgtatatatatatatatttatataatacaacattatttgtacttgatggtactagctaccgttaattccaatatttggaaaaaagacatcatcatcatcatcatcactacatgcttaatttaggtttttcggctaagagcattttcaatactatttcttattttattcttttaactattataactaattaaaagttaaaatagagtcattttaattgtttttctctaattatactctttacttagttactaatattaatgattttaataatcttttataatttgaatttattaactataaattaattttataaaataatgaaaaaataatagtgttttggattattaagatacactactaattaaaaaagcttaaccaaaaagtaaaaaacctaccaaaaccattttttgtatgttggggttcattaattttttcaaatctcacctctttaaaaaaggatagtataaagtatagtgattacatatatttattaatattattatttcaaccaaataaacaaagtattattgtgatattattgaacgtatattaattatctcattgttattatttcagaagtataggatggcaaactttattccagaatcgaataacagtaagtgtgaaatatatttatttttaatttttaacagttagaaagaacttccacgtgtagaaaatgattagtacgtagtactctattaattatatgcattcttataaataattttgagataaaaaaaaaggttatagctagttttttattgtttgagcctatcatctaaaactaatattaatttatatgtatatgtatttggctccaaatgtgtatgtactacaggagggaataagtttgagaagaaaaacatttcagaaatgctgccaaatttcactgcaacatcgtgagtccttatgttacatcattctttataataatatatatatatatttataattattatcatttgttttgaaataaaaattaatgctatatatatttatatatatgtagtgctgctcagctaaatgaagccctagagatgcagaagcaagtgcaaagccgacttagccaccaccttcaggtatatattatacatatatatatatatattattaatagagaagtagtttgtatacactaaaaataaaaaataaaaaataaaaaataaaatatgtagcagaagatacaataaatatcaagttttgtgaatataattctacagtatatacttggtgattcttttataatcgatcattgtgaatatataattgaaattaatggctgtattgaaaacgttttaacaaatattttaatatctaaaattattgatatttctaccgtgcactcattttcaacatctagagacttttaattttaaatttttttaaaataaattacaataaaaaaaagtgttgttctctatttcaaataagtatataataaaagaattaaacatggaacaaattatttaaactttattttagtgcatgtattaaattattttaaattttttaaaaatttacaacaatatatattatcatataaaaaattaacattaaaattatatatatatgtagaaaatacaaaaaagactgcatctatagatctttttctatatataaccataaatttttgaccatattataattatatataaatgatgtaaaaataacaatttatattataattaataaataataatctttctttatatatatgaataattgatttgaagtatatatattaattagtgtattaatttgtttgaggaaacaaaagagcatgaaggttaaaatggaagtccaagtaaagtacatggaaaaaatcatcacaatagatcatcatcatcagcccaatcacaacaacaacaacaatactactactaataaaaaagtagtacacacaagatcatcaccaccaaaatatatgaataataataataataattcaaatgattattattattattccaaagaattattattatctgaatcagcaccaaatagtactactactgaaatattattatcccaatcccatcatcatcatcatcaagatcaaggaattacctcatcatcatcaccatcatcatcatccacgtcatcatcatctatatcagatcagcttaataataatattccagctacgaagaagcatagagtactacttgatgaaaacgacgacgttttctcttctggattaatattacaatcatcagtacttgattcagattcacattttttgggtgaaaacatgctattattcccagatgataatatcagcttctattggagtattattaacaacattaatactatagattaattaataatttatttacatcttttgtgtacaatataaatatttagtgctactaataaaattaagttattgtcttcttgactttaattttttttttatttatttttagcaagtgagagtttgacagtttaaagaccattttggttgtttttgcaatagtacacaacatgattaaatagatgatataaatgcaatatttccgtatagcatatatacatatatatattcaacttaattaatttacactatgaggtatgaaccgttaaatgcccttgattcaaaattttgtaattaaatataattttttttgggaaattatagtaaattaccataaattataggaccatatttgtaaatatcttcagttcaaaatttatagtaaaatgattcttttagattatttattatttatattgtcttttgctacataaaaaaaatcaataattttttttttcatattttatttttattagaattataatcaaattacttaaacattatagtatatatgtatattaattttgttagaaacaaattatttgaaagttatgtcggtttttttagtttttataagttgctgatatatatagattttgttgtagtacaatatatatatatatatatatatatatatattttctatgaatcagttcattactccaatatactaatttacaacctatgagcatcttcaataaaaagacctcatcatgttgaatcaattaaactaatttttttgggccatatatactacataattaattcagagttttacaactcctttactctattcagaatgatatgtacattatcacacttg

SEQ ID NO: 79630 - DNA, 2406 bp, Cannabis sativa
caatcatgcaatgttggctctcttacataattaagaaacttaaataccataacaaactcccgatcttatataaatttcatcctcgaaatttgcttacccaaataaatctggatatctgattctaatatcatcttcccgttcccatatgtagcttcttccactgtaaagtttctccacaaaacctttactagtgaaatctttttgtttctaagctctttttctcttttatcaagaatttgtaatggcctttcttcataagtcaagtcttgttccaactctaatggttcataactgagcacgtgtgaagagtctgacacatatttccttaacatagaaatgtgaaatacattgtgtacccttgacaatgttggtggtaatgccagtctatatgctacctttcccaccttctcaagcacttcaaaggggccaatgaatcgtgaacttagttttcctctctttccaaatctcattactcccttcagatgtgctaccttgagaaatactttatctccaattgagaaatcaatatctcttcgtttttttgtctgcatagctcttttgtctgctttgagctgtaagcattcttcttcttattttctctattgcctctgtcgttcttctaactatttctgggccaagatatcttctttctcccatttcatcccaatgaactggagatctacattttctaccgtacaagacttcgtatggtgttgtaccaatggttgcctgaaagctattattgtaagaaaattctatgagaggtaggtacttattccatgaacctggaaaatctagaatacaagctctaagcatatcttccaatgtttggatggttctttcacttttcccatctgtttgagggtgaaaggttgtattgaaaattaatctagttcccatggccttctgtaaacttttccagaaatttgaggtgaatcggacatctcgatttcaaataatggatataggcactccatgtaatctaacaatctcctgcacatacaacttagcaagttgatccatagtatatgtcatacgtattggtagaaagtgtgctgattttgtgagtcgatctactataacccaaatggcatcatgttgcttagaagtctttggcaatccatctacaaaatccatagtaatctctcccatttccattatggtatttgtatgggttgtagcaaaccagctggcctttggtgctctatcttcacttgttgacatgtcaaacactttgccacaaactctaccacatccttcttcatttttggccaccaataatgcattttttaaatcattatacatttttgtcgtacctggatgtagcgaatatggagtagtatgagcttctgtaagaatttctttcttcaattcatcattgttggggatacacaaccttcctttgaactttaggcttccattaactgaaatctcaaaatttgttttcttcccaccttccactgcacttttctccttgattaaatcaggatcttcaagttgaccttgtttgattctttctagtaatgtagactgtagactcattgcatttcatcttcctgtaataatctcaatctctgacctacatatatcttcttgattcctgatgctttaatacctaatgcaattgatcctgatgcgatttacttagttaaacatgtctttagatcttatgtggcatggccaaaatatcttgttcttttagacggtgagaaaattaaaaaatatacaccaaagaaaaaaagaaccaatacaaaacaaccccagccaattctacccaaaacacaaccacagccacaacaagagactagtttagcttcttcaagctctagtgcaaggccaccacaaaattcacaaaaagtaaccttcatagatgttccctcaaatctaaaagctatgtggaatgatattatgaaaaaatctgaatcatttatgattagtgtgcttgtgaacgaacacatgtttgatattaaagagcataacatagcagtgattaaagaagatgttcagtttatggtatctgttagtaaaatcacagctgcttgcatatcactatatatgaggtacgtactttacactataataactattttctttcttattttatatttttaaaatattgtgataattgtaaatcatgtacatgtaggtttttgtatacaatacttgtggagaatgaaagaatgcatttatttacattttttgagcctcaacttttagctgcaatactagggagaacacctgatgatagagctagagatcttgcaaaaagatttggagaaattataccaggacaagtactcatggcagcctttaatgatgggtaaggaaatatattctaaacttatatatatatcaattaatgtaactatataattttacttttttttttataaactaaatgtttta

SEQ ID NO: 79631 - DNA, 854 bp, Cannabis sativa
gtttttacacaataataagaaaatttctctatttctgttagagtctaagtttagtttaggttcaatttctaaatttcgtaatgcatttaaattctctaatggtattgaagtccctacaaataggtttaagtggatgtctttttcttaaaaaaaaatctgatgtaaatgtaaccattatgaattatggaaaaaactttattgattgctacattgctcttaatgatggcccttcttggcacttttcgggtttttatggttctccaattgttactcaagaatttaacatggaaacttttaaagaagcttaaagacacatctccgttgatgccttggttagtcaagggtgatttcaatgaaacaatctcccattctgacaagcttgggggtcccttgaagaatgaatcccaaatttatgcttttttcgaaataccatagacttttgtggctttcaagaacttatttttgatggtgatcaatttacttggcacaatgacaatgtcaatggaactaatgccaaggagcgcttggttacattaaatatagttaatcataattaatttaattctttaagtatatagttaatcataattaatttaattctttaaaacgaatgcatgtttacctattagtaacctattattaaaggcaagagaaaatgtaacaactaacaataatggttacattaaaaatataactattgattagtcacccatttattattaaaaaaaaatgaaaaaaaaaaaaactacagtagaaaaagatggtaagaaaatgtaggcaatactttaaaaaaatatattttaaaagagaaaaatgagtaaacaaaatgagagagattttttgagaaaaaaggg

SEQ ID NO: 79632 - DNA, 2027 bp, Cannabis sativa
ctctctctctctctctctattgtaatcaccaaattagtttatttatgtgctttttttttattgaaagaagtttgtttgtgtgcttggtgccatatatggtggtttatgctatttttcagtttcatcttaaaaatgacatgaggtaacaatgacacatttagctcgaaagatatgatatcaaattttaattttttttattagtataataatttagtatgttttttcaccattgaattaaaaatttctgttttaatttaatattatctttaaggttaattgaattttatatatttattttataagtgtcttaaattcagtgacttggttattaaagaatctaagcatttttaggcatgctagaatgatcttgattgcattgcatatatggataaaggatgagatcttgctcctcctataatattttcactttttattcttatcaacgatataaaaataaaatctgtatgcaattaacatagaattacttattatcaaaagcataaagaacatctaaattaaaaacaaattcagtcactatatcatggcttggttgatagtatataatgctttgaccaaagtgtgtatgagactagtctctcaacatttcatccaatatcaattttagcaaagtatccacactgtataataaataaaataaataataattgcagacaaacacaatacacaaatgagttattttaacaaccaaaccttttgttgtttattgtcatgtcatgctaggctaggctttcctttccctgtgtttttggatttggaagactatacaaggatttcagctgcctacttatgagcttactgttgtgaagagcaagattaagttctaaatcatcagaccaccattgctccaatccatgtgcttcaagaaacttttggtttcccttagacatcacaaacagcttagctgccatttgtcctgctctaggcctcaaattctctttaccaatgttgcccttgttttcttctttttcttcttcttctgttgctccatcaggatcagtataagagcaacaaatgtagtcactgttatttacatacaaatgaggtacccattttcccaaagctagaccaggattcttcaaaccatacaaattgggcacccaccaactattattattactattactattacttgtttcaccttcactgttaacttgagttgaagaagaagaaggaagcattgacttgaatctcttccaaacaaaaccagctttttctccaatgtttcttaagctcatggcaagtgaaactgaaggtggattgaacaagtgtgtgtctacatatatcccttctttggctaatgtttttcccacttggagagcaaaaccagcccctaaagagtgacctgcaatacacacattactactaccatacttttcagccactgatttcaatgcctctaaagccactttgaatctgattgagcctttcaagctttcccaagccaaaaaccgtaggtcatcttcgatgtcccttcggaatgttaagctcttcaggagtgttcctctgagtgctaatacagctcttggtgcaccactgggtctaatgaggattaactcagaaagggcagcagacctgtcccattctagtattgcaccaaaaatcgatccatctctttcatcaaccaaggtttgaactagcttgtatttaaagggtatccaccattttggggctagagcagtttcttcacttctgttctcttgtctgtcaagttcaagcagatatactgcctgtataaaacaagcaattactgttcttttgtagtttccatccttcctgacaaaatataatgaagaggttgttcctttatcaattgggttacaaaaaattattacttctccccaacggctactatgtttggaagttgaattttggcatgtataaaataaaatgtggaagataaaaataaaatcatcttctcatgtttagtctgaaaagaattgtatagaggaaaaagttgtttcaacaaaaattttcatttctctaccaaaatccaacttctacattac

SEQ ID NO: 79633 - DNA, 2288 bp, Cannabis sativa
atagttcaaggggaatttttaacggccaaaaaagttcaggggcataatttagtacatgtcaaagttcgggagaaaaattgctaattagcctaataataatgtaaaactatctatatgaacagtaattacacattacatatattgcatactgcacactatatgttgtcaacgttaaaatgagataaaaaaaaaaaacaaatttttgcatcaaattaatatattaggcgttggaaatgcttttacaaacccaaagctttgagtactcaaatatcttttgtttttcaagaaggcatattttcactagttcttagagggatagaaactcaaggaactataaattgtctaagtcaatatatctaagaatggaatgaattatatagccagcaccttgtcaacaccagcaatagtacgtatgttacatcaaaatttatccaaaatgatggtgaacttgtggacaacctaggctatattcatccacactattggatagtggatgtgtatgatcacacgaccgaaaacatattctcatcatgaaagactagctaatagatcacgtgtacataaaaatgtaatagtgtattctcatattgtcattgtcaatatgtaaaatttattctcttctcaacaattatggcccagaattaattctgacaagtggccattgtcatggccactaattagtgcagataattaaatcaaatccaaatagggaaatgccactaagagttagagtgtcctgaggtaattattcatgaagagcagcatcaggtgctactccattatttaaaccccaatatacccaacaccaagagcacccctcaacttgtaccactaatctcttgaccctcttaattctcctttttttaccattaattattaagtgctaatcatatggtgatgatgaacaattttgcttctttcagtaagaaacttgatttgtatagtgattcccctaacagatcacgcaccagcaccttatttcgccacttactctttcgttctaaccctcttttcatccagcttacttacttcttaaccatatcgttggtgggttacttggctttgagtgtattcacaaagccaagaacttctcaacctttgatccccaaacagttagatctgttctatacttctgtgtcagcaactactgtttcaagcatgtcaaccatcgaaatggaggttttttccaattcccagcttattattctcaccattttaatgctattgggtggagaagtcttcgtttccatgctaggaatccaaatagaaaggtctaaattgcccaaacaccaaaccacagcagtagatcccaccaaaatcgagctacatagcatctcaaatgccgcatgtccagataataataatgatcgttattctaacaatctcttagacatcgacattaataatgaatctctaaaaaataactctattaagtatttgggttatgtggttttggggtatttggtatttgttcatctagttggttctgccttactttcttcatacataactctatcttcttcagcaagtaaagtactaaacaccaaaggcatcaaaacacaaacattttcagtgttcaccatagtttcaaccttcgcaaactgtggattcgttcccacaaacgaaaacatgattgttttcaaaaaaaattcagggatcttgctcatcctcatttctcaaatccttttaggtaacactttgtatccagtgtgccttcgtttagtaatttggagtttgggaaagataacaaagagaagagagtttggttacttgttaagaaactgtaaggaaatagggtatgaccatctgctgtctagtgttcgttcaacacttcttgggttgactgtggttgggttcataatggtacaactcgtgctattctgctctctggagtggaattctgaagccatggatggtatgacattgtatcagaaattcgtggctgctttgtttcaggttgtcaattccaggcatgcaggggaatcagtagtcgatatatccactatttcttctgcaatcttggtgctctttgtcatcatgatgtaagtataaatatatatatatctacataaatatatatacatattactctattcatacgtacggacaatatgagcaactatgtataataattaacggtaaatatatcatgaccacctttaagattggaacgtgatactataaattttataattttatatatgtagggcggttatttatatataaaaaaaaataaaaaaccaacaaacacgacgagagagaatgagagtaaataataatatttatca

SEQ ID NO: 79634 - DNA, 2084 bp, Cannabis sativa
  modified_base (1377)..(1379): a, c, t, g, unknown or other
atattattaacattaataaattaattatttccctacttaattactgatcttgcaaaatattaattaatgatgcttaaataccagtaattcgtagcaatccttgacaggttcaggactatctataaagggatcaaattcaacaaaattattattattgacattatgggatgagcttattatttctttgtccttaagcacaatacttccaattctagctaaattattatcttcacgctcgtttgcagcaacggcttcgtttagttcttttttagattccatataaagtttctcatattgcttaacctgtcaattatttattaataagttatatatattgtttgaaattaaaaaaaaaaagaataattaagaaattaattaatgtatgtgttgtgtgtgtatattaatattaccttgtggcgtaagaaagttaattcatagtcacatatcggccaatttttgaattgggaatcatcatcttctgaagatgtctacatttatacaacaaataatattattaaacttaaaattttttataaacgacaaaaagaactcaaatctatctattttggcatctaacaaaatattttaattcatatttttttttcatctctatatatgctctagtcatgaattagaacagaaaaaatttaatacgtaagtattattatttaattttatacgcgtgaaaaatataccatacactattaaaaaaaattaaattaaaatattttcttaaattctaaaaatgataaatgatgatgcatggctaaaaccccttaaaagcaatgtaaaattttgtaatgaaaacatgagtaatgtatgtatatattttatatatacctgaagaaggaccattgcagtagtgtctttagaattagatgttactagggtgagcaggcaacagatagataaacacagtgaaaaagcagccttagtagttagcctcattattgagaattgagatacttacactgtaaatgtataatatacacaaaaaagagagagttatgttatgggtttagtgaaggagctacaaagtttcaaagggtagtgttagagctgttatggggttacgtactaatttatagttcaatttcaataaaaattcttactttaatttgccaaatgtaagaatattagtgggtgagacacgcaatgaagaaatattagagggtgggacacgtaatgcatatgcatgcactaaatttagaatgaattaatttattaattaatatccatatttcttttttctaaaattaaaatcctatcattttcattttagtattattacttttttatattttgtggttttccatataaatggaaagctcaaagatggtaattaacatcgcagcttatattattattattattatnnntattattattattattttgacatgaatattattttctttctataattatttgcatgttttatatatactagtgaaatcaaccaaaatattttattagaaaaaaaaaaaaaactaatatgttatgtatttatggggagttatttgcatatgtttttaataaccgtctcaatatatatatatatagatacggttttaataatatatgttgaagcattcaaaataaataaataaataatgtatgttttataaaataatttacattaaatccctactgcgtatcaaagaacattgaaaaaaatacagaatatatattttcttataagggaatattattattttttttggctaattaatttgtaagtgtttttttccatttaaataacaatattttccatatatttacaaagtatttatttcttaaatacttgcacacatttgtatcaaagatgaacataaaaaatctagggatgattatataattaaaatactactgtttgtaaaaattttaacggttcaaagtttttttttttttttttttttctaacatttttacagtattctagctataaaaatacaaaaaaatcacataaaacttataagaaaatactatgaaaataacataaaaaataatatgtaaataacaaaaatttaacaacaaaataagagtacacataaaaacatatcaaaagaccgtattttatgtaa

SEQ ID NO: 79635 - DNA, 1250 bp, Cannabis sativa
ttttcttgtttggtgggttaactgtagtaatatttggaagttctctgttttgttttctcatcacattgttggaagatgaatctttgagggttcaattagaaagacaaaagatacgaaccatatgctcgtaacatttgtactcaatgggaactaacatctatagtttgtctttggtttcagtgacttatttgatcagcctgatcaagacatgccccatgccatcaatgtcaccccagctgagcaggaagctatagaacgggtatgcttactttttgtgaatcggtgaactttttatttttttgtgagatgtaaacctgctaactcagcaaaatttgtaagccattttatggattagctatgcatgctcttagagtggatgaacaacttatttgcttagaggattatcctgtgtttattcgagaaagattttactgatagctgatgttgtttttctgtatagcttgagggaatgggatttgacagagctttagtcattgaagcatatttggcttgcgatcgtaatgaggaattggcagcaaattacctattggagaatgctgcggattttgaggattgattactcaacactataccattggattcatagttttagtgtgttggatccgagctaagttccgcttcttttctagggttagtgaatttattatgattaattttgccctggtgaaatattagttactaatgtgttttgagattttttttctctttgtattgggggatcatttattttgtgaggtttaaagagggaaaaaaaagaaaaaaatcattgatatatattattgatggatcaacagtaatagttttcctaatccacaaaaaacgtaatgcaatttctcttatattttgtaaagtcattttgagaatcttggttaatagattaaaacctgttgtgatggtcctcatctcaaatctcaagttctcatggtgctcgactttcggagaagatcatttttgataatattttagtagctcatcaaattttttcatttttttttttttgacaaagtgattagaatttagaatcactcatgaatttacgacgcaaacgtccaaccgcagggcatgttttgccaaaccatgggctgctaaattcttagagcgagccacatgggacaaaattgctcctggaaatttagacagtaaagttataacatcttcaaacaacttgttgaaatacatctttccgttgttgatagtcatcaccgaagctaacgaatttgaataaactg

SEQ ID NO: 79636 - DNA, 824 bp, Cannabis sativa
taatacccaagccacaggcacgtcttgatgagtctcctcggctacagagacaccttcggcttcggctttggctccagccatgtccgagtcgtccacaaggccaacaaagcctgaactctcgttctgggcctggcccaatgtgatcgattcagaattttgcatcatttccgcgggagaaataggtttatctgcgagttcatcgcttacaatgaaaacatcgccgtatttgatcggttcctggtcgctttgaggcttacgtggctgttccacctggctcctcatcatcattttcttcttatcttagtttggtatttccgaacgttagggattcgttggacaaagtattatatttatataaggcatgctgcatgcataaatatcttattcatgaacagaagtgtacagacatatataattgaatgaggtgctgacacgtgggatgtggtgagtacgtggaaaatgacgaggacagctttggtttacacgttgatgtagtgactattgactagtgactagtgagtttgtaatctagtagaaaattccactgtttataagacgacgtttacttgaatttacagatgccgccaaattagcgaattatacacatctttccaactattatgagcatctttaaacgaagtaagtactaccactactatgaaattttagtaatgttttataattggttaacaacttttaatctccaataaaggttaattataatcactacaccaaaaacaacatttaataacacttaaaaatgtcacaataatacaattttagtaacatttataatagcttttgtaacaattgtaaaaaatgta

SEQ ID NO: 79637 - DNA, 1883 bp, Cannabis sativa
atttaatataataattcttaggaaatattattaactaatcctaggtggtaagttacatgtcatctcacttgatcaactagttattttctacgaacttttaaccagattatcatatttaattatttctccctatatatataggtactcaattatgaaatgtcaaaatggtcctgatgagtatgtgaaaataaaattacaaattgaaattttttaatatatctacaaagtgtatatatagaaagcaatggattcatatataaaaaatctaattccaccaatgatattcccttaatgtatgttactgtttaaagaacacatgggtttatataattagccagaatatatatcgaggaaacatgaatatataatatatatatatacaattaataatattcaaagtcttatatatatctttagaaagagagaaatggggtaattatatcacacctgtatgtactgttggtggatgaacccaaatccaagcgagcatagtatgccaaagctccagaatcatgaatcatataagtggtgtttttcaaaggcctcaactctatagcttgaatgaagggtgtcccagatccagtgttgacaagacatacatgaacatagtcctgtggaggagtatatatcatctccttaatcaaagcttgtgaagctgattcgatcttcacagtgtcccaataattaggccctatgtggatatcaaatttagcagtcttgtttaggccatcataatttccgtacagaaatattgtcctgaacaaatacttggtacccttttgtatgcttagtctgtaacagtttcgaactccttcaggaaagcttctgagcaatgtcatttgttgttggagaccgactctgtatttggggagtatgctttttattacaccactattaataaaagcagcatctgaaatataatttattgttgttgttttctccgagtagctagaattttcagccagaccacagtccaagctaatgaaacctgatcaattaattatcatgtattaattaattacgtaagatatatgcagctatatagctttttaattattacagaaattttaattagctacgtacctatatattcgataacaataattaatacgtacctatatagaaacaaactacatagtaatatatactgatatataaatgatgatgattaatacgtacctttttgatcatcttgtgcattaacgagatgtacaagcagggctgtaagaactagcgataaaaagaggaaatgaagcttgaacatcatattgtttagcaaacctatccggatcatatatgatctaccacacctagaatcaactcactggtttatatatatagtacaatacaattatatatctcccaagtggatatattatagctaattaatttagagtttgtaactttgtatatagaaatatattatatatgtgcaattcaatgctagctatcatgcgagtcaacatattctttgttgcttaaaagttgacccgatacatgcaaatgtaatgaattaaagtattctatctaattagtctcctatatttggcttgtttttcaactcattacaaatgcaaatatcctcttaatttcccttctttttttactaatgtaccctcgtttttgttggtcgtgagtggcgacgactttcttgattagaaattaaattacaaaaatgagaaaaatacgcaagttggaaagtactggcaattcaattcaatagctagctagggaatagtaaaatgcaagtagaaacacgtagaataatatattgacgaacgttgtgttaacttttctataataatatatattgttgagaagcatggggttccatctcaaaaccaattggcaataagtgaagtagcccatgtttttatatatgg

SEQ ID NO: 79638 - DNA, 2050 bp, Cannabis sativa
tataagactcagaagaaagtccgaactcattgcttccaaggcagccggatcattgtctgcatattgttccatttcctcctagaaataataacaaaatagaattagaaaatcaaagccagaatccttggctgcactaaggaatgtcaaattattaaacaaccttcagctcggtatgcttttgctgaatggattttaactcgtgtaaagcctcctctctttcatcctggaaaattgtagcatgtcagacaaagaataaccacgagttcatttttataaactagttcaaaccctggtcagtgataggatcttcaaggatgctcacagatgcctctcgccccttctttagagactcacactgctcagaaagttcagcaaaccgcttcttactgctatgaagatcggattcaagtttccgagttacatttctcagctgcccaatatttcaatatcagtacaagtaccataaagttgtcacatgatttataagtcatcaaatttacctgattccctgcacagctaggaagactccaaaaataaacctgggaaaaaaagaaacacccaatataaacaagttgtaaaatagtatcacattcttaagcagcatagaaatctcatttttagtctaccaaacaacaacttcaaggtaaaaaatgtccattatccaaaactttccaaacacatcaaacttacagaggttcctatcttgtcctttgaaacaagatcatcgtccactagactttggagaacatctttcacggactgggttattacacctttctttggtcccagtttctcaagttccttaagctaacaccaacaataaaatcagacaagttttccactttgttatgaaaacaaaaaaaaaaatgaaaactcaacacatttaaaatacatttcatatacttcatcgaggagattgtttagaaattcatgaataattcaccgtgctcatgaaaaggaatgctcacaagatagaagtcttgagaatcgtaaaatatctgaagaattttctcacgcttctcttccagcgaaagacctcttttctttgactgtatcaaaaccaaaaattcaaaaaattagaataaaaaatctgaatgagtaaaacaggaaattaatctgtcgatagtttaaattaaattataaacatataagtatgtgtaatacactgaatcaacaatctcaagaatctagaataatatgagtacaattattacggtgaagtcatctaagattcaaagccatgcatttttcatcaacaaaacagagcagagaactaaagatcgagaaatgggagccacgccccaaatcctatttagtttctctcattttcgcacattttctcagcagccaaacacagacaacatccaagcattagaatcagaattaaaatgcatttatgagcaaatgctaaacattaatatcccattataatattcatggttgaaacaagaaacaatccagtgatccactgacataccaaaaaaaaacgaaaacctaaattcaaatatagttgaactaacttttcttaagcaattataatgtacgaagactaatcatcgagagcttcaacaagaatttaaatggattttttaccattggtacgagttcaaacttgaaaatccgcccagagctttgagttttgattttttttattattatttggagaaagaggttagaacttcttaagatcagtgtcgaagaagcctccagactccagacacggttttctttctttggcgggaaatttttacccatggactattttttattaaaagtactaaagtgcccctaatctactatcaaattttcaatgtggccagacgactatcgttttgggggtgttaggacctgtttggcataatttttaaaaaagttcaaaattattttttaaaaaagtgatgataaaaaagtatttagtaaatagttcaaaaataacttattgaagaatttatggagaaactacggctaaaaattaaaattggtgcaactttttttttttgagaaatttcaatgttattataactggcaatcgtttacaacaacagagaaa

SEQ ID NO: 79639 - DNA, 2582 bp, Cannabis sativa
tttttttttttttgaaaattttgtaataagaacagttaataagcaagtcagacaataaattgcacaggttaaaataagtgttggcctaaatactatataatgttatgtcatgccatctaccacaagccagccataactttacttttagtgatgtgctaccatcttatgcgtgtgaagatgataggcaactgtagaacgataattgaggcacatatcacagaatggatcctactataacgttaactacagctaatttatattctgaccggttaagaataggccatcttaagttacctgtgctagaacatgaatttaacccccttgccaaataccgagtaccaggatgcaacctgctacgacgagcaataagagcaacaattccttcttgttgccctgagcttccaaaacttcgacattctgcaaacccctacatattaataaactataagtgtggtatgaactcaataactatgataaacaagatgctactttaaacgtggtataaatagaaagcaaatgaaaaataatggggccaaataatggaggggaagtagcaaaagattgattaaatatattgaagtatgttcattcaaagaaagcagaattgaaatgacacttggaaaaaaatatgaattctacaaatcttctcctctctactcttatagagaagggcatagatttgctaaagtataggcttttctttggcgaacatataaacggagcaaaatcaaaattctggaaggctatttatagatgtatgtcaaattgctaaacatcaaaggacaaagtagttagttgagcacatcagtgggagttgtgaagaatgaagcaaaacctgcagaagaatggcacagtggcgtggcagtccaatgtttttgaaaggcaatgaaaaccaaccattccaaacaaattcatcatcaggctcattgaaggacatacgactcggaaaggggcgggtaatatcccttgtatcacaaaagtagtgttttccatcaatgtcaagatcagccaattcttgaacattcttcaattcacctttcccttgttgttgagggttttgaagtggaatcttaatccattgacactcagtgacagtatacacacaacccccaccaggaagattgggaatggtggcggttaacttagtggcaataagaagcaaagcagagcttccaagagcagcataacccaaaattgccctggcataaactgtactcttgcacagccatcgtgatccattagtaatgaaattcaatgcttcattctcagatttgaaaacatcaaaaccgagctttgcattgtaacgaagtgcacccgttgttggatcaacatatatgacctgagtatcgaccgtagaagacaagctcacgataatatacacttcaccagtatcgagtgtaacaacaacaacagaagtgtccctggctgtaacaaaacatgccaaatcataaattacaatcaactgtcgataaatttggatcttttagagaagaatagtgaggtagaatacaacaatttcgtaactttccacgaaatttcgtttcgaaccttttgtacttctcaaaaattactcaagaataaatctttcccaacgaaaaaatgaaatcccaataaaaagaaagattttttatttctttatagacctaatttgggtttaatcccttaataagacaagaattcagatatgaagattacaaaaacagatcaaagaagaggaaactgacctggtgacgccatgggggtagcgaaggtcttgttcgatggtttcaaagatccaaatccaaatccaaatccctatcgaatgaagactttttcacaaacaagtatatatacatacagtatattatatatgtacgtaaggccttaaaccatctcattcagacattcttccttccttgcttccttcccctttgctattctacatttgtatttacagattcatcgatcaattcaatgctttatttctttatgattcactttcctagtttccctttcttcttttatttttttccaaccaaaagaatcgttttttttttccttccttactaaatttgtaagaaggaaaaaaatggtaataaatccgataatttgatgttgtaaatgtaaaaagtctgtctctgttacaaatgttaaaattcagattttccaacaaaaaaaaaaaaagtgaaaatacagaaagaaagaaaaaaaaaatggataacctatactttgcttaaacaacacccaattcaatttcacagtatttccctcaaaaagaaaaaaacacccaattcaatttcaccaaaattgaacaaaaaccaaaactttatattaatcgattaaatcataaatttcgttgaattgttaatgttttgtgggtagcgtggaacattcttaactttacggattcctgattggtaaatcggtgacttattagttggctttaatccttttgtagtaatagagaataactcagaaatggctattaagacactaaggtggcgtttagttacaaaataaatatagaataggaatgagaacagaaatggtaataggaatagaataaagtgaaatttctattttttttatttggtaaaaactat

SEQ ID NO: 79640 - DNA, 2415 bp, Cannabis sativa
  modified_base (580)..(582): a, c, t, g, unknown or other
tttattttcataattttttttaacatgttaaattattaaacatatatttttacataattatgttctcaataataattttttatcttatttttaaaaaaccaagtttttttctgaaaggaaacctgagaaacagagaaaaccaacacactacaaagaaataggcttgtcgaactccacgagatgacaaacgattaaaggaactcccctattccaactagccgaagctaaaaaaaaaatcatgttaaacgtatcaagttaacctatttgtattttatgttagtgtgttgacctgtcgctaatttttttgaccctatcccctaatatttgttccccatttgtgttcatgtagccgtatatcgaaatctatttttactactcttagagcatctccaatagaggtataaataagtggtgaaaaactaaaatatagctcacttaacaaaaagtgtgctccaatagtgtgctaaaaagtgatataaatttggcacatagaaaattttgtgtcaattttgacacaatatttgctatgatgtaaaatttacaccacaataaatacattactttttcatttatatttatnnnatttctattattttattagtatatttaactatcacattaaattataaaatatttatattatttttttattgtcttacatattaaaataacaattaaattgattataaagttattagatttttttttaataaaacattaattagatattaaattgaggaaattacatcaaaattttgcaattgtatattggagcacaaagctaaaatttggtgtaaatttaccgtaaaattattttttgtgctaaatatttatctaaagaaggcccatacaagcccaaaaataaagcccattaggcccaatatgactacctcacctctgtctcagtcttctccctcacatggtggtaatggtggaagaaagaaacttagctatggagaaccagaaacccaaacccgccattgttaacacctcaccacctcaatcaccatcaccatctacttcggagattgctctagtccatttgatttgcgccattggaatagccatatccatttctctgactaaatatcttcacttcatcactctcatttctcacccttcccaaaccctcctcctgatctgggttagtatctttcctctcaatttgattttaattaggttttgtttttttttgttctgttcttactctatttttttttttttgtttaaaggtgattcaatgcccaattgtgattattctctacagtcgttttagacagaatcgtcaacaatgttcggtgagctttctgttttagtgtttggttattgggaaaatgttggaaaatggcagaaagttttgatttttgaagttaaagttgagtgttcattattggttgtgcagttcttcagagctgttttgcgtggcattgtaggaatttttgctggttagttcatataatcatttcatttctaaattatgttaattatgatatgttattgatgttaatgttgttcatgtttttatctatggttttctcacattacatattggacaaaaatatgtaaaagaaatttgattcatattggtggaattcgacaaactaacaatcttaaatagtaaaatttgtaaggtcacccatcatagttttttcgtaatgggctatcagaaaacaagatgtactttgttgatatagatagtaccaattaatccatttaagcctacttgatatttcccgggcgatatggaattgcacagcttacctggtatttccttttacggatcacgagactactgactgtcacaatgatagtctttttatggccgcagagtctaatttatgtcacacatggttatctttctaataaaatttttgtaaagttatttcgctaataaagtctatttttacaaaacattcttcatattgcttattatgtgtagcttcattactattataataatcttgttacaagttcaaattaaagaaaatatgagaagaagttgttctacaatgttctttttttagtttggattcagatattcatgaaagttcatacattttttggtgttgttcttcttcatgatattcatggaagtatgctgtctatttgttcatacatttatgtttctgcctttttgttttttgttgtgaattgtaagctttgtgttgtttactctgtaggggctctggttaatgcttttgtagccattgctttgggcgcaccgataggcgaaaagtatgtaacttacaagcttggcatgctattctttttagtgattagcttatccatgatttggaagtaggaagtcacagttgagattggaatgttgataagttcacaactttctttcaacccattatgatctagatttggtcaattatatatttgaaggatttgagccttgtcctgaagttt

SEQ ID NO: 79641 - DNA, 1470 bp, Cannabis sativa
  modified_base (89)..(90): a, c, t, g, unknown or other
aaccataaacatgaaaactatatgcaaacataaatgacttctaatctttttattgataacaaatcagattatattgaaatgggttttanntagggcataaaatcccaacattacggccagtggtgttggtcgcagtggtggcttcagtgggtggtggtggcaatagtggtagttggctacgatgatggtgttgtgggaagaagaagaagaaagtaaaaaaaaaaataattatattttatttttataatatttaaataaataaaataacgtggagtaatgaaatcatgccacctgtacagcatgacatatttatttggcacttaatagccaaaaattaatagagtagtagatatcaaaacaattccgtaggttgaagagtttaaccctaattatttcattaaggggttgatcatgtcaaactccaaaagtttaggaaatttgactgctagttatctaaactgtaaatatattcaaaaaaaaaatcataaaataaaaaaaaaatctccatatgactttctctattgttttactatagaatttttccatatattaaaatctcctaataggtattgtctatagataaatactattagcaaaatttttaattttatgtttatttttgttaattaataaaaaaaaaaacatttttacactatatgtggattgagattgttccatcaattaaaagagattaaaaaaattaagtttgagttagataatttttatataaacatctttttaatatcgtgtaaaaaaatactactataaaaaaaaaaaaaagtcaataattatttaacagtatatataaatatgtttttataatttattgaattgtctcaatgaattgacatgccatgtttgaatttattaaatttgatcagctctcaaattaatgaagttaaccactaaaatataaatatatgattaatattaatatttatattacactaataataataagcaactcatttaattcatttcaaaaataaataaacactcatttttatttttcataaatttcaatcacacgtagcattaattcaattacatctaggttgaactaataccgaatataatcttaatcactactacaaaaatagtttttctttacgtttttaaacattcgtttaaagtattcccgtcgttttctataactgtcgctatacggccgtagcaaaaggggcaaaatagacaacggttaaaaaccgtcgctaatgtggacttcccgacagtttaaaactgacgtctatagtatagggtacggtttaaaaccgtcccctataccctgttataggcaagggtttaaatcgtcaggaatgtaaaaaaaatgagaaaaaaatactagaaaaatctgtatttttccttttttttttcttgcattagttttataattttacctaaattaaaataaaacacctaattaattttgttacaataacaactaactataaaacacattaaatttataca

SEQ ID NO: 79642 - DNA, 1497 bp, Cannabis sativa
aagtgcagatatctacactttgcgggttggattggattggatcgactattttatgaacacccctaataatgacctactcccattttaattgtattaataataagataatgttgtgcagatcactaaggggtacaaagtgaattctagctgcatcactcaagatgtttacaaagaatatgtttcagagaagtgctcttggatgcgagataataatttcccattccttccccttgtaaattcattcactatttataagagggatatttttacaattagctccgtaaaaagagtaattaggaagtaaatatccctatttctagggcgtagttacgatctgttgaaggtcctacaatctcaggcaaagcagtcggatctgtatctgtagaatatagttagatatatttatagaagttgcttgaggaagaaaacaggatttgtgtagctttgtccaaccatcctgatgtcatttatcctagccagcatgttgatgaccggccagatccttttcgagacttctcttttttgatgagattactcatgaagcaatcttagacgatacattgatcttctctcatctaacagtcatattgatagcccgactagatgcttcctggaaggaagtacacaattcatggatatcagccctgtgtggcacttgcccaacacactcctgcccaaaatttccatgttatgtcaagtgttggctagattaagccatgtgtagggccacatcagatatgcgaaatttaggataatatttgcccctaagttctcatgcgaatatctgtctggatgggcaattttgacatttgtacggatgctgacatgtacgtgagctccacgtgattcatactagcgactgttataaggaaagtttcaaatcatgctttataggggatcgtgctaacgactgtactcccccataaatttattttttgctcttcccactttcccataacaattttataagagatgtacttcctaattaatttttctttgggggaaactaactaaatatgagagccctatataaagccctctctttccctcaaacctttttactttcattttttactcccagaatttttctagagagaatcaacattatacataacaaatgtattaacagttgaacctgtcatatacattaaaaaaatacaattacaatttagaacaaaaatctcacagaaaagttatccaaaattttaaaaatgcaataatgctgtacaccatcgggctcagatcagaccaccatcgggaccatatcgaaccccgttaaaaataaagtcaaaaaaccatgttggacaaaaaatgggccaacaatcggacaccatcgggtccaatcggatcctatcggacccatctaacaaaaatgtcttgaacctaatttttggatccccatcggcctaaaatcagactagcatcgggcccagtatcgagcccatcggaccacactaaaaaaatttccccagtccattttttgacccccccccccca

SEQ ID NO: 79643 - DNA, 1936 bp, Cannabis sativa
atatggtgcagcatgcaggccctcttcattggcagtaatggctactgaagacatagtagagattggcatatcacaaagaacacgagaaggagcctcactataaccagcagatgcattaagaactgaatgggaatggggctgtccttcaaagggtgtgggaggattagagccatgtccaatagaacccccttcaagagtacaactaaggggagtagaaacagaggatccagctctaatatcctcagtagacaggaattggttgactgcagcagtaagagattggtcaagattataatgaggaaggttaagctcatcatatggaatggagttggtcaggtcaaatgggtttcttttgaagttggtcttagcaggggctttgagaggaattttgtagggcaaaggaggagggtaagcatggttatcgcacatttgaagataagtcatgcacttagtcaaagtatgatcaaacataccacagtggaaacaaatattagggaggttttcatacttgaaattaagccatttttcacggtgtatgtttttaaaatctaccatgatacccctagtaacaggcttagacacatcaatgagaacacggacacgaaggaaaaagcccgagacctgaagaatggtagacttatcaacttccaggaaatcaccaacttcatctccaatcatcttggcaagtttgagggatttcataccaaatggtatagaatggacttgaatctagaagggtgagcaacagagttgatttggtaacagagtatcaagactctggggattggcacaggtgaccaagcagtggtcaaaatgccacggctgtccttctaggacccgtcgcatatcacattcacaagcaaactccaccataaacatcccagacccatagtcagagaaggtaaggggtgcacgggtgatccaggaatttttcatggcatcctcaaaccattctggtttgatggaatgggaggtgatgagaactcgaaagacaagacagaaagaccttctgggctggttatcccttccatcatcatcagtaaggtcatggaccacaacttctttttcagtaaggttaaggatttgggacatgttgagagcaagggaatccataaaatttggcaaagacagagagggagtatgtgaagaaactaaacaggcaaagtcgaggaaaagtagtaacgaccgtctaagaatccaaatccttaaatagctaaaaatagatatgtacctggaggcaaagagcttgtcggagaagtcaaaatgaagatgctgtatccatccctgcaacaaatctctgcatatcccgtaggcaataggaataatcatcgccccttccctagagaaactcaaaacgacggcagccataaatggaggaatagtaaaagttcagagaaacagagagagacggagtaagacaaacaaaagcaagatcaaagatactcagcaaaatctaagtaattaataacaggtagatagagtgtaagagcattaaatgcaccaacagagggaaaagagaaagaaacaaaatacagctaaagacgacgagaaagagatcccttaaagacagaaaacgacttaaaactgggagagaaaataagattaaaacgacagtaaaatcgaaaataggattagctccagatcaaagaaaacaggatgaaaccagagttacaggaagagtcccgctagagagttccagaagcttacggcgtcactatttctgagaaattgatagattgtataatgtaaatgcttactataaagtagataaaatataatttatgtgatgtattaattaaaagaatagaacaatgctctatataagtatgagctaaaataaataaagtagaaatttaattaaaaaaaattaaaaaataaaataaacaaggtgatgtgagtgctcttatgtacaaaacgtgacttttccttcagaacc

SEQ ID NO: 79644 - DNA, 1188 bp, Cannabis sativa
accaatgtaaacagtagcattaattagtttacagaacttaagctgacccatattttcatattcatatggttcagtactcattaggttcgtattgccatgtgataataagttattggtctaaatctggtagtgttctgtcagcaaggatattgttttgggtatcttaaatattgcaagttcagggcatttttatcttacaattcattaaatatatcaggccatggtggaccctgatccaattaagcggccttcagctaaagatttggtggaaaaccctcttttccgcaaggctccacaaaatgctagaacctaaacaagacaccgtagccgggaaactctggaaaattttgtaaattacatggtggtgccacctacatacagtcaagttacgtgtatgctatgcaccattgttttccacttgcacggtgcaattttttgtatgactagaggtacgtaacactactactggaggagattttgtgaaatgttctcttgttttgtgaggttggacttcttagtttctggtttaaccgaattattatatgtatatagttaattaatctaagatcaatggtaattgcgtaggtttgcatcgccggctcatcttgttgtagatcattctcttgcctcaccagagtaacccgttgggtggaaaagagtcgtgttttgttttaatttttgccctccttaccattattttatgccttcggtgtctttaaaattgagatttgaacatgaactactatagtgaagcttgattgtttcacctcatttctcaaatatataatattatatataaaatattgtatagaaaatagagtataataatacgtgttaattaattaagagtaatgatatagtaattaagtagattaattagtaaagtattaatttatgaagatattctttttgaaaatagcattctgtaatattgagaagaataaattttaataaagggatgtacgtagagcggaaaattagtagggagtgctccccattttcatctcgttaagggagaatgtttttataaaaaaaataaagtttataatataaatttaatgtataaaaatattaaactatataaaaattaaaatatttatattaattattattcaaaatataatttaaaaatcataaaaaaaatattaatatactaaaaaaaatataaaaataaattataaattataa

SEQ ID NO: 79645 - DNA, 2283 bp, Cannabis sativa
atattcaactcatggaccaacatcaagaactttggagaccttcttgtgcactaggacccctttcaaactttctctccatagcatgaagtctcctgttccattaaatttctccaattcgaatcttgcaattgatgacagtaattgtttcttcaagaattacagcggaaagaatcttgattctgctttcttgatcaaaaaccaataccaatctctgatttgtggaaaaattacaactaatgcataatcaaatcaactaatgtccaaaatgatatgaattaatcttccattcaagataaaaatttcatacccgctcaataatgctcaaggtcagcaaaccaatactttctccataaaccttggaataaataatgtaactttaaccatatagcacattcttcatagtgataagttgttggaatgcatattcatataaaacatgaattatgaataatgagcaaaaagatttccacaaattatgaataggagaaaataaccatatatgaaacatatcaaaaacaagtttcagtctacaaaaaaaaaaaagctcaccgatcgatgtggtgagtaattaaacctatttagcaatagtgaataaagtttgtaagaaagtaagaatgagtagtatagctccaaccaagaccgaaataagtgcccacgggtgtttaaagtaatcacgcataaggactctacgatatctgggccaactacgttgacaatatgtattgacctccttcacaagatcaagataatagaaatgccccacacaaacactgttaaaaatatggttaaagattatggttgcatcgtgcatatctatcaagttctcaaatatgtcactccttgcaagtgtttccatatcttgggcagtattaacgaggtggtccaaaaatgccacgtaagaacagatcaattcctcacaattaggaagacactgctccaagcatattagatttcgaaacagaggctctgtgtcatcgtcaatatatagtgaaggaatttcaaggacgccatctttgaattgaatatccaaaatactagagaacgtaccactcgtagcctttttgaactgaattccagcctcctccaaacttgtagctgatggtatggactgccaatttcgaatcgtacaattcataattctctcttgttttgcaataatagaaggcaatatcaatgagttccttagtagatcaagaatatgcttgttttcccatttatgatcctcaacctcttgatattttcccgcttctctagagattaagttacctaagtaactagtgctgagtttaatgagagaaagttttacacctgaagttgtcctggtcttctgaaacaaacaatcaagcacgaaccaaggaatttgattttccaacaaaaacaagtcacggtttagtgtggacatgctattcacaccgaaaatgggatcctgtttctctataagtttcttattggtgtttttgcaaaacagctcaataataaagcagccgtcaagtaccaaaacttttacaaattcatccatactcataccaatagatccttcatagcaatctctagccttgtattgaaactcgctaacagctgccgtgagttccctcagttttgatttaggatttgtatcagctggaagggaggacaggagttcgtgcaaataccggaatttgatcttctgggtggcttttagatgtggcttcttgtaatggaaggggccaattgaaaatgaatgaggtatataagcgtttggattattcaatgatagtacgtttgggactctaaaaatgcagggattacgtccatctaccattgacacattatcacacatcatattttctatttcagttgccaatttatcaacatcagccctcctaattttatcttctcctccaactttcttctttttcgccattttagttccaattatcttctcctcatcaaacttgcttttctcttctctgttcctaaaagtgcaaatgaagttaaagaaagtaataaaaccacctaagctaaagtttgttgtgtttaatttggtgcagttaaaccagattcgaatgaataaagagaactcaactttttgtttttattctaaatttctgatgaaatataaattcatatgaaagaataattttttttttttttttaaaaaaaataacaaacagctgagcttttaaattttcttaaactccgacaattctgttggatgaaaaaaaaatgaaaatttagtaaaaatgacaaacaaaatgcgtacctttgatgaggactgagagctagtggtggtggctattgatg

SEQ ID NO: 79646 - DNA, 3462 bp, Cannabis sativa
tttttgtaattttgtattttttttttaaagtggtgaaatcactcatgaattaataatgcagcaattcacaattagtggtagaactttttcaaaccagtgtagttcatcgtgtaaccgaagggcatgctttaccaaaccataagttgcagaattcttattgcaagtcacatgggacaaaactgcctctagaaatttaaataataaagttatatcatcctcaaacaacaccttagcacattaaaggacaccctttctttattgattgtggtcaccaaataaagcaaatctaaataaacctcttctttaattgagatgttgcacgaatgagctcaattgaatcctaccaagagagccaaaatttaagcttgtaatattgaaatactacctaaaaactaaaaaataacacaaaatattaataggtattaaaaagagaatgacaaaaatagcggcaaactttaattttattccattcctatttcaatttttattttcattcttatatttttattcctcccaaacaaacaccacttaaatctcaatatcttaaacagtaccataattgctaatcaaatcaaacaccaataaagagtatcaaacaaatcaatcccaataaagaaatttcctataataattttaaaccatgaaattggtggtatttttgataattccacctctaaactcaacctaagcccaatccagcagcccaatttctattatgtggcccatgttccccatatggagctaaactctcatagagaagcaaaacctcttgtctctgtatcgccgtcttcctctctcttgctcccctcgtcttgcagagaagaccagaggtatgtttagctctactcgtatgtgttcaccttgagtttggtatatcttctttaactgtgatcgcactctaatgtgtcataactttgattttttttctttctttttttcgttgtttcgatttattttgaactgtttattggggtttatgacgctgtgaagtagagggttttatctctctctctgttgttttttatactttgttcaagttttgttgtaatttttttttttttgagttttgaagatttagcttctactacaacagtaattttgaaatcgaatcagtactttgtggttgttcaaaaaaaaaaagtcagtaatttgtaggttcatggtaatgaattcaattctttatcttttgaattttattattgtgtggatgataacaagtgcttttatcagactcgtcattttcatttgaaattgtaactgaaactgaagctaaaaatcaatagatttcgacccaacagataaacaaaaaaagatgatatatgtgttttttgacccattgctaagatttgaaatctttgttttctttctacatctgatttgattcttactcacagtaggcattaattaataatctccatctgttttagaacttttcaaatctgattattttgttttagacctgaaattcccgagtttcttctctgttttgggtcttgttcttatgttcctccttgaaattacatatagcctgcaccttattacccacctaatttattatataagaaagtacttaattatacattagttaacttatatgtggtattctgttaattattaattagttcatatattgtttctttggaaggctatatagcgtaaaagtccacgtttccttaggcttaaaccctaaaccctgctctgttctaccccacgctgcaaaaccctacgtcttgatatcttcttaacacttcgggaaacaatggttgtgaagagaaagaggaatgattctggaggcggagatgaagaggaactcgaggcaaagcagtttacaaagaaagagatactaccatctacgataaaaaacaaggataagagatcagaggttcacgccaagcttaagcagcagaagaaacttgagaagcgaaagaaagttaaggctcgtgatgctgccatttcccgtgctttggagctgggcgaggaggtttgttgtatttatatatttttgagatatgtacctatgggttggttgcttagccttattaatgtaattttttttactcttttgaattgtttcaatttaattttttcagcctccagcgaagaagatccctcggactattgagaacacaagggaagttgatgagacagtatgcatggcagatgatgaagaggttaaccctttttcttattatggttttatgctttttatctgtttgtgggataattcaagtcataagtttaatcggttgaaactgcacaaaaattagagatgcaataatattttgatcattttcttttgaacaagtttttgttggctttactttgtctattttaaaattggtgaagagaatcgattgaatccatttgcagttatatgctggaattgatgccgatgagtttagttcaactttaaagcgtgaaactactccaaagatattaatcaccacatgtcgtttccattcttcggtatcccttgcttttctttttttttttcgtttcttaccatactttgattttgttagttgctcttattctctaatatgtttaggttttattggtatatgtttggtttgtagagaggtcctgctttcatatctgaactactctcggtgattccaaatgcacattattacaagagaggaacctatgacttgaaaaaggtgttgatctctatatcttcttgaatgtgatgaacgacgagttggaaagacatttacattaatatttctttgtacatttgggttgcagattgtagaatatgctaataagaaggaattcacttctattatcgttgtccatactaatcgaagggagccaggttggtagtgttgtctaaattgtttgatgttcatatttaccatcaagttttgagggtcatcttataatacttttgttgtcaagatctaacagtcgtttctcttgatcatcttatagatgctctcctattcattaacttacccgaaggtcctactgctcatttcaaactatccaatcttgttttacgtaaggatattaaggtactaactaccatgttttacatatagaacagaaacattccattatttttaggcactagtacatgaaataaatatgcacaaatcaatatattcatttgagatcagcaaaaataacattgcacttcaatttggtcgggtaacttgaagttacacttacatgattacatcgatgaatgaataagagcagtagaaactttgtctaaagtttatatatttcatcgtttactggttgagctttaagctgtgttatgattaatgagaaccagatttaatggttagtcatatggtcattctataaaaaatggaagaacatttgagatttaaggattttaagctctcataccattgttggtttcccatgttaagctcaattttcttttctttatactgctggaaggtaatttttgaaggaacaacaacaaactagtattacttagtgttaagc

SEQ ID NO: 79647 - DNA, 3308 bp, Cannabis sativa
ccggtgcattagtgctggtatgatcgcacccctagggaccctctctttaccaacaatcatatatatactcattctatcttcccaccccaattaaaaaaccattaacaaagaaccaaatagatatatggctaattattattgttcatctaaaaagccaacaatggtaatcatcatattcatagtgatgattattcaaagctatgtaatggtagccacaggcttattatcaaacgaacccatggattccaacacagaatttatcaagacctcatgtggtgccacaacataccctgacctctgtttcaccacactctcaagccacgcttttgaaatccagagcaaccctcagctgttggcaggggcagctctctcagagactctcaaaacggtgcgtttaacatcagcagccatgtcaaaactggccaaatcccaaggcttgactgttagagaagctgcagccttaaaggattgtgttgaggagcttggggactctgtggatgagcttcagaggtctgttggtgaaatgggtaagaaagatgtcaactttgagatgcaaatgagtgatattgagacttgggttagtgctgctttgactgatgaagatacttgtgttgatggcttttctgggaatggtatgaatggaagtgtcaaaaccactgtgagggaaaacattgttaaggttgctcatatgactagcaatgctttagctctagttaatcactatgctattcttcattcttagactcttcttcctttttgtcatctttttatttttggattgatgaagctgattatatattatatgcctgtttgtcattattatatatattaagttatatgttgtagagtgtgtttagtgatattaccatagttagagttaacctttcatcacatattattgtatgtattttcagctttgttatccagtttgataaataattatttgaagtttgaattttcgaaaaaacaagaaaaaataagaagaagaataaggcaaaggaacgtaataatagaccctgtactatgtatattcattcacctttctattctgtgagcaaaattataactactgcatgtcactatttcattttcctaatgtgatataaatttgtttatttttcaccacactatagtgtttttatgagagtattttctccatgacccattagcaaatttaccaagataaaaagtacacacgaatgtgcaatgacccaacacaaagaaaagaaaaggtagtgtttttttcccaaggtagagatagaagtatttaggaatgtaaatggggtggatggaggcagggattgctcccccacccctacctgccttaatacccgtttaaattaaaacggagataagctagggattatgcggccggagaagcatttctattaaggtatgtaaccattacatatatactcttaaaatagaaaaatgtcttaaagatgatttttttaaataaaaaaaataaaaaacatcataaaaatttattaaaataaaaaatataagtggaatagtgtataatgtgtatagtaaataaaattagtaaatataaaattaataaatcgaaaataagtgattaaatatatttttttcaaagtaattaagtgagattattttcataaaaaggaaaataactcactaatttaatcaataaaaaacttaaaagaataaaattattttaatgatagtagttacgtttttaaattttaaatatatatttttatatcgggatgaatatctattttctcttgttccgattttaacttaggtatgaacgtttaaatctatatttgctttggctcccaaaattcaacccccgccccacaccctattagaggcggcatgtaccgaacccacagtataattgtcattcctagaagaactatctaccaaaaaagatgtatgaaaatgaaatcttatggaaaataaccctttcttttcagaacttttatgtactttatttttatttttattgcgagagagaacaaaaaagaaaaaaagaactttagtgaacctaattagacaatgtttaataaactcacatgcatataatattggccagtagtttttgtatttggcaaataattgtaatcagtgaattacacatgtaaaatcatatttgctcttgattatcaaaaagaaaataaattactgacatgcttatctttctaacctgcaaaacacagacccaccgttttctgtctatgggtttctttttggttttctcttctcatcccttctatgcagagtaaagcatttatttaatagttgtttagtattcacaacaatatgtcaatagctcagcgttttgtatcccaacaatgaattgttatattacatgtgtgtctagaatagagcaaaatcttatcctactaaatgaaacttttcatgggcgatttgaaccttattgcctctcaggatgagaaacaaggggtagtaaggttatggatagcgatacgaagatactaagagaggttctccgctgcacggggagtgttgacctgggctacgtggggtgccccttttcacttggcagaataatagattcaatggagatttgaccagagaacgattggaccgggcggtggcgtcggctgagtgggtaattcggttccctaatgcaaaagtcactaatgcccctataacaatctcagatcacgggtttatcctggtagatacgggggagggtagaagtaatagattcctgccttttaaattttttgaagcttggggaagagacccttcttgtgaggacactatagctcgggcgtgggacaagaaaaacggttgcaaatcgtttggaaaaagattaaatgagaccagaagtgtccttcagaattggcgaaaaaataattttggggattgtgataaagagatcaagaagattgaagagagactcctatggatccaaggacaaccgctgaatgaaatcctatctcttgaagaaaaagagctcagattaaaaatcaatgagctatggattagaaaagagagtatctggcgccagaagtcaagagaattatggcttgaagcgggggacagaaactccaaattctttcacgcatctacggtcattagaagacggagaaatagaatttgggagatcaattctcctagtggagtgcggttgagagatgaaagaaggattgggaaggctttcaatgagttctaccaagagctttattcgtctgagaccccaattatccctaatgatttccatagtctattcagtacccaagtctcggccgaggacaatagcatgataaaggctattccttctcaagaagaaattataaatacagtggcgg

SEQ ID NO: 79648 - DNA, 1403 bp, Cannabis sativa
aaggagtttcattaaaaattaacaggcatcagccttaacaatgtcacacaaagaaagcggagcatttagctcattaaaaaaaacacacttttttaataaggttgtatttttaaacgtacgtgctatattagagatatcattatcaaactttttcgcattataaattggaaatgatgagaataagatttgcctttgagatttttcaataaggtgccaaatatactaaccccgcttataatttagttcataaaaacacactttcgctagttgtattacaaagtacatactatcaaccatatatataattatttagtcatggaaaaaacacaacgatctcatcaaatgttcaatgttttattggaaaaatacaagaaattaaatgctcaaaatgttccaacaacgtgtcatgagtggaatgaatgaaataatgagtcatatatggtgagtgtgaaatggcttaattaatattactagctagctagttcaagctcatcatcattatcatcatcatcgtgattcatgacatgagcaatttggcaactcaagctaattataagcacgtgagagccatatgctaggacaccactccgttgtgggcctcatcaggcattgcatgcgtgcccgaggttattgtctctgaccgcacctcaacccacccataggtcggcttgtgtttaatattgtaacaaaccactcacacaaccaaacaagttctaaccactactcctactagtgccttctgtactactcactgtttaccccccacgtacactataatactattgccttatttcatttcgcgcttgccaataatatctgcacttaaaaaaatatacattgtcgagtacacattttgatcttgcatgtcattactcacttattactactttctccagtcaatgttaatatatattgatgttccgatttactagtatgtgatctaatgttacaaagaagaaacttggatccaattaatccaataattctacaatttcttggccagattacatttacacaaatctggtttatcaatttcatatgctctagcatgatcatgaataggttcagtacggtactgatgagctaaataattctatacagctatacaccaattccaattaagagaatattctaacaacctgatatgctaatgattatacaatcaaataataacaaaatttgtcttgtcatcaatccttgtcactgaattctaagtgctagtgcatagtgttatgatgtgtacagctatagagaattattgaattttcttttccctgtcaatttcctgcaaataaaagggtaagattctcacactaagggcatctccaacgaagaaatttaaatttgatgttaaattaacaccaaaaaattattatttcaacactaaattttttttcaattcc

SEQ ID NO: 79649 - DNA, 4004 bp, Cannabis sativa
ggccattagacaatgtttttcatggataagtacaaaaagttttgtgttaaatgctctgttttttatgtcattgtaatatttagatgagtaattgattatttcttatattttgttttctttatttgaatgctattatccaacaggataatatttttcgtgaagcacagactatgacactggtggaccatcctaatgtactgaagtctcactgctcttttgtgaatggtcaatttctttgggtagtcatgcctttcatggccggaggatcttgtcttcacatattgaaagctgcccacccaaatggttttgatgaagtggttatagctacaatattgcgtgagatattgaatggtttagtatatttacatcttcacggccacatacacagagatgtcaaagttagtccccttttattattcttcattggtcattattcatgtttttgtcacaattcattgttagctttttttcaaactttcttttgctgcatcaaatgcttattgttattttgatatacatgattttgtaggctgggaacattttggttggtgcacatggtgcaataaagcttggggattttggtgtttctgcttgcctttatgattcaggggataggcaacgcgtaaggaacacatttgttgggacaccttgctggtatgactgtaatcctaatatttgtaatttatgcacatttaggtgaatcaagtcagggtcttagttccctctaggtgacttgattggagggaattatatcatccaagcaatggtcatttgatgaacaagttaccataaaaagatatcactcattttcattcacaatatcattatttatatataaatcaataaattatggaactttttctgtaggatggctcctgaggtcatggagcagctgcatgttatgacttcaagtaagtctattctatctaaaaaaaattgtagctcattgcattctgcatttttccttttaaccgtatatgtttggttggcctctttggtacagagctgatatctggtcttttggtataactgcaatagagcttgctcatggtcatgctcctttctcaagataccctccaatgaaggttcatagtttgctcaatttgctattctataatcactttaattgcgaatagagttttatctgaaccattttttaatttgtgattaggtactactaatgacgctgcaaagtggacctcctggtcttactaatccttcggatgataggttttctaatgtatgatctttaccttttaatatcttatttatacttttcattcattgtaattgtacatgtgaatgagcttctttttctttggcgtttttcttcagagctttaggcaaatggttgcttcttgcttgataaaagacccttcaaggcgcccttctgcaaagaaattgctaaagcattcgttcttcaagcaagctcggtcaaatgattatatccaaaggaaacttttagaggggcttcctgttcttggtgaccgcattaaggaattgaaggttaacattatgatcactttttttttgttgatttttgactcttgaggctgttcaccatttagccagccataatctaacattttgtttgtattaattatagaggaaggacgaagatttgcttgcacaacggaaagtaccagatgatcagagggaggagatgtctcaggtagagtttattaatggtttctcattttcagtaggatcatgctacattaatttgtgttgcaaattttttctacttattatacatgataaaataaatatttctaaggattagcttaaatattataatattcaattcatgtaagatttctagaaaagaagatagcagacccaaaatatgtgatacccattaatcggtcattaaattttgcaccaacgagtattacaaacttcccaactgtgaaaaatatcaatagtgaatagatctatcaattttcaaataaaatttaataaaatcagcctatgttaaagagttttgttatttgaaacttatatgtgagtattttaagtttcttaaatacattgtacagaagcaagcaagaacaaattaaattgaatttaaaaataaatcaccttttaaacatagaagtaatataatgattcttattaccgctactcatagtgtcacagcaaatgctgtttttggtcatatcctccctgtttgtgtctggacattgacccagtaggactttttccctaaatgctattgtgattatgaatagctatgactcatatttgaccttcctaattttgttgtagaatgaatataaacggggagttagtggctggcatttcgatatcgattttgttaaggctcaagcttccttggtatgttaattatcatccttatttctcgaatgataataagaatgaatctatcattattagtataatcaattttcttatggaagaatatacttgtctttctatcagattgaggatgtcgatggctcaatatctgataatagtcaaacaggaagctcaggttctctgtctgctttggacggtgctttggacgggagtgaagagcaatcacaagtccaaagcttacgtgacatttctgagacggtattatcttacacatatatatgtgtgtgtatttgtataaattaatttagacacattacaatattaggttatcatctttcatgttttaaataaatgcgttaatataatctgtacactggataagcatattatcttatattgatgtttttatcgagttcttgttatggtggtgaacaggaaattcattatctggctcatattcaatcacctgttcagattaaatcagctattttgtcatcaccggaatcaactagtcatgaggacaagtactatatgtaaacatatttctttcacataaacattcaacatacatgcctaactatattattatattatttcttatatgtcaaatttgtattttgacattgatacgtggatgaccattctttccatctataggatttatgactgataaatgttttggctactgactcttaatatgtcaaaagaaaaaaaaaagaaagattttgtacaatagaaaataaatcaacattcttattcagtacttcatatgaacatatcaaagggctcttttagattttgtgcctattcgtatatcaaatttttaaagatcatgaaaaacattgttgtctctatgtggtactgtattatgaactgtgatttacaagaactttcttggatcaactctgaattttcagtgatgataagttgcaaggtcagccacagattatttttaattgtaatgcagcaacaattccgcatcctgtagatgatgtggtttctgatgttccttcaagagcattgaaatcacctggcaagtgctgattcttttttattcctcattattttagaatgctgacaaaatttacaaattgtacttttataaatcttctaattaatctatgttttttcaatttggtaaaatctatcacgctgaagcagacagtgatgaacttgatgagaaagcaaaggcacctgttgttcagcaaaaaggccgtttcaaagtcacatctgagaatgttgacatagataaggtgaattggattaattagacttcatgcaaaccatctcttgtgaaaagatattgtattatctttttttgtttcttaacaaaagaaacttctttaatttcaggcggcccctactcctacaatgcaaaaaagtaacagtatgcaggttggtatttgtgattagcaagtgtaattgtggtactttagtaactttacctcttagatttgcaactgcacccttccctataatgctcaattttagttatctgcctctcccatttcttccctctttcgtgtgctcactaaagttaggaagaaaactaaaaaaattatgattcatgcatgagagagtttctttcgtgttctcttgacatttgaaagctttatatcttattatacttccaggacatgttcttatggtgatcatttatccatacaattaaaatcctagaattc

SEQ ID NO: 79650 - DNA, 1649 bp, Cannabis sativa
tttttttcaaaaagtttagatacataaaatatgataaccaataataacacctcaacgaaaattaataagaaataataaaatatttttgtcaaataaatatgccaaaaatagaattaacaaatagtaataaataaaaagtttagacatctatataattatcaatatttattatactttcaattttttttctttattctttttaatttttaattttttatattttattagacgataaatttataaattaatattttactattattttaataatttttttataaaaatatccaccataaattaattaaaaacttaaatatgtaatgtgaactgctatactatagaacatttattaatattctactgagtatataggtacctgaaagaattaccaaatatgcatagagaagaaacgaacaaatacatctggccagtatgttttcaagttaatcgatccgttaaggaagtctaaccaaacatattttcactaattattaccagatcatgtgttccaattcatctttcctaaaatataagttttgaatcatgggccgctctatactgacaaccatcagcatcaaaatcaaaacaaataatattttgctcatgtcctaaaaatccattatatattctatattttgaatgaaaagctacttaaatgttcccagtgaattatgtgtagtgtagtccttgtacagcaggtaactcctcctccgaacttctaagcatcatcagcaaatctgtaccattcgagttctaatcaaaattaataatcgaaagcgaaaactataccaaatttttttaaaaaaaatatattaccctaactcggagaatttaagatgagcctctgcataatcaccgaagaaagcatcctcatccttaacgcaaaattagctagttttagtttaaatgtactacgaagtagtaattaaatctatttataaaatgcagagcagttgtaagttgtaataaacagtacgcacttgtgagtacttgatgacaaaagcacacaaggcggggtccgtaacaagtgccttgtcggattgaagcaacaggcgatcaccacgaggcccaataccaatatacgttgcgtctttgtcacgtgcaaagaaatgacgaatcagaagttccctataagataaatgacaaaacaattgccatcaacaagcgcatttaacccccccaaaaaagacaataataaataaaacataaaacataaactagtaacagaaaacatactcaaaatagctcttgtcaaaaatgtcaggggtgccggtccatgatccatgatatccactgtgatacacatagcactgcccctgcaaattagtaaatgaatattttatcattattatcaaagagatagtacgaaatgaagctttgaaataaccaaacaaatccaaaataccaaagtgtggccaccagagagagcaacaatatctttgtcgctgaaacccatgcggccaaacacttctctcaaatggtcagctcctaaaacaaataccaaaagagcattgagtactaccataccaaactccataaataggaaaacaaacatataaacacaaatttataatagcgcaataacccttggtgcaggcagggagacggccttctggaggtggctaaggcttgtcctgtgttcaacagca

SEQ ID NO: 79651 - DNA, 1878 bp, Cannabis sativa
acccacctaattttctccaatgttcagcacatacaaataaaatatgtatataaactaggaagagttaaacaccttttaaaaaaagtgttatttcatacacatatttacggctacattatttaataatatttatcaaatttacaaaccaacaataaatcaagcaactttcattcaaaagaaagaaaaaaaaaattaacccaaaattagtcataatccagcattaatagtacttctagattttgagatagagcattgttatgtgatactcatagtgtctagtaccacaataaaatgtcgctttatactaagttagtaattttttataatgtttattaaagtaaaacaaatgagacatgatattaagttaaatcaatagcgatattacaatttacaaggctgttaagcaccatgagtgatctttaacatttctcttttgggatatgttaggctaaacctaaaccctttaataatttaattaataaataaaagttgagattgggatgatgaataggattaaactggacttttctctagtattgtatttaataatttataacatattataatgttaatttacctctaaactaattggttcattacacaatattttagttcatgtatatatatcattgcctagataagaatttagctttgtttcttaattatttatcatttaagcaaccaaaagaaagaaaaccattaccaccctatcatacaacacaaaatgttaaccattgaattctcttcaaatcattgcaatgagttagtttttcaagggttggtatcaatttggctgttttttctcaagtcctaaatgctacaattaaagtagtcacttatgtatatcaaagcaatacaactcagctattcacattaatgtatccaatatcctaacttcaacaattaaaggttgttaaactgcaaagaatgtggaggtcccaagcaaaaacatcccatcagtttttaagaaaaaacagtattcattttggctaggcatctatccacagtccaaagtaggttaaaaaaaataataaaaggttttgccaatagaagaaataatgatctgatttaaccccactcatcattacacagctatggcagttgtaaagagaatgaaagcaattgactttactttgcttctccaaacaatgacacagaagacaacagttgaaacaaacacaaaaagtagatacaactcacaaatctatgactcatcatgtatcattcatagtcctttagaattctgcagcaagagttaaaaaatgtcatgtatggcacatagaaagagatgatcatgatagtacagcggtcaaagtgacttgtcaaacaatagatcccctaatatctcagttagtggaagaaaaagattttcttttttcctatataggaatcttttgaaaaaaattattggaagtttggactggtttgcttttgttgcgtacgaaaatcagttgacatttataactgcagtgggtggaaattgaatgtataatgatacagagagattaagaagagtacttgtttagatgaatttgatgtttgcagaaaaggagtactgttagtaagtgtaacaaccgaccattagaatcactgccatgccagattctattttcaaccatttgaaggttcagaaaactatcttattcaactcagttctgagctactgagctgagactcttcttttgaaggggatttaagatttgcctcaaacgaatatttgacaactatggaagtgagtgacaatgggcctcaacctcaacccaattaagccatttagaaaaggcttaatagcaatttttccctccgaattttgacatgtactaaatcatgcctctgaacttttttggccgttaaaaattctccctaaactattaagat

SEQ ID NO: 79652 - DNA, 4196 bp, Cannabis sativa
ttattattattattattggcgtttagcgttgaggctagctatgatgatgataattaatggagccgtttgtagtagtggtaacattggtttgtaatattatatgcaccaaaggacatgcacttgataagaatgttctatctcttttaccaataatttctttaatttgtttctctcttttttcacacacacataaatcattaattatagacaatcacaagttgggattaatgtttgagaatcatcattccactatagtttaacttgtttggttgaaatgggattatcaaatctatataaatatatatatatagtgtattatatattatgagaagcaaaaaatgaaccaaagataaaagtccattattagtgttatatattattcatttgtgttaccacacaaacccataccattttattggcatgatgatgaactatatattaacattaaaatgctttattataattattaataaaataattataagtcatgttgttgctgttgggaaacatgcatggcggacctacatagaagtgaggattaagcagccgtcctattagaaaaaagaaatcaagaaaaaaaaaatatataggtgtattttatttattaacagtatatatttttaattaaatgtaatacttagataaattcaaatttcaacaaaaaaaaatatgttttttttaatatttacagtttactttttaaaaaagatgtactaaaatttgaacacttattaataagacttttcttagcaatttcacaattgaagttaaatttattgttatttgttcacttattatatttgtgtatcaaatcatgtgtatgggtcctatttatattttattaatatttaggtattaaataaatataaaatttaaactcaactcatttattaattatatacttgaaaataaaaccccaaacccgatcggcttgtttataaacaggttgacctactccgatttatttaacccgcacgtttattatataaagaaatcatatttaattttagttaaattatcaactcattaacattttaataacaaaattaacatgttaatttacaacccttttatacacatttatgaataatttagcatgtttatatatatcttatttaactaattaattaaatataatttacatgtaagggcatctctccaaccttaaatatcaaatttagtattgcactggtatagactctttcattctaactacaagaccaaaagttacacaaaaaaaaatataatatactatataatttattgattgtatcggttataattatttatgaccacttgcatatcaaaaaagatgttttggttgaccccacaatgatcgtgtatatagtatatttaagattacttataaatttttataaactttttaatagtttataatgtttaaaataaaatttaaacaatattatatcacacatattagaaaaaataattacactagcaataaatatttgaacattaacattttcggcattgcaaactattcgaatttttttaaaatttaaaaataatcttaaataattaatatataacgtacaaaaaagattaacttaaaaaatttaacaaccgataaaaaatctaccaaaacatcgtaattacccaataataataatatctgtttaaatatattaaatatataaaaaaaaattgaatagtgaaagtgcagttatacagtacgcaccaaatatggtgcagtgaaaattccctaaaaaaaacatatatataataattctttctggccatttcgtgctatttgtattttttttttctctcaaataataataacaaaatatgcatgaatgaattaaagatttcaatgtcaatgtgatgaacaatacttgagtttagcatcaacagaggaccctaaaattaactaaattgaaaataatgaaataaaagaaacaattgattggaaattaattgtgttactagagtaagtgctgaacttctcgattgtttaggttatatttgtaatatttttataacaataattaagtgagtggaaacttatttgttgttgataatttcataatggattcttttcaagtttataataattaacacaatcaattatacaaattaataagtgctcatatatagttcatgaatatatataattgactgtatatgatcaagttaccattaaggttcctatatattattgaccaacttaaccctataatattatgacctagttccccatacaaaattataaataacatcataatatatatacaatattagtgccacttaaaaaatcattggtgaattatctagtcaataatcatttattatattgtctgaaaatcttgaaattattcaggaaacttcttcaacaaatataaaattcgttacactagctaccacactaataataagttctagttaaatagttatattataaagtcttttttttttgtcgaataatattataattaccagtgacttatataaacttatcttcttctttctttctttctttattattatttttgttttgtatgtactcaatttcttttgaatataattatatatagtagttattgtatattctgtgtacgtagtttgatggaaatattatggactttttgcacaagcaattatttagagtgtgtaatgttagtggtatgctcttaagatattagattattatttatcattttatcatgattggtgggggccatggttatcacagtgtttgtgtggaggtgatggctcgaagagttttacaaatattaagtacttattgttgtgattatataatcacacaatgaaaaagcaaaaaacataaaatatcaatcatgaacaatcatttagaaaaacaaaaatacagttgaaaaataaactaaaaattcaagaaaaaccgagaagaataagaacaagttgcagaaaaatagttcagcctttcatggaactccttgattcaatttagcttgagaattaggttacatggacaatggtagcaccacttagcaatggagtacaactctttacaatgattcctcacacactaagaagagattgatcaaaacaatccttctaattacctccctagctccaagtagtaagctaccataaatctaactctaagctaaaagaataactctccaagaaaatcaaaagtttgaacgaatgttagttatacaattgaatgatcagttttctaattatagaactaactaccttaactaactaagacttaagaaacaaataagagagtgccatgtgtacaagacttagtgactagaccatactctaacaaatccacctagacactaggtctcgatcgcatagctagagagagttgttgaaccttctgcagttggatgtgatattcatccaatgtcactgatgtttaccaaatccagacagtgtctgaatttggcttgagtaatacatttggtaaaaatatcagctggattgtgatcagtgcacaccttctttacttgaatctccttcttgacaatgatgtctctaatgaagtgcaactttatgtaaatatgctttgacctttcatggagtattaggttcttcattaagtgcaaagcacttttattatcacagtgtattgtcatatcttcagatttgaaccctagtttcttggtgacacctttcaaccaaatagcttcttttttgcccctatagcagccatatactcagcctctttagatgatagtgctaccacttttgggagatttgattttcagcttatacatccacttagagttgtgaaaatataacctgtgaggaaccttcttgagttaatatagccagcagtctgagtctacaaaaccctcaacttcacagccttctttccttctagttttatagactagacaatgtttaaggaccctttcacatacctcattacccattacccatttgactgcatcctagcgcttgtttccaggatcagtaatataactactagttatgttcatggcataggctaaatcttgccttgtgcatgccatggcatacattagacagccaacacatctagcatatggtatgcaatccatatgatttctctcaattttagtctaaggtgcttgttcctttgagagtttaaaatgttaagccaaaggtgtgacaactggtgtaacgccctaatgctaaggcacgctagctacagtgctttttcaacaatcgtgcaatctttgctaatcaaagaaatt

SEQ ID NO: 79653 - DNA, 3874 bp, Cannabis sativa
  modified_base (3627)..(3631): a, c, t, g, unknown or other
tcatttaaaggtcgattttatggactctggtacgcttccgctattccttaatcctattgtttaattctcatgaattaattagggccaaattaagttttacagtgttctaacattaaccagtgactttttttggtagaattttcctctttaaggtcttagtactccttctattttgattgttttttcttgccttttaacgtgaacgatcttgctccatttatattctacgtgttcgttgcatgtatgattgcgatgtcattctttaatgcattgtgttatggttatctcttttggattaattttgttttatttgtcctagttttgtttcctaagggtccaaaaatttatttcgacttgattccatttttatcttatctcgacagtgatctctgatatgttcttcgtttaacattcttgggacataacctatcttagcttgaattgggttaaacataatccatgttgattttgaggtaattatgcctcagttggtactagataggttttatctcgacacgatattaaactagtctatctcaaatattgtaaagaatcatccttttcaattctcaaacaaaaacattattgatggagagagtgtttcgtcattgttgtaagcttcaacaccacaattatatcaatttgtggactaaagtttcttgcgtcaacataagggaccaaaatctgcatgtgaaaaagtattaatcacaaatatcacaatttgttgtgactaaatgtatttttagttacaatatttattgcgactaaaactaaattagtgacaaattatatttaaatagtatgttataatcacaaataaataaaaaattaaaactcacatttagccataataaattagtgacaacttatatttaaatactatattatgattaaaaattaccgctaattgttgtagtgaggcaatatttaccaaaatatattattattattttgaattacatcttaattacacctaatcttttaggggtcaaactaaatattatgttacattatatatgatcatatgtacatatacatattttaattaaacctgttcaagtaaatcttggtcactcacaaatgttccatgaaaaccataaggaaccctagatggtaatttcaccgaagcaacttccttcatattcgaagccttaacaatcaccaattctgatttctcttcattctcattcctcacaaaacccaccaagtatccattatctatgtcatcattgttattattatcattatcattataattattattattattatttttaattctttttttttcggccacgtagtacggttcgcccccaaatcggcccgtcccgtacacgtgtctgctgacatcaccggtttccaaatccaccttggcgatacccgaacacctcggccaaggctccgctatggccaagtaaacatacctagttttttgccctaacaactctctattcacttgcccagcttctaagttgacacctggcaatataacccgctgactcgattctcgggtcaccatattgagtcggatctcggttaattcactcctaatcggttcggcccgattttcattgaaaatcgagtcgggtgggttcatacacgacccgatcacaaccacaattttctcaccattactagaaatttcctcccatgcattccacaaatgaaagcaaaaacaatttgccacgtcaacccactgaatacccgacccggaaacttcggttttagggaaaataccaaaccgagccgatttatttgggtcgtggataacgggtgacccgccccgaatcatttcggataatttaaaaaccacctggtgatccggtacaaccacgtggtttttagttatagcaaaatcatgtatcatcgtaggctgatccaactttattcccatctcacgtgtcattcttccacacgtgtcaaacctgaagtacttaaggtacggtttcttaaccacgtcgtagctaagcgcgtgtaactcacccgtcacgggatccaacttgggatgcgcgatcattggacaacaaatctgatcatcaaaatcgaaccgtccaatcgtctcgagatcaccatcaccgttgatcttaacttggtacggaagatcatcctcggacatagccaacaaccttccgttaaaataaacaagaccagcgttagccacgccgctacctttagaagtatcgattaagccgataccagctcgagccaagtaaagagcgagccgagccaaaccagaatgtccatgaagctccccaatcggcttaggaaaaacagaccgacccagcttggcttcttggttaagccgattagtacgcgtgtacctacaactgtagctggctcggttaccggcttcgagcttaacggcgtgtatcataccatcaccatcaaacaagtgatgaccacctgagggtgcaaacagaggattagccccgtttcttaagtaaacgccacgtaagcactcaggaatttgaccagtaacttccagacccgactgaaccggaaattccggaaccggagcgaaattcccggataactgaacggtcgggtcaacggtttcgggtaatttgtgggctttctccattggagctattagtgaggtttctatagtgtcaagaagcgaagctgctagcttctgaatggggttcaggtcatgatgggccgggttaagtcgggttttgggcttgggcttgggctttggagctcgaaacggtggcgttttggttgtttttttggggagaattctagaagggtttatgaggattttagatgatatgaaaggtgaaaagtttgggttttgatgataagaaaagggttttggagtaaagctgtgcaaattagagctttgcatggctgagaattttgggaagaagaagaagaagaagttgaagaagtatagtggttttggtttgtagtatatgactatatatatatagaaaaatatcttatatttattatatattatttattatttattggagagcatttataagtggaggttgccagcaaatcatacacagaaaaccaacacgtatattcatggtactattgattttattgtgctaaaaaatatatattatttgtattaaaaatatcaatatattgaaatatagataaataattctatttttgatgcacaaactctaagattatttcacttatcattttacattttacactaatgatctttttctttcataggatctctcttgacatttaagagttgtataaattttaatgtttttaaaaaaaaaaattaattggtttttcttacttaggggttgcaaataatataatcagcggcacctattaacgaaaccgttcattaaaaatagaaggacaagacactatctaaagcatatatagttttgttatagttaaatcctttcaagtatcacatctatttgtatttaaccatctaagctcaaattttaacggtaaaatactctaaactactttattatttgtaaatttaagatatcatctacttttcacaattaattgtcagcataaactccttatgtgtatatttttttatacgtgtgacacgtttatattggtacacgtaatattataatttaaaaaatataaaaacatttcaaattttataatattttttttattttttannnnntttattttttatttttataatttcatttaatttaaaaataaattttaaataataatatttgatgtatcaatataaatgtgttacgtgtacaagactaacacatacacaatctatgatggcagttaacctgatgacaccttaagggccagtttggcacaactgtgctgtgggaaaaaacagctgtagctgtgctgtgagaaaaagcaggtgcaacagaagtgtggaaaaaaactgagttgagtg

SEQ ID NO: 79654 - DNA, 2481 bp, Cannabis sativa
  modified_base (2232)..(2241): a, c, t, g, unknown or other
tagtatggtgacatccctacacatataaaattaattagtgtatgttaatatatatatacatatatttatatgatttattaatttataaagaagggaatccccacagggttttcaatgaaggttcctgcactttctaggaccaggacgtacgtaccccacctttaattaaatttatagttgttttattctattattttttttatattacattaaaaaatttgcaataattgtgagagtcaattatctttttcaatcactaattattaaatatattcaaaaaagaaagaaaaaataaataaagctatatataccgagcaagtttagcgtatctttcatatcatttttcttgtcactcataatattattcactatcatcatgatcatcgatatctccttatatatatatattatctagcaaattaattaagtaccaagttataaagatggactactagttcttcttttcatcgaaacaattatatatctcaggttttgtttctgattgatcttccatatcaattaaatagatagatcagtttattatataactgtaaaaactatatatatataagatatttgagtaataactaactggttaatattaataataatcatctttcgtacgtatatatattatattatcgaaaaagtgagtagagagaaaaatgggagttgaaggtactttggagtacttgtcagatctactaagcagtgtgaaaaagaagaagaagaagaagcaaacacaaactgtagccctaaaaatcaggatggactgcgagggctgtgcccgcaaggtcaagagcgttctctccggcgtcaaaggtatatatatacatatatatatatattatactcttttcattatattattaatttatatataaatagtaaattaaatgaaagttatttcaacattagtacttaaaacatcaaatattaattgttgaccaactatagtactttatattttacatgacaagtttcattctctaatcaataatttagaataatatatgtatatatatatatgcacatacaattttttattttttatgtatatatgcagggacggaatcacttatttgtggtgtggggctgtaaaaaaaattacattttaaaagattaaatatttctttaattaaataataatacaacaaaatggtataaaatgtaatacttgttttccggtggcttttttatacaccattttattggatctatatattttaatttaataaatgttaccataaatttaatgttatgataaataacttatatactatctaattgtacaaatagtccgtaccgaaccacatcttataaaaaatgcggtttataattttttgaggtccagtttgcattttttaaaccgcgcaatacggtaccgtttttaattttgaatttaataattataatttaaattgcactgcattatgtattataaagtaactaatttttacaatataatatttatttatttttttatataagaacaaatatatataatttatgtatacatattataatgctaaaattttatattattttttttattttgtattattaaagcttaatttattagtttgatttttaaatttttatacatgtttgataacgatgatagtgtaaactgctcaaatcgtaccgcacaatactgtattttcgcggtgtgatttttacggtttttagatctcacggtgcagttgcggttagaaaaattataaaaaccacatattcaatttggtttgaaaagataactacaacccgcgacacccgtccctgaacactcctaatatatatgatttaagaaggaatggttaagtaataaatggatgtgtggcaggggcaaaatcggtagaagtggacctgaaacagcaaaaggcgacagtgagtggctacgtggatccgaagaaagtgttgaaggcagctcagtcgacgaagaagaaggttgagctgtggccgtacgttccgtacaatatggtggccaacccatacgtgtctcaggcgtacgataagaaggccccgcccaacatggtgaggcgcgtgcccaacaccgccaccatcaccgagactaccgtcgacgactcctacaccattatgttcagtgatgagaaccctaattcctgcactatcatgtagctagatataataccttttaagtattttgagtaagtacgcacgtgcaatgtaatttgtatcaatcaatcaatcaaatatttaaatatatatatnnnnnnnnnnatatatatatatttatatgatgaaaaggtgatcacgggccatgatgatcatcaaatttcccctgtttaattcttactccatttattttataattttattattagatatgttgaggatagtggagcttatataatattatcagcattaactataaattaggcatatgaagaaacttgttggtattttagggtgcgtttggaaagtcacaatgtaattggatttgtgtgtaattggaggtaa

SEQ ID NO: 79655 - DNA, 1776 bp, Cannabis sativa
ctcggagaactgacctcgttctttgctcggataatctgccttttactctgctcggccaagcagactttgtgcatgcatatatgttgcttgaagtctgttcggaatatttctccgtccaagtgcaagaaatgatagacatgtgccactcgtgcatgctgccacgtcacagtacaaaaaataggataacattagcctaaaaaaaaaaagtaattaaagtattttcctaaaattctacgaactaattaaagacatatttttcaaatatatattcataattattttagaatttataaaattacactcatttaaatttgttttgatttattttattaaaaaaaactctccgaatcgtttatttgaatctaagaagaaagaaaaaaatgaaattttatattcgaattagtataaaatatctacaatattttaagtattttaaatttaaattaaattttcttctgtaaaatatttacataatttttattttaaaatatatataataatattataaaattaataatgaatattatgttaagtgatagtatattctgttaaagttaacataaaaaatcaaaaaatactgttaaactaaaatttcggttacataacacactttaaatagaatagatataagagttaaaatatactattcacatcaacacatgtgagtgtcctacattaataaaagaaaagagagctaatcactttataagactaaagagttaaaagctactccccgccatatagttttaaggttaattatcttatctttgaatttgtaaagtgttttatttctcttaatgataggcgcaatttaaacccgtatttattttatttatgtaatatattttttaatttttttttaataaaaactaaaagctgaaatttaaaatataagatatataaaaaaatttattttataaaaaataattttgataattaatagtaataaataattatttttttttgcattaattttaaaatatagacttttttttaataatattaaaatacggacatatagatataatatttagattacttacaatataatttatggtatcttaatagtagcaattcataaaatttatgtgatatctttttaattttttgttaaaaaaactataaacttaagatttaatatataaataattttgataattaatagtgagaaattatcataaataatttgataaataatagcaagtcacaatatataatatttttcttataaaagtgttctttttgcaattttaagtagcaaaaatgggagtatttgaaaaatgagaataaccagtaactgcagacagggcacaaaggcacgtgtagcagcactaccttcaaatctttcaaggggtaatataaacttatttttgttaagggtgaatctacaaatcttctacaaataataatttaaaaaaaaaatcttaaaattattatcggattatgtttatgtagaaaacaataagctagggtttagagccaaattaattaatgcaaaaaacaacaaatacatatataggaaaatacttaggtagagtcacaaaaaacttctctgcatacaaacatttttttttcattatgtggtttaatattaatatttaattaattcttcttacattatttttttaataatttcttaatatcaatataaggaaagttacttgttctcaaaaaaaattactaattaaatatataataagaatacacccttaataactcaaaaaattatttaaaaaaaaaataacagtgcagtgtaatttatcctctaaaaaaact

SEQ ID NO: 79656 - DNA, 2455 bp, Cannabis sativa
agcgttttttctcttgctttgttggaagctttttgggttttaagttccttcgttttcttttagtgcaggaatttgtttgcttgctgtgaactcaggttgattataaggaaagttggttaatgttgcacattagccttgatagctcttctgttgatttaggctctaagttaatggttattgggggaaccttttctcttgagctattctaacaagtttgagtatttctcgtgaaactttttcctggtaattgaaaaagcaaccctccattttcctttatctattcggaaagcaatgctcccgagccataaatattttgagcttgcttttcttaattagtggtacacaaatctatcacatatgcattgcgatatattagctccatatgtatttgcccacaacttttcttttgctttttcatggcttgagtataccattttggatctgtttttagttgatctcatatggccatattgttttatattgctattagaaacaaggtcaagatagtgacagccggagctgtgccccctcttgtagacctcttgaggttccaaaatggtagtttaagggaattagctacagcggcaatcttaaccctgtccgctgctgcatcaaacaagccaaccattgcagcttctggcgctgcacctctcctggttcagattctcagctctggtagtgttcaaggaagagttgatgctgtgactgctctacacaatctctctacctgcaaagagaactcatttcctctcatcgatgctagagcggttccccctcttatcaacctactcaaagaatgcaggaagaagtattctaaattcgctgagaaagcaactgccctactcgaaattctatcaaactctgaagaagggcgagttgcaatctcaaactcagatggggggatattagcattagtagagactgtagaagatggatcccttgtgagcacagaacatgcagttggagcattgctctctttatgccagagctgtagagataagtatcgggaactcattctcaatgaaggtgcaattccaggccttctgcgtttgacagtagagggcacaccagaagcccaggagagagctcgcacgcttttggacttgcttagagatacccccgatgagaagagactaacatcctctgtcctagagaaaatagtttacgacattgctgcaagggtagatggagcggataaagctgcagaaactgcaaagaggctactgcaagacatggttcagagaagcatggagcacagcatgagtaatatccaacttagagctgcatcttgtactccctccaacatttcctcttcatgatatatattttttttggctccggaagctgggaaaaaaatcgggtagagtttttatactgaatccttgttttgtttgggcagttgaaactctactcagctaaattaccatactaaatgtgcagaaacgactggagtttgactttcccagggatgatcttgttaactcatgagtgatcttgccctttgggcttttgtatatataaaagaaccgtatgctaattaatttacatgtacattacttgtgatcacaagagcttgagaatttcctaagtaataatctggcttttactgcactgtggaaattgttttatatttttaagtgtcaaaatcgatgtttttcaaaaccgaagagctcatactggaagatcagtggagatctccatccttcaaataaaatggtatgatatggtttggtatcacagttttatcagtaataaagatacactgctaatggagataactgcaacaaagcaagaggcaaaacttgttcctctttgagtttgagtttcaacaaagccaagagacaaaacttctttctctttgagtttgagtttgagtttctatgcttcatgtggcaccccatataaaaaaaatatctcacataatgttactgaaaaaaaaatgctattctttcctacttttctaaaattgtacatgcatttcattcattcttattttttttagggaaattatagtaagtggctccaaattataagactatgttagtatatgtgctcattttaaagaattatagtaaatgaccataaatcataacaccatattagtaaatgtctttatttataaattattaatttttttctttttttagaattagaagcaaattatttaaagattatggtatatctatattagttttgttaaaatctttttttatttaaaagatgtcgatttttttaattttttatgagttgttgtggttgtaggtatatagattttattgtacagtatatttctattatattgtatggtatattattattcttagatgatagttattttttgattatgatatgtataatagtggtatataattttattagcataataaaaatattttaatttatgtatataattttaaggttttttttttttattttatttttacactttaaaaca

SEQ ID NO: 79657 - DNA, 3556 bp, Cannabis sativa
tactttgtgaacacccctaccttctttatacaaaagtattgactaaaagaataagaaactaaatcaatatgtaataaaaaaagatacaattaagcattaatagtaataattaatttagtgatttgaacatccataaataatatttcataatataaaacaattaatgcaacgtatttacttaccaaactattaatatctcatatacaaatatatacattaatgatatataaaaatatgatattaatataataataataaaagtaaaatatatacatatatcttcagacaaaacaacttacaaagagagaaaatacatcaaaaaaaatagacaaagtttagtaaaacttctcaaagtgcatttttctattgaatagaattaatatttcactttttgactagtaactcatgtggcctttaccccttactgctagaaaattaaaattatacatgtttggacttaaaattttgtttacataagaggctatggtcaactttttagttaggagacaatgatctcttcggtgctaattaattcgtcggctagatgtggtttcgattccaaatcgataaactggttggacttactagcaaggtgtgaaatgctaaccctgccctgatgcttaatatattcagctacagcttgcatttcttcttgagagatgtaaatatactttcccctgtcatccataattccggaaagtcgccctattttggcaattacaacaaaacaacattaaattttaactaaatttgcattgttgtaaacatgcatgtacttcaattatccagcaaattaaatctgcactagttccaatcgctacaatagattattaacctgatatggtagaagagaaagtagcatgataagtcaatgggagatatgaaatggatacagaatgtaagacattatagattctcagtaaaaagtgccagaaaataagagataagaaaaagcttgaaataaacaggagaaacccctaattgctgacagctgaactagccatttcttgatagaatatagttgcaagaagaaatattcatcaaataataacactcttgttgaaacagaaataaaacatagcatacctatactctccaaggaagcaatcctattgatacattcctgcatagaggcaaaaacaaggcaaataataaaacaaaagagaacagatacataaatttaattaacaaaattgaaataccaaaacagtagtgagcctacctgtgtccttaacttgaattcagcagcaagatcctctaaaggaacacatttctgcttctgcaatattaatttataaaaaacatgaattagtggcaaaatgaccaatctaactacctatttggatagatacattttcttcaatcatatacataaatgggaagtggggtttaacattcagtgagatacaatagacaatagcatatcttaaaatagtttcctatgttggattggacgtagaaaaactccaccatgagtagctcatgtgttatgaagcataagcacatctcaaattcaaagcttgcattgactaatctaatagattctagccgcacacaacatgatctttaactttagcttgttaactatagttaaggtaaccagcatgttaagtccaggcagaatcagttgtctaatctatattttccactctcgataaacagagaagaatatttgttgtcctaaatgtaagagttgaatcgttaccttaatgtattccacaaaatcagaaagtaaatcctgacttccaccttgcacttcattttctgtagtaccttcagcatctatagaaaattcacctttccacttttcaaactccattgctgcagcttcctcctccttagccttttgggccaatgcttcttcctcctgtagagacagaccatattgtttgtttgttattttattttattttattctattattttgttgttgaagaagaaacagaccatattgttaagcaaaagcatggaaaaatggaagaccgaaataatcagctcaaacttccaacaccaaagaaacaaaagcacaatcacccaccatcctacgctcttctgcctcacgctcctcctctttcctcttcctcaaatcattataacaatcttgttttgtttgccttgattctcgtgcagcttgttcagcctaaccacaatcaattcaacaaataagaaagaatagcattcacatgaaaataatgaaaacaaagggccaaaaccaatgtcaagtttctgatgggaatgattgataagcttagaattaagcttgtcaatcctattattcataataggtaaagcaatcctcaaatggagtgaagaaattaacatgccgacggataatttagaaaactcactcaaaaaaggaagtaaatcagttctatattccacataactcactacaattagaacttctactgacattgtagacaacaaatatgtaatgaaattgaagaaaagaaattaataaaatcaattccacacataaaaggtaatcatggaatataaaggccaattgcctgtcgttgggcctcccgctcctgccgcttcttctcctttttctttggtgatttagctttataatactcagcaccagcagcttcatcatcactttcatcaacagattctgtaatcaagtactgcaaataattaactcacaacataccacaacactctacaaatactaagtactaaaaacaaacaaaagatcaacaaaacacctcaaacaagattttgtattagcaacaaaacataaattggtatagtcgatatcatatccctgaatttctatttacaaaagatattgcattaacttgcattgtttcagacctacatagctaatgtatcctaataaaaccgtaaaactaaatcaagtgaaaaaaaaaacgaagatacagaatccatgagtgaatttgataaaagggtgtaatgcttaatcatatatatgtatgtgtgtagatgacctgcatgactagctggggctgacgatgaacttgctccagaagcaggcctccgacgcatccgccgtgtagcagtagaacgcaccacagtttcactttggcgggcctgatatggaaataatcagatgaaacaatttcagaaaatttcttctcgagtagtaaatataaatataaacccctacatatatacaattataagaggaaaccctaacctgaggcggttcgtcatgttcatgagttgattgagaatcttgacggcgcttccataggtaaagggggaccaacgcagcaagtagaagcattgagagaattatagccaacgtttcctccattgttgacctccctggcttacaaagagaaagctcaggaagaaaccgagaacgcgacgaagagaaatatttgaatcgtcgatttgatttgaaaatgccttatgattaagaaatgaaagaaagaaaaagaaagcatcgattatgcacaaaattgagtattttttttttatttatttaagcttttatatatgtatctatggtatcatttgggactcgaacccaacaccactaacatactacttgagctaacgctaaataagaataaattagatttta

SEQ ID NO: 79658 - DNA, 1642 bp, Cannabis sativa
  modified_base (1573)..(1614): a, c, t, g, unknown or other
accaaatagtatggtaagtttaagccaatcgttttgttttaaactgcagctgttatactcccatcacttcagcgtctccacagcgattcatcagagttcgaaatcactcaagagaaaagccttaactcagaaatcgcaatcagaaagaggtatgaagaaaagaggaagcgtttggatgcagattcggatagggaagatgaatgtgggatttgcttagagccttgtaccaaaatggttttgcccaactgctgccatgctatgtgcatcaattgctaccgcgactggtaatgaaaaaataggcctttcgaccgtttgtcttctcattcgttagtgtgtgattatgtttccttacttgctatttgcattacaggaacacaagatcagagtcatgcccattttgcaggggaagcataaagagagtgaattcagaggacttgtgggttctaactagtggaaatgatgtagttgataccgaaaccgctttaaaggatgatgcattaaggttctttcttttcattaatagtctgcctaaggatataccagatgccctatttgtaatgtattatgagtacctcttttgatctaacaaaccacaccaatggtgtacaggaagagaaaattgctgaccatcacattcacatgtatatataaattatcttcaagggttttcattgtgagaacttgtaatgtattaacactccatataatccaggaatgaagtgtttttactgagtaaatgtataataattttctggcaggggcttttggtttctgatccttaaaaaaaaatcctaaaaactagtctttatagtaaataactcctcacattggttattatattcatcaaagcaatatgacattggttaataaacattcatcaagtaccatgatcaactgacttttagttattgtatattactacttctgtcagtaaatcattttgctattagagtactcctattctttcttttaaaatatctcaccaaaattttatttaatttattttacctcatatatttagtacattagttattctatatatatattttttttcattatttaaatattatgtttttacatattttttattaattaaactaaaataaaaacaaaaaaagataatgaaataataaaaaaataattaaaaggaggagagaaagagaaaataatatataatatttttagcttaccaccattcattgagctacatgtaattattagaatagttatgaactattttaactcaacatttacctctttaaaatgttagctaaggagctattttatctcttctattaggaatgctgacaccttataagatgtttaataccatatcaatatgacgtattttgagttgttagcgggtttttatattatttattaaattaaaatatgtcaacttaatattaaatgcactaaaaatagtatgccaccagtgttaacaccttttaacatttttcatttttgtaagtatagaagtggagaatactatatatcttttctatcttttcttttttttcttgttaaggaaggaaagaactaacaattcattagacaaaagtctttaaatctnnnnnnnnnnnnnnnnnnnnnnnnnnnnnnnnnnnnnnnnnnagttcagggagcatgatttggtacatgt

SEQ ID NO: 79659 - DNA, 2610 bp, Cannabis sativa
  modified_base (142)..(144): a, c, t, g, unknown or other
ttgttctaattagataaaattaaacaaatagaaaataaaaattacatcacatgtaaattagatatgaatagtaggtaacccaccttgaacttctccgccgcctagacgttgtattgtcatcaatacagactttacctaaaannngagtaatcaatttgaaagcaatttttcgacataataggccttgggcctttgtttagttgaatgtcagcgatcacgcttgatcgcgctttttcgacattccgtgttgacaattcagagtcgacgagctctttaagatattatcgaaaactttagtcagtcgaaccacaacctatctaatgaagcgatctttacttatcataggggagatgcactcgttcatcgcatatcacaaatatgcgtgaccagcactaatttctcttgatcatgtttattttttgatcatgtcagccatgcgattagaccattgtctctctcacatctttccgcaagtaaaatcatgtgagatcagttttatgggaattgtatttttgatgtgtcatcactatcctttaagggatgagttagcacaagactggactcatattttgaagcggtaaatttgcacaataatacaatttgtactttgtagattgaatgagattggatcgtacgaattagattgaattaactattttatgaacaccgtaatcttagtatgtacaaaatggctagacaaacacactcaagagagagtcggttgacgatgtgctgtctgtgggtcccaataagatgggctgctattgcagaaagcaacacgtgggccgctgcttagttttatctagtatttttgttgaaaaaaaataatacacaatacaaaagttattttttccgtgtcacaatattatttattgtaattattaaaatatttttttaagtatttatgtaaaaatgatgccatttgagacataaaaaacaaatgaatgaagaatgggaaaacaatatacatataaaaagagtggtcatggaaccaaaatgagcaacaaaagaatatatagcaacactatcaaatgtcaaaataaaaaaacttggtgggaagatggatataaagatttgtaggctatttcagcttatatttgccaccatttacgattttccatcgacttcgcaagttgtttagccattgatgcaaagtcctctgccccatttttcaactcctcggtgtgttggcctagtttctgatatcaataccaaaaaaaaaaacatgtattcattcataaaatatgacagattaaattttgacaaaatgtgtaatatttataatacctcaagcttttcctggcgctgtacaagcttatcccttgcttgtgcagctgctcccgaggcatccttcaaaagaatggaaattattgtgttagatatatccatgaaattaaaccattttaaccacttttccataattcattaatctcaataacctcattctttcgatatttagctcttatctcttctgctgttctgagtttgggttttatatcactatcaccaccatgaaacaatctgtctctctctgtttctttatctgttcattaaaaacatcaattacatcatttaatgccagcaaaataattaaagaacttgaagcaataactttaaagcaagctattttacctttcgtttcattcttgtttttctgagatgaagatgagacgtgaagaggttcgtcgatgacaatgtcgtctgtataaagacagtagagtgagccacatagaagaaagatgtcaaacacgaagacttttattctctttctgataatttaaggaagagatatagacggaacctaaattgagttgtatgatttcttggtcatctgtcagagctgtcgaaggttttaagaatggaggacttgaaaataaggtctctaaatgtgcatgaatatctttatgaagtccactaagatcagcattgtgttccactttctctgcttttaaacccttcattataccacccaaaattccaggggtaacagcctgcggcaacagaagttaggagccaaaacaaattattaacaaatgagataaacaatcgagcttagcaataaattctgctacctgtttctgagttggagagaaattgagtgtggcatctactgaagctgcaagcactttattataaagacagggcaaagaatctggtatcctacaagacaagcaaactttcttattattgaagtattttttatgtgcttcactgtacacaaactattatcgttttcatataaatgtacaatcaagaaaaagttacctgaggtcattttcatagctcagaacagatataaaagcaagttcatgcccgtttacctatagcattacacaaaattcagagtaactacaacatggagtggaaaccaaattgaaaatcattgtacttatacaaaataggtgatggagcaaaatgcttatgttggcaaactttgagtgcaactggtatgatctaatgagaaaatattacattagagcatgttaccttatggcaatatggctacagaaaacatctaagtatgacattgtattcggttcacagataatatttgaaaattatgaagcaattctcataatcagaaacatgaaaccatgatagtcaatatct

SEQ ID NO: 79660 - DNA, 2603 bp, Cannabis sativa
tgttaccaaacggcaccttaaaaaatgttatataaattaatcaaacttcaacttaaaagtgccctaaataactttccaaattggacctcacctactcaactcaatagctcaaactatattgtatttttttgtactaacaaataaaagctttagcaaaattcatgacatttaccctatattttattaattagaagattgtccttcccactgaacttgaatcaacaccaaatcaagggtatatatatggataatgaaaactggcatgaatggaagccaataagaaacccaaataaagtttgtttcgttcacatcaatacacaattttccataatcaaaatcacagtaattcaacacaattcaaaccattgaaagcataaacccttttggtcttcaaaacaatcaaaccccatatgcagatataaaaaacacagaaattgaaaaggaaacagaatctacagtattatttattccatacataagaacagaagatagtgtgtattgatccgtaaaagaaatatttacagtatttattgtgtgtattgatccgtataagaaatctacagtgatacaattacaaacacagtacttactgtatgtactgatcagtgaacaatttctatgtgttactctgtagaaatgaaatctgtaaaagcagtaaaagaaatgcagtactgagtctattgactcgttagaaacaactgtaaaaccccatgaatcttgcaagtctgcactacagcaattgagaaaacgttactccagcggaagaagatgattgattatcgtcaatgattaaactcagtaaccttcctcttgaaaaaataaaggaagaaacagagacagattgagcgaacgaaccaaatccttcaaggtcgccttctactactggttcttctagataatatcgaaatcgagatccaacaaccttcgcaaatcgccggtcgccacttctttatttcctataaatccaggaagcggcagagagctaggtggtggagatgtagatgcagcacacgatccagcgtaaaaaggatccattaatttgtgattggatactctaacctgcttcatcatcatttctggatcaggaccaagcctattcgtcgatccaaggcccaaatccgcttcttcaacaaccttcacaactctaggttttcgtttcccaacggagacaaccttagattttcgcttctcatcggagacaacagcaccatggatccgatcgttcttccccgcaatcaaactcaacgagtcgcctcgcttcaatatcgtgacttgaccattaaccaaattaatcgcaggagatttttccaccatggctacatctttcgaccgattacaatcgtcatcgcggggagaagacggaggactccgcttacggcgccgagactgaaaactggtacgactagggttagggtttggattggatctgaactgcgaatcggtcgtcgtcgtcaaagattcgccacgaaaccgcgcaccgaggcaatcgtggggatgaagaatcaccgtgcccattttaaccaaacttactttctcgagaaaatcaaaaagaaaatgaatgaaaattttgggagaactaaacacaaactaattgttaatcaattttggctatgcttaaaaaacaaataagaaacccttctatttatagagggctatagcctaggtcattaggtcggtctcctactccaagtacagaaaaaaaggaatcgtgcaactcacgtgataatcctttttaaaaccgactttaagttagttagtttcacctgtctgtgactcacagatgatgattggatgaatgacgagataagttgggctgcgcttaacagaaagttacattaatgcccttggttttaagtttatttactttagtgttcttttttaaggatgagtcttctactctcatggggtaatttcgtagttttgacgaaaatcaagggttttgatttgacgtggaaacccaaattacggttttagaataaaaggtgtcgtgatttgatttgttgtcagtttgatcaaatcgtgacgacgtggcatatgagtctaacagactataactgtatctgataatgtgaccttttatttcgaggaaatgattacgtgagctaattttttctttttattactattattttccgtttttttatttttttaataatattttgatctttcttattttttgagaaaacgttttgagttttaaattttgaggaaaaagtcttacaataattttagagaaaaaatatataaagatattatactcataataaagatttattacagatattattctatatataaaaaaaatactccataaaatattaggctcgtttcctaatattgcactcaaatattagcacataaaatatacatatttatataaggtgctattcatgcaaatatcaaaaaaaaaaaaaaacaaattttaatatatagcatagaaatttaattacacaaaatataaaattaaaaaaatatcttaaaaatataaattgatattttactattattttaataatttttttctcttaccaccttagttccctcaattttaatattttattaaaacataaatctacaaattgttattttactattattttaat

SEQ ID NO: 79661 - DNA, 2325 bp, Cannabis sativa
agagcctccaaaatggtggggcccgaagcatgggccccgaccaccctaccctctggtcagtcctgataatagaattaggtatatattatgcacattaattttactaagaaattatatagtaagaatttatactttatattaatagtttttgaaagtaacaaaaatgttgctaaaaaatgacataaaagtatcttaataaaaaataaaacaatttaatgttacctaaaagaaattttataagatattattggttttgttgttaataaattactgaagaaattgaaatgttgtttttagttttggtcactttttgggccaataaaagaatatgtattttctcattttaaattaagtgaccgccttacaaaaattttgatgacattatttttgagctcaattaatgctcaaattcttttttgaagttaaagacattagatataaaaagaaaaaaaaaagaagagagagaaataaaaagtgaagacacaagacattgacaaaatattaattaaagaaattaacagagaaagaaatatatagtttatttttttaaaaaaataaaaaaataaatataatgtacacatggttttgaatttttgttaattaaaaaataaaaaggagaaagaaatctacattacacacagtgatgtagagcacaacaaacaagacaacactattaacttatatggccgtatatgcgaaaaccaaaataaaaattaaatgattcatatatatattaataatttgtccgaccataatttcgtaaatagtttaaatcttacgtatataaatgtaaaaactttgaaattattcatgtatgttatattacctgattgtattttattttttattttgggaagatgattcaattttttttagatgtaaagtgagaaattcgttaagaaaatgctaaaaactatccaaggaattaaaacatgataaaagccactcgcaagatcaagacgcatacatagtggtagactaggccactacactttggcactatcaatgaatatagctagtttagcaagggaatgagctatggtattagctgatgttgtaatttcacaacatagaactcaaccaagaatcaatacataacaagttaaaatcaatccatacacaatcaactaatgaataatcaaaccaaaaatcaaaaacagagattaaatgcagaaaaatatagtaaaagagacaaaatatgtttatacagatttggccaaacaaaggacctacttgaggttactcccctgagttttctttctactccattaatttgatgaatacaaggcttcaatagttgtgtgcaccctagagaaaattacagattaacacacttgaaactcagctcgagttcagctctaagaactctagtattggtccagtttcccaactctattctctctgattttctcttttacataatcttcctcccacccaatttcacttattctctctcaatttagtatgaattgttccttttttattacaagaatgactaaagccttttaaataagcaaggactagactcaacttctatcgagtgtactataaccaattaaaatagaatgctacaacattcaactaacttgacagtttatgagttaaaactgttaactttagttttgtttattctgcgaattaccatacaattttttttaccttagttcatagaatcaacacaagaaaaacatcaggggagtgatccagctatcttcagatggagccaatgtttagcaatttcaaaaaatattagaacttgctgagagaaagaattttggttcttgcaactgcatgattctcttcacttggtaccttcttgagttttacatttccatcttcaatcttctctccgatccaaaacaacctaatgtattttgatctctcatgatagattggattcttgcagatataaatggttgattggctatctaagaaaataataatttttcctttgatcatctgtagctcacttaggattcccttgatccaaacttcttcttttgaaagcttccgtggttgctataaactctgcatctattgtggataatgctaccacagactgtagctaagatttccagttgctgtacaagctatttaattgaaaataatagctagttatgaattttctggtgtctgtgtttgatgcataatcaacatcaacaaaaccttccgattgtatcttagttccatgcttggtgaactttaaaccaatctatgaagtagtcttgacatatctcaacaaccatttgtgccctttccaatgttgcaggtgttaagagaagttagttaaagattagttatctttctgttatggttctgttattt

SEQ ID NO: 79662 - DNA, 2811 bp, Cannabis sativa
  modified_base (2754)..(2758): a, c, t, g, unknown or other
ctctctctctctctctcaattgaatctaaagtataagcttttagagattagaactctgaaggaacctctatatatagttgttggtgggttccctttaagttggtgttaaagccaactgttataaatattagcagctttcttcatattcatttgatgagcaaatagatggacatactgacttgataggttaagtgagtttaatcccaacaaaatcaaaattactcttggaaagttgtcctaaaagcaaccaaatattatagtagtagtaagaccaaacaacttctcagtaagatcaacaggagctgcaccaggagaagataatgagcaatgttttgatattgagtactcaatcatcttattaacttcttcttccctaattgatctatatgactcagctctcttcacatacaaaagcccaacatcacatgtttcctcatctctctccaatactcaccataaggtcaaaaaactaagtcatggtaattgtgtaagtgacctataaatgaaagcttgggagggcttggtggaaggttcttgttgaatcgtttaagaacaattttgttgtttatgattaaaagtaataaagggagtaggagaattagaacaagaagcaaggcttgctgtgtacatcagtagccattgaagcttgttaattttaatcgagataagattattgttaatcagttttaatcgtttgtcaccaaacgataagtttttttgtatgaatcttgagtataatgaagatgatgcaattgtatgaattattggaccatgtgaagtgtagtgtagaacgtagcatacatacaattatttaggattgcagtgttattgttcaccaattatccttcacgatgagatttatcatgtcaacattcttatcttagggggccaaaagcaaataatttatttttttaaaaaaaagtattgaaaaatgtaatttttatgagaaaaatatgtaaactttataaggatgaaattgaaaatttgagaggacgaagtgaaaaaaaatatagatattataaggaccaaaatataagtatataaggacgaaaatgaaagcaaaaataattatgttgtggcaaaaattttatatacgaaatataatttatgaaaaattgagcacatgaccccatatggctcctatagtcatgcggcctctctcaaatgagtaatgtgaaatatgtaggtgatgtatggtaatatttctattttttaaattttaaaattaaaaaataaaaatagaattcttttttttattttttattttcatttttgtttttaaaaagataacatgtttttgcaactagttttattttaaaatttttaaaataaaaacaaaagtgtattttacatctacatttatttttttttattttaaaataaaaataaaaatgtgttttatatcttttttttttcttttacttttaaaaacaaaaagaggatagaggtccggagcctgaggtctgggtccaagttcgagatttgggtctgcggctctaagtccaagtctacaactgggtctggtccaatcgtgaggctctaagtccaagtctacaactgggtttgggtccaatcgtgagatcatggtccaaaatattaataaaagaaaatattataattaagaaaaaaaattgtttaaatatttttgaaattgacttttttaaaaaaaaaaattaatttttatttcaaaaattcaaaagtaaaagcagtatataacatgtttttcaaaaatattttcactttttgaaataaaaaagtattacgaaacgcaccacagttaagctcatttctcaatcagggatcttctcacttcagttggagagacatcatcacagacatagtcaacgtcatctagttgtggaagttgtacagctagctggatttccgaagagtttctttcttgtatagtcgaggtgtcttcatcattctcgtctgggaaatcccacacattacgcaggttgcaagcattgacaagcttccaatcatctccattcttcaggtcaggaatgtaaaatatcatattttcttaggatgcaagtatgaatgtcatgcacaaccaaatgtaccccattatcaggagtttgaaagttcacattcaaacatctcatgcaagggcatcaagtaactccagtagaatttatttgcattcaagcaactccaataaacttgtcacactcctatgaaactgtatagaccgtcggtttgcagttatccaactactgtcgctcatcatatttctacataatataaacagagaaatttcaaacaaagcaaaaaatgtgcaagtgtcttaatctgtcttttcactccatcattaaaagggtaaagaatctatctcatttaggtttgaagtatacatatagtgcaatttaagctcttaaaattatttcatttttataaaaatttcgacaacacctccccacagttctcataagttagcaaacactactacaaaaatagtttttcctgacctttttaaacagtcgtttaaaatattcatgttggtttctataaccgtcgcctatatgactgtcgaaaaacggacagaataggcgacagttaaaaactatcgctaatgtggacttcctgacggtttaaaaccgtcgcctataacagccgtcgcttatagtataggacacgatttaaaactgtcgcctatacctcgttataggcgacaagacaattttaaaccttcgagaatgtaaaaagagagaaaaatctgtattttttcctattttttcctgcattagtttnnnnnttttacctaaattaaaataaaataactaattaattttattacaataataacta

SEQ ID NO: 79663 - DNA, 1786 bp, Cannabis sativa
aaaaaaaaaaaaaacaaaagatagttataaacgagcaaaaaaataagacccccaactcacttgctcttgtctaatcccccaagtttcccatttcatttttaaagacgaagaaggttaagtcgacgtttaaagatccgtggcgacggagaaagctctttatttttatgcttcttctttcttttccccagaaaattccgtaatacagaagagggttctggatttcagagtcagtagttaggttcttcaaagtgtgcagggctaaagtcctagtcgagtccgttttcaaaaaatgattgcccagcgccgtgagctgcaagattcaacccttcgttaagaggttacgtttcctagcactgaaatataacttgaaatactgcagggtcttcattttcaatcttcatctccaacaagtctccaattttttttttgaatagtaagtaataagtatgatacggatttctctgtactgtgtttcttattaattttcatagttgatttaatcatatgatatgaatgtgcttcttatttatttgaaaaataacctcaaaagttacagtaagcgactctgaaatttcctaccacttaaatcactgagcttattttacaaatttagttagtttgacaaaatccacatatttgattctatattatctactgtttttctatcagatttgtaccacttgtttaaatcaatttccctttcatttttgtttgcaaatgaaagagagagcaaagagagttccaaaatttctctttatgttaatcattttttgtatacacttggtataagtccttagctttctttctcatgatgacttttgtctttctcacaatttattaactgattaaccctagtgtgtaatttctatacgttgtaaacatttctgaaagatgattcggtttcattttttgtaatttcattagtttctcttctctaatgcaaataaggtatctttggaaaaatgcctcagaatgacacgattatgttttttttttttttttttaaaatatttatctatgcagtttgcgaattcatccatatgatttgggcttttaagatatttgatatggttattttgcgtattctgtatttggactaaatttagttatttttgtggttgtcttttgatagaaggaagaccttttttttaatgattaatgcactaagcgaaatttgaagcttagattcaaaagtctcacttatgatagcttttcttgatacatcatttttcatattccagcttttactatttggggtaactatatcacttgtgtaatatttaatattattttttggaaagaacaagagcaagaacctgcatgccagatttaaatctctacaggaatagtttagccattctccattaattttcaggttgtacgaaacgtttgaatagtttagctattctccataacttacaaccaatgtaagcaacaattttgttttgcatttgacggttgtacgaaaaggagttttgttgctgagagtacaatgttaaacagagttaagatttcaacatggaaaagatatgtccaatcatctactcatttagttacatctcttttacttggagaactaggcttagctacaaatacctcaatctttgatgaagcaaattgtataattggtacacttgattagttgtagttagttttaaaaatcagatgaggtgtacgccacgaggcgcgcctcaaggcgaggcggtgaaaaaacgtatttgaggctacacctcacaccgatgaggcagacttgaggtgcacacctttgagcggcattttctttctt

SEQ ID NO: 79664 - DNA, 1571 bp, Cannabis sativa
ataattcttataattattacaatataagaattaataatgaaaaagattttagtacttactactgtataattttccatatataggatgaaattgacacttaattattaattgacctcctcttcttttctcttgtgttttttttttttgaaaattattaaccacaatacacattggtggtatgtaacttatatagaataatatctttcaactcatgaacaagcacataaacgaatgaaaaaaaaaattaattattggtggtgaaaaaaaaattccaatgattagaaatccaacaactaattaaatatatacttattaaaaaaaagacaataataaaatttaaattcgaccgacaaattacttgaagacaatatttttttgctatagctggcgttgtcaactattcgaatgaaagtttaaaaaaatgagaagaaagcattacaaaacgtcaccaacttcatcatttgatcccgttcacactttagataatggtaaaactatatattaatcataatattccctaatactttatgtataataaattaataacattataaatacaagatggatataacataacacacctctcacaatcgatcaaaaatattgggataaggattaatgaaaaatggacaacataaacgtcgacttggagctacacgatttcattgccgactcaaatttcgaccaattcatcgatttaattcgtggcgaaaatgaagacccgcttgtgaattttgggtgtgacgatcttatcaacggctctaataacttcattcacaacaacaataacattattaatcatcatcatcatcttcatcatcataatcctttagataataacagcaatcaagtctttggtttcaacgctaattctccaatggtgtcgttggaccctaattcattgtcgtttgttaatactactttgttagtaccggaatataatattgatggggatatcatgaataataatatggatatgatgattgaaaataataatggtgatgaggatgatgatgacgacgatgattcctcgggaacgacgacaacaacgacgacaacgccaaatgcatcgtcgaaaaggccaaaggttgatcggtcgagaactttgatctctgagcggaggagacgaggtaggatgaaagaaaagctctatgctctacgctccttggttcctaacattactaaggtacatattattaaatcaatgtaaatgctaacacatttaaattaggaaattacaccaattattttttttagcatagataactatataagtagactacaaccgattttaattttataaataaacataattagtattttgtcttgaattttttttatattattattaataatatctcttaaaaatataacttttacatagtgaagtacttaataaaatagtaaataataattaattaattgatgtaactttttcatcttttaattatttaaatagtgtaggatttgaatgtctcacaattattattcaaataatgtcaaggagcatcacattacttttagggctcgtttggaacgtcgtattaggccgtattgtattgtattgtatt

SEQ ID NO: 79665 - DNA, 1892 bp, Cannabis sativa
  modified_base (26)..(28): a, c, t, g, unknown or other
acaatctcaatagttcagggggaatnnntaacggccaaaaaagttcaaggagcacgatttagtacatgtcaaagttcagagggaaaaattactaattagcctaataaaaactattgatgttcatataatttacaatttatagttcaaaaccctaattaatctggacaattcaagaccggaacaaatgaatccagtgtcaatgatttggtcaattcgaacggtttataattctttagttcgatcatagttttagaaattctcatatgtagttcaaaccaaaccaaactgtttaattcttgatatatacttaatataatttttttttgattgaatattgatatttagcaactaattgataatattaagtatatatcttaacacaatgttaaaatattagcaataatcttaagcctaatattgataatactttaagattgtgttaagaatatttattttcattattatttacgtattataagctttaaagtaaaattaatccagtaaaaaaaattatgaattacaaaacacaatttcaaaccaaattaatctattcttaagtggattggtttagtttggtttgagcatttaattagtctagttcggttttaaattttaaaaaaccaatattacgagtatggtttgaaataaaataaaaattcgaaccaatgaaaatctttaaatccaataatgtaattagaactatacatccatgtatttgaaaaatagtgtataatcacgtgttgtgatgtaataaatccacattttgttctacaactcaaaaaagtatactattattcacgtgtgaatgcatattaattaaaaaaaatacaattaaagtataaaattaataaatattatttgctctactaaatagtaattaagctaaattagaaatgaaaaattattttaaaaatcattctttgttttggttatattttaaagagaaattaaatatcatggtgacaaagaaccctctaaatatatgaaattgtgagacagaaaaagaaagagactactacttttataataactaaaacagataatattaacaataattaaaatatattgacctaatacttaattaagagaatgacaaaatacaatagttgtgtctaatactactttgctccttgtgatcttgctattaatataataaaatattgtgtcttgtaggatttaaaataataacttttaaaaattattaaccaattacaaaacgtcacccctaaaaagagtaagctccagtggcactctaaaacccaaacaatgctccttaactaactaatatccaaagcgctctatcagcctagggcatctaaaagagttggagctaatgttaggcctagttagagatgattatggccagtcaaagttaggaggcttcctacttggcggcgtagcccaaattatctttcttggtttgggccaatatttacgtcttgaaatcaactttgagcttgttggtttaccaccacctctagacattttaaaccagagagccaagccacgctctggtataaattttgaccaaatcttagctaggtaaatccacccatcattacccctcaatattaaataatgtgtgaatgaattcaaattccagttcacaacacgtccttgattaactcgcaccacatatttaagttccacctcattatcctgaacatcatcatcatcaaacaatagattaattacatcatatgtaatattcataaagtagccaaacatgtgtgtatacatcatattacgaacgtaccattctcttgctatgctctttcattacaaatattgccattgctagaaatggacgaggtgcaaatggagttccatactccgcagggaaaaatccctatatcatgaatttaaacaagaaaagatgacacataacatta

SEQ ID NO: 79666 - DNA, 3095 bp, Cannabis sativa
cccattccccatttagacaaggaatccccgtcacattaggagcaggccatttcattcccatgaaaaaaaatatacatcctacataacacaatattaatttaattaagtatcgaatcacattataatttaatatattatgaaaaattaatatttactacccaataacaatgctctaataataaaaaggctaattaaaatttttgttccctaaacttttacatgtaccaaatcatgccccctcaactaatgcccctgaattattgagattgttggatttaaggacttttgtttaattttattcaattttactatttcaatgattgtttatatactaaatcatgctcccagactttgataactagcaaatcatgtctctcgaactttgacatgtactaaataatgttccctgaactttcatccatgttagacttttttataaaaattggacaaaagtccttaaatacaataatctcaataatttatggagcatttttaacgacattaagaattaagggcatgatttggtacatagaaagtttaggaacaaaaaactaattagcctaataaaaataaaaagtgtggccttatttttatttatttatttattttgaacaatactttataaataccttattattattttattttaaggagtaatatttatatattttaaaatacaacgaatttccccccttgcggcctttgctctttcttcctcctcttcttccatggacgctcctccgcctcctccgccctcaaaatcaccagaacccactctatccaattcttccatcaccacggactgtatcaacaatgacgcccatgacatcttccctgaagattcttcttcccaatttccaagtccttcggtccaaaattcttctccttccgcgggatccatggaggaaaccccaataaaggtggccaataagcagaagaaaaagacgaagaaaagggctcagaatccgaaggaaaacgccgtagctcaaccatcttcttcctcttcttcttctccgcctcagagagtaacgcgcgtagccagtactcgccgaaaccctcgggtcgtgttcaggacggcgcgtcgaaattccgttgctgatgcggttgcttttcgttttggaatgtcaatggcagcttttgtctctcaggtttttcttaatataaaaacttttgctttttgaaataattttgttgagaattatacactaaagatcttttttcgcctctttctttagctctttgactcttgtcgttaggttaaatttttaatgagatacatttttgtattgatttaatttactaacaaaacaataatgtcgattaaaggaccgattgcaatttgaaagtccatacctttttatcattttatgtctttatgaacgtaaagcacataacatagattacagatttagtagtggttctaataatcaatatccttgaaattgagttgtgattgaatttaatatccaggatttcctgtgacattaaatagtaaattaagtggcttttcagtttgggatttatgtaatttttgttatctcctctgtgctcatcttttatatttgtttgataattgacatgaagagtaaatttttaagcaaggatggcttagaatcaaagctaagttgtttgtaaagattgggagatagcaatattgctggcatattccttccaataataagcatgttcacaagaatttgataccattttgctaacattaattgatttaacaaatgctgcattatgatttatttattttggtaaattttttataacagtattggacacatttagttcttgttcaggatttattttagctatttatttgattttagaaattaagtcttttgacgtaagatgcttattttttttttatttacgaaaagatttttcttttattcttaatcgtcaaaagtaattatatatccttttagccctggcctttgcttaaattgttggtgtgagttcatacctttattacaaatcccttgtctccttcctaatttttttttatttggtaaaagaaagtaacatgttttaactagattttaatgattgacactcatctaaggttcaatatttttgtccacaaggtttctttttaatccactttagtctttttttgaaattctggtttaacattggtactcgtgttttttgttttcttagattcttgaaaggaaagatacaggagttgaaaggatgtcctctgatcatcttgcactggtattcttcttgcctctaatgctggtcatacattttcctttcgtaaattgtcatatgtagtgcatagactattctgtgttgtttgtgtggcatctcttcatccgacaagctaatgtttcattgttcacaactagcaagataacatgttgaaatgattgcaacacagcaacttcttgattgtgagatgaactctaattgaatttgacgaaataactgccacattaagctctcggcctgccttttgctggggaggatcattctcattcagttgtgaagtatgggagatgttgcattgactgatatgtatatatttgcttgcctgcagatctgtgcttctgctgtcagagaatctttagccaatgtaagcatggaccttaactgctcattcttggactctgattttgcaagtaaaattctctatatttagtttttaatgtcgtcacacaagtctgagatcttaaattttagcttcttggattacctatgtgacaacaggatttcggggatacatttgattgttttgtaaggaactttgagaaatcattcagcagtacacttaggactcttaatttaatcaaggaatcttctgtaaataagggagatgaccacacaaatgtggaagcttctcctccagatgtgcctcattatgtacgcggaggagatagtgcaagcagtcttagtatagaaggttgttcaacagaagagctcttccgtagtattgagcatcaattaaataacggaaacaaccacgaaaatcacataaaagcgaaaatttctcctccagatgtggaaggttgtgtacatggaagtggtagtacaagttgtctcgacatagaaggccatctaacagaagagcatttccgaactac

SEQ ID NO: 79667 - DNA, 3201 bp, Cannabis sativa
  modified_base (39)..(49): a, c, t, g, unknown or other
tgatctttattaactaataaatttgattatattgaaatnnnnnnnnnnnagggcacaaaacccaacactatccccgcgtcctacacggtactaagtcaagaacattcatacgacagtattattgaacataatatcagcctatactcgatactctagtcgtatcgatgtgatagtgacaaatagtacttaagccaacatacatttatcggtatccaatacaactctatgtatattgataccgctatcaatgtaatctaacaggctttgtaaacatgcacgctaaacatgtaatcacatatgtatatcattatactaatcttacctcattttcgaattcaggtgtgctggtcaacctgagtggaacagctgctcgacgatttacaggtccctaagtcacaatattcgtaaaaaagatgacacgataaatcactttttgtggacttaaaattaaatttaaaagtttttctatcgatggataacatggaaatgtcctaaatatcataaaaaaatggggaaatctagggtaccctaaaattccctaaccgatagttcccaaccggttttggggttctgcctggggatgaaccgaaattctagttcctacaagtccatactgaaacggtggaccggttcagtgcaaggacccccaaaactttctaaataaaccaaatcgaccccaaatgaatctaaaccttccacctcagtaaaactaatttaacttctgcatacccaaataattccaaacaatacctatagcaaccttaaactcataattatgcacaaaacccaactccagacatcaaaatttcaaggaaaagagaataaagaggcctaccttgagttgaatccctaaagttccaagagaattactgcctaaacttccaacaatctaagctaaaaacccctacttgctattggtcacaagggaggtcgagagaaagagagagatgaagagatagaaagaattttgtgtttatcttaatattttttttttaaataaacctaacctttatctaatcatgtacattaaaacataaaacataacttaaaattaaccttctaagtcactaaaagacagagttaacccaagataaaaaaaaaaaaaaaactatttttccccttgcttcaccaagaagcaactttgccacctaggggcatttgggtcaaatctaaaaccacaagtattcctgatatttccaatatctatctaaattgccccgctattacaaattactaaaccatatgaaaatgtgactctatcggccaaacgtcgcgttccactattaccggacataaaatatgaaaaacatgaaatttcatatataacataaatgacacacgtagaattcaaatatatctccataaattcataaatcataattgaaagtataattctaaattaaacaataattattagctaattctcatactaaaattaagcggtctttacaagcatcataagtgtatgcttataaaccttcttatccattgatatactatcttaagaaatttcttaatgaaaaagttataggggaatttttaagagaaacttcgattaaaataagagtccaacgatggcccgtttaggcaagagtaaaatttactcttattttattagttctctattatttcagcactataaacactagtctaagttgtcatctactgggaatcaagtagattttgcacttgcaatcacttgtcacctggtgaaaaagcaacagtgactggaagtaaaaaaaatgtgcctcactaagggaatatcgactaagttggagggttcaggtcaagccacttcttgcagataatggtgtctgccctcaataacctcttgtaagaatcacatattacatcgagaggtttcatctttactagatttaacgagatgatctctaattttctcatcatttatttcaagaatggtttggggtctacgagttttgggtctaaattctatagcagaaatttgaggacaaactaatttcaaggattcagaaattgtgaattctggaataaattgggacatgattataactaataatgtcctaattcctggaaaaacagaacacatataaaactcataaatctacgaatcgtataaccttaaattttctagccctagagttattcaaacactcaaaaccaaaatacccaaatagcaaaacaatgcagataagaaaaatgcttactaaaaaattgaaattgaaagcacagaggaaaaatcagtagaaaagagtgtcattgctttgatgagaaattttgggcagagacgaacttcgcgattgaaattccaaagatcgaagaactaagttttgatgatttttgggaggaggaatgtaatcagaagaaactcgcaggaagaatgtaaaagactgagagggcatgcaaatctgaaaaagagagtggttgagattatgtcgaaagctcaaaggtttgaaggctgaaaatggcataaataatgcacatattcaaatttatacctaaaaggtggccaccgttcgatcaagggaaatctaatctaacagatgggaaccttacaagaaaagaacagtcggaccattaaattagaaatgatgtacctcgaagttttgaatcgccaaattctaagcatgcaaattttaaacgaaaaaatatgattatacccttgaagacatttaaaaagttatttttaattaaaaagaactttttagggggcaattattatacctaaaatttggttatttaccaaaagctgacatgtgtactacaaaaagaatatgaatcagctaaatgagtataatattaagttgcattattaaatgcgtcttaaataatttgtttcaattaattatagttgatagaaatattcaaactctctgccacataagcatacgtgagataagaataataactattaacagatgtgattgacaagacaatatgtccatctcggagcagacaaagtatataatagaagcatacaagacgagacatcaagaatcttgcagctcattgacccacatacttgggagtaaaagcttgcaactcattgacccacatatttgtacataaagaaaataactacattcatccatctcgccctctacatgacggagtagccatgtaacgccctaaataattacacatgctacccaagttatttacgaaaccctaatcccctaaacaggattactaatcaaaatagcgcaaaaattaaacttt

SEQ ID NO: 79668 - DNA, 946 bp, Cannabis sativa
aaaaaaaacatctattgagagtactttaaagttgaaactaatgacttaaaagcctttgtacttctaaaaacaaaaagtagcataaaaatgactccaatgcaaggcctttccatgccacccaaactccctctactcacgtcccgccacgtggcagtgatcggtgccggggcagcgggcctagtagccgcccgtgagctcggccgagagggacacagcgtcgttgtgttcgagcgaggagaccaagtcggtgggacatgggtgtacactcccaaggtcgagtcggatccaattggggctgacccacgtcgggccgttgtccactcgagcttgtaccagtccttacggaccaacctccctagagaagtaatgggttttcgagatttcccatttgtggtgaagaaagacgatggaaaaaacgagagagaccccagaaggtttccgggtcacagagaggttcttatgtatttgaaagactttaccagagagtttgggattggtgagttggtgaggtttgatactgaggttgagtgtgtgtgtttgatggatggtgggaagtggaaggtgaggtctaagaggagaggtgaattgggagtggatgagatttatgatgccgttgtagtctgtaatggtcattatacagagcctcgtattgctgatattcctggtaaatgtttacatatgtgtcaacgggacttagttaaagagaaattcatctttttctttttccctttcttacccggtgtgcatgtttggattttgggattatgaatctgaatttgtctcagcctaatgaatctcttagactttgattggttttgacattaattctgtttcttctgttcttcacatatgatatagaagcataagttttggcagaggtttacattctgtgaattaatgtataaatgttgggggtaagacctgtaaggctactgttagaatttgt

SEQ ID NO: 79669 - DNA, 5651 bp, Cannabis sativa
  modified_base (614)..(627): a, c, t, g, unknown or other
  modified_base (2793)..(2800): a, c, t, g, unknown or other
aaaatcaaagtgttatatgaccttaatatgcaatatataaatttctgtaaaagcaatctttatccaaatcagttatagagtccatgaccgtaggagattgactgtttaaacgtctttgttaatgatattcttgaagttaaagcagacgttttttttgccgataataatagaacatgcaaggctctttggttttgtagttttacaggatggtctcattcatttttgggtaagttaatctcttaacatttcatttagtttcaacatactctcttagcaattctagagcagtattaacatatattgaaaatgcatagaatagcgtatccacaatgtatatacacaccaaaaactaattccttctctctatatcgatcattgcatgcagtgttatttctttctttttttctaaataatatttctcttctgcccttatttattaatgagtcatctttctctcatgatcagtccaaaagtaattaattccatcgagaccaatgatacagagatgcctatatataaatatgtatatgtatgtacaaagatgacaattaatacacagtttatagacatggaaaactatagatccaaaattctcctctctctctctctctctnnnnnnnnnnnnnnatatatatatatatataaatgtagcccaattatgaagataacattattattatttagttggcatttgataagagcaactttttggtcttcaccatggataaaggcgtagctggtggttggaccaaatatgagcagattggaccattaaagtatttatgttacttactactaccatttttgaagaacggtgagattctaatggaagtgtttgaagatgatatctggggcgcaaaatacatggcttcttgcaacattcgtactcaaaagatcaaaaatgttgttttagatgcagatggaaaactagagatatcttatgattgggtttgtttatattaaaagagtctcgtttctcttaggaggtagtgaaggaagttcagtcaaaaacatctctggtttggctatagaatttgagatactaaaatgctatttgtttagtttgattttgtgatttaaacattatctatgtaattaagtccttattgatgcctttctgaattttgttttttttttttatgctttgaaatataataggctgacactcaaaagtatggaaaaaaaatgaaaaaaaaaaagaagcaaaatgctaaccaaattgtgacattaagaccttaaaaagttgagcaatcaaaactagtccccacaccagacgaaagaaagcataatgcaccacttaggagttgtaaggaaattaatcccattgagtctactgagctgttaaacactgtacctgatgttggttaggattagttgagttagttcagttagttttatctgttatgttctgttatagctaactgtttttcagttagttttcttcactcggtgaactctgtacataaacccctgtatacatgaggacatctctcgttttggcaaaagtatttccttgcctcacacttaacttcaatatgtagaattttaacattagtctagtagatgttatgttagttggttcctaaggcttatgtcaacaaagttagttgttatgttcaacatattctcaatcattgtcaggattataaaaaaattcaaaataatataatgtacacataaataaaacaatatgcatgtaaattgactatttgaagaactacaaattattttaaaatttctcattgaaaaaaaagaaagaaaacaatttacaatatacgaaaattagatatgaccataggagtttagttataattgattaagattttttaggaaaaacaaaaaattgaaagtaaaaaaaatagaaaaactttaagaataaaatatagaaacttttatttaagtttttagaaaaatgacacaaaataataaaaaacaacacatgagtcactcagttaagagcataggaagctctctttgtattgggccagactttaccaatctcaaatatcgtggttggatcatcaattatcatcatcttcatcctcatcatccttggaagcaatactaataagatcaaacgtcgctgtatcgctcatcgcctgttgatcgtgatcatgacgagttgctctgaattcaagtacttccaccgatattacggcgttgtttcagttgttgattttcgagtcgccactgagttggatgagtagctcaggcgcgttgatttctgactcggagaaaataaatgtagaagagcgcagcgatgaggaagaagaagaagaggagaacgagtactctccgtagggaactcaatctttcggctcagaaatttgggttttatgtttcttatcttttagtttttattccattttttttcaccttcttcaaatttggattttaaaatttctttttgttttcttgaaatatttttttaaagattaatgtgttctgcaatgatattattcgatggtattcatgctggatattttataatctaaaagttatataaatgtagtaaattttgaataaattgaaataagaatgaatcaaaataaaattaaaaaaaaaaaaacaaaacaaaacaaaatgcactaaccttcaccttcaccgcagaagatggtctgggcggaattgaagagaatgacttctcgtttttttttcctgaattaattttccattttaatcattataattttcttttttaatactttaagttttgccaggtgaaccaatgaaataataattaaagatatataaatgcttctatattcaccaaatcaactaaataataataannnnnnnnataataataataataataaagtgtctatcagtatattccactttgcctaattcaaatgtaattttatttcaatacactacaatctacaataattttctaaaattttcctatgtggaacaattatagtacacgatagtggaactattaatgagtctcttttacgggtgtctattaaagaatttcactaaactataaaaataaaaactttatttgtatgtatgatccaaagacacgcttttttaatagtgaaaaaaagaggagagagtttttctttgaaaaaccaaaacactgcataaattttttttctgttaagttttaactattcaggttattagatttataaaattatatatcaaaatatattaataaaaaaaaaaaaaacttataaattgtatagttagtatttttattaggagtttgtcattgattggaagaatgcaaccggatactttgtatcagatttgatcaaaagtgatcaactaccaactccaagttggtccttacggtgttccactcgggtgtacccggtttcagtacctctccaactgaaaaatcaataataggaagcctgagaaacggttgctggacgtcatggctttttctttaattcctgtgtttagaattatgtaaccaaaggtcattttgtgaagcttgaagaagcttgaacaccacttggtttgggtgtgtatggaagcaaggatacttgaagcctagcttaccattgttctgtttgttatttagttagtggtccgaatattggtctggttttggcgagagtgcaatggcggatgctaatctaagtgatctttgtgaaaactctgttcaggttaccacaaatgaactgacttgcgacttaaacccgggagaagttgatcatagtgaggccccgaatagagtactactgggaaagctctactgtttttcgaggctgggacgcaaggccattcaaggctctctgaacaatgcgtggagctctctggtgggatggagttggaaagagagggaagatggtcttcttcagtttacattccaatccagctgggatgctgataatgtgttattacgacgcccctggttagtttgtggccatctactggttctcatgccctggccatcttggttaacaccctcggaggttgtctttgatcaaacgccattatgggttagactcaaaagtatccctccattctattggaataagacgaacctacaagagcttgctggaaaagtctcagcatcgtatgagttaccacgacacattgaaaaaaatttcgaaagagggtccttcggcatgggcactctgcgattcagagccattgtcgacatagaaaaacccctgttctctggtttttatttaaggcgtaaaggcattaaggatttgtggatacgatatcaatatgaaaaactcccaaaaatgtgttttaaatgtggagctctatcccatgacctcaaattctgtttcaagacccccactgttattaaggatgaaaaagggtcattcttccctatgtttggtacctggatgaatgaagatgctgtggaaagatctcctttccatctacctcttcctaaatggttcagtgactggatcctacaacaacaaacggttaaggatcccgaaactcgaaacaaactaaggatagagcgaagatggaaggagacggaggccatggaatgtagagagctgagaagacaactgcctgggaaaagaagacaagttgaggttttagtggagaagagaccggcgacgaaagaagtggtgatgaaccgttttccggccgtgcacttaccgggaatcggagagattaccccttttgagaatacagctgatatggttgttgaaaaggagatgcctgtccgtcctaatcctatgatggggacatctccaggcgagtcatccaacaaaaccgatgcagggagagctgtatcttcagaggagacgactacagaaaaggacggtactattctcagtcatacaaacagaagtgaggcgagccccaacatagcacatgacagagaactggaaaaattacctgaaaaaggaggaaccattctgagtacagcaaagaaccctgagccgcatactccttctccccatccttcgtacttaggcgtgcaagacagggaaaatttcactttacaagaaaaatttcaatttggccaatttatcaattcccttcttgggccgcaagcccaacctctggaatggccttcaagactatgttgggctagagcttttgaacctttgatggggtccacaaccatagacaagttccatagagagcccaccttgtttaacccaattctagatattgaagactttaagtgtatggagacagaacatgggcctaaaaagaggaaggcagttgatgggttctatatgatccctgggaggctccaatcatatgatgaaggcccatcaggagtggttacccctgaagcaaagaataaacaagtcaaccacaactctgatgagggagggacggtagcacagttctcgcctgggtcgaatgaacaagcaatacagaaaagaaaaaggggaagaccaagaaagatcaacgatccctgcaaatcgccatcgtcttacatgaagaaagagagtattactatgcccaatgagaggatcggagtcaagacaaaaagcttgaaaaggaggaaaagagggtcatccatcaaaggaaatagtagccaatacagaaatctttggaatgtaaaaggaattgatctaactattgatctggataatcacttcgttgttgtggaaaaggcaaagaagcaatacccggggtgtgaaataaacaaattgaatgaaggggaagaactactcatacgggagcacgatgacgagcaa

SEQ ID NO: 79670 - DNA, 1128 bp, Cannabis sativa
tgatcatctgatatagatatcttttcatcaacaacaatagctgtcgtttttgggtggtgatgaataatatcatgatgaggaagagagaacttggaagtgaaagagcattctagagggaactttttgttgccctggatagtactgcctctcttgttgtggtagccaagataaagctctttcaaaaacgacactttttgcttgagaatcaacccttcattttgggctagcttctccacctcccattggttgtaaggttcgtccccccggtgagtaatgtggatctccccacctttctttatcattttactagcacttctaaagaaacctccaaccaaattcttgtgcctcctataaagtaaatcatatatatatacaaataaacattaatatgtatttacacataaagttagtgtaggaaattattaacttactgaataagaatgtcatccctttcacatagccaagagacatgaccagcatgaggaaagttaaagacaatgacatcaaattccatgtctttaagggtaggatgtcggtccatgtcatgaacatctacttcatgcaaaaccaaacaatctctcttctccaactcatccagatgcgattgacaatgccaatgctttcccagtaacacatctacgttaatttatagattaaaaagtaatattaagtcatgtaattaatatataattttaaaaatataatatataaattacctagagaatccaaagaagtagcgaccatattatcggcgtagcgaaatgctttagctaaacaagcagagaaggaaaagtcaccttctccaactagcagtatctgctgagaactgttgtactctcctatccatctatctctattcctcctactcattttccttttttcctaacctaaatgagttttaagtaaaatatataataattggtctttagttttattatatatatatataacagaacagagagtagtagtactagaaaaggatcataattatttgttggggttagttccacataccactggtagatacgtactcgtataagtactaacactattatttttataaaataattgataattatggattttgaaacggcataatagaatagaatagaagacacagagtccttt

SEQ ID NO: 79671 - DNA, 3158 bp, Cannabis sativa
  modified_base (26)..(28): a, c, t, g, unknown or other
acaatacttgttgtgactaaaactannntagtgacaacttgtatttaaatattatgttttagtcacaagtaaaattttgttgtgattaaaggtggaaattatcttagtgtctacatatatgtatgtatgtatataaattaggaggggaatggcttgtctcatgttcccattatatcgatcatatacacaaattagaattaagttggaaaagaattaaacacactataatatacatacataataaacatatgggtctaatttcatcattagctgtggtgattttaataaaacttcttgtgatgcttcaatactctcatcatagtcttgttaattgtatgcagccttcttgtcatgatgaagagaggagagctttgatccatttcaaccaaagctttaaaatagactgccaaattagagtggattcatattatggctttgttcctctctatccaaagacttcatcttggggatctaatggtaccaattgttgttggtgggatggtgttgattgtgacatgttgactggtcatgtcattggccttaacctagctcgttcttgtctctacggctctatccactccaacaacactctctttaaccttgttcatctccaaaagcttcatctcggttataataacttcactttctctccaattcccaccgccataggcaagttctcggagttgatgtttcttcacttgggttcttccttcttccaaggtcagattccattcgaaatttcacttttgtctaagttgtcttaccttcacttgtcaggtaacgctgttgacaacaatccaacacatttgagtttgaagcttaaaaatccgaatcttggaactctcataaaaaacataactaccttggaaactctttctctacaatctgtagacatgggttatgaattaggtaattctttggcaaatttgacttctttgaaagttgttgatcttgggggttgtggattgtatgggcctattccatcttcacttggaaaattaaccaaacttagtgttctaattcttgatcaaaatcattttactggtcatatcccatcttctattcaaaatctcacactactttcccatttactaatatcaagaaatcaaatttctgggcccatcccttcatggtttggaaatcttactaaactaacactaatgaatgttaatttaaacaatttaataggctcaattccatcatcattgtccaaactcaaagatcttcaattactcgatctctcagcaaatagtttaagtggggcatttgagttagatgcttttcttaaaatgagaaatatggttgtcattgatctaggctacaataacatttcgttacttgtagaagaaagaaaatttgatcctaacaccacaatttcaaatttaaattttctatccttagcttcatgcaatctgagcaagtttccaaaatttattgctcatcaaactaatcttgaattgttggacctttctcataaccaaatatatggccagattcccaaagatttgatgaattcaagtcttcaaagcttggaggtcatagatttatccaacaacttgattacagggtttcaaaaccacacatccatcctaccctggtcaaatttgcgagcgttctatatgcaatataacttgttgcaaggacaactaccgattccaccatcatcggccatacattatgatgtctctaacaatattctgagtggtgaaattccctcatccatatgcaatttgagctcaattttagttcttgatttgtcaaataataacttcagtggagaatttccactttgttcaagcagtatgattagtgacacaatgttagttttgaatttgagaaacaactctcttcgcggcactattccttttcaatgtcaacaagaaagtgagttgagaatggtagatttcagtcacaatcaatttcaagggaaacttcaacgaccagtgatggcttgtatgaatcttgagtaccttgatttctctttcaataaacttactgatgtgttccccacttggttggggagttttcctcagttaaaagttgttttgattagagaaaacaaatttcatggagttatagagaaacctcaaaacactacaagtgagtttcccatgctacaaattattgatatgtctcacaattatttcacaggggcattgccttccgaatatatgtcattttggtatgcaatgaaagatttcaagacaaccaatttaacatatatgaaagcaatggaaaatctcacccttaacacgaatgctattgctcctcgagaacttggggagtatgattattcaacaacatttgtgctaaaaagtgtggcaacacactacgggaagatcccaataaacctagctgtcattgacctatccagcaacaattttagtggtaagattcctgaaataattggaagtctcaaggctctttactcactcaacctctcaaacaatgcgctcaccggtcatattcctccattgttggggacattaagagagctagaatcaatagacctttctcaaaacaaactatcaggagagattcctcctcaactagtagaattgaaattcctccaaaagtttgatgtctcttataacaatctcactggtgttataccgcgagggaaccaattcaatacattcgagaacaactcatttgagggtaaccaaggactgtgtggagaaccattgtcgaagaaatgtgaagtctggttgctcccaccatttgcttcaaatgaagatgatgattctgattatgcgattgaactggattggaaattcatcttggcgggacttgtgagtggtcttgttttaggagtctctcttggggagatggtgatcccaaggacgcggctagcttggttggtttacatctctggaacaaaattgagggagatgattatcagaaactgactgtgcatctgccatagttgttggtaagcgatagcttgttcccatgttaattcttctactacataagtaggtgcaattgaaattggtggtgtttttcaatttgaattaatatttcctagatgttataatttgcagttgtaattgggcaagaggtaattgacttccaacttggatggagggtcatgattgtggtgaggacaataaatgtttatatcaaagccctcttcttgttgtttacaaaaataaata

SEQ ID NO: 79672 - DNA, 3242 bp, Cannabis sativa
gtctacctattagtaacctgctattacaggttaaaaaaaatgtaaccatatggttacaataaaaatgtaaccattgatatatatatatatatatattttctaatgttcttttttttcttttattttgttgcatatatttctgttttatggattggcttgttgtcttaaatttaaaatcatgacgaccttcaatgtttcttgaatcacttcactgtgtatgaatctccatcacttttacttttaagtttgaattaatgattgacttcttgtaaatgactgattttattaatgttgtttaagttggattaggcttcttccttttctgatgaaaagctaattaaatcaatgtagattgaaaagtacaaactaatattttaggtgcttaaaaggaaaatcaacttaccaaaaaagacatgactctaaaaaattttacataaagaaagagaataacagaaagaaaattaccttgaaaaattggacaaaaaaagccttacaactgagaggtaatacaattaaaagaagtcagagcttaaacctaagaccaataaaccaccttaaaaacaaacaaatagatcaattacaactatttgtattcaacttaaattaggcttctacttagattaggctaatggtttgtcaaattagcatagtttatttttattttatttgtattctatttggtccttttatctgcagggtgttgttaagagttttttcgagcgaagctcacatgttcaagttgcttgtgggtcccttatacaaagagatgattatgcagtcaatctttgcctatgaaactttcagagatgagctccaagggaacacgttgcttaggcctggcatataaggacaagcttggagagcttttagattattactctaacagtcatcattctcacaaactgttgcttgatacaattaactattcaggcattgaaagtgacttagtttttgaagggattgttggtttgagagtgagtataattagtcttattgtgctattgtgttttaagttagactcaaatttgaaaatgtgtttaacaactactctggacaagaccctccttgtgagaaagttcacacttcagtaagtaagtgtgttattttattctaaaaaatttcatggtcttttcaaaagtattttggacgctatgcttttctgtcattccttgttatttgaaactaaaggtgggtaatattttaccatgaataaatatgttaaataatgtagggatgtcctagtaggttcaatagtatttgtgtaagccaaacttgaattgaaacttgttcttctttatgttttgaatctgacatgtggtttggtatattatcaatcattatttgtatcacatttttataaacgcttttttaattaaactttatgaatattttaggttgcattcccataacaaaattgagtggttaaggtcactaacaataaagtgacgataaagcatgtaatatagatatggttcattaacaagaaaatgtaaacttgatcaggagcattaacactttaaagttgatcccaaattaaaattgtgcatttttatttaagatttaatttactaaacatatctttgctatatggttaaagagaaagtgagaaaaatgatcaaatcattgcttctttttagaagagatttgtagttaaggaaaattacacgaatgcaacacccgaaaggaacactaaaaaatgaaatatgccttgaattgagacacagtgtttacctaaataagatgtgtcatttatcttatttaagagaagaagtctgtctattaaggtgtgtcgtttaccttattttaaggtagtgatttatatttttaatgataaaatatattttggtttatcaaatttatgacacggaatttacctaaataagatatatcatttaccttattttaatgtagcagtttaccttttagatgataaactaagttttattttaccttatttgaggcacgctatttacctaaataaggtgtgtcgtttaccttaatttaagatagtgttttacccttttaatggtaaactaggttttgttttaccttatttgaggcatggtatttatctaaataaggtgtgtcgtttaccttatttacaacaggaagtttgcataataaggtgtgtcgtttagacaaggtgtttacgtaaataagacacatcgtttaccttattttaaggtagcgatttacttttttaatgataaattatgtattattctaccttacaatgtttacctaaataatgtgtgtcgtttaccttattttaagacagtgtgtttacctaaataagatatgtcagtggtttatcttttttaatgataaataatgttttattttaccttatttgaggcacgtgtttacctaaataatgcgtgtcgtttaccttatttaaagaatgaagattgcataataagacatgttatttatcttattttaaggttgggtgtttacataaataaggtgtgtcgttcatcttactttaagactgaatgtttacataaataaagcgtgtcatttaccttattttaaggtagtagtttaattttttaatgataaattatatttttgtttaccttatttgaggcacagtgtttacctaaataaggtgtgttctttaccttatttaaggtatgtcgtttaccttactttaacgcagggtgtttacctaaataaaatatgttgtttaccttattcttaggtagtaatttacttttttaatgataaattatattttgttttaccttatttgaggcacgatatttacttaaataagctgtgtagtttatcttatttaatgcaggaagcttacttaataaagtatgtcgtttaccatattttaaggtagcaatttacatttttcaagataaattatattttattttatcttatttatggcacagagtttacttaaataacacatgtcgtttacattatttaaggtaataaattacccttataatgataaattatatttttctttactttatttgaggcacgatgtttatcatttactttatttaaggtaatagtttaattttattatgattttggttcactttattaaaggcacggtgtttacctaaataaggtgtgtcgcttaccttttttttttttttttaagatagacctttttaatgatagattatattttgatttgaaaggcacaatgtttacctgttgtttaccttggtagaaaatttgcttaataatgtatgtcatttaccttaatttaaggt

SEQ ID NO: 79673 - DNA, 1924 bp, Cannabis sativa
tagattttcgaagttccaaaaacattttttttattgtttggatttcagttctaaaaaattcaattagcaaaagttaattttactaattttctcataaaaaaacttcttgagagatgttaaaaaacttaaaattagaagcgaaatccgaaccaaatcgaaccataatctaactaattcaagaccaagttgaacaagtacttgttatatcgaaaccgatcaagttctacaaagtactcatattttgataaatagagtaaactatataattaccaaatgtacttttaaacatgaaaatttaatcaaatggaagttggaaaataacctaacacattctgagtgtacaaaaaaacacacgtgaaactcaattaaaacctcataattgggttattataattagtggtgaacttaaacactaaattttgggcttgtatgttgagcactctaaggacctacattttttctttttttaattatttcaaacaaaatgctggcaattgaaattgacacctgcatttagaaaatgctatattgacacctaacttttgattttaatttttctttataccaatttgggcaaactaaagttgattaagtacatattgattctttatttttctttcccaaaattgatgtgtaacatataataagtgcctttaattttactttcctattcaaaatttttacggtgcatggactagaatctagcctttttattctttgatgacctaccttttaggtttaggtttattaggtacacaaaataattatattatatatatatacatatatctgtcataaggtatggaacctcttgttttacacgtgccttaacatattatgtccatgccattgccatatattatatatatatatatatattgaatttctcaactgtgttgctttcatatctgttcacggtttacatatttaccgaatctaataacttttgactaagattttaccttttcatttgttttttatgttttcgagtgtactacatgtgttataccctcaattatattgccaagcgttttgggttaaaaatagccacttatttattacaaattatatatatatcagttaaaatgtaaacatcaaagttacgattcatgtgaatatatagattcattttgtgtgttggtggcaatgtgaagagattcataattattgacaaaacatcaaccagtcaaagttttattttatagttttacttattaccattctgtcctttagtacttcacttagtactatttcgatttgtatactaaaaacatcacacattaatcatgtgatatataattatgatcaatgattttttttgaaaaaaaaaaaaaaatacatcagacattaaaaaataattagagaggaagaaggttaaagtaaaatgaatctaagatttaaagtgattcaggcttaactattagccataatttaagagtcaatattatattaattactagactaaatacagcatataattaataggggcatagacaaattttgttctctctgttttaaaggattactcttatcataatatatatatgtgattttaaattataatatattatcctcatgtaattgaataaaaagaaaagaaaaaaaaatacattttcctatcaaatattagagtttaatgaatatacatgcatacatattttatatcgaaacattatacacatttatgtgctaattttcaatcaatcacattaattataagataggtttggctataagttaaatggaatattaatcaccaaataagtgtttttaatgttttggcacaaaataataaatgtgtcataaaatgttgcaattgtcacagcaaacctataaaacattgtattgtatttatataatatttatttttatttttaaaaaaaagagtatatgtttatgtatgtaaaattaacagggaaagtgt

SEQ ID NO: 79674 - DNA, 891 bp, Cannabis sativa
aagtaactcaccacaggcatgtctacatagtaatttacatggtcaaaagcaagtgttaggggctgaaagggcaatgccaatacaattttcttgttcacaacattttcttcagcatttttagaacctatattcagacatatatcataggaaaaagttatgagcatgaaggtttatgtgtatgtggtaccattgcaatatgaatagtgaagaatgtgacaccaaatgaatagagaataagcataatacttctctttttggaaaattgttaatgggcaccatatggtatccaacaccctataacatatcatactgttcttagtacaatttaatatcgggtctcatatttaaatttaggtagagaaatgctaaagagcaatctagagtgcccaacaccctatatcaatatttgtgaaaatcgatatatgatcctagggtgttgagcatcctaggtgccttgtagcaatgcttattcaaattagaatatacaatacacgatattaaaatgtaccaatagtgatatgtcatgttatagaaagggcacgaaagcctgaactaaattttgtatttttggttctacagttaacacaatcaccaacctttagaaatggatttcttggtatgattttcaaagtcttcatctgtaactacaggcttcgaatcgccaaaagctgaaattaagattggagatagaatactaagaaaatactaaaaaaaaaagacataaaacttttgtagaacacatgacttaccttttaaaaatgtcaatgctgcaataaaaagaacattgaaaagaagagaaaatccaagtagtgctccaatgcctatccaataccaattttcatctacaaaaagtcccctctctttaagaagggtcttcccaactgtaggctg

SEQ ID NO: 79675 - DNA, 3385 bp, Cannabis sativa
tggtaaaataattccaacagcttttcccttcgagactctggcagcctctatcttatttttctacttgactttgtctctagaattggtttggtcagcgtggcctgaggtgtggtttcctttgctcttttattgaggttggtcagtaactttagactttttgggctatttttcggaaggagtcttctttggttattcaatagcgattctttttcctttatctttgcaaatgcctaaagtttcagggtccttcagatttacactctcaagtgcatcagttgttggaggagctagcatgtcaagagatagtttagttaaagcagtcattatagcctcctttctggtcatcttgccaagtaataactcgttgaattgatcttgccgagttaacctacttttggccagttgcagttgtctttccatgataaccacaagctctgactcatatcaagttggcttttctctccaacgttttcatcagcaactttgtcctaaggttcatcttgatgcatgtcctttggtatgtctttgatgttaacttcagcatcctcagagctactttctctagattttgcatcctcaatgatgggatcatctcaatttcgatcttcatcccaacgacctttttaacaactagtcacctcttggggatcactagagtctccagctctagcactacgaccagtgaaacgaagacctgacttggttcatgtgagggccatgattactcaattataatcttcaagtggtcatactgcttttttcatctctcaatgaaagtaccaaaacatttaccgagatttttgaaagctaactttaattaaaaagaattgaaaaataaattatcgaaagagaaagtataaaaagagacaaattgtttttgacgtgattggggcgttaactagccttagtccacaagtcagtattattcagtaagtctttagcttgtaaaagctttcgagaatacaaagaatatatgttctcaagtttgcttgagcaaagcttacaagagaattcaacccaaatccataggattcgtggggtatttatagtgacttaagaattacattaggtttccccttttcctctattagatagtttatgataaataatacccttaggctatctcatgaagtccagcccataaaggagacgatctattgactagacggatcgaatttggtttggtctggtcaacaacgcatacactaattgagggcaattaatctgaactaattgcataatatttgttataggaagtttctccattaatcttgatacgatactctattatgatatgataactagaatttccttatttgtgtgcacgaataaaaagggaaattggaagggtcttttgggaacacaatatctcatctctctggtctcgtgcaactgaacatacttccggatatggctcgctgagggaagaaggctttgcgagtgtggaaccaagatacgttcctagaaggacatatctaggtgggcttggcccttttcacctttattgggggtcccactggcaggtcttgggtgctgacctggagtccacgtgtctaatacctgaaacacagataacaattaagtttcccatttcattcctttttctttattccttcattacggcttgaatgtttaaacccgatgtatgacaataagaatcgttagattcttctttgcctacatctggagggagccttttcctagtggttaggggacccccattcccctttctgacttaggtttttacaagggggctaactgatgggcttcttgtctttcagatgagtgaagttcttcaggatcttcataatgatagtttatttggattcgaccaagaaatttttgagcttcatataaaaaataaaatgtcgaacaataaagtaccatcgcatgctacccctaacgctaatccttcttcggccaaggaatctcaaaaacttgtccccctagacgtggttatggaaggtcctgtaccttacaagaagtactcgtgtcgctctaatgactgggaggctgatgagttgcactcgtccctgacgtgtgctcatcagttggagaaaattgtggccgtgaatgggatcaagccatccaatttaggagtttaccaccaactgcccagggatgaggaaacacccaaccacaacttcaacgactttggagtgtgaatccaaactcacttcatttcgggagccatgctactactttatgattacattataaactttttagttttcatcagactcgccccatatcaccttatcccacaagcataccgcctactctcaggcctttttattttttatgctgctaggggttgggccactcccggccccgcagaaattttgtatttctatgaactactatccgtccccaagaagggtgacaagtttaatgacagtttttataagttgcaagcgcattcggctaacgaaaccctaatgccttttaaatcttagaagaatgttaaggaatatcgtcatatgtttttctttccatcatggtttaaggcttttgaatgttcagatcttttgacaaaatgggttaagattcctccattgcacatgacaacccctacatatttatttttgaatcacgccaaagtgtttgccagctactaggaggagctgaacgttggcaacttggtgactacttttaacttacgtaaggctaagttgatcgtggaccattaattagttgagaattttaatttatgcaaggtgccctatcccaacacccgaaatctggggactaaaaagaagctctgagtagaaatcattgcaacagctgaagataaatacaacaagtatcgatataaaaaagagcacaaaattcattatgcatgccttcaaaacacttttgggaagactggccaagggaagaccaggaaaggggttacatctatcaaaccaagatttcctttctggtgcccaactctgggacccctgcagctagtttaaaaaaaatattctttctttctcttattttcaactttaaaataaaattttaaccacatcgctagtttttgaccttaaaaatagtatcactgcgacccacttttcaatgtaatcatttcaagatgtgtgaagcatatgttttctcgccttttttaaaatgaaaataactatttagttgcttatcatatcaattatatactctttagttacatatcaaaatatatacaaaaatacaaattttataaacaagtaacttattggtattgccttaatttactaattaaaatatctatatttaggtattataagtaactaaatagtactttttattatagtaacagtagaaaatatctatacttcttacatattaaaatgaccacaataattttggacccgcttgcggactatttcttttagataccccaacaccg

SEQ ID NO: 79676 - DNA, 1807 bp, Cannabis sativa
tttcttaactttatatgtgtataaattctatttttttagaaattcatatttagaatgttaataaacatacttgttagtaaatctagattctagtaaaacatattccaacacagacctccgtggctgaacgggcctttttggtctggcatcctttcttggctggccaacttgctttcaaggcttggccagcctacaagctttccttggccagccaaacattgttggccaaggtcttgatggcatgcttaactccttttccttattcttgctttgacagttttgcttgattgttatagaacccttgccagttaacatgttgtgtaaggtgactttgtcatgttattgacaagttgtattccatgtgtccccagtcttgagtatttacacatgccacatcaggtggacaaaatttaggacaacaattacctagtaaatgtatatttcataagtataattagagtaagaatgcacataaataaatatttcagaataccaaaattttaaatatttaatagcagtatttgacttaataagaattacataaaacctcaaatttacaatcagataacatatacaaaaatctttaattccatacccattttgatgctatcaagtcaaatacttcaacaattattgggagagacatcgatcccatgactgtgccacacgctgaagcggtcaaccttcacgatagggagctcctgacagtgtcgttttgtcgttgttgggttagattgaggagatcaaaaattccaaaatagtttctctagtacacttggaaagattttttcaaagatatttgggcattaggatgtttgacagttttatcccctgtgttcgtcatcaggattcaaagcttgacattagagcttaaaattgaataaaaatagccaatacttatcctagagcttgaaattgaatagaaatagcctcgaacatcccaccttgcatatcaattatcaatgggcaacctggttctgagttgaaaatgtatagttttatatgattgaaaatttaattggaaaatagccagtgatataaataaaatctcgattgggaaattgacgaaatcaaagatgaataatgcaatttaaacgaagtcctttttggtagagaattaaggttaggggttattgattaaaagtaatttatttaaaagttaaattttgaatattctgttaaaatttgacagaataaaaataaataacgttaaaccaaacaatgatttggcataattctttcacaggtagctacacggttaagtcgagttatcactttgctgttaaccttgctgaacaagaagacacaaattgtagctcctcgatagagcattggtggacaacttttaaaagttgaatcttccatcaaagatttaactttttatttggaaagcttttcacacagcgccaccagttgctgttgaactccattaaagacacatagcttcctctcctcgttactctctctgtaattcacatggtgaaacaattaatcatgctttgtttttttgccaaagagcaaaagttgtgtagggtcttgtgaagttgccaattgactttaacttggctagttgaagcacatgtaaggattttctgctcaactttcagccaccctttctacttcacactttgaacaattcattgttctttgctggtgcatctggcatgaaagaaacactaaatttcatgggaatattgcaaaaaaagcttgttgtcttattttttttgccaattcattataagaatattttattttgagaaatatatttctatttaaggaaataaataaataattgattttctgataa

SEQ ID NO: 79677 - DNA, 1367 bp, Cannabis sativa
aaaatgtgttttctaatagcatttatcaattattgaaactctttggttaatttaagacttggtagctaaataagacttatgtcttagttttattttctttgaacacgtacgaagtttgattttttttttttttttttttttgggaaacgaatttcgaaagtttttttttttttttctgaatacctaaaacattcattagaaagaaaatagaattgtggtgagcacaaggggctcaccaaccggaaataaagaaaaaggatgatcaagtaagtcctacttagccaaagtgttaattgatggctttgtagttatatttattttcactttttttttctacctgacagaaataaaattatatgacagagcaagcataactttgtgatacagtggggcgcacgtgggagatggcccatattgtcacgtgcggttgtgttttttatcacgaaatatgtacaacccttcttcctgcttccacgtaattacacacatacatattgagaggatgaagtgatgaagggaagtttttcatcattcttctctctgtcttgcttttttaaaaaattttttttatagtaaatagatggatgaatttgcagacaaaaaaaaaaaaagaaagcaaatctcatttgattcctccataatcaacattaatattcatgtttaattaagtagtagagcctacttgacttcgattacccaaaagtgaggtaaattacatgcataatgagaaaactatgatatatctttctcaattatccctttttagataagtaaataaaaacaaaaaaaaactcgttggatttgtagagtactttacaaaacattgaacattattattaatttgcatattattattatttcgagtgtttttgcattatatcaaatgggccttgcgtatgatttatttatttatttattttgagaggtgctacttcgagcaagtcaaatcaagattgaagctagagtgcattattaaatctgcatatatataaattaagacaaatgtggaagatatatagaagatcgtatgtatagctggtacggtggtcctaggctttgaggataattattatcccacacacatggaaatgttgtaaattaatcacacttctgttttatggtatatgccactgaattctgtttggttggtgagaaacataccctaccaatacttacgtaatcatacctgtatatatacattacaaataatatacaggtgctttattatctatggcactaacaatctcgagatcgtttggatgtaatttaggattagtggatatttctgttaggaaaatactagtataggatattgtttataagttaaaataaataaacttaagaagatacttaaaataaaaatagag

SEQ ID NO: 79678 - DNA, 2839 bp, Cannabis sativa
ttttatttagggcataaaacgcaacatttactccggtagcttgatgcttaaggcagtccgctacaaaatcttggtcttcactagctgcagtagcaaaatgattcgccacaaatggagctagattagtgccaacctttggcttgagcctttttacaatatttggacggtcgaaaacttgaaggtaagcatctggcctctttgccaaattcccaaactcagcattctgcctagttgagatcatggtggcccgtttccttacttcagtagcctccacattataatttttgtggaagaatttgttggacgtgtccagttgggcacggtcttgttcaaatattaccgatggtcaaatgggaaagatcattctcaaaatttgaagtgttggaaggtttgtcttatccttttgcatttgggaaatagaagcaaaggacgacttttgttgttgggactagggtccataatttctttattacaacataagttctgcctaattgatctctcagtttcctaagatcccccttctttatgcccagatggttccaagtcctgcttttggctagcaaccagttgttgaagtttatccattggcttctgccctactccttttgttgtctccactaagggcagagatgaatcttttaaggtttcagaacacaagaccttcttcttcctcttcctcttcctccacgtcaagaacaactggcacctgttgaaggggcaccactataagggcagtctcaacaagttctccttaagaaggagcatccaccgcaactgttgagggttgggatctagaagctttcgccatagtcgtggaaacttgggtgtttgggacagattccaaggccgaaacctgagaaaatagcctcttagctcatggctagaggtgtttgatccttatgaatgtacaaccttgcatttacctttatcccttggcaaccccctcacctcagaggaattctttgaaatacttcctaagaagttgtcaacaagccccatttgaagattgaattggtttttttgcaaatgaaaacacaaatattagtatcacggtagcaaaaaaaatgcatgcaattgaattcaaggaaatccttaagcaccctgtctaaaaagctcccatagtgaaagaaccctaaaaaattcatctaaagaaaggaatctatcttaacggtttgagtaggcaaaataaaatgattaagactcctaactatttcatctgtcctatagatatatcgtgccactgtgaatctacgacgatctaagttcaaaaaatatagatcaaatctgccttggtcaaatccgttagggatacttgtctaacgagattacacaagtaataaatttaaaattataaattaagaagaagtcttaatgaaataataaaagacaacggataaatatgaaaatgtctaattgagtgggagtattaaatgtactaggagtatatttaaaagaccattcaataagtgaatctatttgtaacaagttattagaatttaagattagagagctatttaataaaagaatatatatattaaagtatcatttattaaacgagaaataatttttttttattaattaagtaatcttaaatattagaatcacttgagtttgtcagtgatctagagggttccatattaattaattttaaaataacgaattttgaaaaaataaatatttaatattaagaatattaaatgattaattgaaaggatgaacccaaaggaaataaaataaaaaataagctaaatatactataatcaaattttgtatatttgtccaataatgatgtggtggtctccgagatctagaactacattatgtggagagtctcgtttacatgacttagcctgaatagtcgaataggatataacatctataagagttatagaacatagatcacttacttttagtgcaagttggaaattattgagatttataccctaaaagaaagtaattaatggataatatattacaaaatatatgaaatacaattataagataaataaattcattaattatagaattgtaattaataaatatctaaaaattccttattcatatgaagaatgtataatcttgtaaggatagacaatagaattaagattatacaatatgaataaaactagtcggttgtgtataaaagtaaaagaactcttaatatagaactaataagtacaatttactatacgctatactctagtgtgtgtgattttgattcagatcacttgtgttgtgtataatttgattatgcatgaactcttatttgtgttcattgagttctttgatttactcgttaaagtttctcaaataaaataattcttaagacttctattttaggagcttattaacatgagtagctaggaacatgttatacaataatgaaattcaagctttcctaactggtcgaatattagtttccatatagtgttaattctgagagcgctaacagttggatccaaatctataataagttatagattaattgttcacattgaattaagatcaagagataattaaaagggtaaaatggtagttttgaccaactctaattatgaactaataattggagggtgaactacttatattaattatatcaatagactagtagtaagaattctgtaaatataattctatgttgtcaaagaatgttaattccatatttatagtggaatatgaataagattatacaatataaagaaaactagttggtagtgtattaaagtaaaggaacctctaatatagaactactaagtacggtttactatacactatactttagtatgtgtgattttgattctgatcacatatgtagatagacatgtagtaaaggtattgt

SEQ ID NO: 79679 - DNA, 779 bp, Cannabis sativa
atgttacatgcataagaatatctgtttggcttctcagaaaatgggctccaatactattacatataacaagtacataatttatcagataatcaaatcaaatttgaaaaaatctggtgttatgatgtatatgtaggtatttatatgttcttacatatatcaaaatgtgtgtgtagcactaagtagtttcataaaatgatgttgtttggcttttaagaaaatagactccatatatatatatatatataaattgaattaattgcattgcagatatgatttgaaatggggtttggagattagtattttcagggtgggagacattaatggaggctaagtaagtatgtcaaagaagggacttttctcaatatggagattggagggtgacaagagcttgtttcgccaaccgaaatgaaagctttgaaatcggcaacatccaatgcctgctgctgtatatctaagctcaataattggggtgagtagtttgatttcaatctatttgggatgaaagaaatacataaatgaccaaaatgattgaattcaagatcatgtgatcaaactggtaaaacaaactcatcccattctttgaagaattaaagagattgactttattcaacaattgaagttgggtgtctgcttttggttctctgtttaatttacagtttatttttttttttgttaagcttagactttgtttcaaataagctactggtgataaagaacagtataaaagtatgaaagttaatttatcaaattggtgagcaaaataaatatttggggaatta

SEQ ID NO: 79680 - DNA, 3004 bp, Cannabis sativa
cttctccaatgagagggtcagagaagttgagcaagtttgtagccacccacaaaatagactctttgtgatctcgagaattggccaccgtacacatggattcgaaaccaactttgacatcgcagttgatcttgacccaatcctcaggaggcgacgagcaacgagtagacccaacagtcttcgaagaggtaagtaaacaagatccataatctgcgtaacaagaagagatagaatcaatataatgtataatgctacctagaccattcttgtgaaccttatcattgcgagctatccagactgtatcaaccactattgaagcatataatgtataatgctacctagaccattcttgtgaaccttatcattgcgagctctccagattgtatcaacaagcatagagaaataatttgtcagtgtccacccctttatatctaagattccaaaggaactgaacccaatcccaaacacgggccccaaaattcaagatcggcataacccctcaaggtgacgaacgtcagagatgaaaagcaaagttacaatagaggaaaagatgctccatcttctcttcaccctccccacacatgggacacgagacctcctcaatagccattctcctcgcaagagaagcacggataggcagtgcatatgaaagaatactccaccaaaaaactttatgccgctccaagattttagagctccaaaatttattccgaagcgccggggcaacacagcacaagggagcacagttgagagcttggataagataggcgggcttggtagaaaataacccattcgactccttggtctagaccaatctatcacactcctaaccactcaacttgccacctttgataatgttactgattctttcttggtcaaagaggtttgagagcttagagaagtcccaatccccattaggtaagagtaaatctgcaacaagcctcaagcccttcgaaggccaggtaatggacttagggacaaaattccgactacgaattatctaagggtcatcccaaatactcgtatctttctcattcaaaataagcttgcatgctccttttctcagtatatctttagtacgcaccacattcttccagaaccaagaatcagaactcctgaaaaaacactagaagaattttttacccctaagatatttggcccttaatactttataacacaatgactggttctcattgagaagggcccaaccccacttggttaataacacttgattcatttcccaagacttgcgaaaattgaggcctccccgagatttgggaaggtacaagtgatcccaggcctttaaacagagaccacgattgccttgctcacagccctaccaaaagtctctaaccataccatccatattcgaggctagtttttcggacaacattatagtttgcatggtataaacaggcaacgcaagccccacagatttgatcaaaatatctcactttgccgtggacaagaatttcagcttccagccatgaagtttagagacaaggttatccagaatgaaattaaaatcaatatttttttggcgagacctaaacaacggaagacccaagtaattgatgttctcaatagtgttgttgagaccaagttcctggatgatgcttcttttcatcccctccgcagtgttattgctgaaaaataaaatgcatcttgctggaaaaactgatataattcatttatcattaaaaaataatatgtatataatccatttaagttttgtttagcatagtcttacatctacaaactgaattatttcacttgatttttcttcatttccaggtgacatggaattgtacaagctacctaatcttttcccgtacggaaaacacaatttcggcaatcacactattaaggttatctccaatagtaaaatttaaatttggtgttaaatcaataccaaaaaattattgttttaacactaattttttttttttttagttctaatcacaatactaaaaattacattaaattttatattattttattaatataataaaaatattttaatactaaatatatataattatttagttttttcttcagttattaaaaacttaaaaggaaaaaataatgtggtctatcccaccaaatttaatgggacaccgtaaataaaactatttataagtataattttagtgttccattaaagtaaatatagtttaaaattacactatattatgttttgaagctcttgtttggtattgtgcagagtaagaaacgaaactgtagctcagaagtgagaaataagcaccaactgagaaagcactcacagatattgatcaacgggtgtcagggtgtgaagtcattataatttaggtcaattaggaaggctccaacaattctcatcactacactaattaatataaaaagtatattaaaatataaaacttgtctccatcaaagttggatacacagtacaggtagttgtttgttttttcggtatttggactatatattttagaaaagtaataaacagaaaaatgaaaccaaaatattatccaacttcctcttcaattttgctaaaccgtacttgtcttttggttttgactaggttctcaagcaaataatagatttcattatctcattatcattagtgtttctctttatttatcatgatttggtttgaaagaatttcatttcaaatttatttcaaccatatacactctaatattatgcttaaaaaacccaaaaataaaaataaaataaaataaacttcctattactttagaaaaatctaataactcgttgaccaaccgaatcaactcacacaactatttccgatacgtattccataaactcagaatcgttctcaagcccagccatggtctccggcgccaaaacaacttcaagatcaaccgtcccattcccttctcgtcccggaaacgccgagattttaccgtcgaatttgtttgccttaccgctccgaacagcaacgggtcgaccccacccgaaatcgttgttgtacatcgggaatctgggggagcttcccatc

SEQ ID NO: 79681 - DNA, 1274 bp, Cannabis sativa
tgacttctctataaattactcattcttagacattagtatctaggagttttgcttcaaaacattcttgatttgtaaacttttttgtatttttagtatgaatatgtatttatttgtatttttttaatttaattattttagctttttcttctttcttttcctttttgtttgatccatttaatattctttttcattcggaccaaataatattcattccaaacaatgaggccgaaaatccgtctcctagccacatcaagtgatttccttagagcatggtgaatctccgatcaagattcaggcgtcgaactcaaatctcttttccacgaaaacaaaaacagggacaaatgatacaacttgtacaatcctttcgttttctttttgttaaggtacaattgttttattatttacatactatatatatttatttattattttaatagaatctctataaactctatatgtacataatctgttgctacatgtatagtgtggattatctttgtttctattaatattgcttgcatctaagggagttgcaaactcaagtagatcgatatctggttctgatatacagcatgggaaacaagcttcggtgctccatggtatattaataaaaaaaatgaactaatcattcagaattttatcatatccctaatttattctttgacttgaaattcattcagtgatttggattggagctgatgtttgccatctcaaaatcttcataaaatattttgtattccacatgaaggaggtggtcctattcagttttacctctcagaaccatttttgctgcaccttggagttttgcacttatttcgccaactttttatacttacattgcaatcattggatctaagggactcactaatggataaaaaatagcaatgcacaaatgcaattttgccaacttcgcttgaaggttggttcacttcaattttccttctttgactattattaaatgtatagcttcattaatgccatttcattaatcaacttcaaagattaacattgagagagtctcttgtgggtacctacataacaattgctatagatttttcaattcttgaatattataaaggttaggttgggggaagcctataacttcttgctcttgctatttttcacattttttcttatgtttatttcttatagaactatgaccctgtcctttttcatggtgtcaatggaacatatactcttgaatacaatactgactagggaggcttacaggtagttcttccttccttttttttttttttttttctttttcactt

SEQ ID NO: 79682 - DNA, 1671 bp, Cannabis sativa
ggctgggctgggccacacaatggactcacatcagatgtggctctatttttacactactttcggttctcttttaagactgtcacctcaggtggtttaagaaagagatttttcactctttttttcttttaacaaaagttagattttttttatatatatcattcggttgaaaacttcaaatagacaaatgtcacaaatctatgttttggcatctataaggagatagtatctatagttattaaaactaaaaatatcattttaaaatatttttttttttttattttttctcttatccacgtaacatttaaaacattttttatttattttttttttatttttgaactctaaaaattatctactatgatttcatatcacattaaattaataatttttatttttgataaaaataattttttctctacaaaaaacaatgtcatgtgatcataatccatattgagtaacactttacataaaatcgatcttaaaaattaaactacattaagaccactttaataaacaatcttcattaaaaatgttctaatttttaagttcagcaaatgtttgtacatgtaggaaatttttagtgaaaccaataaaaatatagtagttgttctatgttgggaacttcatggttgataaactgtagtgcgcattttgagtaatgcagctaaatatttgtaaaaaaaaggcaacgtaattagcaattcggctataaatttcacaaaaaaaattcagcattggaagaaaatctactgaatttacaaattagagaggaaaaacattacaaattattcaccacaattgttattggtctcttgtggccaacttcctcttaccaatacaaccaaatttaaccttaatatgatgatgaatcaaatcatttacatgtctaactgagtaagacttgtcctcaaaaacacaaagattcctattaatccaaatataatagacaactgcagccataacctgcttctgcattcccaaaccaaagcttcccaatctaaaccttccaacccaagaaactgatgggccacacaataaaaccacacaagcaagaagatgaagtcgatgaagtttgtcccttgtcatgaggttggtgctcaccatttaccaaagaataaacctatgttttgggtttgggactgagaatctacaccaccctactctagccttgtcaattttctcattacaaagtaaggagttgtacaacttacttttaagtttcccattgtaaacaacaacttggagaatagagtgtgacatagtctctcttagcttgataagcttcttccaataccggctagagtctcttggttgggtaattacaaaaagtcttggccctttaagtaaaccttttctttgctaatcttccaactctgcttcatctttgattctctattatcatcataatatgtagcagcaaaaaggtacaatacagctttgtagtttttcttctctcattctataatcatgtctaccatttctaatatcattaatactttctttttttttttaatttcaatctcttaaataatgaaaattttacataattgagcaaatttgtttaccaagaaaacagtaaacatactaaaaattacagctcattgatcattggaaaaatagatgatcaaaagaataacttgactcaaaaaaatgtgatttttgagtttcatg

SEQ ID NO: 79683 - DNA, 1990 bp, Cannabis sativa
atccttcactttattccccttttctacatttccatcttcttactttgcttagacttcacgagttttcaagaacaatcccaagtttgctacaaataaagcttctcccattgctaaccccaacttcatgtttgaatatgaaccgactttcaagtacatttgctctgagtatcctgttatagaaggggtaacctttcgtatgctaacaaaacatgaattgaacattaatctggaagatcttgaaatgtctaagggagattctgatgagtggaaagcatatggagctcatgcatttccccattccctctttgctcgcttacattcttttttctcaattgggtattaatgattcagttagttcccaacttcgttcaaacaattttttatttgactaccatatgctctctcaaggatacaacattcctcacctctgaattcatctattgctcagcggaaccacatgcacttcatgtttttcgcttggtacatctccataaaaacccctaattacaccctaaactagtagggtgttacacataaccaatcagacaagaatgttacaatattaagtatattcaattaagataaaaaaaaaccgtttacagaataaatgagagaacaattttgattattcttatttaatatctaaatgtatgcgacatattcaccgtacactttcctgagtaacatatgaacttgcgagttctctggggttactcgcatatcaagtctttgggccacaaaaccttgggattatttacaagatagatgctagcttgcggctatactgatcacatattgggcattcatgtactgacaacattgaactcaggggttcaagatgagttatcacacacattagccatttggacaagacacttgtatagatacgatctttacatgggatgcagaggagaattatttagtcattgaatataatcgatatatgcgcaacctataataacttttcttggttctgcttttactttactatgttgtgtatagtgagcaactagctagaccttgtctcggtcacaccttctcacaagttttcatcacgtgaggatagctctactggagcttgtaattgacacatcatctttttctaactacgaactgggtccacgtgttaaatatatacgagattgtgctcatatttctaggtaaaaatatcgcactataacacatgccccttattacctcagcgataagcgatatgtagtcgcgcttattaccttagcaatttggtggggacattcctaattatcgccgaacacaccatctctgggattacaagtattgggcatgactttacgaagaactaggtatcctactcgcaatttacattccttaaccttcaagctataatatcgaccagtgcgtcgttggtatgctaaaactttgagttgtgcttgattacacttttctttcaagagtttgaggttgtgacgctacccctgattattatcatctatgttgacaaaatcgcgatgaatagattctgtgccaactttagctgaaattatagcttcacatccataagatagtgagaatagagtttcacctgtagttgattgtggagttgtattgtaggaccataacacttgagccagttcttctggccatacccattttcgttcctcgagctttctcttaatcgtatgtcttatttgtgtttccagttagggacatgtggagtcctcataataaatacaacttaaataattaaggtcaaaatgaaggcccaattgagataactgggcaagatccataaattattagttctttcagaagaataaataacttgtccagcgatatcccatccagtatgaacgtttagaagagataaaatcacgtacatggaagaaatctctagcaaatattcagaagcttagtatattttcctatttattactaaatcacgtacgatgatggatcacccttcaataatctcaaatagaatctcgtatctttctaaataacaaaagataat

SEQ ID NO: 79684 - DNA, 2112 bp, Cannabis sativa
tcatgatttagaattggccgcagttgtttttgcactgaaaattttgtttttttttaatgatacggcgaccaccgagagagagagagagagaggggcgatggcctatgaagcggttgttggcagctaggtagttgtttgggcagtggtcgatggcatcgtcgacatctgggttcttattaagagagaagcggtaaataaagaaaattttcgagagagcgtgaaggggaaagagaaattagggttcatgtttttttttactttagagagagacgtgaggaggaaagagaaagaaaaaaaatagtaaaagaaattaactgtttttatgaatttttttggtggaattaatttttttatgattcattacacaatttaaattagtttatctaaattttattttatttaaataattaaattatctggactaataaaattgtgtcatgtgtatactgtatacacgtgaacaatccaacttgattgttaacaatcaaatttagatagaaattgtaaattgctaatgttactgtgattttgagggttttgccgttaaaatttagattctgtgagttaattactaacaaaatgaaactattaaatgttggccgcaatttattctattttaagtattgttataaagtaccttggtctgcaaaagctgatctaaagtggtcattcagctaaaataactattttataaatatctatataatataggaaaattttgtagtaggtcccttaaagagtcgttcttgtatattttttttttatatctatttctaatatttaggagagttttttagtttaatttttttttttattattattgcacacgttgtagttatttaagaacacttgtaaatttctaaaaaatatcgtgtgtatatgaaaatcattcgagcatgtaaaaaaatatttaattctttttctctgtattgtaaactagaaattttgaaaaaaatttaggtaattttaaataactataccgtatacggtcagaacaaaaaatagattacaaatttatgtcgaaatagatagaagatctactcaaacattcttttaaagagtgctagacttatcctataatatatagctaaatggttagtgtataggtggccaatgtaaaaatagagtaacttatattctacctactactcaacacctaccgaggaggttaaggggttatttggtatatgacataaaaatattctttgaagaaattagtgtatatggtgtagtatactgcatatgcgtgatgcttgcatgtttaccttagcagtgaagaagtcacgaattgacgaggtaggattgagttgatcaaactaaaaaaaaaaaaagaacgagggagaggatagtaacgacggcctggatatagtcgaataatttgaaacagaatctgcaccgactttaatgagaatgaatggtataatattgattctcatacaattatttaataaattttagaaagagataaaatagtatgaacacaaattaaagagaaaacaaaagtaaaagttctccctatttttttttagggaatacctctttctttcctaacttaattattttaattttcattttattaattaaaaatgaaaaagataaatatgccctttaaaaatttataaacagaaaataattacatgttctaataatgacaattttatcaaattaaaggatttcgattaaacaaaataatatgattctatttttctttccggacagtttagtaaacatcataataaaatattgtttccgattattttctatttaaaactaatacatttctctcattaattattctgattccaattacagtttggtaaacgcgccacaaattgaaaattttttccaagagacttaaaaaatactataaaatgatagaaagtttacaaaaataccgtgatatggagtttttacatttattttgtaccaattttataaaaatactgtatttgaagtttcaaaattataaaaatattgtgtttcagtaaaataaaaaaaactaacccaaaaacaactctaaaataacttaacaaacaaagcttattttaccattataccaaagcttattttatgtgtatagatatcacttttatttataaatatatgttgtaa

SEQ ID NO: 79685 - DNA, 4158 bp, Cannabis sativa
ctattacaggttaaagaaaaatgtaattacaataaaaatataaccattaaatagtcacccatactattatacctctatcatcatatactatattgatggaacaattaaaacccatggttgtatcatcaataaattaaatacaatttattcaccgcgtcagaaaataaaaaaaatacaatttattcaacatcattcttgattaaatttctagtatcttatactaaatagaaatttatagattaatttttttcttctttatttttctttatttttctctcttttacaaggatttaattgtttttcattcactagaattatagtccaaatacaccaaaatatttttattctctcttcgctccaaatgcaaacaaatcaaggaaaaaaaaaagtattgtatagtttaacttgacacttttatctataataattttatatctatgtcccttttttctttagatttttttttaggtttagatctcataattttcggatgatttctccatttttaatggccaattctttcatgaaatattaaaattgtaggttgcacgcatatgtaaagcctcaaattagctaaagaaatatgtgagatatagtgatgatagcgggtgagatacggtgagataacgagtgaaatacgacgttgaatgatacataacaatagatgagatacggtaatcacaatgtgtgagatacagtaaaacaatgggtaaaatatggtgttaaaggatatggtgcttataaggatacggtgacgataactggcgagatatgatgataacaccgaatgagatataatgttgacagcgggtgagataaaatacgaaacaatgggtgagatacggtaataactacgataaatgatcgcaaataaaaataatacatcatatttatgaagaacactcaatttttcttatatcaccctatttttttaacaaatcaatataaaattctatatatatatatacattaatagttaaaattttaaaattcttaataaataaataatgaatccctcaaataataataaattaattaatactattcacacaattttttcttttttactttatccagtagtttattattcaaaaaaataatttttaagttattctttattatattataaatagttatttgttattatattacttaaaaaaaaattaaattagtctcgcgaagagcgattatattacctagtatctatataaaagaaagatatgaggcggcggtgacgtgatattctaaatctttttaattaacattaattgttctctcattaattctcttattttttaattttttattagctttataaatataaattaatataaaatatatatttttatttagtttttccataattctctctttttttttagttttaatttcttcaacacttcttcttaaattaagatattaaaaaaattgtattttgaaaaaagttaccattcacctcatttttaaattatataattgtaaattatatatataataattaaaaaaaaatacaattcacataaaattatttcccaactgtaaagcttttgataaataattaatatttatttatttatttattatatatatatatatctaactctaaatgtgcacatcataactgctttctaaaagaaaaaaaaaagatagtatatttttatatatattgattcatattatatatataaatatatatttagactttaaactctatgcgaagctcttgaattaattatatggatggatgaatgtagttatagtactttatttatatatgtttatatatatttttttattaattattaattatatagtgtttagtaaagtatttttttaatcgtacatatatttactagatcaaatttataaatttttttattttatgatttatgatattttaaccatgactttgttaaatataatgtttagtgaagtatattttttttttgttttaaataatattttatcaaatataaattacttatatatatatatttttttttcagcaagtttcggagccaaatttcctgttccatatccctctcccaatatatgtctcaaccaattatattatgacaactcatttaattttccacataagcacttaacagactttacaatcctattaactatactgttaaatatatccgtcaatctctcttatatctacatagatacaatcctactagctgcattaaactatcataaaaagatagttcacctctatgccatgagtttgaccttaccactattgagtacaatattcctaatctataccatgtaccttagtcaaaaagttacaaggaacgagattatactttcattatattacttgtttccacagccacaaaatttgatgaaaaaagagttcgtgaattcaataaaaaaaatggtgactatgaagcaacaaaatttatttatgctaaaaatttcataatttaataatttagaaatttaatgtctcaaaatgcaaagacttcaccactgtggcttttgaaaatgattgcccatagcataatattataaatagttgctagtaaatcttttaaatgtgataggagttgatatagcctgcaaaaataagattatactaaataaattttaaagtttaataaaattaaaaataaacactatatataaataggccatatggatatatataattacatacctgtcgtaatagttcatactcgttgtctcattcatatcttcataatcatcaaaattataagtgtatgatataacctgcaattaatatttttaaatataattattattgaaataattattttaaaataagtttgataaacaaaatatagaataaataacaaatagaacagaatataattacttctttgtgctggaatgaactatgtttgctgatgaaaatggcacattatcttgaaaagaattattagtagacaaaaaaggtattctaattttgctatggctttgatcatttgctttttctttatgaaaatcctacaacataatgataaatgtatgcacacttatgtaggaaaaagactatgaaacagttagaattacaatatataaaactaagtaaatattaccttttgtgatggagaatcttcattgacaatctttttcttactttttgctctctcaagtgcacctttaagtcttctacatccaccgtgagctttccttttagtcttgaatcctttaattttatcacccatttcgttacttattttgttttcaatgccattatgtatggtagtcgatatctctttcccttgagctacatatcagttgcatccaaatctataaaaatcttagtaaacgcggaaacaacaatattgtatgctttttcattttctgcggcttttgttgcaagttgagtttgcattctacaaatttctttgtaacattttgccatgtttgcttttgcagacacactcttgcaattcatagttgtagaaaatctagtttttgaatgcattgtccacctctttaaaatatattcacaaggaatttttttgacattcctaggcgaatatacttttaaaatatgtgcgcataaaattcctataaaatcaaatttcttacagctacatgtcacaatcgtaggcattgcacaattctttctcaaatattatgaatacagctggagtgtaaacgattgaagaatgcttcaaaatttctactcgtaaagacaatgacaatgaagtttgagttgctttaaaatcagccttcaactcatcatatcgacgatcctcaattaatctttcaaaatgttgaaaaaaccttggtatttcatgcttgtagctaacataattcttaattacattattcatactttcacttcgttgagtaattgttatgtttgcacaaaatgtctctctcccatataccaatgcccatttttccttcaaattaaacatttttttaagccatttattgtctctaagatcatatttctcaagcatactattccaagcttcaatgaattcgtcattctcatcataattataaatacaattactaaaatcttttgtaaattgtcgaaatttttctaaaacccagtaagattttttgcagcattctgatatatatgccaaatgcataaacgatgagttgtttctagccattgagactctagagctttttccattgccgcatcttggtcagtaa

SEQ ID NO: 79686 - DNA, 2534 bp, Cannabis sativa
  modified_base (47)..(55): a, c, t, g, unknown or other
  modified_base (154)..(170): a, c, t, g, unknown or other
ctgtagaacaacagtaataacgtaacacagtacacagtataaaactnnnnnnnnntttttgaaaaaaaaaatacaatatttttaaaaaaattccatctcacagtaaatagaaaaaagtaaaaaaattagaaatataattattattattattatnnnnnnnnnnnnnnnnnttattattattattattcatgtggttacttttgtacccatatcaaccaaacagacactccagtatatggctcaaaattcccaactaactcctcctaaacctttcccattatatcaatatatatatatatatatatttatatatatcgatctctgcacctttctccattgtgtccatagtactactccctatacaccctaacttgatctctctgtagtctatacaccaaaacacacgtacactcacatttataaaatatatatttagcacactaattatattactattactttcttatcatcaaacatggaaaccctaccatttcttcttaccttcacagcggtcatctccgcctatctcttgtggttccacctccttgcccggaagctcaccggtccaaaagtatggcccatcgttggaagcctaccgtttctttacatgaaccggaaccgaatccacgactggatatcgtacaacctgcgctctaccggaggatcaggcacgtaccaaacttgtaccatcgcactccctttcttagctcgtaaacaaggtttctacaccgtaacgtgtcaccctaaaaacatcgaacacatcctacgaaccaggttcgataactacccaaaaggccctaactggcaagcagcctttcacgatcttttaggtcaaggaattttcaacagtgacggagaaacttggctcattcaacgcaaaaccgcagccttagaattcacgactcggactcttagacaagccatggctcgttgggttaaccgaaccatcaagactcggttatggctcatcttagaaaaagcatcaaaggagaatgtttccgttgacttacaagacttgttgcttcggttgacttttgataacatttgtggtcttacattcggtagagacccacaaactctttctccagaattaccagacaaccaattcgctgttgctttcgactcggctacggaaaccactcttcaaagacttctctatcctggcttcctatggcggcttcagaagattttgggaattgggaccgagaaaaggttgaaagagagccttgatatcgttgagaattacatgaacgacgccgtttcggcaaggaaggaatccccatctgacgatttactttccaggttcatgaaaaagcgtgacgttaacggtaacctctttccaacttccgttcttcaacggatcgctttgaacttcgtcctagctggacgtgacacgtcatccgtggctctcagctggttcttctatctcgtcatgaaccatcccgaagtcgaggaaaagatcgttaaggaaatctcaacagtcctgaaagagacacgtggcgaggacatcgataaatggctggaagagccgctagagttcgacgaagccgataagctggtatatctaaaatcggctttagccgagacacttcgtctgtacccttcagttccacaagactttaagtacgtggtttacgacgacgttttaccggatgggactttcgtaccatctggttcgacagttacttactcaatttattcagttgggagaatgaaaacggtttggggtgaagactgcatggagtttaaaccggagagatggctctcggagaaaggagaccggttcgaaccgccaaaggacggttacaagtttgttgctttcaacgctggaccgagaacctgcttaggcaaggatttggcttatctacaaatgaagtcagtggcctcggctgtacttttgcgttaccggctatcactagctcccggtcaccgggtggagcagaagatgtcactcacgctcttcatgaagaatggtctcagagtttatttgtatccacgtcagctccaaggagggaatgatcaggaggtagtcgtgtaaggagggcggaaggggtgttttcgtaattcgttagtgcaacaaggcaacaagatagtgcgaaggggataatatggtcattatgatgcttgttaaaaagggtataaaagtcatttaatttgtatttactttactttcatacatacgttttttctatttttcattttttgtttttcgttcgttgttcgttgagtgggttgaattttgagtacagtttgctcatctaaatttgaaccattttattatgtaatttgtaatgttataaaagtccatatcagttatatggattgtgctgatttaataaagaattttaaattatgctatagttacatatattccctatattcaataaactaacatatataacaaactgtttgatatatttattaagtaaaaataataataattagtgtttggtaattaggtcttagttgagcaccctagtagtcaacctactttgactaaccctataattggcacaacaattaaactttttttt

SEQ ID NO: 79687 - DNA, 1011 bp, Cannabis sativa
atgaagttcaccttctattcaaaaaaaaaaattatatattttcggataaatagaaaagaataattgatatttgatataatgtactatctgttacattttactaaatgaatgtgtatatatacatataatatattatatattcatatttgaaattataatttttggaatgcatacataagtataaaagcttcgaaagactttctgcaaagcaaaatattgtactatcttctgagtgaaagtgtggctttaataaagtatgcccaccacaaccacaactactacctagcaatttattttttcttcttcttaatttttattttattattaaaatcttcttcttcttcttaattctaaatcaacaatctagctagctaattctatataaaaaaaagtatatttctataagagatatggagatttgtgggcatgtccttggccattgctattaatataacatctaactattgtaataatttatctgtttataaattaaaaaaaagaaatataaagaagtgggcctataatagttacaattaaataattgatgatggtcactgtgtcaacattaactaccatatatacatatactgccagcacaaactatggacttaaaaccagctttaacactttttaaagttttcaatcaatgttctccaaatcagaaaagtgtctattattaattagttgtcattcatatattcatatatgtatatttattttattttgctcctatatataatcacagcgacaaagaagataataacacctttttttttttatttattttttaatagtaataaagctaattagtaatttttttctgaacaccaaatcatgtcctttgaatttttttagtcgtttaaaattcttccgaactattgagattgttagatttaatgacttttgtctaatttttaacaatctcaatacttcaagaggaatttttaacgacaaaaaaaaattcaagaatcataatttagtacaggaaaaaaattcctaattaacctaata

SEQ ID NO: 79688 - DNA, 1307 bp, Cannabis sativa
tattttgagaaaatgaagtatatatgggcttttgtcataggtccacagctaataaaaaacgggagcccgttgaggcccaattatatctaagaagttgggtagatatttagggtgagtgacagaaattagggcaaaataaaagaagaaaacgacatcgtcttttatgtctttccttctttcattccatacgtaaaaccctgcaaacacttagcagcgcctttaagctcaggaaggaagaagagcagccggtagagatggacactcatgaagcttttcaggttgaccttggtaaccttatggccttcgaccctcatcaccaatttcattccgtcccctcatctaggttcgttgtttttcggtgattcttcatgctttttgtaaaaatataatttttttatgttctttaatgtttccgttgatcagctcaatgggttcatctatgtatgtgtgaatatatatatatattgtggatttgaggttggtatgaggttatggttaaattgaatattatggttaaatggtactgttgattttgaagttcaagtgtatgttagtatagtttgaaactgaacaaacatgtttacatattcacatttcaccaaggttcccagttaaatagatgtatgctttttgcaagatggaagtggaagtgaaagtgaaagcggtattggtttgtgttttttaattttttgtttctttcttgatttgggttttatacaatgctaagctatggaatgtgataatctctgatttcatttacctgtatatttcaccatataaatacaaagaagtttcttttcacaagctgcgtaatgtgagaatgggatactgttgaacatcattatatatgctaagtgttttagattttgaaatgcaaatggttattgttcttcatgtactttgaattttgaaagtctattggttagttcgaacatatacattgctctcttgtgctataatgatcacacgagttctagtaaaattcactattggcatctcttttataaccaaagtttgtaattttcttcacaagcaatttccggttgctaaaattgtacttgtgatcccggtacctgtcatattttggagaggggatttcagtttatactttgtatctttcttatttataatgaaattcctatttctatagggcggagttggtggaggaaagtctaaagagaggaactgagttagtacaagctattgcagatactcttttcaacttaccttctactgaagatatagatggccctcttgtcagattgccaccccctgtgactagattgcccagagagaagcatgtaaga

SEQ ID NO: 79689 - DNA, 2417 bp, Cannabis sativa
atttccaagatgtttaggtttaagaaaaatatcggagagtttttaatcacattattttattgttaaatttgttattatttgcagcaaaataattatacttttttaaaataataataataattggcttaattgtcgttatttaatcacctgccaatatataactaacgaaaaaaaatgagtttccagatatgcaaagtgatgtagtataaatatatccaatggattacaggtaatgattcaaaaaataaaaatagaaactatgaaattacaaataaataataattgatgataacttagttgttttgagggtttgacctaactcacaactcaacaaattaccacatcacagctaagaacttgttggctatatatacatatatacataatatgatgatgagggattgaaaactatgtatgttctcattattaattggttctatttaaatcagtaataaattaataatcactcagtaataccaaatcttttctgaatgattaaatgttgacaaacacaaaaatattagaaaaatgatatgtcagtggacagatgtcaagttaagttcctcaatgaatcgaatgagaatgacctccacaaactagaaattgaatccttaactaccaaaattatgtaatttctaaataattctatatcactttattgaaaactttgctcaactaacactagttaaatatatgtttctttctttcttttgttgttgttgctctcttattatctttaaagaataatatgtataagctattgctttatatttctttctaaaattcatatcaatagcaataaaatgaataacacatgttaataagaaaaattagccacataaatacttatatattatcaaatttgttacaaatatacacttaaattttaaaattaacaataacactttaactgataagctacaacaaggctttgtaaccaaatattatttagagctaattaatattttttttctaaattatatatattttttttgtagagttctgtttttagataattatctcgaactataagaataattggaaatgtccttgtttagttacattttgtttatttttagacaattttttgttgtaaaacttgcacgtattaatgtggcataatttaagaataattcaaacaaaaattacatgcataaataattgtctaaggatgtagatatatttttataagttaatatttatatgtttagtgtcaacaaattaaattatagcatgcctaataaattattttttaaaaataaacaaaatgcaacagaaaaaaaattacaataattttatagctcctaaagaaaagaaatcagaaatcaaaactttgctatggtgataataatataaagatttatgacacaatttacatatggattgcataatttctatttttaatttggtattttttgcaaaagtagtggtggaggacgatgagtattataaaaaagaagaaaaatgattgaaatttcatgggtggttaatatatcaaattttatgggactggactggacgctgtcggtgattcggtgggtgcgcgttttattgttgacttggctctgttctattacattactaatcaaactattttattttgttgggtcttttgcatgcttcttctttgtttataatttcagataatattttccttcttttctagattatttgaacacaggtcatggacagagttcatcttttagatttatatatattttcaaaacatcgtcgttgagatattcaaaacaagtgttttttttggtgttcaattatgggtctaaactataaaatccaaaatttgggccaggccaggcccttttcctgtctgggagaaaatgattattctattattacttcagaattcagaaaggaggggaaagtacacatcagcataggttgacgtgttaaaacttaaagctaaattctaataacaatttatttcttttgttgaatctaatcataaatcaagcaatagtctcgttcatgattattcccaaataagatacgaaccttaaggctaaagcaaattaaaaaaggtacatttttccctaaagaaaaaaagaatattaaaaaagttgggtaaaaaagtatcgatgaaaaaaaatatggcctagtgaaaaagacacgaaaatgatttcgtcacagttcatcttgattttgtttcgttgaactacagtgaccagagtttctttttttttttttttttctcttagctgagctgtgtgagcagagttgaagtgtcatattagacttccttagtcacatgtagaaaatgtttgtaccgtactctactctacacaccttttaattctgttgtttttttctttttgtttttactttcgaagtcagttctacaaaaagacaaaaactagctcagttggttctattctactcataatttatacaatttgcca

SEQ ID NO: 79690 - DNA, 1653 bp, Cannabis sativa
ctctctctctctctctctcattggttctcacctaactccaccaccgaaaccccgattacactgatcgagaccaccgcaaacatccagaccacccaccgtcgaacctcaatccctctcctattgtcccagtcccttcttcaaccgcaaatgaagagaccaccaccacaaacagatattggagtttttttaaacctctgccacccacaaacgtagagaccaccaccacaaacagacttttttttaaaaaaaaaatctctaccacccacgaatggagagaccaccacgagccacaaccctaaaaatctgaacaatgtcgaaggtatgattttttatgaaaaaaaattattgattatgagtattttttgtgtaaaatcttaattaaaaatagtattgtgctatgtgctatgtttgatcaggtaatttgtttggcaaaattggttgtaaaatatgataatatgggtaagagctatctctttaaaactcgtgttttaaatttattaaaagaacatttggaagtaattgatactacatatttttatctagacctaatgatttagaatttagattttatatgtgctctgtttaagacaataacagagtctgtatgacaaaatcagagaaaaattacagttttacaaatattgggtacttatgccgcttactaacttaaaattttgggtacttatgccgttatttaccctatataatatagtcatgtttggagtattggactattgaatactaatctatgtttggcattttattttatggttgaatgattggataaaattctaatggtctagtccatttatattttatatcattaccttgaaatgttaactaataaattaaattataaaaatgacattatttttaattttaaaaattataaaatatgttttgtgtaattttttttaaatattctttttgagttgaattttataacatacaatatatacatgaattaaagtttgataaatgctgtgtatcattttaatattatttaatttctattttttattatatattaatcaatttatttagttataaatattttatttttattaaatatcttatattagtatatattatttttattagtatatattcttttatatttaattcttttatctataatattaacataattcaatctaatcttaacaaatagttcaatccaatctaattgggtcctgtatactaaagaaattgtcttatatatttataaatatttatatagaaattgtgataagatccaaatttggagagtgaggaagtttctcaatgtattgactgtcgaccaacttatatatacatgcatgcatttgctcaaactatacaagccatttttaaagttggggaatctttactatttaaaaatgggtgtgtatttattgggtactctatattttattaaactatatataaatttcatatttatatatattttttaataatacttatttgaaatcttatatattttttttttgaaaaaaaaaaaaaactgttattataacttaaagagagtcatttgcaataatagaaaaaatagtaggaagagtttcttctaattaaatacaattattatccaatactaaaatttgtttaactaattcatgagccacttcgaagcacaatgtacataagaaattt

SEQ ID NO: 79691 - DNA, 929 bp, Cannabis sativa
accttctggagaattgtagattgatcatcaagatcaaacttgcgcataagcttcagcatctcaagttgctgcaataagattccctctacttcagaaatcaatctttttaaccagtacggtcaaaacaaaattgtctttacctgctcttgtagtagttcttggcgacgcattctttcagcatattcatctggtccaagctgtgcttcatcacaaaccatttcttccctgttattccattgatcaaataatttagaattgttaacaaaagtactacaaatcttcacaacctcacaagtcagtaatagctccacttgtaaaattagccttagccttagatttaagtattaagtacaaaattcaactaagagaaagcggttacttactttgcaacgaatttgtaaaactgaatcatcaattcctgatcactttcataagtcgtattcacttttcccaggcatgatatgccaaaactaggatctgccataaacaaaagctcaaacattgaatactaaatatagatataacaggccaaactagcatctaagggctaataggacaaatttaccgattcccatttccaaaaatatctcttcctgtatgttagtggttacagctacaggttcctgtgatatgaataccgaaattcagaccattaatcaaaccaattgactgacagagtaacatatttggcagaaatccttttatcaatttcaaacttgtgaatgaaagattacacatttacatcaccagatctgaatgaaatgacaaacttttaaacagaaaaattacttccactaaaagagtcacattttgagaacttcgttacacaatggtggtggattaaaaaactagaaagacaaatttagagaagagattattaacctgctggtcttgaacagcatctgcaatccttttcttaacatctgtaa

SEQ ID NO: 79692 - DNA, 3773 bp, Cannabis sativa
  modified_base (2927)..(2929): a, c, t, g, unknown or other
ataataataataataataagcatactctattgtaaatgttttcataataaacctttcaaaaaatgatttaaggtctgaaaatgtatcaaaaggtctggcatcataaggaagttcaacatagctaaataattacaccacactaatcataccaactaaagttggatatttaacagctatgtccttataagcatctgattgccttgtatatatgtcaaacaaaagttggcagctttctaattcattgtctggtccacacataaacctggcctccaaccatggcacctgctagcatcccaacattgtaggggtgtgcatcaaatctgcatggaattgctttcatgtgttcactctgtaatgtcacaatagtttttccttctgaaggtgagatgacatccactcctttgttcatgttaccaataaaaatatatgaatcgtcccagccccatatagccctattcaacaataaacatagcagagtgagcaatcatagcttccaaagattccaggcccagagagtatgttactgataacttagacaagaaaagaacatgaattcaagatttctagtgaaatttaaaccacaccaacggcctattatagtggtttaatgaaggaattgataatttaatgatactaaaggggacatacaaaaatatagatgaagaaaaaagttggtacctgaattgaggaatccatgttcccgactgattactatgtggaatccatgaagattcctcaaagttagctccgctaagtatacgaactgtgtcgtccaaactacaacaagcagccaaagaatctcatcaaaagaaagttatttcaaaacagagcatattcctccaataagttttttattattcaatagcatttatataatacaaatgaggctatgaatggaaggaaccattggtaaagcaaaaatatacctaattattttaatagacaacaaatcaaagaatgttcatttcatgcattattagagctttgttgacctaaaatatttctaaacaaaagaaactttgaagaaatgcagtaatgagacacaattactaaaacttgagaactaattaagtttttaaacattgccctccttatatgtcagaagaatttttaaatatgtttcattgaacattcaaaacctgatacaatttttctctttttatactacagtttagcattgcaaatgggaataatcactatcatgtaagaaaacagtacgccgtttatgtaccttgtagttgccaagcaatttccagagggtgaaaaatatgcagaacatacagctcttttgtgtgtaaccgtgttcaaagtcttaggcttatcagcatcaatttttctcaaatcccaaatgcaagcagttccatcagcgcaacttgttgccataaaatttggattttgtaaattaaaatcaatggagttaactctatcatcatgcaaactccactgagctgcacagcacccactcctctcatcccacatactcaaatttccgaaccccgcaccaaaatatacacacttcgcgttatctgatcgttgagacagagagaatatagcttcattgtcattcagcagaatatactaaatcaaacttctccttttcagcatccatcaaccggatatgtccatcataacaactggtaaacacctgcacttgagcaaaattaatgagtttgaatacaaatgaacatacaaacagtttacattgacatcatatttggctatagtgacataaagcaatggcattattcaaatcaaatggaatccaaaaccaatatttacttattaaaagttacctttgacaaggaatgttggtgaatcgaaatcccagaaacagagcctgagtgaggatgatatgtataaaccccatcatcttcttcatcaaacccatccgcatgatcaagattccaaaacccaacatccccccctctgcccccagccacaacaatactagagctactacaagggaaaaacttcagagacattattctggtccgcacgatccgagctacattctccggattcaaagtcatatcaacccaaattttatctccaccagactctgttccaaaagactgagccgattcagattttatcccagtactcaaaaaggtctcctcattaaaaaccctacctccaccaaactctgttcctaaagactcgcccggttcagattttatctcagaactcaaaatggtctctattagagctcgatcagaaccctcatgaagtaacgcttctctcatatttagaggacccatgttcatcatgggagctaaaggcttcgacggttcggtagactgagagttacgactcctcaatctagagcggaaaagattgtggcttttggaatgggccagcttttctctcgttcttaaagatcgtcgctcagcgacaggagtctcacctttgggcttcttctgtggtttcactttgtctccaatcctaacatttaaaatgagaaattcgacattggttctcataaaaatggaaatgaaaagaaatataaagggaagagataaagaagaagaagaacctctcacgctttgacgaggcggagagttgagtgaccatggagtgaagcttgagcccagccatcatttcttccttccgacggatattctcgagcctctgaagctcgtacgctgtaagcttagcgggcgccatggaagcgaaacgaagattgagagagaggaatggagatgaaaaccgccacaaagatcgtatattatatggagaacgaaagtggtgtattcttcgttttatgcagagttggtgaggcgggaactaaataaagccaaaatgggtgggaaagtatttgtgctttgctaaaatatccttcttattatatttgaattgtgtaatagtgtgcttacaaaatctttttgccaaatggtccactttcctagggtaaatactattttagaccnnntgttttgcaaaagttatcaattagaccttttattttgttaaataacaaaatagaccatgtattttccaaaatagtacaaataggaccctgaactgattttttatcaaaataaatcttaataataaatcgatctaaaaatattatggtaaaagtgaatacattttctatatctgttcattttataaattgtcttcaagttggttgtattaaaaaataaaattatcaaaaattgagttcagggtcctatttttactattttgaaaaatataaggttcattttgtcatttaacaaaacaaatggtccaattggtaagttttacaaaacataaggtctaaaatgatatttacccttcttacaattcgcaataaattattttaaatctcaatcaatcagaatgaaatcatttgagacagaactaaatgaatatgatgttaatagtttgattattttgaactgtttataattctttaattcggttacgattttaaaattgttataagctattcaaatcaaataaaactatctaattattttacatttacttaataatcttaggagaatatagatattgatttaaggttaattatgattctgttttgtcctcaaattttgacatgtataaaattgtgtctttcgaacttttcataagtattgagattgttaaattcaagaacttccacccaattttgttcaatttgactaatgggcgtttgacatggacgaaagttcaaggatcacaatttgtacgtgtcaaaattcgggagcacaattcaatacatgttaaagttttttttttttttttttttgaagaagaagaagaagaagacttttattcaacaaagg

SEQ ID NO: 79693 - DNA, 649 bp, Cannabis sativa
cactatgtgcctttatctcaatttcttgagtccggcttcattaatggcttctgtttatcccattatgaaccagtagatccttcatctttttcattcgaagtccaaaatcattggccctattaaacttgtcagtgtataactttgcactagccatgttcttgatggctttcttgaaaccttaaacttgaatcttgatcgatctaaccctcagctctgatacaatttgtggtaaaaaactatcatcaaacatcatggctcaatcaccataaatatactaaacatgaaccaataaaccagagattgaaaaataaatcaaaaacataataacaccaaggattttaagttgttccactgtagaattttcaaccccgatttaatccattgtaggaacaactttcaaagccattgaggcttttataatttttattcactctcaataagatcagtataaagtttgtccaataactatacaattagaacacttagtttttgaagctaaaaaatactcgacacctcaccactaattaaacccctttcttttagagtttcttgtttttaaatttaattataggaggttgtcttttttctccggctaggcctgccgatcttccctaggcataggtgggacttggtcgaggttgtgttttgc

SEQ ID NO: 79694 - DNA, 3009 bp, Cannabis sativa
aaggtgcacataaatatgagaaaatattgaaattagagttttcttgaataattttagttgtataaccacaaactagggtaattgaatctcatatttattttacgatccttgaatttgtgctgcgacatgcctttagtcaaggatatgtgatcactcaatttagtattgtgtgtttaatgaccacttatcatgcctctttatgaccaaatacttaatgtcgatatgctagctgcgacaaaaacttttagctataaatattgtagatgaatttgtcgcattttaaaagtatgtcttatctatattttcagataggtgacatgtggcataaaaagaaagagataatctcaggatctcattagttaaagtctttcaattaaaacaagtcacgaagaggcttaactaatctaggacaggtcaagaccatgaggtatgcggagatccaccttgccttattttggcttcccaaacacagaagacttattaccacttcaggacccggagtggcctaaactcaaagtctacccaaatgatacccggacgggtacttgaagggcctatcttgaaagttgactctccaaaaggatcgcgaacgtctaccttggatacaaacacggttcacctaaagacgattatgctttttctgacacagaatcagatcttgttccctatgccaggacatggtagtgcgctcatctcacacacctttttcccaagcagttattccagtcatttacttttcaaggttaaatcttttggtgacatgtatccattgcatatagtggtcctctattatccagctgcttcaatgtacgagcacaaatccttttaaggagcccaatagttagctactttttgcatgtatattaccttattagtgggtgggtcatggggatgttcatatacccaccctttagcctataaatatctttctattcctatacgaagggagatcacaacctagatagccgaagctctgctaatattattctaagctttcttcttcttcatgagaaatgcagaatatagagtgagagtttcctatataaacattgtaaaaacatcatatatgccttctaaggctaataggctgactcgtggactaggattaattaactgaatcacgtaaaaatctctatctcttttattattccaacttattattttttagctcttattatattagttttaaaaatctcgacaaacattttggttctttcattgagagttgaagaaagatctaaacccataatgctactgtaaccatggtgtttagcctaaaaaaagttcccaaaaggactcctcaaggcggccttgacactgtcatggaagatgtaataaaacctctctcgctagagcacgcccagtcgagtgaggtgaggggaggagatacatctaatgctgacaaccaagagggtgacttaaacaacctaaatgaccgcatcgacgaggaccgagatgttaaaaatgaggaggaagacaatgatggaaaatatgtcaaagctagacagatattacgaagatggctatcagtacgagcagaacctcgaggtggtttgagcgtccagagagttgctcgagactaaatagaaattggcccattaagagaatttttctcacagaatggagagaatcatggcgcacctctaaggtaagtttggagatcttgacgagggagattcagatgatgaacccttagtggaatgtgttagaggaactaatagggaaatcccttctgatgttggaacctctgctcctctacaagacaatagaaaagaaaaagtaggtgactctcagataattcatctctcatacctcctcagaaaaatacgaatccaatcggtagacctactaggcatagaaggccaccgacacctccaggcttagattcccttttcctttgaaaggtcttactatgcgaaaatagactggtacgaaagtacctgagcctagaggaaggaaaaatttccctagtgattctgtaagctgggatggagggaccagagagcaatattctgatgaaagttagtccacagtagatctatgaaggcgttttgatgccaagtatgaaaaggctaaaagtgaaaaggtgatgccacgagggaatgacctcagagttcatctaaatgacaaagtttgcggacgagatctccaagataatgacaccaaaaggctagatgagcaaattactgctctgatgaagttggtttggaagcaaagtggggccctcaccgactctgaggatgcggaccctgagccgtatgttagaaggaccacggaagctccgctcttggagaactttcaaatgccctatatcaggttgtatgatgggcacacagatttgaagaatcacctggccaagtataaaaaaatgatgcaagtggtaaacgtatatgaaaatgccaagtgcttatgcttctccctggccctcaccaagtctgctaaggactggtggaaaaggttagctcgcagatcaatccatagctggaaggaattgcagtatgccttccgaaagtaattcatagatgctcgctactatgatatggaaataagatccatcaccaatattaaacaactggtaggataaagcctaaaaaaattcattcaacagatgatagaggcggcaactaaaacaaaagtgactgatgacaagaagcttgtggccttgcaacccgaactcgcagtttgtggtactcagtttaagcatgttatcaattgagatattatttatgtcaataatgatttatgttagtgatttgttaatgtaattaattattaaaattgaggtaatataatatatgatagctttatatagtgcataataaataaggtaatgatatatatatataatacatacatatagattaaaatttaagtgtgataatgtctgttatttatatatatatatatttgttttgcagaatattaagatacattgataatatctgttatatatatatacatatatttgttttacagtatattaagatacataaatatatctttatatat

SEQ ID NO: 79695 - DNA, 2053 bp, Cannabis sativa
aaataatttccaacaattttaacctgctttcaaaaaaaaaaaaaaataagccgtcaacggttaagcacaaaagaagtatgaagtatattagacgtccaaactaaaagaatatctgatagaattcacttatcattgactatcagctaatgatcttataagaaaatttaggacataacagtcccattgttcaatataaaataaatgaaaataagcaaacgactaaccatagcaataacaattgtaacacacaattgcatcataatccatggggccaatagaaacatgagaatctccttgatctgaatctgaacatggacaaagaaagttatgctattaacataaacatactttgagtcaatagagatttcatcatgaatgaaaaaaggtctactatgataacaatagtaaggtggtgtatgaacaccattattgaaattaaaaaagaacaaaataaattaaacataaataatgacataatgaaaaacacagatgcctatcgaaggtgtattctccccacgggtcctccatggacacagtctcaccaccttacagatcaccccgctcaaccacgtagagcccacaccgacaaccactacaaccccagattcgaacaacgagccaccaaaaccccaatggatttgaactagcccgataggcctaaaaaccaccctcatctcatggctaggcaaccccagatcttgcaccatagctcgacaaccaaaggaccacgaatcccaggcgaccaccagatcgaccgccacaccaactttcctcaacgactttgccaccctacacccaaaaagaagaacactatcaaaaaaactatgacacctaaatcaaaattcgaccagagcaacgcctaaggccagaggaagccggcaagccctggtcggactggaagaagacaacgaccacaaagggctaagagagaaaccctagcagcaaaagggatttgaaattcaacataagttttttttttttatatatatgtaatccaattatcaaaacactattatagaattaagacttggtagttatgagtgaaatataaatctcacaaattatttccacataaataatatgagacaatacacactagtttcttctctcttttttttttttatagaatttatttacacgcataacattaatcttccataatgttcaccatcttaaactttcttcatagcaatattttttatttttttgaacaatattcttatgattatgcatttcttgtatgtcacgtgttataaactttagggttgctttctatattttgatgattaaatgcatatgtatacattgagaaaaactggttaagcatgatccaatataagaacttacatcatggtcatcatgtatcatagtttttttttttttttttttttgaagtaactgcaaagaaaaatagttacaaagtttaaacttcacgtaatacttgtagctaagtctatactacactactttaggacatttcggttgacttaattatcatctgtttcggtaaattttttatctattgtgatatacatgagagttttttaattcaattgtttttcatgtttacgttgtagttatttagaaccatctataaattttctaaaaaattctaataatttacaatgccgaaaataaaatttgaatattttattacactcgggattgttttttatataccgtagtaaataattatttgaacgttattttcgatattataaattattcagagttctctaaaaatttacaaggtacaacgtacactatcataaaagatgagaatggttaaaatctcttatgtatgccaaaactaataaacggatttacagtactacaaattttctcatatatttatgatgagtattttcttttgttgatattttccttaggtgtaattgtgggatttatttactggtgtaagtattaggcagttattacagttggtttttttaacagtttttctcttatgtttgtacccaattttgtactcttgttcgacctatatataaaggtcattttctgttatttcagttagcaattagagagtgaaaac

SEQ ID NO: 79696 - DNA, 1879 bp, Cannabis sativa
gtatgttgtccaacagatttgtgtccatatacatgatctgaggatggaccatatgtcagctctcaaacggattattcggtatgttcagggtacgttagatcatggcctacatttgtctccatcttctttttcctctctggtgtcttacactgatgcagattggggcaggtgccctaatacgaggagatctacatctggttattgtgtctttttaggggacaacttggtctcttggtcctctaagcgtcaacccacattatctcgttctagtgccgaggccgaatatcgtggggtggcgaatgtggtttctgaatcatattggctttgaaatcttcccttagagttgcattgttcgatttagaaagctactttggtgtattgcgacaatgtcagtgctatttatttgttgggtaatccagtccaacatcaacgtacaaagcatatagaaatggatatccattttctccgagagaaggttgcacgtggcgatgtccgtgttgtctatgtcccctcccgttatcaaatagtcgatattttcactaaaggtttgccgcaggtgttgtttgaagattttcgagatagtctcagcgtttgtcaacctcccgcttcaactgctggggagtgttaaatatagtatatattttgacacgtcaatgtatattgttagccgttcctattctctagcctaaacttagtcaatgtatatcattagtttcctaatttgtagcctaggattatgtacaatcttatgtatatattcaacaatttttaatgggaatggtaaccaaaatattttttcactatcaaactctcgaatcggcttgcgactagaattgatagaatagtttgtgatttttggtggggatccaacaaaggtaaccatgggatccaccttaaggcctaggacaaattgtgcctttccaaagctcgaggagggttgggcttcagaaaaatgaaagaaatgaatcaagcctttttggctaaatggggatgaaatttactgatcaaaagccaatcgctctactgtcagattttggaggccaaatacctcacagggaaggattttctcaattgtcagtataaagagtcggattcttgattttagaaaaatattgtcaaagctaaaactactctcttgaaattggcatgtaaaatgattacagatagtaaggacactaatatttgggaagagccttgggttacccatgggaaagacttaatgcttaaagtttttggtaggccgcctcccaatattactaaagtggccgacctccttatggaaaacggggactaggatgctcggaaactgagatgcctatttaataaagaaactatctctgctatcttaaaacggggcaagccctcagggcaatgaaatgactattcgataggacaaaggggagtaatggccaattctccaccaaatctgcctatctaatccaggctctagctcatgctctattatgtgatgttgcccctgccctgtggaacaaatttggaatagtaaaacgctggagcgttacaaaattttttggtggtgtatctttttgaatgctctccttattcggtcttatcctgattaaaagattttcggttgagaatacaaattgtgtatatatatttatctttatatataggctagtgggatgaagaaattactatacataaatatatggaggaggttccaatggttacatttttattgtaaccattatggttacattttttttagcaattggatcactattaaatggttgtgattaatttagaaattaaataaaaaaaaagtaaaaaaatgacctgcaacctgatattaacctgttaatttatttccttttaaaaatttaattaagattaattatattttaaaattaaatta

SEQ ID NO: 79697 - DNA, 1638 bp, Cannabis sativa
tatatgaattgtaaattttgtatatcaatgtaatagtatgggaaattaatttttttttttccaccagtacactatcttggtgggctctttagatcactgagattgaccaacattagggggtcgggcccgtcgagatagatgtcaaaaaatactaaattaggacaaaaatatatctctctcggcaagtataaactaccgagattgcatcattattactggcaggctttgcccactgagattgcctccaataataatggaggttgggactgccgaaatagactcaccaccaatctcttcattaaaatttatggcggaccaaccccgccaagatagatcaataactgaggatcaggctcgctgagatagaactttttttttttttttgtagtgctcgcttatttatcttttacaaaatataaaatataaagtataaataatatctgttaaataaaatatttatttataattcatgaactcttttttttttttttattattattttattttgaattacattaaaatattttattgttaaaattttcttaattcttatggtaccaaataggttcccatacttaatagggatttccctattccgaatctattaaaagattaagcggggcggggtgagaccggagatgggggcataaatggggagcatggaagggattggggtgtattccccatttactatcgacccaatttccatccctacttattagcgtgtggtgtttaacaacacatggacccttagcagtgttcttagtgaaagtagtataatttatgtaacaagtagttttcctaaactaatagcaagggccacatgagaacatgctagaccaagcgaaaacagattatagctcgaaaagtaataatgagaaagctagcttatttgtggtgctggacaatatatatgacaaaagatgttcaacttgtaaaataatatatatacagaatgtgaagtgtgaaccaccaacatttaacgtgtttgaacttgtaaccaacacacctaattatgtttatatataaatccgtgaagagatgtgtgtgtctataaatatatatatatatataaatatatatatttgtatgactaaagaaaaagccatgaaaggtagaaagaagaacaaatcaaagaggctttatcaaataatgttaaagaaaagaagagatctgaagcattttcattacagattgtcacgctattcgagtcttttacctttttcttatcttttttttttttctttctctttcgactgttaaagctcacccaatccaaccccaccattgaacaccatacttttaatggcctgccctatatatatatatatatatatataatccttatttgtatggcctttgactttttccctacactcactcatttaaaagaaacgttgaaataatcagtcaggctccctttttacttttttatttttcttttttcacactattgtatgaaacatacaagatatattaatatttaatgtaaatcgcagagatatgagtgacattaataatacaaggtatcttccattggctttgtgatgtacctttttgaaatcatgctgaaccgcatcatgaatggtgagtggtgcataacaattatgtccgccctatttgatgcaacttattatt

SEQ ID NO: 79698 - DNA, 2173 bp, Cannabis sativa
agagtgtgttgagtgtttgagttttattgtcgttcatggcgtcaacaagtggtgttaataaaaatttagagcaaaagtggaagaacatatgtttgggtgatgaggaagataaagagatcgtttatgaagaggaggatgtcaaagacattgagtttgatgatcgatggtgcctcgttgggagattgttgacagggaaagtctccgatttcatgatttttcaaaatataatggcggacttatggaaatccaggaaaggaatgtatgtcaagattattgagcaaaaccggtttttatttcaattttttcacgaaattgatattcaacgagttctcacgggaagtccatggacatacgaccgaaaacaattgatcctagaaaggctgaagaaaggcggtaacccaagaacaattgctctaaacagtctcgacttatgggtgcaaattcatgatctacaatctggcttcaaaacagcaagggcggtccaacaagcaggcaactacattggtcaatttcttggaaccgatctgaataatttccaaggcgtttggcgtgagtatttgcgtgttagagttcgacttaatgtcgatgttcctctcaaaagacgaatgaagtttcgtgagaagggtggtgatgctttctatgccaattttaaatatgaaaaactccctacattttgctttatctgcggtatcatgggacattcggaacgtttttgtgctagactatatgacaccccgattgagaaaattgaaaaatcgtatagtttggagatgaaagcacctataaggaggtagagttttctgtttgcttctccatggctgaggacgcgaaaaaccgacgacaacccagctcctgctgcaccccaatctgatcctcaatcacctccgtctgcattcactactgctacatcagttacggcaggcctggggggatcgtataggccgagaaatcagcaacaaatgggggttgttatacagccgactatatcccatgattctaggagagtttttactcgaatagaatctcccttaaatgaccccactataattttgcaagacaataaggccacttttatgtcagatatgcaattagaattagttgacttgaaaagaaagagaatggaagttaattcccaatcagtcaccaatattcctaactctaaggaagtgatttttgaagatgagcccaatgattttcttgatgaagatgttgttggcctcccaaaaaacggcggttcggtgggtcctggttcccaggcccaccaatcgaaatgagtaccattagttggaattgccgtggacttgggaacccatgggcctttcaattcctacaagacatttgtgttgaaaataagcccaattttttatttctttgtgaaactttatgcaaaaaagaagtagtggaccgtgtgaagatcaagttgggctttgaaagttgcttcattattgaagcccaaggaaggagaggtggattagcttttttttggaaactctctgatgaagcccgattgttgagttactctaacaaccacatcgacttagaaatctccattcctagtaaacttccatggcacatgaccggtttctatggcgaaccacagcgtgctctccaacaaacaacttgggatctgctccggtctattgcagatgagtcgccctttccttggtgcattctcggagatttcaacaatgttactacttagaatgatatcaaaggtggctgaccccgattccttgatcaatggcttcaaccttgcacttcacgactgccagcttggagagcttgagttaaatgggtatggtttcacctgggagagaggacgtgggactgctgctcacattgaaatcaggttagacaaagcctttgcgaattatgactggttttctctatttcctgatgcaaaattatgaaactttgattactcatcatctgatcatacaccactatttcttgagctagatccgtgactaatacccgtgctatacatttatttcgctatgagaatgcttggtctcgtgagcctctttgtgccgagcttgttaaaagttgttgggccgataattgtcatctttctcttactgaaaaactaaaatgctatagtattgttttaaccgattggggctttaagattactagaaattttaaaaagagattgaagcaaagcaagaagaaa

SEQ ID NO: 79699 - DNA, 4551 bp, Cannabis sativa
aacttgggctttgctatcactgcttccctctccgaaaacgaccttgtcctcaaggtcgactaaattgtacatccgtatgaaagcatcaaagtcttcccatgttgcatcttcaggcgaactgagagtccattgaacgagcacttgacgagtcataccagtagctgtgtgattaattctggtagcgagaatagccaacggcgtgaggattggtttgttagccaagctgaactcaggcaacggatagcacggtaactgttgtgatccccgaaatggtttgagcagtgatacgtgaaaagtggggtggatgcggctgccttggggaagttttagcgtatatgcaacggggccggcatgtccgataacttcaaacgggccaaaatatcgacgactaagcttgaagttgttgcggtgctactgtggattgccggtaaggttggagtttaaccaagaccaaatcgccaatttggaaggagatgtctttgcgcttcttgttagcctgttggcacattctgttttgagccttgagcaaattgtctttgagatgctgtaagatgtcgtcccttgtcaacaagtcttcctctaccgcttgaacagttgtggacccttgaatatacgtcggaatggatggaggtgttcggccatataccgtctgaaagggagtcattgcaatagcggaatggtggctcgtgttataatgatactctgcccaacacaaaaacttgctccattgtttgggattctcggcaattaaagctcgaagatattgctccaaatagcggttcgtaacttccgtttgaccatccgtttggggatgataagctgagctcattttcaacttagtgcccataagctcaaatagcttcttccaaaatgcactagtaaacaccggatctctgtcactcactatagttctcggtaatccatggagcttaatgaccatattgctgaataattctgccacttttgtggctgagtattgacggggcaaggcaccaaagtgtgcatattttgtgaagcaatcaatcacgaccaaaatgtttgtgacgccattagagttaggaaggcctacaatgaaatccatagctaagtcctcctaaactctctctggaatgtctagcggttgaagaagaccatatggtgccgaagttgaatgtttcaccgtttgacaaatagtgcaagtggccacaaattgcttaacatcagatcgcatcccatgccaaaaaaatttgctcctaagcgcaagtaggtgcactctatgcccgcatggcctcgcattggtgtatcatggaactcatgaagcagtttttgtttcagattagaataagcactaataaaaagtttttggcggtagtacatgaggccatctctctgagaatacacagtagcatcaagctgtccctgctgcaattgagtgtgaagaagcctcaaatctgggcaagtaatattctcctgctgtaattcctctagaaaatcataacaaccagcactttaaccgatcaataatgatgaagaaggtgtctcaaactttcgggagagggcatcaacagcaaaatttaatgtacccgctttgtattcaatagtaaaatgaaaacccagcagcttatgaatgaactgttgttgttccggtgtttaaatgacttgtgttaagagctcccgtaaacttctgtggtctgtcctgataatgaaatggtggcctaacaaatactgtcgccatttgttgactgcttcaactatcgcacgcatctcccttagataagccgacgaacccatgaaacgaggtcccaatttcttgctaaaataagccaatgggtggccatcctgcattaaaatagctcctatgccgacgttagatgcatctgtttcaactataaattctttagaaaaatcaggcaacttgagtacgggtgtctcggtcatcgctttcttgagatgggcaaaggcagtagcagcttcggcagtccatttaaaattgtctcgcttcagtaagtcagtcagaggggatgctattgttgcataatgagatacaaagcggcggtaatatcctgtaagacccaagaatccacgtagttgtttcaaagaagtaggcacaggccattcgttcatggctgtaatctttgatggatcagcctgcacaccatttgaagataccaagtggcccaaatattcaactcttttctggaagaaattgcatttactggccttagcaaaaaatttagtatcctggagcactcgaaggactatggccagatgttgagcgtggtcggtctcattgttgctgtacacaagaatatcgtaaaaaaaaaacgataacaaaatgtcgaaggtagggtctgaaaacctgattcatagctgcttggaacgtcgaaggggcatttgttagcccaaaaggcatcacaacaaattcgtaatggccttggtgcgtcctgaaagatgtcttgtgaatgtccctgcgatccattcgtatttgatgatagccagctctcagatctaacttggagaagacggtagcaccccccagttcgtcgagtagttcgtctattgtgggaatggggaagcggtctttaatggtgagaccgttcaacgctctgtaatccacgcagaatcgccatgacccgtctttctttttaactaatagcacaggtgaagaataggggctagtacttggtcgaataaatccaacatcctgcatctcttgcaccagtttttcaataacgtccttttgaaaataggggtaccggtaaggtcgcacgtttacaggtgccgagcttggctgtagaaaaatgcggtgatccaccgaacgaaaagggggcaactgattcggtgtagcaaaaactgctgcaaactgagacaataaaccccgtccctgtggcggaaaatgggattcaagagctgccagattagtaatgtcattctccttagtgtcctcagttgtttcgagtcgaaataaaccccgaacttctccttcgcgcagtaaggtagtgagctgtgtgtaagtaagatggttcccagaaatttgagtggaacccgatagcttaataatgtttccctgccaagtaaattccatggtgagtgccttgtgatcgtgaatgcacggtcgcaaagtttgaagccattgcatacccaaaacgacgtccaagccacagatcggaagaacatatagatctactatgaagcggtgcccttgtaaccatagctcaacctccttacagagcttgtaacacaacaaaaaatttccattacccatgtatactttgaaacgtttcgtctcttcccacggtaaattgagttgtgtagccaatgattcttgaataaaattattattgctaccggtgtcgaccaatacttcgagtaattcattgccatgtttcgctgtaatgcggaaaattctcgggttcaatgaattagagagcgaattgagacttacttcttcttctggactgtcaatttcatgttcctcctcgtcagcccccatggatgcatcttcctcatcttgaacgcacataatcaacattttgttcttgcatttatgaccataatgaaacttctcttcacatgtatagcataagtctttctcccgacgttccttcatttcactgggtgataatttcttaattggcagagagattgtattgggtggtttacccaatggttggattggaggtgatggaggacccgtactcggcttgtatgtggtcgaaaaagttgaatgtgaattaggttgttggtaacttggtttcgagatccacccggttctattatggtctcgttgtcgagcgaacagatcttcattgcgatcctcgaataattgagctttggccatagcatcggctaaattcgcaggaggtgccatcaataactctcgtcggatttctaacttcagtccccaaatgaagaagttcaagaacatggagtctgccactcctgtgatacgaggcatcaacatttcgaactcttgtctgtactccgaaaccttccccgtctgtgtgagtttcgaaattcaacccaaaggatcgtcgtaaatggatgtaccaaagcgaagttgtaattcccttaagaaggaatcccaatcataaatcgatccacctttttccatccattgaaaccagctggatggaggtccgcctaagtgaaacggaacaaccgctaatcgcattccataatccactcggtgaagatcaaaaaacttattgatcttataaatccaatcgtccacattctgtccgtcaaagcgaggcaccttaactcgcaaggttttgagaattgagttgatgtctcggcaatctgattcagcatcggaacgtcggctccgttcgcgaactgagtctctgcccccacttgcttcacccacttggttcaccggcgatggttgagaattctggttgaagcgttcatcgatcatcatcttgatagtctccatctgggattccgatcgttgttcccacttgaggtccaacgcctgcaacaatgcagcaatctcctcgttcttcattctggaaagaaaaaaaaagggtcaatgaaagcaccaaatgttaagtaattgctctcttcgag

SEQ ID NO: 79700 - DNA, 1159 bp, Cannabis sativa
ataaaacttaataccacatataattttacataaaatacaatttaatataatactatacaatacaatactgtgtaatacggcgtaccaaacgaacccttaaagtcatatttcggtagactctctttatttgtttcgacatttaggacacttttttagtctaattaattttttttataattgcatatattgtaataggagtggcaaaaataggtttcgacacggcatataaacatgacacgaattttacgtgttaggattgaaaaaattaaatgagagtcgaaaacgagtggacacatcttgacacgaaataaaaatgaatttaacacaacagacccgcttaacacaaatttgacaataaaataaaataaaaaattattaataataatataattatgtaagaatatatagttaatgattcaatgttaagttaaaaattttaaatttaatttttttaacatgaaattaaaattattttaaattttttaatttttattatatgtataacaaattatatctattctatataagatatggctatctaacggaattcttgatttaacgatattttttaaatttctacgttaactttaacagaatatcttattatttaatagaattattaattttataatattaatatatatatttaaaaacaaaaattatatagatatctaaaaataaaagaaatgagtaaacattaattaaattaataataaaagtatagaataagcctttattttaaaagaaaaaaataaataattccaaattttaaaaattgaatttttgctaacttaattttttgttaaaaaaaatctaactatcttaaaaccaatattcagttcattattatatatacaatgtcactccttttcattggttattgtaattaagaaaatctatagatatatcatatatagcatttgaaatagtgcaaaaatattcttaatctatgtgggactaaccatagaaagaaaattttattcattttttttcaacacaagtttctatcatgttttcttttttttttttattgaacacttaacttgaaaaaaaaaaaaaatactctaacaaaattatgagaaaccatattaacacaccgtttaataaaagacaaaaaatataatttaaagaaataagaactttgacttagatttaatta

SEQ ID NO: 79701 - DNA, 6053 bp, Cannabis sativa
  modified_base (38)..(54): a, c, t, g, unknown or other
aaagttcatatttcgggtgttaataaacatacttgtgnnnnnnnnnnnnnnnnnggtaaaataatttccaacaggtttgtgtctactaagaaacagtttcctgctcatccctaagagtagaggacattagcatattccttatgcttcaacagttggatatttaatgtatgatatattgtgcactgtatgcaaagggaattttcaaaagatattagtccaacccaggaaaggaacattgaacgacagttaagcatattctgaagtacttgaagaggactagaacaagggtggtgctttaaaccctttaggctatatagactcagagttttaggcttgtcttgatgataggaagtttacatctgggatggtattcactcttggggatggaacagtggtttggagaagcattaagcaatcaacaatctcttactctgccatggaagctgagtacatagctgtagttgaggctgctaagaaaatagtctagataagaaagttcttcacatagcttggctttattacaaatacggaagagctactagtgttactttgtggcaatagtagtactatgacaaatagtaaagagccttgaagctgcaaaaggagcaaacacgtagaaagaaaataccacatcatctgggaatatgtgacaagaggacatgtgctagtggaaggggttgatactaaagataaccttgttgatcccttcactaagactttgacagactacattcaaaaagcatgtcatgaatttaggattagttgaaatgtattgttagttttatattagtgcaagtgagtgtttgttaggagttcatgcactaaataaaatttaatttcaatgtaatcttaattttatttatcaataaaagaacataaattatttaatgactattatgtttattacttggttcacatgttactttcgtgatcatatgtatgatatataagttttgttaaatccttattatttatcgagatttttggacaattaattatttaatattagagctaaaaaaatataattgaaagaacaatgatgaagatactcaaagtttatacatagttgggcgttaatgagccttaatctacgagtcagtattattatgagattggctagaaaagcttaagggattacaatgagtatgagcactctattctcttctagaataagtaagtcaagaattttctaccctatgcataaaggattcaatgtgtatatatagtattttagaggtcatacttaattacccttttcctctaatggggagtttacatataatacatagatttgggcttatctactatgaaaacagttattgaagctcttcataagaaaggtacctggtctctagtgtccttacctccaagaaggaaagtaatcttatatgggtctttaaggtgaaaaaaaatcctgatgggatagttgcaaagcacaaagctcgcttgtggctaaaagatttccttcgtaatatagttttgactttatttaaacttttagtccaatagttatttttaatgagcatttcttttcctatgttgctatgtctcaaatctctactcaccctcgtgtgtcttaaactgtatctcctatgtctcactctataccacgtaaagatgtctcttttgtctttccacaacctcctcatttgtaaacatttccctagaaaaaatatctcaaacacaatccacaccatctcattcttatcaatcaaatgcctcaaataattaaagtgcaaattttaacaatttttatagttctattaataccaccgtgtctcctactagtactttgtcaccctcccttacaccaccaccaccaccaccaccaccacctctagtaccattaaataatcactcaatgataactcgagctaaagtagacatctccaaaccaagagctttccttgccacaaaagaacctcacaatgttacaacaacattacaacaaattgaatggcacactgctatgaaaacagttattgaggctcttcataagaaaggtacctggtctctagtgtccttacctccaagaaggaaagcaattagttttaaatgggtctttaaggtgaaggaaaatactgatgggatagtcgtaaagcacaaagctcgcttatggctaaaggatttccttcgtaatatggttttgactttactaagacttttagtcccgtagttatttttaatgggcatttcttttcctatgttgttatgtctcaaatctctactcaccctcgtgtgtctgtatctcttatgcctcactctataccacctaaagttgcctcttttatctctccacaacgtcctccatttgtatagatttcccaaacataaaaaacatctcaaacactatccacaccatttcattcttttgtaatatggttttgactttacttagacttttaatccaataattaaaccagttacaatcaagattctcttaataattgccttgttctacaaatggtcaataagacaacttgatgtgatcaatacttttttgaataggaaacttcaaaaagaggtgttcatgacccaacttccaagattcattgattccaagtctcatcatgtaaggatctgccccgccccgccctactagatcagatctgaatcgacttattcggatcggatttgatccaacctgactcttttttttaaagaattttaatattaacttataattttatatccattttaattttgtattagtattattaaatacaatactatgtttaatattgacatgtattaatagattgtgtaaagataatatatttttaataaactctagcccaacaccatcaatgggtcaggtctaggtccaagtgtgggtccgggtccgggtccgagttgaggtcctaggtccgagttcgggtctcggtccgggttagggttctagtccaagtttgggtctagatccgagtctgggttagggtctcggttcccgatttgggtttaggtccggatctcgggtctgggtccgggtcccagtccaggttcggggtcgggtagggtccgagtttaggtccgggcctgggtcccggtcctggtcccgggtctcgggtctctgtttgggtctgggtcttcaagtttgggtctgggtcccagtctaggtctgagtccgaatcccgagtccgagttcgggtctcggtccaggtttggggtcagggtctaaaccaggttcgggtcctgggtcccgggtccgggtctgggtttgggtcccaggttcgagtttggatcccgtgttgaggtttggatctcgatctaggtctgtgttcaggtcccgggtcagggtccgggtcctgggttagggtccggttttgggtttcgagtcagggtccgggtcacggccctgggtctcgggtccagatctgggtctcaggtccaagtttgggtcccagtccaggtctgggtttgggtctaggtctgggtcttgttccaggtcccaagggatccgagtctagggtatgagtcttgaattaagtttttttaaaaaaaaaaataaatcaaaattgagtcagattagatccaacccagaaaaaaattaggcagggcgaagcagatctgatccaagatccaataagtatccgaatgtcagtctaactaaatgaatttttttgacatgcctatatggtttgcaaacttcatatggtcatctatggtctggctcaaaggacatggtttgataaattaagagtttctttacttgcatttaattaggtttaaatgtgcaagggcagacaattactttgtttttaagcacattgcaactcattctatatgtgacataatctatgtggatgatattttggtaacatgtagctctactccaattgttatttcacttattgagagcatcaataacatgtgtttctctcaaatactttggccctctcaactacttcttggaaatcgaagttactcacacctctgctaccctaaacttgtgcaaaaagaaatatatttttgatctcctagccaaggccaagatggataatgctaactagttgcatacacctacgacgagggtgagaagctctcaatttctaatagtgatcttatttatgagccattatttttaggggtgttcatcaaaccgcacaaaccgcctgcattacaccacatcgcaaaaaaatacaattttaaattcttcacggtgcggtcgcggtttgaattttttctaaatcgcgcggtacggtgcggtttgcggttttgaattgttaatatgcggcaaattgcatcgcaccgcacattaaaaaataccaatttttatattaatttaggtccaatatttaaatgtccaacccaaagcccactaattattgtattgttgaaacttaaaaattctttgtggtgcagttttttagtttcgcggtgcgagtgcggtttgagaaattagaaaaaccgcctgtgcgggttgatttaaaaaaaaaatagttaaaaatcgcaccaacggcatcgtgaacacctgtaatcgttttataagagcatagttggggcattacattatgccataatgacatggccagaaatatcttatgttgttaataaagttttacagtttatacaaactctccttgagtcctactggaaaactgtgaaaaagatacctagatatctcagtggtacagttgattatggtgttcacttgaagatcctatctgcattgtccctcactgagtttcatgatgttgattaaacataagatccagatgataggaggtctgcctcaaggtattatctctatcgtggtcctaacattgtgtcttggtcatctaaaaagtaaagaatagttttgagaccaagcacataggttgaatatcgaagtcttactcttgccacaacatacttatttggaatgaatcactattcactaaaattagtgttcaacttcaacaaccaccagctatgtggtgtgacaatgcttatatttgctagtctcgaaccaaacatatggagttagatactatgtttaagaaaatgtgttgaacaaacaacttttgggttggcatactcttgcttgtgatcagaatgcaaacattttaactaaggctttgtctagcaccaagttgaagtttataaggacaaacttagtctggtcacactaagttttagggggtgtgagtgaagtcaataattaattattcttgttagagtttgttatcatattgtatatagttatatgttaattagaccagttaacatcaaatgtatttatactgagctagtgttgattcattcaatgtatttatacaatgaacagatttatttccatctttgattacactctctaagctctaataaatgttagtaaatcaaatcacaaatattaaatcaaattatgcattttattttaaaaaaaaaaaacatatatttagatatatacggataaatttagttcacacaacatatacaaatacaattggacttgtcaatagtttggatagtgggtgaaatttttaataagaaaaaaaaatgcaaagacattatttagtatagtagtgctaataattgatatagtttgagaattgtccaatactcctactaataaagccacaagaaaacactaaaaatatgcatattagttacctctccatgcatgagatcaagttatgaaattaatgtagctggccattgctgaactgctatcatttttgcaattttgatcacatgggctgtctttattgttgaccttcaattgtcttttcactacagttgagcattctgtggcttttaagatcctattgttcttgcttctattaaaataaataaattaaaattaaaaaaaaaaaacccttggccttgcacaaaaatgttcaaattatgcatatacttttctgctcaaataatccatcatatttatactttttttcttgaatgtgatccttaattaagttgattttcttttctactacctttaagttcgtttggtacgtcgtattataccttattatattgtataatatattatattaaattgtattttatgtaataaatttatgtaaaactatacgtggtattaattttatagacacctaaatatataatat

SEQ ID NO: 79702 - DNA, 3080 bp, Cannabis sativa
tactataatatatacatttatatattataaacccaaaacttgggtttgctcttattattattagattaattcaattaaacaaatagcctagttttaccacttccaccctttgacggttcagatccatattaagtatttttcaaaccttcaacggtcaatattcaatattacccaaattataataatattaactcatcaattataagaattctctacattgatctcttcaaggtcttccctttgaaaataaataaacaccgtgtacgtgtgaagaaaattaagcacacaaaatataacatatatatatagaaacacaatgataatatatatactaatcctcatatttgaactcattacaaaattttatatactatctttcttcttcttataaggattgtagttctagagctgagtaatcgaaaagattctgaagcattttcgggtttagatactagttggtttgaatactatatttcgagtagtaaaaatggttttgggttggagattaaggagaaaaagcaacaagaagaagagcctcaaggcaatgaaggttgagattccaaaccatttcctttgtccaatcgcatttgatttgatgaaagatccggttacattatcaactggcataacctacgatcgagaaaacatcgaaaagtggctcgaggaagggaatttcacttgtcctgtcaccaatcagattctccataactttgatttgattcccaaccattccattcgcaagatgatccaagaatggggtttggagaatcaaaagcacggtttccaacgcattcccacgcctcgaattccaatcacgccaatcgaggtaaccaatattctttctttcatagaatcttcatctaggcagctagacacatccagctgcctagaagccctaaagaaaataaagcaatggggtacagaaagccaccatcgcaacaaacgttgtatggtggctaatggcgcggccgaagtactctcggctgcgttcaagagcttcgcagccgaaccatttgaagaaaatagtattgtttgcgaagaaatattgtcgaatttggcttggatgtttccaattggaaaaattgctcgaaatcacttaaaatcagaagcttctttacgttgcatgattcagtttctcacacgtgtggagacgaatatctcaacaaaggagaattcaatcaaaacattagaagagctaatcattttttatgatgttgaagatgatcaaaaccaaacctacacattattagaatttctatcaaaaatagagggagtaaatgagatactaatggagttcatccaaaaaaaagtttcaaacaaaattaccaaatctaccctcatgataatctaccaaatggtttcaacaactccttcattggaaattaccatattgtccttccttgaaatgggcttgatttcttcactcttggaaatccttgtagattctcatgatgatcaagagaatagcaaggttataataagtgaaagagcattgggtattatggatagtgttttaagttactaccaaggtagagtaaaagcctatgaaaatgacctaactataccaattttggttaagaaacttttgagggtttcaaatttggcaactgaattttcagtctcatcaatttggaaactttgtatgaatggagtagtggaacaagagaaagaagagttgagatcagttgttcttgttgagactcttcaagttggtgggtttcaaaaattgttgttgattattcaagttggttgtggttatgagactaaggaaaaagcaactgaggttttgaaacttttgaatccttatagacctcaattggaatgtattgagtctgttgattacaaaagtctccaaaggtcattttgagataaaattaagtagttttttttttggagttctagctagttggaaataatctaatataatatattcttttcttcttttatgtagattttgttttaattaattaaattttgaaatacatgagtatatattggcaaaaattatagagttactttgtaatataagttttattttgttgtgagatactaaatagtaaaatattaaaatattgaatcatatataagattatgagatactccatttatcgttaaattaatttaaagattgcacttcataattctctacacatttaaatgaattttgagatttatatatttaaacttacaattcataattagaattacatatcgactatactcacaatgtcatgtgaatacttaagatatatttctagaacattatctacgtgttattttcttaattggtatactttaattaatttttaaataacaaaataataatttaataactttgaccaatcagggactgtcacgtgaccatggacttggcacttagcagtcaagttctacggaagtttcaaaaatataacttatacattattaccgtaaaaatttaaacttaagtatttatctgtagccgggagttaacttaaatattaatgacgtaaattagtcttattttattaaagaattatcaataaaatgaatgagaattaggagttattttttatttagagattaaaattgtttcaaaacttcaccaatttttgtataaattttgcgctccattcttctactttgttgggccgtcatattttaactctcatattaatatgatattattcgttctaaatttttacaattttattgttatgcacttttctaaaaaggtaagagtactcttaaaagaatagtatttttataaaatcataaagacttgggttatgtttatgttgagcttttttcctttaaaaataacttttgtaaaataataataaaaattgtataaaaaaattgaagaaagtaataaaagggaaaaagagtatattattgttgaaagtgggatttgaacccacgccctttcggaccagaaccttaatctggcgccttagaccaactcggccatttcaactcatttgttttatgttctcaatttattatatttatatctttataatataactttcatataatatgtatcaactacttgacaaaactcattaagtgcaacttcaccattgattgtttcactttgt

SEQ ID NO: 79703 - DNA, 1106 bp, Cannabis sativa
taaattatttgagagtacacacacgacaatagtaagacaaacaagagtcgtaactaaaaatggagaaactagcctcagcagcattcagcaatggtgtcgtacggattaggtgaagtgatgtaattcgaccccatatcaaccgtccgatcaaatattaatcaacggcacaaatattataagactatatttgtagataaaccaacaataaagacaaactcacttttattaaggaagaagattacattgaataagactcgaaacagaaaaatatccaaaactagttgagtagttagagagagcaggtgaagaaacccaatccatggaaccggtagccatggctgtttatagtagtggagcagttgaagaacaagaacacgaaccctatgaacaaaatactgacgagttcacaatcccttttcaattttacataagaagaagaaatccagcttacctcctaaacatcctcaaaccctaaccctaattctatttcagccatgacctcacctaattcgaatgtgaattcttcttccgcggcaaccaccccccgcgacaagagctccaagcagccgtggcggccggcctttgccacgagctgttgttccgctgaggataaaacgattctcaggaagcttagcttgtgccgaacttcgagatcgactgagctttcttcgaagaatattggtccgattccgtcgtttcggagaatttcgttctcggatttgagtcggtcgtcgtcgacgcgtattaacgaagacttggcgcttaattttggggctgagttgtacgattttcaattgagtgagttgcgaggtataactcagaacttctcgagtaattatttgttgggagaaggtgggtttgggactgtgcataagggttatgtggatgagaatctgaggcagggtttgaagcctcaaccggtggctgttaagcttctcgacattgaaggtcttcaaggtcaccgggaatggcttgtaagttatttattttattttaattggaaaaaaatgtatcttttaacattaaattatttaaattacataacaactgtttatttatttatatatttttacacaaatacatgaattgaatagtatctattgcct

SEQ ID NO: 79704 - DNA, 2354 bp, Cannabis sativa
gaataagaatgtatcaaattttaaatgcataaaaataattattaaaaaaattataaaaaattttctcatctcgcattggaatggttattacttccataattcaaaatagaataatcattccattaaaataatgaaaaagtcattccattggaatcaatggtagagccagttcaatcttttcgtcgtagtagggaatttttttttttttttgagtaataataaaaaaaaataaaatttctattgaagaaaatacaaatttcatggaaataaaaaagaaaaaatatgtgaaaataaaaacaaaaatataaatttgatagggatacaaacaaaaataggtgcaataaaaataaaaataatataaattttatgacaataaatacaaaactatgtaaaagcatagataaaaaaattatttttctggtgttaaaatataaattacacaaaaaaattatatccaaaatatacattataaaaagttgagagggtaaatgaccccacatgctcccttttcctcaatctatggttgaaataacattttattactttataatgcaatcaattacaataaaatagaataaaaaatatttctttttacattctattaccttcaaccaaacccacctaagtattattttcaaaccacacgtactttgagggactgttagagttagttaatattggttatagtgagttagtcacggtctctttgtcatgtattgactagtttgttagtggttgtctctcaaccattccgttagttgtttatataagctaattcttgttagcgttgttagtatatctctgttattttctgagaaatttatatatggccccaattctatacagttcgtttctcttttaatatgtacatgaccacaatttcaatatttttcttttgaccattatacttttttttatttggtcacatgagaataggttttgtttcatgtgattttgagaaacttgaaaagctcataagcagacacaataagaaagcaattaattgtgtatacatcctgcatgtggtatctataaatatatatatatatatatagtctacatatatatatatacactaacatatatgtatgtcatgagatcagctaaagaaagctaaaatccatgcagagttttatttatttatttatttattttatttaagctatattcctttttttataggaagctatatcaaataattcaattatatgtctcctttcttttctcatatatatatattgtggtataagtgggtagcaatatatacacattccatcaaactttttcaatcaaatttgatcgactactgtactgtattaacttgagtaagattctcaatccataagtgtcaaagatacgaagcatttattccacagtacaaaatattctaagcttatatatgggtcacacacaaggtcttttttccaaatgattagcataaattgaattattctatctccttgtatatacatgggaccattttgcagcaaattcattaactgtaaaagacacccgacaaattgactatatatctcaatcacccaaggtatatttatgtatagggtcactgtatatgtggaaacttgtctgtggtgcaaactaatttggaagaatatatatctatatatacatatataattaacgtatatataattctattatacattattattattattcctctccatttatatggacattattaagcagggtttttaattttatgaaaatatatcaattattgttgaagaacatattgtttgaagaaaataattaatagtgaaaattatagaatattaatggaccctttcaatacaggtcagctaattaatttgtgtccacataatgctagacactgcatacatctcaatcttatcacctctaaaacaaaatctgtttaaaattaaaccttagaaatttatacatatgttaattatgttatacatagattaagctagcaaatcgctcattccaagatcgagatgaaccactacaaaacatactattgtgcccaaaatgtttcggtccattgattttacttaataaggtaaagcacactaaggcccaaaatcggaataactcagcccattaattaaagtagaaattagtaggggtgttcactaagtatccgatccaattcaatccgcacgatccaatttaatccaatccgcacttaattatatatatttttaaaaaattataatacataaatttctttttatttgttttataataaaaaataccaaaaaaattcttatttacatagacacacacataaatttaaatatatatactaacttatttattttagtaatgaatacacatatattttagtgtaaatttaaagatgagta

SEQ ID NO: 79705 - DNA, 899 bp, Cannabis sativa
caattagttactgaatttttttaataaaaaaatcactaaaacttaaataaaattaatatttacgtggttcgccacgtaactttcatctagtatattgtaatatatatttaggtacatgtagatatatgtttttttaaatatattatattgtgttaaaaaaaaaaaaacttaagagagtcgtgaccttgacaatatggaccattaattaattagttaattcataatctatatagtaattaaattaggtatatttatatattctgtagagaataattaattaactaaaaaattcattcaacaaagtacaaaatccacaatttctgtatctaaatcaaatcaatatatagtattttctccaccaaatacaataatgaataaaaatattataaaacgaaaagtcttataattaattattttataccactcttaatttctagtaacttattttatttaacttattatatataataagttatatattttttgttttatttgcctactgattttctaagaaattaccagaaaaatgtcaagaaacttcatgtaattaaattatataaactcataaactataataacaaaaataactgatatttcaattagaatatccttaaaaatgaataattattacttcgataagagcaaaatttgaactagtactagatcatcagcagcctcctcagattgtgattgatttatatttatatatatttatctaaatcaaaaaattccaaagcttttggaaagttaatcaagctgtattgagtcaaaatatgtcaactagatgagctgaccaaaattctataattaggtatatacatctctctccccctctctatatataaattatagtagaaaattccagtagttcactcttaaaagaatattctggtagactt

SEQ ID NO: 79706 - DNA, 4712 bp, Cannabis sativa
  modified_base (4500)..(4500): a, c, t, g, unknown or other
caaagtcatttgtaaatttcatttcactattaggttctctctcctctgcgataacgagccacgccgtcgcactcctccactctgatctctcgccatgtccctctcattcgctctctcatggcagcaaaaaattaagcacaacattctcttatctgttatttaaattttaattagtggtaatttagtttgttgatcttgatttgtgagtgttcaaaataaatctgaagcttgtgaattgaagaaagtttcaaggatcatcaagtgaaaaacaatccaaaacttgtaaaagaaaatttcgaggaggatgatgactagcacaacaatagtggaagaagatgaagcttgtaaagatctttgagcggctgtgacatatatgcgagaagttcttttgaggaggacaaagatgataattttttggggggcaatccactatagcaacggtttaaaactgttgggaattctttatatttgacatttttctactgttgcctattctaccaagtattcacgatgctcgtatacgcaacgattttatagaccgtcgataattctttaccaaacggtgtaaaactttcaagaattctgagttttttaatagtgtgcttctggataggataaagcctgctagagttgactattcggaactaccattctaggagggacaactaaccaacaagaactccatcttggagtgagactagatttcatgaagattggaccttaagtggacatgatagtcattcaggaactcctttttggactcgactatcattccacaactctttctgggactggcatccgcgagtgaacaactttctaaaaaagatgtttaagaaaagacattggggatattctcatttggaggaacaatactacaaattccacctactaacttcaaattaatgatgatgaagaaagaatgcaaccatcattggttggtgttctaagaatctcagtatactaacttctaagattgatcaagttcaagcaatgcttgagcttgtatactgtcaagaccataatcccaacatcaacatgaatatctcagttctgaccttctttaaattaaccaacttttcttatatcttctctctaatccagtagagtcttatattcatatgtttgctcttttcatgataaactagattcttacaaagataaatggatgactggctatcaaaatacacagtcactcctcctttgatttgttccaacacataaagtattctgtgaagccataatgcttccttaaaagcttttgtagttgtcataatttttgcttccgtggtggaaagagcaaccacgcactgtaattgagccttctagcatatacagtttcagtttgtcaagaaagcataggaagtggttaattttcttgtatctctattcgaggcatagtttgcgtccatgaaccatttcaattctaattctcctttttctttctcgtaggtgagactataatttgaagtacccttcaaatatctcaataaccatttaagggctttcgaatgttccatgcctggattaggatgcttaaagcgtgagctatatctggccttgtgctcaccatcatgcacattaaacatcctagaaccacaacgtagggtacatcattcatttcttctttttccttcttattgttatgacactattcctttagtaaaataaaatgacccctaatggaacagatgtattctttgcttcttcatgttgaacttttgaacaattttcttgatgtacccaaactgttttaagctaatagtcccttcctcctagttctgcgacacttcgataccaagtgtcttttgaacttgtccaagctatttcatctcaaattttcttttgagcttggctttgatacttttgatcaggatttatctttgctcatgatgagaatatcgtccacatagagcaataagaacacgactgtagattgctccagattcataggcgaatcatttaaacccgatttgatgcatatatgtatcgaatctcttattctatttccttggggactgtttcaaacaatataaagacatattaatcttgcacgccaattcaactcgtttcccttccttctaaaatcaggtggttgcttcatgtagatctcttcatccaagaatccatttaaaaaagcagtattaacatcaagttattcaacctcaaactccatttgagtaaaccccttagccactaatctagctttgaaccttactggttcattcacattgattctctctttcaccttaagaatccatttgcactccacaaccttcttgttctccagcttcagcataattatccaagtcttgttctttcggagtgaatccacctcctcatgtatggcctgaagccatttagattgttttcacctaaaatttcctcttcatagcttccagacccttcaattttagcctgttgaactactggtagtgcaaatgctattaactctacttttgtgaaccttgctggaggatggatctctcttcaggttctatctcgagttaattgataacctttcagacttgtctgtctggacccttccatcacctctgtttcattaccttgttcttccagcttaataacaacttctatttgcatctatttgcatatggtctttcgattccatactatctttcacatgtgaaccttcttctaggagcttggttccgtactccatttccatacttgtagtgtctttgtttcctatttttctcgcatcacacgaagacacacatcctttcttggaggtcaagtgaggatactccaactcattaaaaacaatatttctagcaatcacaacctttgatttacccttcttggaaatgtagcttctatacctcttggttcctaaggcataacctaagaaagttaccttcatggatctaggttctagcttgtaaatggattggtgtacatatgttgtacacccaaatattcttaaatgtgttaggtttggggttttgttgtaccacatttcataaggtgtttttaagtctatcactctgtttgggcttctattcatatggtatgttgcgattgttagagcttctatccaaaatggtttctctaacctagaactaaagagtaaacatctaactttgtttaacaaggttcggttcatccttttagcagcaccattttgctctggggtcttcagtacggttctatgcctagttatcccaaattcttgacacatcttgtaaaatttagagttaacaaactttaacccattatcagtcctaagtttcttaatttaaagatctatttggttttccacatgagttttccgatttctaaactgttctaggcactcagttttggttgatagtaaataggtctaaatatacctactataatcatcaactattgaaagaaaatattgcttactgaagtgagtaggcaccttgtatagtccccaaagatcaacatgcacatattcgactctctttttagttgtgtgccttgatggagtgaactttagcttatgttattgccctaaatcacaagcttcacaaaatggtaaggcgcaagaatttaaattttcaattataacctatttgagcaattctttgaggccttgttcactgatatgtccaagtcagtgatgcaacaacttcatatttgattctagtcctttcaccatactagcttctccagctgggacaatttctccttggagaacatataaccattgaccaaataacctttggtgatcctcaagctttcgtgtatggacttgtatatgtacccctaatctttaagcgcacccagtgatttgaggttttgtctaaggtttgggatatgccttagattcatcggcaccttgatttttccatcatagtatttaatggcaaccttctcggttccaatgaccctgatagagtgatcatttcccattagatatctacctccatcaattgatctataatcaaaaatgacttttgactcggacacatgtgataagtgcatctgaggtcaagaatccactccctgttcatatatgactccaagatagagaaaaactctccatgcgtggagcagtcatcactatctttcatgattgcagcagaatccttcctggggtgattgcgccaaaagaccttcctatctccattgtgagatttgttgaagccttgtttctccatgtacttcttgcgaaatcttcgcaagtgtccagacattcaacaaaagtaacactccttattttcttctctttggacttcgatcttgattgagagtgatggtgtttactctttgaacttactctcttgggtaatcttcctctggccaaatacacttcttcttttttggattccttctccaactctaattcaaaatctttcgacttaagtgccgcaagtacatctgtaacgccctaatctatagggacgccacatgtgtgattttataaactagtttaatactaatagaataataaattattaaaaaccgtgataatattaaaaacttgactaaaataaaacactaaaaactganattataacggcataaaaagtgtgttccgagaatttgtgttataaaaagttttgctaaaaaaaatatatacgacaaccatttaaacataaaatcaaaatacacagcacatacacccagtccaaaataactcttggcaacttggcacggaggccggtgaggtcaacatgtacattgctggagaagactgtcacctcatggttgatctagctttt

SEQ ID NO: 79707 - DNA, 2505 bp, Cannabis sativa
gtaatcttatccactccagtgctccacctcaatccttgaaacatagctctcaccaaagaaaaggactcaattcagttcctaccatggccacccttcacttcactccatctccttcccttcttccgccgagacaaaggcaccccaacaaacccatcacttccggctttgagctgcatctacggcggagactcactccaacctcacagcgtcgctcatccttgaccgtacgatcctacaaagtggtggtcgagcacgataaccagtcgaccgagctggaggttgacccggacgagacaatactctccaaggccttggactcgggcctttcagtgcctcatgactgcaagctcggtgtgtgcatgacctgccctgctaagctcttgagcggttcggttgatcagagtgaaggtatgctgagtgacgatgtggtggaccgcggctacgcattgttgtgcgccgcttatcccacgtcggattgtcatattaggctcataccggaggaggagctgctttctcttcaactagctactgctaatgactaaaactgggttcttgggttgtttagtagttttgatggtgtttatttaaattgggctggcttagattgttcaagttgggtatttgatatgtaataacaagtatcaatttttgatgacattttcgaaatttatcatgttgttgtgtgaggtcattatacatgatgacactaaaacaaatttataatataattaagaaatattacatggaagagatatagctagctaagttcgattgacagtgtaccaaaacgaaagcaaattatttctaatacaaacatgtatttgttaaatctttaccttttctttttcttaagatctgaagttatagatgggaggacccaatttcctggggttcctttgcttaattttcacctttacattaatcccattatcaatgattgactgaagcacaagtccaagctttccttccaacttgtctcctttccttggtgtataaactacatcatgtatatcatcagccaaagctctctgagcaagaactgaccctacagcagagcaagctgctgaatttctagttgaagccaaatcaaacttcatatccttggatattgaatgtgccacaaccacaaccttactagtggcacgatgaacaatgcaggcacgaacagaagcatttgatataaaaatgtccaagcagaagggttcatggtaaggacctgtaagctgattataagtgggattcctcagcttcttcttcttgtcattgtaagtagtgtccgtctgatccaatgcagtaaaaccattatcatacctgtttctcatgacactggaaaaatcttcagaattggaggccagatttggagattgggtgtcccttactgtttcttctgaaccatattgcttcctcttattgtcttctaaatcacaactgttcttggaagaagatgggttgtcccttagtccttttgaatcattcttgttccttttgttctccttaggatcatcttttttcttggacgatttcttcctacgatggaagtcaaaactgtactcttcaaattctttcgaatcacgatcgatcttgtaaaaaaggctaccacggattctcaaattatcaatatcatccatatcagggtcagcttcattaaatggtgaattgctaacacccaagtcaccaatccctttcggtgatgaacttgttgtggctgtaggttcttcctttgttcgccaagcttgggccaaacccgatgaaagttgccaagaggaatcatccacgagctcaatgtcataaccaccaaaataagggttgcaatcagggaacaagggagaaagatggagattactagaacaattagtatgagctaattcactttccttatccaaaacagacgaggatgaggctttggagaaagaactccaagtggttgacaacaaattaggtttccccttcaacacagagctgattcctctccttaagaacattactaagatctaggtaatcgaacttatatacgaagagactctcttgggcgaaacatcaaacacctgatatgcaaagctcaactctggatcaaacagtaaatccttcaattgtcaaataatcttacttctttcgtgaacttttggctctttgttgttgttcctacaaagataaatgtttttgaacgtgaatcttaaatctaattgtagaagaggaagaaatgaaatatatgagagggggaacctagtttgattttgatcttaagtagccgaaatccttggaggtgagggttgaaggagagctttcacagtagctaagtcgctatggctatactgactacttcgatatatttttgggctttttttacttcttcctgttacagaaattacaaattttataagctttttattggtgaaattcaagaaaaaaattataaaatatgaaaaattaaaatagttaggctaattagttaaattttaggtagtcataacttcttggttatatattttttaaaaaaaacaaatt

SEQ ID NO: 79708 - DNA, 3665 bp, Cannabis sativa
  modified_base (3548)..(3553): a, c, t, g, unknown or other
acctctcaattagaatataatttatttggtcctaagtgtattcttagatagaggttctactgtatattcattgtacgtatactaaattaccaataaatattattaccatatatatatggtgtcctatagatgataatattgtcattaaggtgttcacatttctctatattagcgtgtgcataaatcgatccaactcaatgataaccaattgatccaatcacaaccgaccgtcaaacattgaatatccaattataattgaatcggattggatgttatttttaaatatccaattggatcggatcgaatgttggatgaagtatttaaaaatttaatacatccaacatccaattaaactaattagtattttcatttagtttgaatatgtaattagattttataatattatacgtaaaaaaaatatatgtatacataaaaattcataacattaaaattttacttttttttttggattggataaatccagtctaatccaatacatattggacctaaaatattagatggatccgatctgatccaaaaaatactagtctaaaatattgaataaatctaaattaaaccaataaatatatattaaatacatccaacagatagaaccgatccaatattagatgttggatcgattggatgactgaaatcaattggatcagatcggatggtaaaatctaacatccaatatataattagatcggatctggataaacctaaaaatattgaatgtgatccaataaacacccctttaattagatatatacatatgtcagtacttttcagttaggattagcagaatgtgttacttctcttttacccaaatactttgtataaatactcttctttttcattcaataaagttcagatcattattctctaataggtgcaaaaacatgctataatgtataaggaaaaatgacacaactcaaagaataagaaaaaaaaagaaaagggaatagtacaaaaaggaagaatttaaaaaaaatatgacttttcttcaaataaattattttattagataaatcttaaaaaaattaaaaaatataacatccttaagataattaattactttatactttttttctcgtacttttttaatgtttcccctaaaaaactttttcgattaaaaaaacccatatctttgcatataaatcatattaaaacacataaaatgtctaatttaatagtgaatatagcataatgtagtaatacattgagaaatgtgccagatattattggtgtaatttattagtgtcacatattttaaataagagcattactattaagtgctagtagtatttttatagaaaatattccacgattagttagtaatattttgtaaaagttatttttttaagttatatgagactcaatacttaattacaccgattgcgatttaacactgaggagggaattagacaccaattaattatatcttttagcaattctctttaaataatgagtatattcttatggggcactaaggtgcctagtatgacatgacgttttataattagttagcggttctctataatatttattaaattaaaataagtgaaatctgattaggggtgatcattagactacatccaatatttttaccatttaagctgatccgatccaattaattttagtcatccaatcgatccaacatccactggatattgaatgtagttatatctactggatgtattttatttctatttattggtttaatttggggttattcaatattttagatacctagaatttttttgatcggacccatccaatattttaagtccagtatatattgaattagactggattcatctaatccaagaaaaaaaaaattaattttaatttttataatacatatagattttacgtatattatataatataaaatctaattacttatccaaactaaataaaaatactaattagttcgattagatgctggacaaattggatttttagacattctattcaccatctagtccgatctaatggatatttaaaaataacatccaattcgatccgattacaattggatattcaatgtttggcagtccgttgtaattggataagtcggttttcattgaatttgatcgacttatgcacactcctagacttgatattaaattacatcagtaacaatattacaccttataacagtgttagatatcatggggtgccctttagtatttttcttttaaataatataggaaattgttaaccacttacaatgcgccacatcgctaaccatctccaatgcatagaatacaaattgtgttaaatatgacacaaaaattaataaatgttatatttgacacaaaaaaaaattagtaagtgctatattttgtactctttttgcaattgtattttaatacataaaagtaaattaagatataaattgacaaaaaaaattattattaataaattaaatatattttttaaaaataacagcaattttataataaaaaagtggtatttaagtaagtcgttaatactaaatagtaatgatataagtaaaaagatacattaattgtgtattgaatttggtaaaatattagaaataatttaagatttactattttttttgtaattttttatatttttaagtttaattttttttttatatattttttatgattttttataatacaatacaaaaactacatgaacgtaacaagaaaataacatccaaacaatattaacagaaaataaaatacaaataataaaaaatcaacaataaatcaataagaatataatatatataaaagtacattaaaagaccgtattttttgtaaataaaattttaaaaatcgaaaaaatatttaaaattctgtacaatcatatttttgtaatttttatattatttttgtattttttgaaattatttcaaaatattatatttttgtctaaatttaattagcgtaactatttttataaaaatattaaaatatagaattacactgcttattaattctttgttttgtgagaaatatgataaatagctaagaatagtaagttttttaaacatttttcttaattaaaaatttaacaaaaacacatggtcactcgtcagtgagtgagtgtgttgggcagtaggtgaggttagtgaggtggcaagggtgcaagatacagaattttgcatgcattgattcaggctgtccacgtcctacatttattccacctggctgtattaaattgttttctgcctttcttcaagttcaacaacaacacacataaaagaataaatgtttcttacatattttatagggtaaatagtattttgaaatttttgttttgcaaatgttagtaattggattttctgttttgttaaatgataaaatagactttgtatgttctaaaatggtaaaaatatgactctgagtttaatttttgacaattttttttaatagaaccaatttcctaatacttttagataggaaattgtaccattttagatcagattattattaaattttattttgataaaaaaatcagttcatggtcctatttgtaccattttaaaaaatacatggtctattttnnnnnntaacaaaatagatggtccaattaataacatttgcaaaacacgggagctaaaatagtatttaccctattttaaataatataattgagtattattttgggaaaaaaacaggaat

SEQ ID NO: 79709 - DNA, 1490 bp, Cannabis sativa
aaaaaaaaaagttctttgttggctatgatggtctccaaaatttccttgacatctttatgttgtaatgatatcaaagaacgaataatttataagtgttttacccattattccctttcaattcaatgtttttttttctctacttttttgataaaataaagaataagaaacaacccaatatgatgtcgttttctgaaaactaagaagctaaacaaaagaaaacctctcctcccgccgatcaaaaatgccggcgacgaagcccaaagcgcggtcaccgggctcggaaagtatgggcactagggtttggctctactcaatcttgctcactttgcagtacggcgctcaaccgattatctccaagagttgtataaggtacttcgacgcctttctctattttttttgacaattttaatcacttcgttatttaacattacgttgttcctgttttcaattttcgtgtttttgttatttcggattgtttgaattaattatacctagattctgatattcggccactcaattgggatccaagttgagctgggttttcagttttatgtatgtctttccaaaaaaattgcttctgatttcggattgaaatgagagattgcaaaccttacgcggtgcaaaaattagaattagattttagaatcttgttagtattcttagttgggtagattgttttaaaagtccagctaattagagattttgtttgtgtgtttgtatatattcgtctatataagaatgtgaatgttgttagaaacccatttgaataagtgaacagaagaatgttgtagtaagttttattgttcttcatattcataacatttatgatcatgccaagatatttgcaggctttgtccgtttatttttaagtagaatacactcatgatttatatgatactgtataatgcaaatcattaaatagtatatacttcattgcagacgagatgttattgtgacttcatctgttctaacatgtgagattgcaaaggtaattcttctagtgagcagtaaatttgaatggatttgtgttttagacatagttgatcatgttataagtttcatgttcgaattcgttattaggttattagtgccttgtttgtcatggcaaaagacggtactttgaagaaagtatacaaggaatggactttggttggtgcactgactgcatcaggacttcctgctgctatatatgcattgcaaaacagtttactgcagatttcttaccgaaatctcgattctcttacgttctcaatgttgaaccagacaaaaatattctttactgccctcttcacatttttcttattgaggtatgttgcgaattctatcaccgttaactatcataatttctttggcatattgaaccttacattaactgttacctatagaaggtataaaatttacttattcattctgattttgctgtcatgtttaacttatgaaattgctgtcatatctgatcgaaagcttattttgctcattgctgcaactta

SEQ ID NO: 79710 - DNA, 2634 bp, Cannabis sativa
aacaaacaaaactataattaacaacacacaacattaatataaaatagaaatcctactgaaatttttaccgaaatttcggcagcataacatctataaacgttcttgaaatttttagacatgcaattaatctattaaaacatccacaataatacaaacaaacaaaactataattaacagtacaaaaattaccactcatccgaccacagtacttttattggcagaacctacttcactacggatgaatatccaaaatattcaaactcttctaacatgcatattctactttcaccgcagtcatgcaatcccagaacttactttactatgaatgaatatctgggatattcaactcttctaggatttataaaatacaaagaaacaaagtttaagtagcttactaattccaaactagcgttcaagcgaattcttcgaaagattaccaccataattaagcatctaaacaaaattagcaccaaataattactaatagaaaataagaacaatatattattattaccattattttaattatatatcaggaaggaccaataattattaaataatatgatcaatgaatatttacatatgcattgtggtctcaaaaaatatgtgaccaccaatctctatatataaaggagaagtatgaaacggtgacgtgacactataaaattattgtgatctcactatctcttctctccttaattctgtctttttttttaattttttatttagttaataatattaattattaattaataattctcctcatagaatctcttgactcgccaaaatattttacgtcaacttacgcatctttttcaagatctctgttgtcagccatagtgtaaacagataatagaacttttgagcttataacttaagataatgtttttcaaaattttagtactttattttgaaaaatggatgccacagttgacttcagaacaaatagctaggaataggttcgactcgattgaaaacgggtgaaaatgggctaactcgttccaaaaaaatattgtttgactaagttatctcggttgctagcagaaacactctaacgactactagcggtgcgtcagacctccggttgaagcgattcttgtagcataggatatgcctcgtatatataatattgctatatttggctttgattaatttgttgtgcacggaagcagtcaatataaaaagataacgataaatatatatcaaagcggtaaataaaaatacacagaattacgtagtttggcaatttgcctactccacggaaggcaacttaattatattattaatctgaataatatagatactgaattcttactaataatatctctcaagtgtttctcaaagtatttcctaaagtttggctatacagatgttctctctcaaatttcccaatgaatctgattgtacaaagttgtacccaaaatattgcttttcattgagatgcaaatcctcttttaagagctccatatttataaaatgaaaacctcaactgctaaccatatataataaatgaggtagttcatcttctaacgatatataataaatgagagagtatgcttcttgataaatgtgacaaataacaagtctcaaaattcttgaaagttgaactaaatttttgcaactctaagacaagttgattctgacaagttgaaccatatctttgcaactccaagacaagttgacttttgagctaaactcaacatttttaagtgaagtgccaaatatttttattatttttgttaggtgggtctctcaataaaattgttcactatctagcgaaaatatcctattatcttgttgatcatatttttataaaagaaagatatctctttgaattttctttatgtaatcttgcaagattgtcattataaatgatttgaattttagaaaaaatgtgcacaccaattttgttaaacaattccttcatagactgatagtaattactaaataagaacatatatgtatatatattgatttaaacaaaaacacaccaaaattattacatgccaacctaatgggcataaataaaataaatttatttatgaggaggtagaagtgattgttccaaatcagttgaataagttgtagtgttgtttaataaagatttgggctccagcttttgaatatcattatttaaagtctcctctctaatctcttcaaggtcttttgcttttccccaaagcacaatatatagaccaataatcacagctaaagcacccaccaagctggttataatattattaaaaaaaaaaaacataagtctcttagtaacaaataattatattaagctaataataaattaaaagaaagtagctaatatagtaattagataaaggaatattaatattggtacgtttatcaagattatagtgattatgagttaggtctaataaactttaaagtatatatataattatttcacaatggggtctcgtttgaggatttttttgttattttgcttttgctttaattaaagtaattaattttttttgtttgaattattataatgaaaaaataactgaataatttaccccaaaacaaaaaagagtgattagataattaataaaaatatgcataagacttgtttggattgttagctttaattcatcttgcctttaaaaaataataaaaaaa

SEQ ID NO: 79711 - DNA, 1725 bp, Cannabis sativa
gcttcatgtatcaagattatgtagaatagaatttggggatatggtcttgtcaaaggtttatcatgttagtcctacatttcttcatgtaaatatatttactttagcattatcatacttattctatttgtatgtaatttatagcttgtgatgttatgatcaagactgataccttgtattttgcacatattcaaagccttcatgggaaagcagcagatgctttctacaagctcaccaattctaactcagagatccaagcctatgtcttttgatgatatgtatgtttctctctagtgctacacgtttgtaaatacaaaaaaccttacttttgtagattaaagaatcttgataatatcggtatgagattacgtcctattgagttcttcctcgggtttcctactgactagcacagattatttcctactgaatttgatgatgttgaagatgagcttgagaaggtaactaacacacccaattgacagtttatttaagttaaaacatagttgtgtagtttctttgccagagccttgcatttgaaaagatcaatgaatgagaaaaatgcagaagtttcaaatggctcaaaacgaaatggataactgagattgtacttgatacaacataattgtactatttcacttatgatcaactaatagcagagaagatattacagatcggatcagatcaagcgagctggcctgtcagcgaggacagcgttctgtcgccttctctgaaagtgttcctgcaacatcagccattgatatcatgaacattgttggttgttgattcaatatttcttatgttttcatataaccgacatgaaaataggaaagcctgaattcattgctactttaggtgtgtagtattattagttataagccaacttagcattgacataagaggctggatcttaagaataaaagccaaaacaaaaggccaggctgtcttcttacctaccatacagaatctacttgttttggatttttaagttttaataatggaatttgatccaatagtcaactgaataagaacatagtattctatgtcaagagtttccacctcgtggaaatcttatctttataacaagataatcatgaaacttatgattatctatgtagccaagcctgtcagtcgctattgctgcaatcagcatgaaatgtataggcatttacagataaaagaatcttcttgtatataccatctgactttaaatatcttaaatatacataatgataaagaaattaccattaaatgtttgattttaactttaattgtcacagataaagtggcagctctcttttttgatgaattatgaaaaatatcaatttgcaatatatatatacatttatttatgatacattgtaaagactgagaaaaactagaaagtctaaacatatatatacctcgaagtttctcaaagtctgattcttatgtagatagatatttatatatgatggtgatgatatggtatagcattaacttggggagttagttgacttcttctttcatcttttttctatatataaaaagattttaaaatcaaaaaataaaaaaaaaaaaacaagatcagattatatcaaaggattcacatgatgggatcagctgcttagtcatccacgccttccaaaatcaagtggccaatttactataaagacaccctttttaatatcaactctttatatctctttgttcatatcttccaaacttgttagtttctctctctctctctct

SEQ ID NO: 79712 - DNA, 1351 bp, Cannabis sativa
atggcttccacctacaaaagtaaaatatggaaattagaagagtcaaaaccatttaatatcatatgttcaattcccacctctcttccacatgaaacaagcttcaaacataaatggcattctcaatgttgtaataatgtgtacctgctcagttaaaaattcactttcaatgaaatctgtcaactgcacatctttgcttctgtcagcaacctgttaaagtcaaatgaccaaagattaaagaacgtaggctaaaggaatccaaatatttcccacaaactaaaactgaaaaaattataataaaggcaaatcccatacgctgtgcaagtggaggagcttctcatttgtcagcttctccagagataatgcaagctccattgctgatattaagagaaataggcaaggcaagacgacctagttagatggcatttaattccaaaacatgcagaaactaagattcaaataaactaggttccaaggaagtactatataaatttaactctagcaccatttaatgctcataagttatagcatcatagtctaactcaagaccgtaacatctaaagaaaagtcaaaggagactaaatgatgatgatagataaccattggaatagtacaaaattatgacatagtacaaaattatgacatagttttcaatggtaggctatttcccaatacaaaggctatcattaaaatgttgtggtacctactggtgccacataacaatgctttctaatagatagatagatagatacaattatatgcatttgcaactaagttcaagcgacaggtcaacaagaagaaagttcttattggatgcaatactagtttaagaaacagcaataaatgggttcacatcatgcattgtcagttgtcaccacaaacagatatacattaggagaaaaaaaaaacactaaccaaataaagcatctcctttttcaggatgatcaaactcagaatgaggcatcaatatagactgcaactttacttttccaccacgcttgttctgattaaaaacaaagaatattagaaccttatctttctagtactaaataaaaggcaaaaataagtgtaaaccgacaacaaaaaactttatatgaaaaagtttaaaagtcttcaaacacctgatattccatcaatttctcagcatgttccctttcttcttcactagattccttaaagaatctgcagacaaaatgtttggacaaaattaacaaaagggtgaccaaaaaagcctgaaagaaaataacttctaaagaattcaaatacattacttggcaaaacccttgagcgcaacgttatctctatcgaagtaggcatacaaggcatggtaagcgtaagaaacgttgtactccac

SEQ ID NO: 79713 - DNA, 3576 bp, Cannabis sativa
aataataataataataacataccattattggttgaaggtgcttaccaatatagtctcaccagaattcaatttatgagaatgcaattcaaagacttgtaaatgctattgagtctttgtgtggagttttatttatatagaggatttacaagagatgaagctatacataatatcactgtaacataatttacaacttgcaagaacaagtaattatattaaactaaaaaactaactcaagacactaagtaataagattaatttctctatcatccctcctcaagcgaaagagtattgtacacacttgaagcttgtgcttgcgatagtcaaaaagatcggtagacaccgactttgtaagaatatcagctatttgatcatgagctagaacatatctcacttcaacttgtttggtcaagatttaatcacgaatgaaatgtaaatcgatctccatgtgcttggagcatgcatgaaatactgaattcacaactaatgaagcagctccttggttgtcatccaaataatttgaggagaggttagagtgaaatttagttaagaaagaacataacacaaccaattcacttctgcagctgtgttggcaagcacagaaaactcgcttttagtatttgatcttgcaaccacctgttgctttttgacagaccaagatatcatatttcatccaaagtagactgtgtatccccttgttgagcgtctctcattggggcaacttgcccaatcatcgtctaagtaagcatgtaaatagagtcttgtttttggtctgacatgaggcccttcatttatggtacctttgagatacctaaatagtcttttgcaggcttcccaatgtatggtagttggggcatgtatgaattgactcagtttgttgactatgaattccacatctggctaagttaaagtgagatattgtaaggctcctaacgtgcttttgtagagagattgatctgtaaagggttctccacaggtaagagacggcttgtgttgagcttgtaggacttagactaggttttaatccttccagatccaactttactaacatattagaaatatactttgtttgacacaagtatattcatgtattgtcacttgcattttccaccccaaggaaatagtgtaaggagccaaattttttgatagagaacacctgattcagttcaccaataaggttggagatatcatcttcattgggacctgttactattatgtcatctacataaactagtaacccaatcaaggtctgtccaaaaccttttatgaagagagatgtgtctgaccgagaggctttaaaccctttggtgaatagggtttgcttcaacttaccattccaagctctgggagcttgcttaagaccgtacaaagttttgtgtagcttgcagacatgagttggcttggtatcatccacaaagccaggtggttggggcaaaaacactgtctcttttaacaattcattcaagaatgaattggaaacatctagttgattgattttccaattgttagattcaactagggtgagtagatctctaacagtggctggttttacaaccggactaaagatgtatgtgaagtcaatacctagattttggtggtattctttagcaataagtctatatttaaagttgtctattgtgccatcaaagttgagtttgattctatgcacccattttttgcccactaaacgcatgtgaggatcataaggcactaatgtccaagtaccattcttctttaaagcaaggttcttcctttatagagttgaaccaccttggattagtaagagcttgcttgagagttgtgggagccttgggtagaatgcactctttaagaggatgtttggtggcatgataagatttaggcttttaaactccatatttagatctggttgtcattgagtgatcattgacagtgggtgggggactgtcatgtttggaataacactggtggatgcaataggtattgttgtagaagatgttgaaagagctaaagtggatgttgcaagaagtggagtttgtgctgcgggagctattgttgtgtctgtaggaactattaaggctatagcttcaggatttgtggtcacaggagatgattgattagtgccaagctggggtggcacatggacaacctccataggcaatggtgagaagaagcagtagcaggctcaactctagtagtcacataagttgaggaccttaagtggtaaaataggagcattagcatctaagggagaagtgtagaaacttgtggttggaaatagtgatttaggagagggagtgcagggaagtccaactcattgaatttcacatttcaagctatatagattctccctttactattctgagatggatagcctttatgatgtagtgaatagccaacaaagatacacttctctgatctgatgtccaacttgtgtggttgataaggtcttacgtgtggaaagtaagcacatccaaatggttttagacggttgtaatctggtagcttatgaaagagacatccatagggagataagtcatcaataacatgggttggcaatctattgataacaaatacaacatgctgatatgctaaccaccaataagaaaaagctaacctagattctacaagtagtgaagacctgtttctattatgtgtttgtacttttgttcaaccctaccattttgttcatggtcatagagacatgcgtgttggaactgaatcctatgttgaatgagaaacttagaaaaggatatgtattccccaccccaattggactgaatagttttgattagaaggccaacttgtctttcaataagatttttaaattcaagaaaagaggggtattcttaggactttagggtaaggagaaagatccatgtaaacctactaaaataatcaatgaaaattatgtaatatttatggccttctattgatgaaacatgagatcgagggcccctaaagaattgggtggagcagttctaggggttgagatgctctcgaattaaaagttgggtaaggcagcttatgaatttttcccatgttccaagcctcacaaaattttaggtttttttaaagtggttgaaatattaattttagatagtgttttgtcaagaattctaggtgttggatggcacaattttgagtgccaaatattgacatcagagttagtttgcaaaaaaaaaaaactttcagaagaataggaaaacacatctttattatttgccgaaagtacaattattttcagctgatggaccaactttattacaatttgactaacaagaagaagactctgaatctttagacaaacaagaaggagacactgagtattttggcaaggatgtggctagatgacactagagctccacatatgaatcataataggagatttttgagagcatgtagagtctattcataactctccctttgagcaaacattcagaactggcccaggcaccaggtcaacatgggcgataggtccaagttgtgcccatcaaatgcttttgtttgattcccgaaaacactcgtatatcagttatcggtgaaaatagagaataagctcaaagccttctcaaaatgttttttggaaatggcccatgt

SEQ ID NO: 79714 - DNA, 1510 bp, Cannabis sativa
ttttttttttttgctttctaatggagatcaacaagcagcaaaagaagaagaagtggtttctaccattagtactctctcttttgttatctactctacttgtgtttattacagttttcacttctttcagctcgtcttcctcaaaattgtacaagacccctgtcaagaaagaggtccctcgttttgttgaatccaagcttaggatttctgatacttccaaagacccaataccaaggttggcttacttgatctcaggctctatgggggatgggaggagcttgaaaaggaccctgaaagcactgtaccaccctagaaaccagtatgttgtgcacttagacctcgaggcctcggccgaggagaggttggacttggctgagtttgtgagaaaagaaccgctttttgctaagctgggtaacgttaggatgattgtgagggctaatttggtgacctatcgagggccaacaatggtgaccaatacgctacatgctgcttctattttgttaagagaaggtggagactgggattggtttatcaatctaagtgcttctgactaccctttggtgacccaagatggtacaaactttagttttctttctttattttttttctttttaatttcagtttctaaatatagattgcttggtccacttgatctgggaaatgatggcattttgcttatgtgcttaatctaatgtaagaaagaactgggttttacttttttattgcaattgaggcttgcattgattggttttttgagtttaaacttagttaactctgttaccaattttggttactagttactacctgtgtttgaatgaattgtttattagtctcctcactggtttgacaagtgtctagctagtttaaacaactcatctctttctattggagcatttggcttaatttgacattcttgctcttgtcgtttatagtatttttatttcctaaaggaaaagtgagagaagtgggtgtgcctctctttctatttttccttttcttttttcatttctttctatttattttagtgatgtcattcttgttttgcccagtagatttctcattgtaatggtccatagattttggttgaatagatgagtaggtaggtaaattcaatgattaagaacaaatggttaacttctaattccataattttgtgcgtttatttcctgtaacgcagatctgcttcatacattgtcaacaattcctagaaaccttaattttcttgagcatacgagtgatattggctggaaagagtaagttataatcatgtattattttacgttgcactatatgtgttcaaactacaaggctgcaaatgaatgtgttatattaattggagctactttcaggtctcatagagctagacctgttataattgatccaggcttgtatagcttgcacaagtcggatgtattttgggtgccggagaagaggagcgtgccgactgcttataagctgtttacaggtgacattttctgtttcctgcactttgaatgtacctttttttcccttt

SEQ ID NO: 79715 - DNA, 2377 bp, Cannabis sativa
  modified_base (40)..(64): a, c, t, g, unknown or other
tcatcgttttagaaagtttatatttagggtgttaatcaannnnnnnnnnnnnnnnnnnnnnnnnctcgtaaaataatttccaacagtgatcgctccacatcaggctaaggacccataggtctgcactcccaagtctgagcgcttttggaagctcgctcgcggtccattttctaagaaacaacttgagggatccaaacatccattctgtagttcccgaagtcaacatgggcgcaagactatgaacccttcctagaggtgacaactattactcagggcacttatcttcgtgaatgttttcgttcttgccatttgtcaaatattgatgtctatgtcactaggattaattttcgggcaagcaatagtgtagtgaaaaaaatattgaatctcatatctcatatgtctctctataggtacctaaaaaagaataaaaatatatatgattcaaatgggtttaggaaaaggattttttttgtaaatatgtgtttgagatttgggactgcaatggggaaaccctctttgtacatgcatgttattttattttctattttttttttttaaaaaaagtttattattgtatatatatgattaagctttgggattgcgatgaaaaaagaagaaaatggaggttattttttttaaaataaataaataaaatacaagtcaaccaaccaatccgatggactcaactactcatgatctaaccacctgtgaaccctatattcgcgaacttgtatccattttatgagaggtatgaatgttattttcttaagtgtgaaactcgctaacttaaaacatgtccgacattcagccctagttaatacgggagtgtggacaagggcatgaggcttaaaatggagcaatggttaaagagttcaatcatcaattttaactcatttcctttctacaacttatcaaacgcaaactcaatatataaataaaattagaacaccagaaagccatagtggagtattaaaaaaaattatattttcttattcaattaattttaaaaatatagtttgtaaaattatatttattaaaattaatgataaatatatcattgctaaatggtactattaaacactattacaaggtgatatcttcctatatcattgctaaatggtactattaaacaccattacaaggtgatatcttcctattgattactattgataaatgtaggattcaatattaaattacaacaataaaaatacaatatttgcagttttgtattgtcagttacctttggtgcctttttagcagttttattgtaaagttaatttaatattttttttttgaacaaaagatgatttattcatttagaaactttcaacatcaacaatagacataagttcaaggggagcgttttgctcacaaaagatacgatctgaatggaaacaagatgcttgtgcaacacaataagcaaccctattaacagactgttttacaaaatgtaaagacacatgattaagacaagacaataaataacgacaatcttgaaccaaaaaaccaaattgagaaagcatttggattgagcctaggacaagccgcaccaccactagcgcatctgtttcaatctccaaatttaatatttttttgaaaacatatattctattttttttttgagaaagacttatattttaatctgtttttattttttaattaaaaaagtaaaaatattttcaaaacatgttttgtaaaaatttttcactttttaattttaaaattgattaccaaaattttgaaaaaaaaaagttaccctcaacaaatttttaaacatatatattttaaaaaatattatgtatatatatatatattttttttttttgtattttctttcattaatattttggacctcaacctcaatcttggacccgaccctgagcctcggtaccagactaggaccctggacccagcctcggccctcagccctaccaggattgtgactctagacccaaacctaccgggccctagaccaagacctagacctggcccccaactcggactcgaaccttgggcccagactcctaacctggacccgaactctagccccaaccctgcccctggggcctggactcgaactcggaccttgaacccaaacctagaccccgaactccaccccgacctcggccccgaccacaaactccgacccgggcctggacttggacccgtatcccacccccaaaccctcaaacccagactcataccctgaacccccaaacctagacctgaccctgaactccgaccccaaccctaaacctcgatcgaagaccagacctcaaatcctagacacaggagtccagacccaaactcggagcccgaaccccaaacgtagactatagactcgatttaaataagaataagaaacaaaaataaaaaa

SEQ ID NO: 79716 - DNA, 2938 bp, Cannabis sativa
ggaaaaaatcaaattaacgaatcaatcaacaaccatatattacttcccccacagcatctagaaactcttaacatgtttatatatactaaaaatcaaattgtccatgttaagtagtgatgaccaaggtactacagctatccttcaccccacccctccaaagaaagaataaaaaagacaaattttataagtcaaaagttcctcaataaatcatgtctcactcattggcattattgaagttccataattctaagtgaacccaatgacaaaagaatgccaaagattaaacagtgaaatgcctcagcatcccagatattgtctaagttcaccaatgtcataaaagaatgccaaaacattaaacaggaaaatgcctttgaatcccggttgttctccatagaaagcaaactttcttggtcggtctcctaactaaagatgtgaacatgacatggtttccaaaaaaaaaaacccaaactctgccaatttctcaagtttaaagcaccattgacagtctctaatgataaaatttgccaaaatggtatgtatgagaaagtgaactttgcaaatcaaccgtgatcataagggttgttcaattgttctacggaccccaagtatcatagttgatcataaagcaaaccatgaaagtcattaaagttaggttaggtcattcgtcagcaaccctcttatttgctaataagttcaaactagttttgctattttctgtgactcaaaaactaagacagtgtaccttaatttcatacataatatacaaaaagtaaatgcaaatcataatgaacttaccttgttgtacaccacgaacagtagctgtgagaaatcgtgaattggggcggaccttaggtttaggttgattaagataaacagagacaccatctttttcagcttggcgccgcaactctgctgcttctttcataagaatagcagctattctgttctccgtctcaagatccatttaaccctaacaagcaattttcaactctcttttttccccctaattcaaaatcatatcatcaaattcacagcccccacaacaaaagactgaaaatttagagttctcaaatttgatttgacataataacactagtccatctatctttattaaataattaatatatgaattttgaaaaaaaaaaataattaatatatgacaccatggttcagacatatataatgaactaaaaaaagcacagaaatatctaaaaacctctatcccacaacaaactaatgattcacagttttaagcagaaactatgctaaaatggtcaggcatgtgatttgctctcacaagatctgaggttagagttaagcgggatcctagttccaaaaaaaaagtttaaacagaaactagaatctacaacagctatgtaaagcaaagcagcaaacaaatattaataataataatcataataataaaaaggctataaccagtaaaaaaaaggatcaatacagcatagaactaaacaaacaaacatatcatatgataaatcttaaaattgaggaagaagaccagcaaacaaacaaacataagttttagaaaacaagcaaaagatacaaaattttcaaatattaaaataaatttatcgctgtaacacaaatatatttacacctgaaaacataaaacatagtacataccctgaggaaggagagtgacctccgtcaatgattctctgtgctttggccggcgctgccgctggttgttgcgagagaaagaggacgacgactgaggagaaggaggaggtgacggtgcttgatggagagaagcagatcgcagtatcgcacgagagagagagagagagagaaggggctaattcaattttagggttttgtcggaaagtgaagactcaatcgttttttttgaagagactctaaattttgaaatctttcttatatatataatataaattttgaaattgaatattatgtctcaaaaagattatgaggatatcattttgtaccaatgtatttttaccgaatgtattctgtggtacattagatgggtatcaggtatattaaataagtatcagagaatgtttttactttttaaccctaattacccctagatcaatctcagtcgtcagattaaataactctctcatctgatagttgtcgtatatcacgaattacaatccgtgaaaggaaagattataataaaattaaacaataaacaataatgcattacacgaaaataattaaaaacatacatattttttaaaaaaaaaaaacaaatctaagacgtgagactttatactaaaaaatatattttaatatatatgtattaaattaaaattgtatttaactaaaataaatttctatgtatactatttgtgttatattttcaaaatttctaatttatccttttaaaatgaaaatacattgaaggatatatttggtaacatttattttaaaatttattaattacaatagtaaaagtaaaatttttgttattaaaattttatttttaaaaaataaaattgtgttctataaccacttttgtttttcaattttaaaaacagaatacaaaagtgtgttttgtaaattttattttatttttcatttttttataatatttaagttgggtttgggtctagagccggagttcaggttcggatccgagctgggatcgaggcttgggattcgagtatggggttcgggtctgggtcgtggtcggggtttgggtctggtggtctgggtgtcaaggtccaaattggcgtcaaagtccaaaatattaattaaaaaatttgtttaaaaaaaattaaaactttttttttcaaaatttttaaaattttaattatcaccatagttttaaatagaagaaatccccccttgaatcctcgtcaggatcccatgacggtaaattctaagactagtgtttctcccaccacaaagggacctaccgacctacataacactgtcaatctagccaatg

SEQ ID NO: 79717 - DNA, 1816 bp, Cannabis sativa
attgagatattcatgaaccactctattatcatctcgacgtgtagattttggcttgaaatatagcaagcccatggaagccacagatcttgaaaagcccttataagtctcctatcccaatccgaaagcctaagcccttacttcaaaagtttcatcccccacataagactagtccacaaatgagacaaagcattaatttctatcaatagagtcatgtatagaaccatgtggaaaatatttatgcttcaaaattctagctgcaagcgtatccaaaaactgtacgccacacttgcttggccaccagtccttgattgaataaatgaaagtcttgaaatcctgttccacctttcaccttagcccaacacacattctcttatttcaaccaagctattttctttttatcccccgaagaacccaataaaactgtagaattattgacttcagcttatcgctagtccaccttggaaacttaaaaatgctcatcaagtacattggagaaatagcttgtaaaatggccttgatgagtagttcctgcccgctagtggagaaaagactcatttttcaaccccgcaccctcttttgagcctcctcaaaaatatcttcaaatgtcttttttttattctgccctactatagttggcaaccccaaatacttgtcttgtgaaaccaccgaagttaatctcaatatctatattaccgcatctttgtcaggttattgcacattaggactaaaattgatcgttagcttgctaaaattaattttttgccccgatgcctcttcatacttttgtaaaatctttttaatagtctttgtatcatgagcattagttctcccaaatatcaagttgtcatctgcaaagagcaaatgtgacacttgagaacctgatcttgaacatcgaaatcaaaccaaatcagagttagcttctccttgcgtgatcaaagatgacaaagtttctgcagaaaataaaaataagtagggagataaaggacactcctgacgcaatcccctgatagggaccacatgtttcctaaggcgcccattaactacaaaaacatactcggtagctgtcgcataattcataataagcttaattcacccttctacaaatccaaacttccttatgtacactcttttataagtatgttttaagcattaattaaaacttatttaaaaaatttcaaaaattcataatcacactaaggtatatcattacattcattagaaatattatatatatatatatgtcaatatcaaagtataagtggagtcttaagtattcatttatgtattttgaatataatttccttcattctagttttttcattgtctaaatcaattatttaatgtctattttcctttttgtccaatgccgaattcaattcatgttatgcatttattttggttctaattacaatttatggagataataatgaacatttagtatcaaatttataataacttaattaactagcatgtttgggatccattgtcatgatatatttttcaattatttatttatttatcgttataaattgacattaatgtattctcattaattattatgaaatgaaaatttaggttttttacaaccggccccctctaatatcactattgtattacaaatagtttattattatcatttattataaaaacattacacgctttaattttttacgagtatagaaactaaatattgagattttaccatgcatagactaaaaaaaaagattttacagaaagttttattcatggtttatttattactttttgagttaaaaaatgattaggaagtttagagtttcttgttcttaaatttata

SEQ ID NO: 79718 - DNA, 2635 bp, Cannabis sativa
ttgaagcttattcggatgctgattgggcttctagtttggatgatagaaaatctaccagtggcttttgtatctttctaggagggaaccttgtcaattggagctcaagaaaacaaaaggtagtagctcgatcgagtacagagtcagaatatcgagcccttgcttcagtagccactgagttagtttggatgcattctttactcactgaattgggcattaagttacacaaaactcctccagttttatggtgcaataatcaaagtgcacaagccttggccctaaaccctgttttccacacaagaaccaagcatatagagcttgatgtccactacattagagatcaaattgttgaaaacaaactcgaaatctgctatattcccacacaagatcagacagtagatctctttactaaacctttgtcttctccacattttcaatttttttgtaacaagctgaatttggagcactccaaatacagcttgaggggggtattagtgaagaaatgtatagttagttaatacagttatacagctggagttagttagttatgttatagctggagttagttactctaactatttttcagttacattgtattcttgctttacagtatatattgaatacaaggagctgtgttagttaacacacaagctcatcttcattctctattctcaattagctcctacaatctaactccgcttgaactgcaaggccctttacttacatggaataataatgtggcctcgccaagaaacatccaggagcttattgattggggccttgttaaccatgcctggaccgaccttttcccagacgctcttctctctcaccttggtttttttggctcggatcaccgagctcttgagattgttactgccaatgatacaatttctcctactgatcactctcagaagcgctttctctttaaaaatgtctggctcgctgaaccaagttgggatacaaccttggagtcggcttggatcaatccttttggtccctcggtggaaatttatcgcctcgtagccacccaaactgtctgtgccactcatcttaatgcctggaatcacaaaaaagatttccaattcaagaagcggtttaacaagattgagcgagaccttgaaagtgcccagaataccgccatttgggatgacaatgttattaaccatatcaagaatactcaatcccagctcgatgctttgctctacaaggaagagacatactggaagcaaagggccagaacccaatggcttgctcaggagataagaacactaagttcttccatcgcttcgcttctcaaaggaagaaaactaacaaaatcctcaagcttgacaagtctaatgggggcatcgccactacggaggaagatattacgcaggaaatcgaatcttatttccattctcttttctctttctctgatccgtctcctcaggacatccataatgttctagaaggaattgagtgttctttatctaacactgacaaatcccttctggattaaacttactcaattgaggaggtggaaagagctttcaagcagctccctctggataaagctccgggcattgatggctttaactccaacttttacaaagccaattggtcattggttaagaaagatgttctcccggcggtgcttagctttcttaatggaaatgggaacattgcccccataaacaccacgctcatcactctcatcccccaaaccaagcaacctaatacagacaaggattttaggcctaaaagcctgtgcaatataacatacaaaatcatctcaaaaatgatagctaacaggcttaagctggtgcttaatcatttgatctttcccaatcaaagcgcctttctccctggtagactcatatcggataatatcattattgcccaggaggttgctcactctattaagcttaaatcgaaagggaagaagggttggatggcgatgaagctggatatggccaaagcgtttgatagagtcgaatggtcttttatcctagctattctcagaaagtttgatttcccgatgcgaattatagaccttatctcggcttgcatctcaacagccactttccagtttaatattaatggcaaaatcttaggccatatttctccttctaggggtatttgtcaaggtcaccccctttcctctatctcttcctgctctgtgcggagggcctttcctctttgctcaggtaacaagaaagaagcagatcccttatcggtttcaaggtggcctgcactgcgcgttatctcccatcttctgttcgcttacgacaactttctcttttgtcaggcctccattaattcctgcaatatcattaaagaggtactggctctttatgagaaagctacagggcaacaagtgaacttccaaaaatcctcactgtatttctcctcgaatgttgctctctgggatcaaacacttatctctgacttcatgctgatacctgtgagaacctcttttgaaaaatatttgggatttccccaacatatcgggcatacaaaaaaaacaagtttttcactacctgcatgataaagtttggggtcacctaaacagctggaaacataaggttttttcaaaagggggtaaagaaacgccatggcttgtttccgcctcccagttgccacttgccactctcttgag

SEQ ID NO: 79719 - DNA, 995 bp, Cannabis sativa
aaaaaaaaaaaaaaaaacaatggccacattgattttggatttgaaaaataatggtatattgctaaaaagaaaaggatttgtgaatactaaatccctttattccccttttgtagagtcttagagtcaaatgtgtaaggtccatctaggccacaaagcccatcaaaaaacaaaaattgaaaaaagaaagagacaaaataaaagtaggtaaaaaaataaaaataaaaataaacaaagactttttttttaacagaaataaagaaagactttaacctagtgtttttttaatttatttattataaaaaacaccaattaaataataaaaaaattatgttatacatttggatttttttatgtttgaaaatactttgatttgaatccactagtataagctcattttagtgcctttggtgggtctctatctacacttttattttattttgggcctcgatcttcttttaaattttataaaataataataaataaattaatggataaataaaaataaaagtagaaaaagaaaaagaaaagctaaagtgagttttatttaaccttaactatgaagaaaaaaagtatgaagtattatgagtgaatggctttcaaaattgctcaaaaaacctttaaaatatgggaataatttttttaaataattgattaaaagagttgtacgcttttatttcttgtagtttggttaaatactttttttttcagcaatgaataacttcattgaaaaataaattatgatgtcatacaaccttaagtatcatgaattcccaccaaaataaagaatctcatcaaacgatacaagtcctctatccactcgaagagcatgctcagctaatccatgtgcagccttataagccgttcaacatacatggactaggaacactccaggaaaactacatcaaacttggttaaatactttagtcacacacacttgaaacaaaaaaatatagacttagttacacttttatattttaattaacatcaacatttta

SEQ ID NO: 79720 - DNA, 2922 bp, Cannabis sativa
taaccaatcgtaaagtgccacctataaaaggtgttggcactattgatgctcaatcacaatgctgatttaataattaattccaaataataatgcatgattgtcaccaatctcgacctaaatttgttatagtaattgagatctattggtaacaatttgtatatatattctattcaccaaaaggaatctaccatacgattaatgcatccccattaattcattaattttgttcataaataacaatttcaaaaacattaaatcatcagtatatatcccattagaattcttttccaatacaaatatattatttttagtatatatacatataattagccagctcataattccaacaaggaaggttccgctgaagacacacccttatcccataaaaccccacccttcacacccaataacacaccacaaaaacaaatcactctcataccaaagctactaccagaaagctagctcatcactcatggctttcacacctctctctatcctcctcctgactctcatcaccatcttttcccaccaaatttcagcccaagccccgggccccgccccggccggccccctaaacttcaccgcaatcctcgaaaaaggtggccaatacaccaccttcctccgccttctctccgacagccaagtattaagccaaatcgtaaaccaactcaacacctcctccgaaggactaaccgtcttagccccaaccgacaatgccttcaacaacctcaaggccggaaccctaaacggcctctcccgtgaagaccaagttaacttaatcctcttccacgttctccccaagtactacgccctatcagaactcctcaccgtatccaaccccgtcagaactcagttctctgctgatggccttaacttcaccggtcaaggccgccaagtcaacgtcaccagtggaatggtggagactcaggtcaacaatgctctgaggatgcaatctccattggctgtttaccagatcgacgatgttttgttgccaccaagtctttttggagctaagccaccggcctctgctcctcctccggccaagactccggcatccaaggacgacggagataagaccaagcctaaggcatccggaccatcgtccgatgatagtactggggattcgagtaatacacgtgtagggttgggattgtttgttgggatgggtattgcttgcatggctgttcttttttgaagagataatcgatcgatgatgatcagtttattaacttgagaaaaagataagaagatatcacacacttcttttgtatcgcaccttcgcgtgaaatttggcatatatttgtatctaaattcattgtcgttttgtattcttttatatttttttttccttcttaatttgaatctgattgtgaattcttcttcttcttcgtattttttttaatgttttaatttgtttattaatttctacaaatgggagagcagctaagttcaacaagaaaaaaaattaatggtggcaatataggcttgtttttttactattgagtcgacaaataagactatatttgataaaacgagcgaccatgatttttattagtagtttgacaaaaaaaacaataaataatataaattcatttttgtataacaggcataatatccaataaatggtagttattatgacctttgaagaatgatgaattaaattgatggataataggcaaggaagaaaatttaaaaagattatatattaaactagtcaattatcatgatttttaaattttctattacctttattctattattgaaaaacatatgtatatatatatatatgcttaattaaaaattgtattttggacccgaaaagaaaaacacatttttgcattttggtaagtaaaaaaattttgagtaggaaagtcaattaagaatataattatattataatgtatatatttatatattttacactttgttcatgacaaattgatattcatccaaatttttgtacgtcaattttcaccttatctttttcattttatttcttggccccaacaatattcgattagtctttacaaacaaacaaaaagacactgggcgaaaaaaaataataaaagacttaactaattaatggttttatggcaggatctaccttacattttgctgcacttaattaacggtaacttttggtaaatagttaaaacaagaattgccagagcccgcggtatatgattatacaaaatatcttgtcctacttaattaattgctttcttatttcttttctaaactttaaataatgatgtaccatatcgtttatatctattcatatatataaaactagatgcttctaagttctaataggcacagataatgtgaggtacgtaggaccccatcgagaagcaactatacttgattaattttaatttgtatggtgtggattggatcctaactacctatatattcttttccatatagcagtactacaaatatttaataccaaattaattaaacaacatttcaagaatcactgtggtttttagatctgcctcacaagttcacaactcatacagccatagaaaattatcttttattcatgagatgatgagtacagaatttaatattaatgaaagagcccggttcgctagctaattagtctgaccccaaactttgaacttgaatctcacacgtgcttctcagtggtatccaccctatataagttgacttctaatccaagtgaggaactcctaattataaattttattatttaaaagatatataaggtataggacttagtgtattacaactatgctataaggaagttattttatgagtcaccttaggctcagcagatagttcacacttacaatttacaaaaatactggaatttaagttaacttttacaaaaaatattgtcacacagaaatgttttctaaaatactgtgtttttatactgtgtttttataaaacacc

SEQ ID NO: 79721 - DNA, 2854 bp, Cannabis sativa
ataatatatttataattttactatgtattagaattatatttttaagtaactatttattataatattaaaaaaaattaaattaatcgcgcgaagagagactatattctactcaatattagtggcacaggaattcactaaaagaaagtactcaatctaagttatggtaaattattattagtggcaaaagaatccactatccactaattgcttttattattatgtataataaagtttaaacttgatttgatcacttttcaggaaattaaaaggtgcaatcctaaacatagtaggaagccatgatagaaaatcatcaagcaatgataatattaccaaaattaacatggccaacatgacgatggaaattagtcctaacttaacatcatgccatgactcctatggtcgtccagacctcttagtcaattgttgtcctcccttatcagcaactgatgacgtggcaatcgatttccaatacatttattcaaaatcatcaaagcttagagttcgtcgctcagctcaccacttagataccacatatattgctaaatacaccaaagctcttactatcatgaaatcccttccctatagcgaccctcgaagcttttcccgccaagccttactccactgcaccttttgcaccggtgcttatgaccagaaattctcatctgccacaattgatatccatcgtcaatggcttttctaccctttccaccgaatgtacctatactttcatgagcgaattctcgctagcctcatcgatgacgacacttttgctttgcccttttggaattgggataaccctgactccatgattttccccaagatgtttcttgaaggaccctttgtagattcacaacgagagccttcacacttcaataaagttgtggatttgaattataattcatatacggttggcaatgcatctggagaacaagaacaagttgatactaatttggcatttatgtataatcaagttatcgctgctgcaaaaaagcctgagctttttatgggatgcccattgtatcccggtgaagatgggtattgtgatggacctggcactgtagaattggcaccacacaacactgttcatacatgggttgggctttcttcgaatccccacaatgagaacatgggagctttctattcggcgggttgggacccatgtttctattctcatcatgcaaatcttgatcgtatttgggatgtttggagagacattcatggtatgtacttacccataaacgatactgtatggctcaattcatatttctatttttacaatgagaatcttcaactagtaaagatcaaagtgtcggatgttttgaatactaaggagctcggttatacttatgaagagactgatcttgcatggttgaacaaacgccctaaacccttcatttcaccaaaaattgccaaacatatattgaagactcaagagaattatcataacgaaacttcaaggttacatttgtttagcaataaattagagggtcggagtctcaaataccccataaaagtaaaggtacccaggcccaaaccatatcgatctaaggaggagattaaagaagaagaggaagttcttgtggtttatggaatcaagactaaaggggatggaatagtgaagttcgatgtgtatgtgaatttagtaaatgagacgaacgtggggcctacttatagagaatttgctggaacttttgttcgtttacctatgaagagaattggagcaagtaatggaaataaaaagtctagactgaaattaggaatatcagaattgttgagagatttagaggctgatagagatgagagtatttgggtgactcttttgcctaaaactagctcatgtgccaacactgtgattgatggagttcggattgattatatgagatagatgactagttctggttgattaggttgaagatgacttgaaatagtatattctttattactagaatttattatcacaaacttatatgatatgtactgtggatatgaagacatccactcactttgacaacaatattgttgaacgagtagaagaattggaggtcaatttagttattggtgttcgttctcttttcttttaatataggggtgttacatttaatagatacttttaatgaaaatgtttttattttttaataagtgcacccaccactaaaagaataactgaatacacacacctaactcccaagcttcacagcagctcacatagaacttgtaagcattcaggtgctatggcaactctctctcattgcttaaccattcttcttgccgctgttaagtactttctcattgctgctcttcttatattcatactcataactcttctttaactttgtaattgttcttattactacaaaagtttacactactacaaacatatcttttattttcgttttttttctttaataaattaaaaatccgaagataaaactattttaatgctcctatcgtcgcttatttagtgaaattttaattatattttcgatctttattaataaacgaagtcaaaaagggtttcatatatcgtaaaatgaagtgaaatttgtaggaggacctttgtcttcggtaagtaccaaattaccgaaaacaaagggctctacgtgtttgtggagccctttgttttcggtaatttggtacttaccgaagacaaaggtgtgtatatcacaccgcgcgagacccaattttattacacccacgacttacgcacgaccctcaaaacccacaaccccctcttgctgaacccctcaatacccacaaccctctctccgatcgctacagctacccccgacgagtacgacggtgaggacgtacgtctcttccccaactcttcctctaacgacgacgacgacccttc

SEQ ID NO: 79722 - DNA, 2844 bp, Cannabis sativa
ttagaattgattaatttagtttaactactttttatccatgtttattatttatgtctgtagagatgttgaagaactacaaacagaactaagaaatcatctgaattgcaatcaagctgcctctgattctgtaagtatactttacaaactatttaagaaattggtcccaaaatgccttagccatgaaactttactactctagtttactaaatggagaaaagatttattgattagagtactccaattgattgttaaattatcttttccacaggttgagagtatatttatgcaaagtgacatgaatgagatggcctcttatatccaaacaaatgacaaggctttgcaaaatgaattattgggactccatgatttagatagagaaaacaatggtttggtagaagaaagcaacaaagatattgaaagaatggtcttgcaagccaagttggatagaatgactaaggacctagaagaggtaaggctactcaatagccattttcaagaggagaaaacattggagttttcttgcaaccaatcagccgaactagttcgtgaacaagttgagatggagacagctagaacaattcttcaattacaagaagaggttgatgcagttcagtgcaaacttgatgagagattatttgttatgactcaagaaaatacaaagctacaaaacattattgcagctaaagaagaagaaattaaggcagtaaatacagagtgggaaaaggcaaccttagagctaacaggcttcctagctgatggctctaaatccctgaaaaatgtctccaaccaaatagaaagcattgctcattcatttcctcaagctaatctttggattagcgaacatgtccagagagctgctagaatttatgttgagaaggaagaatcaattctgcagctcaagaagagcttggaagatgcacaaaacacagtaacggacatggtgcaaaagctaagttccttaaaaggtgcaacgttggctttaactgaattcccagagtcagataatcatgcaatctctgacgaacatgttagcatgttgttgaatgataagatcaacatggttaagttagaggaaaaactcaatttcatggaggctcaggttgttgaagcagaaaaatgtgctactcttgcgtccattgtaatgagttggctctttgaaaatcaaaaggttgccctcaaaaatgaagcgaaatgtattaactctcctgcgaaaatggccaatctcgaaacctcaaaggctcttttagtggaagatgttatggctgaagctgagttgaccgggttagaaatatttgagtccaaaaatgctatgttggaactcaaagatcaattcaagaatttcgaccaatgtacagatgatacacaatcagttaaagcattcaataatcagaacttcaaaaatcagtgccatatgctgcatcaaataagagacgaacttaccaaagcaaattgcagacttaaagtaattgaagactttgttcatgctgaagtaaatgtatttgaatgctctgcgaataattacgacatagtacatgcagatgtatggagttctgattgttcttcatcaagctctgatttttcaattgaaagtgtggcttccggaaacttatcagatgtttcttcacctatctgctcgtccacgtcacccaataaacaaactgagcaaatgatgttgaaaactgaagtctcaacgcctccatctagtcatcaacattcagaaagttcaaatatgcctttggaatttaatgaagcaacaaatttacaccttaaaaaagaactaaaggtgctaattgatgcttttgccctgctacatattcgtgtaatcaaactatttaatggtttggagtttggagtttctgctgaccaagaaggtacatatttccttaaaactcgaaataataattatatttttcaaccacgttcactaagcatctcatgatgtatggcagatttgaaacagttgattccttcatcagattcaacattggagaaagctaatgtatattatgattatactagaaaggtaaaataattgtcaacttactcttgtgcatgaccaactatatttcattaggggaaaacagtatttgtttgacatcacctatttattataaacaaacaaaagattacaggaatttatactctggtgacattctctgcatgcaggtgtcggctgatgagaaaactgagcatgctacaagattcatgaccaaattcgaggaagcccatgctacaataaaggaagctgattttatgttgaatgctttggtggaggctaatgagaatgcaatgcagttgactggtgtttggaaacacacaggtgaggaattgatgatagagcgagcaaatttgataaaagaagttgaacatttgaaatctacaatacttgtgaaagaaaacgagaacaaattacttcatgatgaagcgaattgtagtttggtagagattgcaagttcattgtcttcgcttgaagaatgttatatgcaattgaaaaatgatgaggagaaactaacagcaacatactcagatgtattttctatgggaatggaaatgctacagttcataagcaactcaagatcatttctagaagatatatgccttgagattgtggggaagaattttgctgcttttatcctataccaatgttctgttggagggctaatcagcaaaatccgttctttaaatgtagaaactgatactggccgattcactcacgaagaaagcaatgcggtagtgaacaagctgcaaagtatttgttccaatgatggcgataagactataattactagtaataagcttgttgctgaagggactcagaaagaagtaaagagcagcatggaaggc

SEQ ID NO: 79723 - DNA, 904 bp, Cannabis sativa
tagcggccgaggtccgccgctattgccctttagcggccagattgtggaccaatagcggccgaggggcccgccgctattggtcctttatgttgtagtgataattagtttcttatcgtccaagttaacttcaatgtgcaagagatgccttgaatgccttagcatcttaggggaccatgtactatatggaaaatggcttcaaacaaaagtcagagtagtgaaattcagatagttgttgtagagtgtcaggttgtattgatactcgagatcatgttctaaataccttgtactgtaggtacatccttgtacatccactcttttgtcacatcttttgtaggcgttgtggtcgtgtttttgacctatcctccacacatctctcatccaagcttgtgtatgccttacggactttggcatcatagaacctcttgacgaactacattaagggaagtgggcctaaggtgagaaagacgtgttgtatatggtctcctccaaatagtactcatgcatcacgtcagtaagaggtgagatccttgtcttacataaggctggtgtggcatgaaacgatgcagaggattaggatggtgttagggagcgagacattgtcagcctcccatctcgctggtggttcgtgcgacacaacaccatgcagaagtgagcttcatctctcttcatgaccaatgttgtgcgatgccatgcatgaaagctaggcccctcatattttccttagtgatctaatggtgcgacacggggggcatgacccatatatttcttgtgatgcacccaaggtgtgaaaatggggttcctttttgactgtgctccacgtgtggcgagactttacccttccttctagagtattagattagatcttttcaatgttcaacttttgtttctcatcatgacaaaaaaa

SEQ ID NO: 79724 - DNA, 2813 bp, Cannabis sativa
gacttttaatgcttttctttctctgaagccacattttgtaatagtaatgtagtatatgcaaatgcacatggatgtccaagtcccaagtatttgagaactcaaatcaaaacaactgggtaatccgtattcagatatcagatccaccaacttccataaaacccaacagttactacctctatagtctataggttgcagccaagtgcaaaagactattgagcatgtggatatataagtactgttgatttgtctccaaagaatgcatagaagaacaatttcagtgtgttgtaatatatagattaatagagcaatctccagtgtgtgcactgacctatgaaacaaagtatcaattaatttgtgtcaaatctcaaagggtctgtttcacaaaggagcagtttcttctttcttgtttcgcacactttttcctttatttttcttttatttactgaaaagtgaaaactaattacatatcaagaccttgtcacttgtgagttttgcactatataatactcttgtatagcaagcacaatcaaaatttataaaacagatattataatgcatagtaattaactacctccgtgtccaatacataatgaaaattatataaataaattattaaaaactaaacccttttgcccttttttttgagttgccttggctttagccatcttactatttctcactttggccgcccttacatccttcttcatgcgcctatcaacaagggttttgcccttgccaacctttacctgaataccccattctcaccaatccttccagaccctaactcttgcaatgcctctagccctctcccgttttcttcccatcatcgcatcctcttgtcaagtagtctgtagtcattattgggggctctggtttgttatagtctcgaactattttcactcgttctggagatgattaggagtacggaagagccaaagattttgatatcaatttcatcactaagttgctcgagtctactatgatggatgccgcctcagtaattggtaatgatgaatcgatccttccagttcgagtggtcatttcaatacttgatgggtttcatgaccttactggcttactttggtgaggtttaactgttttcgttactgagaaagttttgattttttcatcattattatcattgtgaagcaagactcttttgctttacttacgtgtttctttgaatattgaatatgttatatacatatatataacatttagagattcatgaatccaaatagccgtggcacaaaattgatgaaaaatagagtcaaaaaacttcaaaattcatgtcaattagcagtctccaaaggaggttcatcctacaaaaatcttgatgcctttatcgaggatatttcaccaagcaattaagatacgtagcagagttttttttccctctttcagacccatgtttgagtaggatattttttttgtttccaaaatttatatttatatgtaaagatttatattataattatttgtatatattgcaggaaattgatgaagagaatgaaaaactactcaagttattcatgtcaaaagatgcagttccacaatgtactcttactgatattattattgcaaacaataaaaagatagatgctaatgtgtcttcaggttagaccatcactacttaactttaaagaagaaactcaatgaatttaatatggtttaaatgttttctccttaatctacattttctggggaaaaatagaagggagtgaggaaaagagagactaacatagctgataacctgaagcaacgtttattgtggatttaagcctcaaggcgttttctttttgtgaggcgaggcttaagcctcaagcctcattaaggtgtatacttgaggcgtaaatctcaaatatttaataaaacatttttagaacacttcaaaatatcaaaaaatatcaaagattaaataatgtcttatataccaaatatactataaaatatctcataaaactcaaatgtctaataaaagttaaagttttttatgactaataaaacttaaatttattgtttttaggattagaatttcatttttttttctttttctttttttatccaagaatttcatatttcactatcctagaaaaagtttcagcaataatggcatgatgaagctttagctaagaaaaagaagaattagttggaagcagaggaggaagctttagtgctattttttttttgttttcttctctaatggtgtgtctaaggttgagtaagggtaacgtggaccttatttaagttaaagctttagtgggcctcttgtttttaagttaaaagctttagtgggctttttaaaacataacagaatgaatttgggcttagaaaaccctaatctttagttttgaaattgaggcgtgcgcctcactgaaatttacgcctcaaccattttcctaccgcctcaggcggctaaggcgtacgcctctcccacgactaccatggcggacgcctcaaagctaaaagtttccgcctcaaattgaggcgcgcaataaaaacgcaattttaaacattacttgaaggttaaattttgggagaaagtaaaagaaaaaggtgagagagaacggaggaaggaattgaatgttcttaaatctggctgtgtttgatcacctatcagcagatagctactcctcgtgcaacttctaatttgtatgagaggcaggcaaatgggctgttgattgtaatcaatcaatgctgtgtcaataactgcactcaaatatttggaaattattaatttttttttttatcctgtgatttgggtgtttcataaatttttgttcttaaatattttaaatgatcgtttttagcta

SEQ ID NO: 79725 - DNA, 2557 bp, Cannabis sativa
tactgatagcaaattaacattagttgtatgatcttgtgcacaaccgttgaagataattctgcggcttcatgaatcgtcaactccaacattcttatctatttaatgtttatgacacgtttgcactttgcagaggccaatgtcatgaattttttatcagcatctaattccaatatctaaaagccttttatttcacttaacaacttattatacttaacagttgcaaggaactctaaatgtcctaattatattaaaaaaatactcaaactgtattggcaaataaattatataagaaaatagagacatggggtatgaagatcacagtgtcctaattagttgaagttccaaagccaaaaaactgttccttttcacataagaactcaagttactcaacagttagctcctcttttgattatgtaattgcttagcctcaccctcaccaacaagaggggattttgttatctccttgtcttcaagtgctttacaatttctcatgttgaatttggatcatcaatcttccttgtttatgatttcaaaactgggtgtttatcgatcaagtcgaaaagttcatcaccaattccaaatccaagcatccttgccatgtcactagttttcaatctaggctttggtacatcatgttgctttaaccatgagtacactatgaaaactttattcaagatgaacaattccaatgcctcaggattgaacaccactcccattttcatactcatctgtgtcaaaacaccaaaaccatatcatcaccaattcatcatagattcacattctcaacattgtaaataatggaaccaaccaacaaaagaagtatatagttttcattacctggtgtggaaccaacatggcagcatagcgagcaagctcgccggctcgccagtccaacaagaccggtagccaaggataagtagcatcaagtctcaagaaccaaagccttatctcagggaattctgagagttctctaaggtcatttggatcttctcttgtgtaatttattgtaaacccaattgttcgttcaagaaactctcttggctccgctaattaaaacaacatggttaagttatcattgtgaaaaaagaacaaaaacattaagaccttatcaacataatgaagatatatacctgaagaaggagatgtaatcccagttacagtttgaaatggagataagtcaagcttggttatagcatcattatcaataactatttcaaatctccctttagttggtggcattggaggatcaacttttggtgagtctgtcaatcaaaaatatatataagcttttaaaattgggttattcatacattaagagaacaagggaaaaggcttaccatcttcatcatcaaacatagagaggtcataattcccagaaggattaaaggcaacagagactgaaacttgtggtctctgtcgctttaaggggaaagaaggcattgaatctgacatgggtttggaagaaatagatggagtaagagaagaaatggcctgttttagagaaggtgaaagtggaattaagtattggaaagtagcagccattgaagcacttaattcgtctctctcactacagctctgagctctggttggatagagtgagtggtattgtgttgagggacggttaatacagttttattatctcctttttcttctgtcctcacgttttaacaatcaccatatctcttgctgtttataatctatttttatttaaaataaaaaatataataggatagttatcctctaatttttactaatggaaaggaatcattatcttatatttgtttatttaatttattaaatttaagaaagggaaaacttaattaaataagagaaaaaagaaaggaagaacttcccccactaattttctaagaaatgttaggttaatggattttatttatttttattttattttttaatattaaatgcataatgataatgttatcctttaaaatatgtcttacataataactaccatatgttatagttttactcaaaagggtaatttagtcaatttaagcattcaaatcacgtttcctgataaagtaaacgagataaatcactatcatttcatttccaatcaattttagtaaacaacatattacaaatattgatttcgattattcttcatttattccattatatttctacattattttattctgattttgaatactgtatatgtaatatcccgaaaaataaaatgatatttaaatagacatattttattaaatatgtaattattttggtaacgaagtaagattatgatcttacttagggtaactagtaaggaattattgaataatataccaagcgtaatttattaattacgaagattatattgagatatatgggtatcgaggataccatttttaaaataaaaatattatttgggcccgacgactgtggaattcagcaatgtggtgagaaatgtcacgatattgatgggataattattttgatgatattccagattaggttagaatttttagaatgtcagtttaatggattagtaaaattaccaaaatgcccctaggttattttttaaaattttgaaggg

SEQ ID NO: 79726 - DNA, 2317 bp, Cannabis sativa
  modified_base (30)..(36): a, c, t, g, unknown or other
  modified_base (2285)..(2291): a, c, t, g, unknown or other
ttaagcaacatacttgtgagtagatctaannnnnnngtaaaataaatttccaacaatagttcctcttcatcgttgcaatttctcagagtttttgaccgtgcttagaatacctctttgaggcaatcacgtagatccctcctatgaacacggtaccttccccctaaccttgtaaatacaatccatgacctggtataaacactaggaggatgactatcgatagatgaagaatgggagtcgccttcatttaccttaaatcgcagttgtgcatgactatgactccgcgggttatttcactcggggtcttcctcttgtggtccttcctcttttcattcaggctatcgacttgtatctggaacagtagggcctctattacgtgtggagtcacatagaggttgattcaaggctaatccttcttgtccattctcatcttctcgttccctgtaatcacgagcattgttaggatgtttagcacgacatctagtattattagttacctcagaatcatcctgatgtcgaatcgggactcgcgaaggatgtcaggtctgaactttatctctccatgtgattttgacatgcatagctcgcatcagttcttgcatagctatatactgtgtggtcgtgagctgaacgatgccttcagaaacgacagcaggtgtgataggtggaaagtatcccattgttgttgcaggtgtgcaagtttctcctgcatggacagcagttgctgagaacaaattgagtggggtgacacaaagtcatcccacttctcctatgatgtcttcgactaggttagttcctcctccagtgttgttcctccactaggggccactcgtccaccatgtggttccttcaccatgaataggaacattcatggtcctaacattgaaagatcctgcattattattcatgtttgtttgatctgtagccatgatgattctcctccaaaaattgtgaatgattatgcgtgccccatagacggcgccaaatatctttagaggaatttagacaccaccaaacttgtgcgagtatttaatataaatataaacacccaattaaaaatatgagagtacttacctagagtagtgagtactcaaactattgactactaaacaaacgaacaaaagcaagaaacaacaagaatataagagaaatatagtgattcagtcagaggttggtctgaagactgttgcaaagatttgagcttagtttgtttaatatggatcactcctttatatagaaagtaagtgtctttaggatttacaaaactgatcaattttagaaccattttacaataaatgacaatattaaattagaataatcatttaaagaataaataaagaacaatttaatccattctttgtattaagtgtagcaatgtatgcaacttactgaacgcgagttccctgttcatattcttgcacaagctcccaggctttaggtgcattttgtatttgcagggtgacctatgggcctatcatttggatattttcattcacctttgatcgcatagacgggcatctcgtgtgttgacaatgtggaacacgcgaatctctgacgagtcatcaaacacattagtcattcagaccaatccttatgtaaagaagcaatctttactagtcgcaaaagatgtctacttgatcatcgcatataatcgatatatatgcgaccagtactaaatcctcttagccccgcttacttctttaactatgcgaggcatagtatgtgactagaccatgtcatggtcacatcatcttactaatttagatcaagctaggatgactttatgggagtcattaactaagtgtcaattttatatgagactgctctcgcatttttaggcaaaaaattcacactataacaattagaatgattgagtagtggtggaagagaaatggaactttcttctacagaaaatgacatattacacaaaaacatatgaaaatgttaaaggaccaactaagagtttagtgtcccgctttaataccaattgaaaaactatatttttgcaattgccaataaatttactaaattacagtaaaaacacaactgtagtctgtagtaacatattgcaattctatcactgcagaacacagatttgcaaaatcaaactagaaccaaaaataaataaatgcagaatttaaataacttgttagttagttagttggtgctatccttgtttgagttgggcctataaataagtctagtcttttcactttaagcaagatatcaaggaggttgaagagagagaataagagagaggattagagagagttgcttagggttctaannnnnnngttctgttcttgaagagggtcaagaa

SEQ ID NO: 79727 - DNA, 921 bp, Cannabis sativa
tgttattataaatattatttaccaaagttatgctcttgcttgaatacgctgttcgtcattctcttcaatcgactgcataacaagaaacaacctaatttaatcaaagagcaagatttttattttatattttctatcgaaaacttaatcaattaaataaataaacttttcatgggtgatgaacaaaagaagagaatgatcggaccattaaacaaaaataaaacagagatacagttcaaacgatcattgttttaagaagaaacaaaaaaaaaaaacagcaacagagttttagaaactaaagaaaatcaaagattcttttggaaaaacaattgaagattgaagaaaacagaaacaagattgaaatttgaaaaaggtcaaacaaaatcaaaacttacgcagaaagattggcaaaagaaaattaaaacacacagaatttagatagtgaagagactgagacgcaatccgaaacccaaagatgaactctttagctttagggataaggagaaaagaaaagagttgattatgttaattaaagaaatgaccttctttccaaattgttttgttgctctttaataatttgtttagcttttctctacgggaaactttggtcaagtacggtcggttcacgaattagactctgccatgtcatcgaattattgatattatatttttagttacgtatttcgtttaaccgtaattcattctataaaagattaaacttaaaaaattaggtaaaatcccatataatggtaatttttctttttcgtttgttatggggtactcttaagatccaatttttccgaaattttcgataaaaaaataaaagtaattaaataattgatgagatttaaaattttgctttactcataattgaaaccgtagaggatattttaatattataatctatgtatttatataattgtg

SEQ ID NO: 79728 - DNA, 1358 bp, Cannabis sativa
tgccaccaaaaataaaaataaaggagttaagtatataaaaatcaaaacataagggggtttcgccgcaaattgctctttttgttttttggttccaaatgaaagtgggttttgacaccctttccttttgttctttcaattactgagtattgtgtactgttgatccccatgtgaatacgggaccacctactcaagtacatctttttctttacaagacacgtaattttgaaagtgacatatatatactacttgtaattaattaattaaaactaattaatgttacatatggttttttatttttagggactgcggcatgcaaactagctacaaaatattattatgggaaataatgcaatttaatgaaggtgtattaggtgccattgtcaccgaaagatgagaagatttattgtaaacctacttaatttgtccatgttcttaaaccgagtgacttttccaactaacctaattgaattgtattgaaagaaacaaattgcgaacatgtaattagtactttgtaataataatttataaataattacttggaatgtgacattcttcaacaaaagatttgtaagagaatacaacaataaataaaataaataaataataagaagcaatatgtatgacataatgtctgtctctatttgtgagtgtaccactttatgtttcagaagagattctccttgcctcctctaatggcatttactgtggcagtcacatggtgaattattgagcctcttacttccatttcaatggttacaatatggtttttctcattgtccatttcaataagttcaaaaccacatagagtgggcagatttaagcttatgagaagataaataattgactccttattgtgaggttgacacactaaagagaatattttgtggaaagagacctatttccgttcattctattatcctctttattttattaaaactattaatctttatattcgaaggaaaaaatctaaaacaacacgtttttttaatccagtatgcactgcagaatataagaatggataatgaaaatatggttatgaatatgaacggaaaagaaaagaaacattatggagaagagaagaaaagaaatagttgtgtcttaataaaaatgttgaaaatttataatgagagatgtagaaagtgtgctctatttggcacaataaaaataattttgtgatatatttatattaatttttagtattatgcttcaatacgcacatttctaaaacttatacaaaatttaatgcttaatatatgttatttgtattttcagaaaaaggacatgtggcatattcaagttaaagatagccaactaaagttcgaagattggctcgaataaggtaacaggttggatccata

SEQ ID NO: 79729 - DNA, 1071 bp, Cannabis sativa
aaaaaagggtggctgagctcagcagtttgaaattgtaagtaaagaattaaacaaccttatgaaaatgataagaatccaagtgatgattttaataacacagccgaggaccactacctttccaaattaaccaattgcattctaaggacatgtactattcgtttgacttatatatgaatgtgtgtttgtatatataaatatgaatataatattattaactgacagtttgagaaaaattaatatcaattaaatgaacaaacccagaaagatcagttggccttagagacaaagttgcactaaatcaatggttttttggttagtgaaaaaaaaaaaacattaaggggtagcattagcatggcaaccccttgggcgtgtagtggaatgtggggttttggtcacatgtccaattgtggtatgtcgaattagagccaagaatccaaacttgtaccccttttctagaaaatataaataaaaataaaataagtaaaatgatggatatgtttgcttctaaggcaccacaacagccgagtcctttatttctctcgtaaagaagagaaaaggccaagcaataagaaaaggagtggctcacattggccgtcggcaaaacgtacaaggacctcagttttaattgggctatagatagaaacagtctatgattattgccatttcacaaatgaaagaatgaaaaagacaggtggtgataatgactttcactaaccatttatcttgaccacccccatcaggtaaaatagacgtaaattttacatcagaagccaagacagttttactttatgtgaatttaacagtagaagccaccacaatggacggccatcattagtttttgatacctctaagtcatctctaacctcagcatgttttcaaaaatcaaatcaatcaacttatccctttttctaagtgccacataatattagaaaggaaaataaaaactctgcggtgtagcacacaaactattgcttgaagtccaaatagcttcgatctggttaagaacttggcaactcatatacatgtttggtattctcatctaaccatttccttcagttacagcttagacac

SEQ ID NO: 79730 - DNA, 2705 bp, Cannabis sativa
atggcctttagtatttctctccacgcacgagtattaatcaaaaagtgtttcacgggtggaaagagtgggagaaagtaccctgctttgcatttaatttgaagtcaatactaacacaaacagctgtgtcatttaatgtgatcaaataataaccacacaaccatgaaccatgtcctcctcgtacgaacctcagctcagaaaaacaacactagatcaattggaaatacagaaacaaaatacaacgtaattaaatctaaaaatggccttctttacttatatcatcgcccacaccattctcctctcttcactcttccttactggtggacattcattacaacagtctttaaacgatggcactactttggtttccaaagaaggaacctttgagctgggattttttagtcctaatcgaaattccaacaacaatcgttatttgggaatttggtacaaaaacgacccagctcgaactgccgtttgggttgcaaatagatgcaaccccatcaacggttcaactggttttttactcataaacaacactggaaatctagtgcttttcaacaacaacaatagtaaagtcgtggtttggtcatcatcatcatcatcatcaaaacaagccaagaaaccaaaggtagagttattagaatcaggaaatcttgttgtgactgatgaagacacatttttatggcaaagctttgattatccttcagatactttgttatcaagtatgaaagtgggaccatacttgaacagtggtaatggtctagacaggagtgtatcggcatggaagaattgggatgacccttgtccaggagatttcatttggagaattgaagttagtaagaatcagttactactagaatctatatatagagaaggtaccaaagtggtgtttcgatctgggccatggaatggtgtaacatttagtggtgcccctgctttagggcctaatatgcttttcacttactctgttgtacacaacgataaagaagcctatttcaccatgaatatcaagaatagatcaaccatggtgagagcagtgatgaatcaaaccactgcaacttggaaccacttcacatggattcaaactgaaaagacatggaggagtttctttactattccttctgataaatgtgaccactacaatgcttgtggtcctaataccaattgtatagtgagtgactttaataattgccaatgcttaaagggtttcaaacccaagtctgagcaacagtggagtattatggattggtctcaaggttgtgaaagaaagactccattgatatgtcaagataaatataaagatgggtttgtgaagcttgctggggttaaattgcctgatactgtacattcatgggtcaacaatgagatttatagcttgaatgagtgtaggaagaaatgcttggaaaattgttcttgtatggcttattccaacatagatattagaggagaaggcagtggctgtattatctggtttggtgatttaattgatattagacaaatgccaggaggtacacaagatctgtattttcgtttgcccgaatcagaaataggtatgtgactattactatgctatgatcatatgaatatatatatataatgttatctcttataaatctaatacaaaatattaaatgaagaaagagaaggacaatataaggtggaaagaacagcagtgattgttgcagctgttggaggtgtttgttgcattttcatacttattgcttgttgcatctacaggaggcaatacttgaaaggtaatgtttaatgttactctaattaataaatgttagtttctgatttggttattactcagttgttgcatgttatgttttgaaagataggagagaaagaagagaaacacttacaaataagagtagaggagaagaggaggaagacatggagcttccattgttcaaattgtctaccattaatactgcaactgatttcttctcttttagcaataaacttggagaaggtggttttggtcctgtttatagagtaagctttccttcttaagttttaagtaaaacacctttgattaattgttacttgccttatgatttagcatgtagttagttcattcaaccaattaattcacatcacaacaactaaagtaaccatcacactcagggtatgctagaggatggacaacaaattgctgttaagaggctatcattaagttcgggacaaggcgtaaatgagttcaaaaatgaagtaaagttaattgcaaagcttcaacatcgaaatctcgtaaggcttttaggttgttgcattgagggagaagagaacatgttgatttatgaatatatgtccaacaaaagtcttgactttttcatttttggtaagaactttctatatatcaacacttcaatcaatcctctattgtgattaattatcatcagttgcttattttaaaccaaaataacagaccaaaagcaagaaactcgactagactggtcaacacgcttccaaattatttgtggaattgctagaggccttctatatcttcaccaagattctaggttgagaattatacatagagatcttaaagcgagtaatgttttacttgacgatgatatgaatcccaagatttcagattttggcttggctagaatttttggaggagaccagattgaagacaagacaagcaaagttataggaacctagtgagtaatttggtgcatttggttaactcttttatgtctttg

SEQ ID NO: 79731 - DNA, 4314 bp, Cannabis sativa
tcatgtatgttttagtctatacaaataaatgtctaacatgttgtccacgattgatctctaaaaatgttatattttattcattgtgattatgttacaactctaagttaaaaaaataattttgagagaaatctgagtttgttaggtgcaacaaaaatctaaaataagatgatattttggatttgattattcaaatttgagattttgatttttcttttttcttttatctcttaatactatgattagttataattagttaggttaagtgagtggaaatttcggttagattgttagctggttagctattttttcaaactaaatcatctcatttttttctgcctaattaaaaggcttgtatattcaaaacaaattaagtaatgagatacatttctttttactttctctttttctcatatggtatcgctcacagcttccatggcaagtccttccacacgctatcaaaatggtgttctcccattcacaagtgagacttcttcatcgaaaatcaatctcaatatcacttccgctccaattctaacacatctcccaatctaacagcatatgtagagacaagcctctctcgctcgaatgttcaagtctccttttttgcggatgctgattggggaagctgccaggacacaagacgctccattttaggctattgtatcttcgttggcaacttccttgtatcatggaaataaaaaaataaaaaataataaaaaaataaaaagttgtgtctcgatcttttactgaagctgaatattgtgtcaagacaaacgcaacctctgagctcacttgggtcattgctctccttaaagattttggcatctctcacaacacacctactatgttgtactgtgacaatactattgttatccacatcagtaaaaatcctaactactacaaacgcaccaaacacgtcgagatcaactgccatttcatttaggagaaggttcaacaaggctcactcaagcttcttcatgttccatcacaacataacttagcagatatagttacaaaagcattacttcctattcccttctccaatattgtatccaaaatgggtgtaatcaacattaacactttatcttgaaggggttattagaattagttatggttaatttttcaactcaattatgtgagtggacatttcgccttgttttatctttgctggtttatcttgaggggattattagaattagttatgttttatattgaattatcaaaataatattccttctccaactccattattattgttacaaattaacaacctcagcttgatttgaaaatatgaaattaacaagatatataaaccagaaaaataaaaaccagcaagaaattaataacagaaaagaaaataaaagacacaagaggatatagaggggttcgaactttcctctacaatttgtagagagcctattccccttgaactcccttcaaggaatccttttccactaagattaatggcagattacaagcttggttcaaaataacacaatggtgatctttctcccttgagcaatattcaaaaagaaacttagagcacttaggaaacacccttgaagacccttgcttccttttggtttctcagttctgctcctctctctttcatctctaaccttcttgctacaagatacaataaaacctcaccatacaatagtctctctctgatttttactcaatcttatttctgcactaactaaaaaaatgatccaaggcctccttttataacataaggaacctggttacaaaggttgttacataacagaaagaattaactaaaataactgaaaaacagtagcaaacaagagaggccaagtgaagtgtcttaatacatgccatgtcatattatttatttaagactgatataacaacaattatcaattcaaaagttgttgatagaataccttaccaaattgaaaaacctttactactaaatttgaccttagtttactttagatggttgtgggagacataataataataggccctcttcccttcttcctttcgccttgccaaacaaaaataagtcaagattaataggctaattccctccacactctttaatccacatgttctccattccatcatatctaaatagttgttaggtttcgatcatgttttatataaacatatgtaaacaaaataataataacaaaacaaaataaaaaatcaactaagcctcaaagggaagaagactcttaaccatttgacccatccgaaactgtcaaacaaaatatcaaaagcaataatatactaatataggcaccaaatccccaaattgttccaaagttttttaactgaaactccagtcctactttaaacattgccactagagtcagagagagcattctaaatattctatattagaaataataatctcatgaacagcacggattaaacaacaagactatgcctctcaatggattttaaactgaaactccaaccccactttaataaggcatttctcttccaatttgcaatattgtagttactaaaatactcgtacacaaaatgagcaacggcaaatagagtacaatttttttaagaaaaaaagaacttggccaaaaagattcagtgcattttccaatatgcctcacataacattgactgactaatccccccatgttgacgggccaccgactccaacttcaacttcgggtgagagacttaaaacaaaacctgtactttgggatttcgctttcttcgtcttacctgggaaggttactatgacacctccagacttgtcagtaaacttcttttcccttttgaagtcgggaacttctccgccaacatttgacacaagctccatgaatgaagcctcactgtcatcaataatatccaggtcactccgttttgtctttgatgtttttggtagtttcttcaccttagcatcatctttctctatgaatgtcacttttctcttttgcagcttgtcaacctgttcttcactttcctgtttcgactttctttccagatcaggattttggtgttttgatttcttagccttgacatgatctctcttctcatcattgtgagaaggaagttctgctgcattgtctcttgttccatcgtttccccccttcactttcttcttagtaacaaaatcacttggactatcctgatccacgacagaatatttagagttcttgcggttgacatgatctctcatttcttctgtttgagtatctggatctttgtcagcggcaacagaagaatccaagtcatttttggtgcgtttgttcgttggtttcgcattgaacacatgcaagtttgggaatgtatttttgatctgcaatagagttgtttttgtaagaatcaagttaacaaggcacaatacgttgaaacagagataaaatagtgaaaataagatgatgacttgtaccttcttcactgatttttcatggtcagcgatagggttcccttgcaaattcagatttttcaggctaacaaaagaattaaggacctgcaattttagcatggataattgcagagtaagatgtttttccacaaacgaaaccataagggagaaaatatataaatataaatatatatatatggatatatatcaagaaagaatgatccagctccaaatgtcaacctttacatctgaccatgttgtgatagcattatatcccaaatctaagttctgtatatctttgttatatgccaactcagctggaagactctgaacagggcacacacgtaaagaaagagactcagcgactccatgattaaagaaaaaaattcagccaaaaaggaaagacatggaatgaaaggaggtgtctcgtgaggaaaatgagataatttatcactctaatttcagaaaatataccttgatatcattatgagacagtctcagttcttttagttcaacacaagacttgagtgaagcaccaatatttcgaatctggcaataagaaagagaaagctggaaacaagagaaagttcaagcatttcaacattcgttaaatatcaaggaatattgccgagatatacatttgagctaagaagttaaaaccacgcacctttgtcaaagattttacatttatcaaagagtcgccaatttcaccaatggggtttttcgatagaactgcaagacaatccccaaaagaagttcacaaatatatttgcaatcaataactaattcagataatacttcacaaaacgttagaacagtctgctagagatggaaggaggaaaaacagagagggaaaaatagccataagagatagaaattgtttatattaaagttatcaagctgaaaacaggtagagaacgaagacaggaagtgaaggatatatgcaaagaggc

SEQ ID NO: 79732 - DNA, 1600 bp, Cannabis sativa
agagtgataacaaagaaaacttcataattatctatgatattcaacagagtgagcatcttatggtttttaagtattcaataaagtaccctgtacccttatgcatttctatgcaaaactcaatcctgcaataacaaatgtgaatctttcggccttcaaggatttaaacatgtaaactttatatagttcctcaatatgtgaaaatgaaatctcaatgctttccaacaaaactacaactttgatgtaaaagtcatttagatataaaattatgactctcctatacgtatgtgaacaaaaaaaaaagaacataaaaaattatatacacaaatgtttgtggtgacaattgtgaagcctataagctctttaccttataaccagaagaaagctcttaggaagagccataaagggcagttgaacaaagtataaacggcagtggtaccaatgttcatcatgagctttaagtaatgtttatctgcctggaagtaatgtgtccaggccaataatgttagtcacaaagagttataaattggccatgatagcaaaagtggcagtgcattagtggctgcaagggccataaatagcaaagaagaaagacctgtggacgatgctgcagctccgcttgagtgtcggcttcttaagtacatcatggtcttattcaccagtggtagtggtatcccatcttttcttgctcccaacactttctggctgcaaatttattgtttcatataccaccattcaattagtgttcatttgagtatactatttttttttgtataaatttaattatttgcgaagtactctccacttgacaaggtatgacttcctttgttttagagaaaagacaaggtaagtcttgagtgtgtcagaaaaaataaaagaattatgaagaacaatttaatgaacaaatacgggttcactacctcttatactaggaccgactaatagaagaataatttcatatgcgcacgtaatttacaccaaaacgttatacatacttaatggtaagtcattttaatgagattgttccaccaggttaaagtgaattgcaacaagtgtgtaacaatatgtgtgcgcatatcgttagttcaaaatagaaaacaaacactaatgaatttggtgctctaatctaatgtgtacatagatgcctcatgcctcaaaagattatttgaaaaacacaaacaaaacgatgcatgcgagtgcttgttcaaagtgcaaacataatgttatctcaaaaagaaacaaaaatggtgtaaacataatgatatttaagagaacatgaaatgataagagctgttacatcaaaacttctataaaatgaaccgcaaagaaagacaacatttgtagtgatcaacatggagccacatgacaattggtatatctacataactttgcctgaaggaaaatacgtggtgataaatggaaaaaggaattagttaataaacaaacagaggtcccagcacagagtaaaataattaaatatgaaaaaaattgtccaaaagactcaaattatggagggactgggcccattagaaaagctttcatcacaccccacaccacttgtatgcttattagagcgaaatttcttgaatgtgccatgcttaat

SEQ ID NO: 79733 - DNA, 2207 bp, Cannabis sativa
atatatatagtacactacaatatcttaccaataatactatgcaataattttgctcattttctaaggcttaaaacaaagaagctgtctttatccgaaagtatgagaaagaaagtggacaatatatctaaaatcctccaactttttatagacactaatataatgtgttcacatatctagataatagactatcatattgtgattcatatgaaactcgatcatgtggagtgcttgcttaatgtccaacactcccacgtggattaattatatatatttgttctttgggtcttcaaggatatatatcccatggaatttagatattgcttttgacttaattcttagccagttcaaacatatgtctactagctagagaaagaggtcgatcaagaaaacggtatctaatatataaatatatatagttatttatatttatgtgtaaattcttatggtcaccccctttgctagggttagtattttatggctccccatgtctggattgtgatggaacctaatcgtttcttcggataccgtagaaacaaaaatttgtatttctccttttttttttctttgaacaatgatcatttgtccatttcgaacattactcattttgtggtaattcaacgtcatattatatgtctagataatgttacgaattattcctaaatatatatatttttttgttcatgagaaattatttggtgattttttttttaaataagagaaaataacaaattatttagatgttgccccgtaaggaggtagttagttaaacctaaatataattaatacacttaaagtgttgcaattaataatagattaaatttgaatgttttgataatttaaccagagtattttcattaattccgaaaataaatttaggaagaataataatttttttaattactattacaaaatataattgtaatttttgtttttatttaaatcattactatggtttcatatttcaatgattatcactacattgaatattattaattttaaaaaattatgatattaaaaaaactaaaaactaaaataaaatcaacatacgtgacttgacacgtaacatttatctagtatatatatgtatatttctctaatatataactttatggtcctcttttatttatttaattattttctttcttatttcaaacaatgaccaaaaaccaaaaaatattatagaggcttatggattatacattctaaaggataaaagaaaagtcatttaacaaaaaaagttgtcaatccatcgaaatagtatgtacagctaatctatgcccaaccatattgactgctctagagattgcttgtgttttcttaggctatcccatgggaatgaaagcctataagttgttggatttaaacacaaatagaattttctgctctagagatgtgattttccatgagcaaatctttccattcgtgactgctggaaccatgtctcatgaatcccttgattttttccctagttctgtcactcacaccagcaattctcacatgtcacaaccacctataccacctgatatagaaccagaccaaactaatattgcaccagattcccatgacagcacagaatatcaaaattctgctgcaatcaccaccaatagacccagcagaaattcaaagaggccatcatacttgaatgattatcatgtttttttgtctactaacagtgtttcatctcagggcaacccttctattactgaacatcctttgtctaaagtgatcaactacaacaggttgtcccccagatttcgtgcaagcatacttgctatttctagcctctttgaacctgaattttaccatcaagctaaaggaattccagtttgggacaatgcaatggcatctgaaattcttgctcttgaaacaaatgggacttggattattgttactttacctccccatcatcatgcaatcgggtgtaaatgggtgtataaaataaaatataatgctgatggaagtgttgaaagatgtaaagcaaggttagtagcaaagggctatagtcaataagagggtattgactacaatgacacttttgcacctgtggccaagttagtttctgttaaattaattttagctcttgctgctattcaagggtggttcatacatcaattagatgtgaacaatacctttttgcatggggatttacatgaagaagtgtatatgactatacctcaagggtatagtcctaagggggagcttccacc

SEQ ID NO: 79734 - DNA, 1291 bp, Cannabis sativa
  modified_base (1237)..(1254): a, c, t, g, unknown or other
tccccacattatctgggataatattttcttgtagactcaattaattggtttgttaaatcaattagaaattctaaagaagactatgtcttatttataaattttactaagaaataacatatttgagaagaaaataataagaaaggtttatttattaattaagacattttatgggtgtaattaataaatatattcaaattgtagttttttttacaattacttatattatagcattggtattaggatattaaaatggtattttaggaaaaagatgaaaaatttcataaaaaaatagcaaaaaccaaatctattggacccatatggctattgagctaataaggtggttttagggccattatcttttcctaaatagcccattattcacttaccttgaacatagataaggcaccataaaaggaagcataaggctttgattctaaataaataaagaaacacacaagtttcaacaattttagtttccctaaaactgtatcagaaaaagtctttctttctctctaagatttttgagtttctctttctctttctctcaaattttgtggccttagtagtgagatatttcccacacaattcaaaacaatactcagacttatatgtattgatttatcgttttacatttttctgatattactctataacagaaaggaacaatggttagagtgctgaatggaaagactcatattattccataaccattatgtaagtaatctcaaacttatatgtgttaatttatcattttgtaatttttcatatttagggtgttagattatattgcatataatcaacatacatgttagtaaattaatatcttggtaaaacaagttccaaaaatttctagcatctcaggagctgggtgtgggggtcttgggacccaaatgggaaggaccatatgagatgcaacacaaggtgcatgatggaacataccaattgaaaagacttgatggatctgaggttccactagcctggaatgcggaacacttgcgccgataataccaataaactgggggtagccggatccattctcaattaatgcattttgtttttcctttttatgtatgccgcagggcataagtaattaaataaaaatagaagaattttgaagagaaaaatccgaagtctttttgaatttttagttgtgttgtaacaagtgaccaagagcttaggctctcagctcacttgggggtaatatatgcagcaatgtgttgaaattattttaccaggnnnnnnnnnnnnnnnnnngtatgtttcattaacatactaatatgaatttctaaaa

SEQ ID NO: 79735 - DNA, 5043 bp, Cannabis sativa
  modified_base (4045)..(4056): a, c, t, g, unknown or other
ccccagccccatgaagcgcctttcgtggaattgtcgggacctcgcgagagacccgacaccccaagctattgtagcttaggttaggaagtacaaggtggattgtattttcttgttggagactaaagttagtaagaataaaatggaggatctagctcgtttgctgggattttcaaaagtggttagtgttggtgctaatggtttggcgggcggttcatgtttaatgtggaacattaatgttaatctggtggtaaattactttgatgatggtttcttcgacgctacagtttgggatttccaaactcagatgcattggaaattgtttgcggtttacggcacaccttattcttgtcacaaggaggctttttggaagagtttggagagtgaatgctctctctgtcaactcccgagggttgttattggagatctaaattgcatttgcagtcaagaagagaaagttgggggccggcttgtttctgctaatgatacgagatggttgaaggacttcatgatgaatttgggatgtattgatcttcaatttattggaaacaaatatacttggcaaaataagagatttagtggtggtcttatccgggaaagacttgatagagcactttgctctcctgattggattttgcattatgaaagtgcgggtgtccgtaatttgcctatctccatatctgatcacggtcctatcatctttgatacacatctgtttgctgctaggggttatatcccatttcgttttttcgaagcttggtcctgggaagcttcgtgtaaggaggagatatccaaggtgtggtctatggatggtacaaatgctactgctatgttcattcgaaatatatctaaatcgaaggatgctcttcaagcatggaaaaaaagcattcaggagattaatgaaggcgaaattaaaaatttaaagcagcgcttggaatggattcaaagtcaacccatctcagacgccctcaaggaagaggaatccaatcttcaatctcagattttgctcagttggtctaaacttgagagcatgtggagacaaaagtcaagagaaacttggctttctctgggggatagaaacacaagattttttcatgctgctacagtcatcaggaaaagaagaaacagtatttgggctatcaaggataatgagggtagaatctggaaggaaaagaagacaattgcaagtgtcattaatgctcatttctcaaatctgtatacttcttcccaactgtgtctggatgttgaattcgatgggctgtttactaatagaattgatagttttgccaatgataatcttgtcaaagttcctacaaaggaagagattaaggatgtggttttctgtcttcaccctctgaaggccccggggcctgatggtttctcgggatatttttatcagaaatattaggacgtagtgagagagaacttgtgtgctacagtgaaggaattttttgccaatgggattctcgaaccaaggctcaatagtacctttatttgtctcatctccaaggtggaatttcctttgagtgtggattattttcgtccgataagtctttgtaatttctcgtacaaagtaattgcaaagattttgtctaataggttaagacctcttatgaatgatttgatctcgcctttccaatccgctttcataccgggaagatggatagctgattcctcgattctaactcaagaaattatccacaagattcggtgtaagaaagatcttggggggcttatggcattaaaacttgatatgtataaggcctatgataaaatggaatggagttttttgaataatgtcctttgtgctaatggcttcagtgataaaagccgtaatctcctgatggcttgtgtgacaagtgtctcgtatgcggttcttttgaatggatgtcctctcaaaaaattgactcctcaacgaggactccgtcaaggagatccactctccccgttcttgtttctcctctgtcaggaagtcttatcaaaactcatctcaaaagctgaagttcaaggtttaatccatggtattaagattgctcactcaacaataccagtgtctcaccttatgtttgcagatgacactatcctcttctcaagagccaacacaaaagaagcaagcaagctgatggattgcatctcaacctatgagaaatggtcgggtcaatcctgtagcaagcccgaatccagtgttctcttctcaaagaatatgagcagtggattaaaagataatattctgggcattctcaacattgatcttgttcgtggtactttaagacacctaggcaacccctttgttttcaaaagaaggaaaaaagaagattataaaagattgaaggatagtatgttcaacaagcttgaaggatggaagatgaagctaatttcatatgctgggcgtctcacgttaatcaaatcagtcacctcttcaatgccaatttatgtaatgtccactacaaagattcctctgtctaacggccgtgaacttgatgctctcatgagaaaatattggtggctaggaaatgttgaaaagaatagatttctggctctaaaggcttgggactggatttgtcaactgaaagcttctggagggttaggtgtcagaagatgcaaagatatgaataaagctttattgacaaagttggcttggagcttggcaacaaaagaatagaaaccgtgggtttcatgtctgcttaacaaatactgcaagtatgatagtttccttaatgtaagcagtaagagtagtgactcttatcaatggaaatgtattttggatacaagaacaacaattctccgaggatcggtctcagttgctgctatgggaaactcaattgatttttggcatcaaccatggattccttggttagagtatcaagaatttgtggacctaatgaatggtcttaagaatggaggatatacaatcaaaactctggcggatatatcgatagtcaacaattggaatgaagagatggtgatgcaaatttttgggagtgaaatggaaaactgaattttaaccattcccaggatgccctccccttaccaagaccagatgtattggaagagctctccaaaaggtatgttttctgtcaaggctgcatactgtgttgatcaattttggagatttgcaccagtaaaaaacatttggaaatggatatgggaggtgggaattcaccctagaattttggttctgctgtggagagttttgaatgatgccatccccacaaagaacagactacattttttgaatgaaaagacatgcaatctgtgtgaagtcgaagaggaaaaccccctgcatttgttttttaattgcagcttctcaagagcaatatggtttgggggaattgtgtcaattaaagctcaacatcattcaggagataacttgatatgcatagtggaagagttggtgtccactttctcttcatctgcctcgggtgtaagtagatgtcttcttctcaactatattggctgtgtctttgatgctatttggaacaagagaaatgctttctgcattaaaaatgttcatgtaagtccctccttggctttgactatagctggaaaaaagttctttgaactccagaacattccttttaggaaggaccttgacgggtatgaccacacaatcgacaacatgaggaatgatgtgattctggttcctgcaatcaaacaagtgttccaggttcttttgacggatgcatcctgggtgaggggagaagcaagattagctgccattagtgtcaatatgtcgtctggctgctggtgtgtaaagtctcaaaagcttcaagcgagttcacccttggaaggagaattaagagccattcttcatgctctgaattgggcagttgagtcaggttgggaagaggtgctcattttatctgactcgaaagtggctgttcaagctttaagttccgcagaagtgagtcctgattggagggtatcgaatgtttttttctctattattaatgtttctaaaaagtttgtagtttgtaattttcagtttattaaccgtactctaaatgcttttgcggatggtgtagccaaaaatgctagagttgctagnnnnnnnnnnnntttgtatcaaggggagggtattctcctagtgattcccatccactttcttaattaatgaataagtagttctttcaaaaaaaaaaaaaaataataaattagattagatactgcctactcctactattaacttccaaagtggtcgaattggcagaataaaaacgactttaattgatttcatgagctcttcataattcacatccatcatttgtagtacaagtagtgattataaaagaatatatgtgatattataattgatttttaatcttgttattgtttggttataattgactcaatgttttatttacggtgactatatggtgactattattatatagtcattaatgttgttactcaattttaaattgtaattggttgatgaaatattttcacaggcagacccttttatagaatatatcacacctatataattatatggtaccaatctccaatatcaatatcattactcttcttaatttttttataactccatctaaaaaagttggtgaaagtttggaaacccatccattttttttattattttctttttgtagataaaaaagtttgcagttgtaagctattaagagcatctaatgatagtagtgtcaatgccattgtgtagcatcaatgtaaattttaagaataatacttttttttttatctccaatagtatagtatctttatattttgtcacttatgctttccacctcattaaacattctctaaaatattactattggagatgctgatctaatttggatattcaatctcgttctatttaaaagcaatttgtttatttctcattgcgattgttatgcatttaaacaaaattaaattttataattaatttaactagttaatgaaaaaaatattaaaaaaatatatatttttacactctactaaaaataaaagaaacttgtattaaaccaaaaggaggagaaaagagtgattaatttggtcagacttatgtaacagcgtgcacattggttt

SEQ ID NO: 79736 - DNA, 1462 bp, Cannabis sativa
atcatcatcatctcattcacacaaaagagagaactaaagacttgtcatcttagtagaaaaaaacccataatattttttttctttttttgttttatttattttaagacctaaaaaaaaacaaagactaaaagcaaggactgttttttttttttttttagggtcttaactcttaagcaataaagggggtcaaaagagtagttagggacaatagagaagaattgtaataccaaatatgaaaacaacccatttaagcttatatatatatacacaattatacatattaatgcacttgactttatatgttgatttggagaaaccaaaatcagacactgcaattagaggttttgtcttcatttataattttgcttaggtgagaggacgaaaccacgtgcaatgatgagaaaaacaattctttggctattatctctctccttttaaggaccctacaaaatgaccaatttttattattaattattattattattattatttcagtgaaatggacgagggaactgccagcttattggtttgtcgtttgttttgttttttctcttataacagctataaatgcaagaaaaataaataaatcaatcaattatatttatatcaaaaaaaccaataaaagggttttttttttccagataaagatttgatattgaaaggaataagaagccacattccaatcatttaagttgaaaaaactggcacttcatgtatatataatatgagatatatattatgacatgattagaatgtggtaaaaaaaagattactatgttacttaggtaaacttttctaaccctataaatatacatattcgatttatattaatttctaatttattatgattatttgtataaattattttagtgtagttgactacctagctagatttgttattttctgtactagattgaaaaatgttgcaaataaaaaatgtttcgagctacgtggttttcattaattggtcgatactatatatatatatttatatatagtatgaatatgaatatgaatataattaaatgggattatatatgagattgtatgcattaaatttggagggctggtctgtcaagagaattattccatggttggctaatctaataccttgtcttacctaatactttcacatgagaacaaccatgcattatcacctaaacttggttgattcacatggcccaatatatataaatatatatatatatatatatatatatcactctctcactctaatttcggtttcttcattatattatatatatgtatattcttaaataggctgagattatggactataactggtcaaatgagataataatgagagatatttatgtctaaaagttgagtcacaaaaacacaccatcatcaatgtataaatatatgaaacacttctgcgtagctattatactaaacaatttttttttgagaggataaatattaattttttttgttaatttta

SEQ ID NO: 79737 - DNA, 3083 bp, Cannabis sativa
tttataattaaagtttaattttagcgctaatcttattagtaatcccaattaggggattaggatttcgtaagtatcttgtgtagcgtgcctaattatttagggcgttacatcttctctacttaattctttcattattataatttttttattttagcactatttgttagagattttattacaataaaacaaaattcaagacattattacaactttattggaatgtaatacaaggacccagaggcgaccatttacctgtgcaagaagtattaatgcacagggctcaaaaattaaaaaggcctaatatgacttttcagagttttttttaacccaatcttctactaatgtgtcatgccaaattaaaaaagaaaaacatgtttttccttgatttcttttccttatttaatgcattttaattttttttccataatatttaataattaaatagtgaatagagagattttgtagtcttttctgacatggtgagaggttttctttaattttttttcttcttagtgttttgtatctattgattatggcgtccagtagctatactatcaatgatctagaggaactatgtgctaatataaaaatagaaggggaagatgatattgtttctatgttcaactttgaggatacttatgcacaagttgctgatattcgcttgtgtattgttgggtgattccttactgccaaggctatcaattttgacgtaatgcgacatatgatggcatccctatggtaaccgggcacaggtatgtatgtaaagcagttggaaccacattagttcttgttccagttttatcatgaacttgatctggaacgtgttatagaaggaagtccgtggacttttaatcgtattcagttcgtctttgcacaactaaagcaaagggatgatgcactgttggttactattaacactcttgacatctgggttcaagtacatggccttcaatactgattcaaatttgaacatgttattcagggggttggtaactacattaatacgtttgtcgagtccgatcctaagaatttctgaggtatttagcatgaatacctgtgagtacgggtagctcttgatatacatgttccattgaagcgtagaatgaggttaagacgcaccacaggggaggaaggtttctgggctatattcaaatatgagtttcttcctacattttgctttatatgtgggattctcggccactttgagaaattctgtccaaaacgctacgatacacccccaaatcaaatcgtctagccttatgggacatggatgagagcccaaccacactctagaaataatctcatcagagcctagtggttgagaaattgtgatgaagatgaattgctacaatctggtcagctaaccggtagtgtgaacaaaccaattactatcaaccagcgcactatgaatgaggagttaagtggaggaaatcgtggtgcatcaaatttacaaatggctaataatagtaagtcaaagggagttatggggactgaggaaattatgagaaatattggtggaaagtatttcaacttagaggaaactatccacgtggacgctttggaggaggaattagaggagaatttgactgttaattctaaaccgtgccgtactaaacttgggactgctattgggcctcctgttgtggctcagtctgatttaagcccatctatttcttgtgggcttaattctgaaattatagaagaagatggtagtatttttgttgtgcatggaaataactatgtggtgggctcactaaacgagtctttggtgggtgttgttatccaggcccaccgtttacaatgagtatactaagctagaattaatgttgacttgggaacctatgggtttttcaattccttgtgaatcttgtgatctaaaagaaacccaatttattatttctttgtgaaactctaagtcatggtgatgttttggaaaggctacgtgtgaagttgggctttgaaggcctctactttgtggatgcaaggggtcatagtgggggtattgccatgctttagaataatagtgttgaagtccacttgctgaacttttcatttaatttctttgacattcaaattactgaggctggttcaatgccatggagacttacgggcctttatggtgagcccaacagaggtttacaccacgaaacatggaaccttatttgaactctgaaacaaacatcaacactcccttagtgtattataggggatttgaataacgttactagtcaggcggataagcgaggcggtaacaactacccttaagcattagtcaatggctttaactaaacacgcatcgactactatcttgttgatgggagagaggtcgaggttcatcaaattgaatcgaagttcatcttgaccgagccttggtaagccattgttggtcctgctcaattaattaatctcaaaatttcggcctcaaaccactgcccgttattgattccgcctactgtccaaaatttctttgttatagttcgtcaatttaggttcaaaaatgcctggttgcgtgagcctttatgcttcaggtggtaagggatagttgggtgctccatgctgactgtaatatcatggaaaaaattagttattgtggcgagaatctaacaacttggggtcgtgattatatgggtaatttctagaaacgaatttctaaatgtaaaaaagaaataagatagtggaagaaaggtcatgatctagattcaattcaaaagtttcgtgaggcagagaagaagttaagtgaaattttgaatcaacgtgaagtcctttggcatcaaaggtctaaataactttggcttcgcgagagtgaccaaaataacaagttctttcatgccaaggcgactgcatgtaagaaacataacacaatacaaagccttcaagataactcaggtactttggttgattgggaccaggtcttgctgctgtcattgtgaattatttctagaatttgtttttttttttctttgaactctaattgtaatgagattgttatgggaatggaaccttcaattacttatgctaaaaatgaatcacttctttgtccgattactgatgaagaagttaagaaagctttttttttttttttt

SEQ ID NO: 79738 - DNA, 2480 bp, Cannabis sativa
aaacattggatacttatgccactaaaaaaaatcattgggtttatgccgcttaccaacctaaaactttgggtacttatgctactatttaccctaaaaagaacagaaaactacttcagttgaccttggaaggtttgttgttcaatatataatatgaaaaagctatttcgtgcaagatgtgtcttttgtgattttagaagtctaagagtctccaagtctgtaggctccttacaaggaccttgtataagtaactttactttgaaagtgttgatttggatactacctttaatttggcatttattatatttttttctcgccgattttgtagcttgtagcaaaatgttcgttgtctaattaatttagcacaaacaggcatatgagaaatgttttcagaatcttcattacatagaacgacacgaggaacatacaattgcccatgcagtacaaactgcatataagaaaaccaaggtaatactcaactagcatctgcaattcgtgttattcaacttatattaactctctttgttttttgattaattcctttcattcctgcccccagtacaacttatactacttacttttgggccaataatgcaggtttatctttggcctgctcccactagaacgggtatgaaagctggaagaactgttcaaaccattttaaatttggcaggtttcaaaaatgtcaaatcaaaggtaatcatttgagtgccaaactgagaatccaattttcaattagcatttcttctcaagtctaaatttgaagtccttttttagtttgttgggggatattccctttagttgagatattagaatgacttttcctcctattttaaatggaatgatctttctgccaaaatggtgaaaaagtcattttatcaaaatggtaaaatagtcattctattggaatgtaatgttatcctataaactgctaccaaagaatggaatgaaaattgaatctattctatttccccaaccaaatggggcgtaaatgttcactataacttacgtttgcttcttgtcaggttgttgggtcgaggaatccccacaacacggtcaaggctgtcttcaaagcacttaatgcagtgagtgtttttgataatgtaaagttatttgagtctcggtttaacctagcaatttataaatttgtttccatttctgtgttattccagattgaaactccaaaggatgtccaagagaagtttggtaggactgtggttgaaaagtatctgctttgagggattactccattcataactgatgggtgtgctccaattattacacctttcctgagttttcatggattctttctttggattctgagaagtgagacgtacatcccgatttttgtttcagttagatgttataaaaatagaaatgataaaaatttccattctttttgttcctgtcaaatttgattttgtttttttttttcatctactttttgtttaataaccaaaagtaacaggaagaaataaattcgtgttattatcatgaagttttcataggtctggttttgttaagtttagtgggtttaagttttttgctgtgaaagtttagtgggttaagttatataaacatcactattttgatgataacaagtgtcatattcaaaattgagagcaaataatgttaggggaactttctgatgtagaccaaaaaaacaacaaaattacataaatacattgagcaggcatttttaacatttatacaaccaagaaacttttattacagaaatgtttcatgctcttgaaattgtagccgcgcggaaaatagctttcctcttccctaaaacgcaagccaccaatgaaaaactcacgccactgttggaaaaattccattaaaatgggcgatcgaaccagaaggcacacttaaaatcaatactgtgagttttgagatcacatattagtcagattagaggttaaagtgatactagaaaaaaattagtgagaataaaatatagttgtttatcaagatttttggagactaaatatttaagaattaagaaaatagtaaaatgcaaaaagtaaagagatgaagttttttaagtagttcaggtgttaattaactttaattcataagtcaatctattagcttttaatggtgtatttgatgtgtttataatatttagtaggaaaccctatctctgtactcttagggcccgtttagttgatggtaataggccagaaaggaatgaaatgaaatactaatgggcatgattcttttgtttggttggaaaataacaattttggaaaaacattccatagaaatgctattctcccaaactaacggaattctatttttcatttggtggaattataattccattccactactttggcatatcaacaaattatctctcttctactgtagccatgggccaagcccaccaaaccctaaccctagcaaactgaagattaatctgccgccattgttgtgactgtcttcttcgatcatctctgcaagtgtcgggttccttgatt

SEQ ID NO: 79739 - DNA, 1100 bp, Cannabis sativa
ctgacttgtggccaataacatgcacactacaaagaaagacccttcatatttcttttacaacagtatgctacagcactttcaactccacattgtcaaccaaaaacaaatcacataaaggttgaaatggcaaaaagaggacacagagagaatcatacatgtcgcgcagtaggctacaaggtccgttgttttttttacacaaatcaacatttttttttctttgcctgggacaaataattgtactcagacccctccatatcatatgatccttctaaggcaccaagcaaaggtaggcccatttttatctatgggacactatcaaaaaaatcacaaaagaaagcaagtaccagatgggcagaaaatgatacagcacctcttttgtatccatttccatacattgaacacccaaccgcatcggtgtgtgcttcattcactactaactaccccaaatttaaagaaccatccttcatcagcttcatgctaagactgttgaatcttcctcttgagtaatgccgagaagcctttctccaatctgttccagttttcatcattgccacgaactcatcgtagctgatacgcccatcctgtatccattaaataaagccatcagttgttttattctgatcataaatgtttcagaggttagctgttggattcgagacacaccttgtctgtgtccacttccaggaaaatgtcattggctacatctgtacaatcctctgctccatcttccatcaatgcatctctgagctcatctggctcgatgtaattgttcccatccctgtcgaagtaggaaaaggccttgcgaagatgctcgtcattggccattctttgtaggtgcaagaaaacagcaacgaattcaccacagtccagcgttcccttcccattagcatcaacctgtatcacaaaataaatgcctatcaaaatgagaaccaaaaagactaagcatatcgcatatacaagccaggtacgagcacatagcattattcctacaactaattacatgaatatgtgaaacaatagcaactcaacatatccatacgtatgattactcagtatgattacacacaagaaaaacacaagtggctccattaactcccaac

SEQ ID NO: 79740 - DNA, 2955 bp, Cannabis sativa
aaatttttgtttccaaatcactttagaatatcaatttatatatcatggttgttttaaagtgtaatcttaaaccaattgtttttttaattgggttttgtatgtattttttaataaattaacaaaattaaccaatcaaaaattacttaatcagctcatgatgatttcaaagcagattttttttaattgattatgattttttttttttttttgagagagaattgattatgattttgtagaaaaagaaaatagaatcatcaaaattatgcctattttgttgagacaaaattactcctaaatccattattaaaaaaaaaaaaaaaagaactcctaaattcaaaatctattatcaatccattaaattaagtccattaaaaagataaaaaaattacacaatacaattttttttattacgaatttttatttttacaagtcaaaataacattgttatgaaacaacggaaaaataacatttcatatttttgtaaaaagttttatcttttttgtatatttatgaaataatccctaaaaaaagagtagccaactaagcccattaaaaaaattaaccaattaagcccaatctaaaaagttaataaggcccacagtattagtaacctaacccatgattattcaaataatcatccaacggctagttttcgccaacgggttagacacctcggtgccgtgcacgcgccaacggtcataattctcatatgagcgtgttctcttatatatataaactccattatagctttctcatgaaaacaaaaacatctttaatctctctgatttgtctgtaatagatttcgctaaagaaataactaaatcttttctctgttttccgacaacccaagtttacttcccggccaaatattcttgttgatttaacaatggaaactccatcatcagcaagaagagtgacacgatctcaaacccttgctacccagaacggcaatggtattccaatttcaagtgagtcattttctttctattttttcaatttactgtttttcccactttagttttttgagttcttttcaataaaaattcaatctttatagattttgaaaagggtttatcgaattcgaggcaaagaaatggaaaacaagatcgttctgtgcttattgatataaccaacgattctccgattgttgggttagcatcgggaaaattggagactccattgtcatccatggcgaaaaaagccatgaagaacactcctgggtctggtgaggccttgcttaggggtcaagttaagacccttttacagaaagttgaagaagaagctgagctttcgaaactcactctcgaaagccgcccttttgttcatcttaagggacttgtgtattcgccagccgggcttctcgcccctactccggtgaatacaccacaaatcttaaatctttcaggtggtgatgaggttaacatgaataacaacaatggtttatcttctgaggcaccttctcccattgtagcagaacagttggcttttcaggtataacaattgagcaattttcttgtttattctttttcaaatgtcttttgtcttaattgggtagaaagaacagttgtttttcaggtagaacaaatgagtaattttcttgtttaattttcatgaaatgtcttttctttttcacctattttggtttatgagaacatgttcatcaaatcgatttgcatatgagaacatgcttaatttttgttggtttatgagaacatgtttatcgatttttgggcaggtgggtgatgaacatgcttaatttttgttggtttatgagaacatgtttattgatttggttgattgggcaggtgggtgatgagaaggcagaagaaagttgtaatgagttgctaaagagcatcataacaaggtctctactcctagatttttcagagaaatctgatagctgtgaatctgtggtgacacaactaggagatgggggaggagaagcagagagcaaagaaaaatcaaccccggatgatgatagttcttctatctggtctactcaggtgaacgctagtactcttggcgaggacgatgatgaagaagatgaagaggattttgaagaggaagaggactatgattttgaagaagtggaggagtttggagaagaggacgagcataatgagttagttgatgaactgtgtgattgtattagcaaaataagtatggatgagaagaaaacattgcccaagtttgcagggaaacgaactaagtttgtgtatgatagtgatgatgaagatcagattgttaaggttgaagaggagacttgcgtggattcggcggctgatggagcttcttcgccaagtgttttgagattgaatggtctgccaactcctaaggggaagcaccttaggtttcttgatgtagagaaggagagtagtgaggaatgagtttggtattattgaagtgttttgtcatttactcggtgattcttatgattgggtgggatttatgatttgatttttaaagccacaatttttgtggttgaattggaatgttctaaaataacacatttgatcaatgaaaagcttctcttttttgtttacatttttatgtcactttttaaggataaaattatgcaacacgtcaatgtaggaaggatctctcttggttttcaacaatgaagaaaagctcattgttgttcatgccaggatagctaaattgtcttcatttggttctttcagccaccagtgcttgtgtgtgtggaaagctcaacacaggaagtttcttggcgttgataagtaagacctttcagaaatggagttggggggacggatgcggtgatttggcatagcagaaatggatttccatggctgctgcggggagagtcgaaaaaacatttcaagctgtttgggtcctttggggtttaattaagaactactgcataacaatctgaattgaccaaatgtagtctaaaacaagtataagaaaaaatatgtattaaaaaagaagatccgg

SEQ ID NO: 79741 - DNA, 2437 bp, Cannabis sativa
tctttgcttcttttcagcttattccatataacactaccccaccagaagagctgaaatcagtgtcagctgggagatttagatcaggcaagcaaaacccagtttctttctcattttctaattcttctacgtcttgtggcggatgtggttgagcaacaagttgattgcgttgatccgcctctgtttgctgcgagattgaaccgtgtttactaactcctatcgcgtctacttgttctgctcggtaactaatttctgtcttaactttttgtggagaatccaattcaagctgaaatgggaaaaacaaagaaagaaagaaagaattgtcagaatcttatatccttcttacactgcaactatacaaatctacaaatgacatttgtcacaccttaaatctgttgaagttttcttttgtggctttttgtttctcaatattgagaagcatggttgcaatttcctgttcagtgaaagaatgtgagaaacaacagccacacatacttttatagaaagggatatatttatgtatattatataaatgaaagaatataatatagtgtgtgaaacacatacagttttcaactttttcctttccctcaatagcaaagtctcctcctctttaagttcagctaatgtctgccattaaaacaaaaaacaaggcattttatgttacttcaattttactcaaaagcaagataaaaaaaaaaaaaaagatttagatctcctaataagtaaaaacaataaagaataaaagtagaacagagtgattataatgttttatgacagcaaaagcaagacacaattaaagttatatcataataaaaggttatgctattctgttttcctctttttactgttggttaaaatatagtaatagtaatagattaattttattaccttcttctttcttggtctcttggaagtagtgggttcacctttgacagaagaaacctgttcacataaccccaacatttatcaatcactaatttaaatgtaactagttaaaaaaccacacaaaaaaacaaaaattcagtgaccaaatagtgaaaacacatttttgcatattcacattatgaccagtgaccacaaaccacttcaaataagaaggcaaattcaaacataaagtcaaccctccatctcaaaatgttgacttttcaatgttttatacactaacgtcggtttccaataaagcaagaaccctaatactgttagttaataatattttgaaggttgtaataccaataacaaacaagtcatcttgccttgcataataccccaatattccatttacaattctatctggtcccatatacaaatataaaaacaaacaaaaacactttgtcctactttgatattttcttatcaaattttcaactttcaactccatacatgaaacaataatttgacccaaaaaaaaacactaccttttaggaacccaattacataaaagctacagtgacaggctgtcacagaatgaggaatgacaaactaatcaccaaaaaaattaaataaactccatttattcacaatgcccaaggataaaaattccaagctctagtagatcaaagctgtcactcgaataatcttactgactaatatatatatatttttgtcttttattttatttttatgggatctcctcccctaaagcggtgtctcacgtgaaacgacgacgctgggacccttaaaaaactagtgtgtgttctttttttcactgttgcgtccgcagaatacgtaacgctgtgtcgaccacaccgaatcatttcccaacataaagtgcacaaccactacccacactacaccaaaccacacgcagacctattttgccacgaaaacacgccaccgataaagcaggtgaccaattttcccaatgaccaaaatacccctcttgtaaaaaaaaaaacgcttacacgacgtttgactttcttgtttttttttttaaaatatgaattatcgttacgaactaactcactccgtcgatatgtatatgtatatgtatctccgctttctccgccaccggagctagtggtggccccgacgtgagagagcggttgtattaattattaaagaaagggtattaaagtctttttatgagcaaaacgtgataaaagaagaatcattctaaacttctgactcttttcgttgaatagaagtcatcaattttcttaagatttttctttttttttttcaaaagtacacggataaacgaaaagtcatttagttcaaaaagaaaagggtattttagtaatttaaagaataagaatgaagcgccaccgattatcatcgagatgacgataatcggcgaaaacgcgatctggggtcgaatcagctacgggagatccccatgcaacggaggtcaaaatggtcatttaggttaagatactgaatgttgggaagaatgagaaggctcctaaaaagattgaaaacgaaaccgaaaaaaaaaaaa

SEQ ID NO: 79742 - DNA, 953 bp, Cannabis sativa
tatattataagtattatatgtgaatatgaggctaggttattttgagataactccactgtctctcaaacaagggtaatctcattgggactccaatacctttgatttttaattactttaaggaaatgtttcatatttgtaattattttatatgtattatcgtaacttgaagagcttagatcttgtaataaatataaaataataagaggaacataattatatatataaatatgtatgactgttgggcaatatactatactatatagtaggttgaaatttaatattccacacagcctgtatgtcatttatgttttaaagttcatagaaaagacaatagttactatactatatcttcatttttgtttttattttattttccatgtgacccattcttattattttctaataatagcatataaccgccttatttaaatatgataaatgaaacaagctatacaggttagaacaactattctgatacttagtgattttttttaggataaatacttaaattctaattaaaaataattttcatttaagttgagagcaaattgagtcaaatcgtaaactgctatattaacactacatttgacataactctagagaaaagagaaaaaaaaacttgaaatgtctacaattacatcatgaaaagatgagatttcagtttgtgatcttaagctagaatctgtcataggttgttatgttagttggtctgtttgttaggttgttcataacagttttctgttatgtttgttatttccaatttctgctctttatccttgtataaatacatttttattcattaataaaaatcacttctattattttcactaatatggtatcagatgcttaagaattctctcctcttcccatcatctaaaactttctgttctgccattgatactcaaacatagttcgaactcgtgctactggttccaggaattttggccaaaatc

SEQ ID NO: 79743 - DNA, 6292 bp, Cannabis sativa
tctctctctctctctctcgaattttctagtgggttgtatcccgttacagtttcttctggttcctttccagcttgatctctccctcgtggtgatttactcaactttgcttaatcttctcattttgtaatttcctacctctcccttcatttattgtgatttaaccctttctttaagtcttttgtcctcttgctcttctaattaattaccttgcagccatttcttcgcgtctccttttctctcttcatttattttcagatgaaaatctccaaaaaaatcttacttcaggggtttttatccttggatcttttgccctctctcttttgatatcccatccccattaatggaggctgcctttttggctctttcaaggaggaagttgatgattacacctaggatccttggatttggcctaggatttttgcaggtaaggatgatgatctctgaagctaccttcctcaataagaatcgtacatgcaagtatttctctaattcttcctgggtgtgaatactctggcgatctttacttttctactttcttttgctatcgttgtctggaaaatactgggaatctctcttgcctatcttactctgggaaatggagggtattactgaaaatatggctcatgtcctaactcttactgaaaaataagcaactgtccatgaactcttggatgatgtaggaggggaataacaaactaggaaagccttctatcttgtgtttcaagtccttactactcgaactatcaaaattgagtggtttgaagaggctatgagaaatccttggatcattcgagctcctattaccttctctaattatggtaatgggatgttcatggttgagtttggttgtgaaggtgatatgcagagggtgattgagggtcagccatggcattttgaccactgtttggtcactagtgctaatccagctggccttgacactctccttcctaaccaactcagatactctcccttttggattcaagcccactccatcccttttggtatgaagtcctataagcttgccaaattgattggaaatgaagttggggatttccttgaagttgataaaaccactctcctcaaagtctctaacttattccttcgtgtgagagttctgcttgatgtctccaaacccattccaagaggtatcctagttgattttaggaattttcataaagagaaatggttaaatttctagtatgaaaatctgtcaaacatttgtttccattgtggtatgtttgatcacaccttaactaaatgtgtaacttatctaagaaagtgtgatgacaatgcctacccaccccccactccgttacaaaatccctttgaaagcccctgctaagtctaactttaagcgtaacccatttgatctctctaactcctttcctttagaggagcttctattgccttatggaaatgttgattagagtcttgctgctgctgtaagccaatttcttaccactgaggatgttggtgcaggatcatcctcctctggcactgctataaggagggatgaggctatttctcaaagattccttgaacacaatcctatttctactcttgaattctctacctttgagagaatcacttctgttcaaggctttaaccctggcctctgtggtgttactccatttggtgttcactttgatgcctctcaagctacacccccaacaattgctactgttgtgcatactccgactgacattgagcctgaaactgttcaggacattgctaggacttctgagaagtccaaaggtaaagctattgctggtgcgaagcgctctgccttcattcctcattctatcatggtgggggattctcttaggaatatcctcaaaagagctcgtgctagccctgtcatcaatgaagttccatctgttgttgcttcttcctttgaacaggcgggtgctgcagagcaaccccgcccaaaaaaatgattcttatgagttggaatgcccatgggttggggagttcccgggcattccgtaatctctcccttattgtaaataatcataagcctagctttctctttattatggagtctaagttgttagctaatcactgtgatgtacttaggactagactctcttttgacagtgcttttgaagttcctagaaatggtcttggtggaggtcttttgttgttttggaaaaggatgttaatgttactattttgaactactgcttaaaccatattgactgtattgtaacttttgaggataatataactaatcacatttcttgtaattatggctccccttatgttcatgataaaactcatacttggacacttttagataggctttttgataatgcccctacttccctggctcattctaggggattttaatgattatctctctattaatgatagaagtagtagttcttccccacctcactatgctatgattaatttccaaaattttgttagcaagtactctttatcaccagttcattttgtggaaaataaattcacatggaagcatagttccacttatgaatgattggagtggggaattgctaatgataagtggttccacaactaccccgaatccattcttcatcatcttaacttttatggctcggtttatagggtgttaaaattagttctttcttatgagagtatgcacaaagtgaagagtaaaagatttctttttgaaaatcattggcttaccgacccctctttctttactgctgttagtaattcttggaatcgttcgaattttgattctaataatcatcctttatcaaatttcctaagtaagcagaacagttgtataaatgctatccaaacttggaataaatccttactaacattaataaaattgataggaagcttagtgatgtcctttcttcccttcctgcttctaaagagattttgtctgaagtttcaaatctccaatctcagttaaacaaccttctttataagcaagaggtttttcggaagcagagatctaaagttcactggcttagagctggtgacaaaataccaaatttttccacaataaagcctcatctcggaaaaaaaaaaccaatttcattagaaaactcactcttgatgatggcactaccatctctagtcaagttgatattgagaatgaaatctgtcgttttttctcgactctcttccattctcagggcagcaacagagatgctactaatcactattgtctgttattagtactcggttaactgctcaacaattcaacttgttggatgctcctttcactgctaatgaagtcaagtcggctttgtttcagctttcaggagacaaagcacctggctttgatggacttaacgcctatttttaccaaaaaaaaaaaaactggaacactttaggggaggatctgtgcatggaaattcttgatattcttaacaacaatgccagtatgaactctattaatagcaatctcattgtccacatcccaaaaagatctaatgcctcctcacttaaagacttcagacctattagcctttgcagaactttgtataagattgttgctaaaactattgctaataggattaagtctattatggaggacattatttctcctactcagtgcctttttgtccgatcgactcatttttgacaatattttcattgctcaggaaatgattcatgccattatccataggaagttgggtaaaattgggtgggtgggtcttaagttggatatggaaaaagcttttgaccgggttgaatggaactttctcttggcgattctcaaacatttcaactttcctgataaaatcactaaccttatctgtcaatgtctatcctctgtatctattcgatttaatgtcaatggtaacatttctaaggaaatctttcattctcgaggactgaggcaaggggatcccttgtctccctatttatttttcctttgttctgaagggctttctgctgctctttgcattcaacagagacttgggaattttaaaggtatttcaattgcctgatctactccggtgatctcgcatttgctctttgcagatgacacacttctgtttgctaaggctactcaaccttcctgtaatgctcttaaagtagctctccaactttatcatcaagccactggccagcaggttaattttggcaaatcatccgtctttttttcccctaacacccctccttatgtttctgattatttttataataaccttcgtctttccggtaagccttttatgtccaagtgccttggggtcccttaatgctttggtaaatctaaaaaaagtagctttaattttatccttgatcatgtcagttctaacctaaatgtttggaacaataattttttttctaaagcgggtaaagaagttctcttaaaggttgtcattcaggctatcccctcctatgttatgtcatgttataaattcctacctctacctgtaaaaaaattgagaagctcatggctcaattctggtggggttcttttgggaaaaattctaaaactcactggaaatcttggtcctcactttgcaattctaaattttttgggggattgggttttcgttctttaatccaccataaccaggcttttttggcaaaacaagcttggagaatttttactacacctgaatctcttgcttctaaagttcttaaagctagatattttaaaaactcttcttttttggaagcaaggaaaggtcattctcccttgttctcttggactagtttgctttggggtagggatcttcttaaggatgggcttatttggaaaattggggatggaaactccatccgtacccttcaggatccttggtttccaaatctcaggtttcttaggtacaaggataactaacttcctccctcagacaaagttaattttttcatcagttctaatggtcaatggaataagaataagttgtctaattattttgatagtgacacagttgctagcattcttcaagttcctattggaggacataataaagctgattgtcttatttggaaaggagatcattctggtctccttactgtcaattctgcttaccatcttgttaatactgcttctctgcccccttcatcctctaacctcagtttctacaatagttggtggaagaagttttggagcttatgtattcctcccaaaattaaaaaaattggttggagaaccttttgccacattcttcctacggcttacaatcttcatacaaaaaaatagttccctctccttcttgctcttcttatagttgtccttagaaactgtaactcattcactactagactgttccagggcgagacaggtttggaaactttctcctttatatcatttttaccttgtgcataaaaataaagatattagagactttatgttatctggttttattgctctaaataattatgacttttctctactgttgtgtacttttatggtctatttgggaatttagaaagaaaaagcttttcaggaatactcatttggatgttgaggacttagtgcagtggaccaccaactacttgtcccagtacaaggacgcacaagctaaaagaattgatgttgttccagtctgcaacttgcatgccacgacaaaggaaaatcaaacttgagaaggatcttaccaattgtacacagatgctgccattaatatcagaaacagtaagattgggcttggagcggtggttaaggactggaataaataggtaatagctggagtttcattgcctttatcaattcaagctacacccatcatggcagaggctatggccctaagatcggctttaaactggtgctgcaatataagaattccacttgcaaatattgtcactgattccaagtagctggccagcaagattaatagccaagagaaagagctttttgctcttgctgatgttatagaggacatcaagagttccttgtctcatatccccaatgtttctgtatgctatataccatgagattgtaacactcatgcacattatatggcaaagaaagctttagagctagatgaggaattagtttggaaggatattcatccaaacttaaacattgtaacttgatcatctttgttttatctgtaagttacaatcgtcaaaaaaaaaagtagccagaaaaaatacaaaagaacaaaaaaaaggaaaaaaaattcacaaaaacaaatccacacaaaataaaaaagaaaaattaaactgccataaaaactcagctctcttgaatgtttagtaaatctattcaatatatcatatgcttttatttgtctcaagaaaataactagctccatcacattaaatatttaaaataatcaaatacaaatagtatatatgagtttcggaggaggtttcaatggttaca

SEQ ID NO: 79744 - DNA, 2317 bp, Cannabis sativa
agtcaaatgaaaattccatgagttaggcaaagacatgacaattcggacctcatgatcagtaatggcctgattacaagcgtggcagcgaaagcattctggatgccaaacaccattcatacaactcaaataccttccattaccgatcgcagcattgcagccagcacaaatcctgcaagccatatgccattgatggttataattcaattgcataaactacaatctcaatttgcaaaaggaactaagaacatggggacttgagacattggcttataacagtagtaaggcgactgtgtttacctgtagccagatgaaaacaagaaaggatgaggcagaaacaagctgccgttgtcatgatggggaggagactccatgctcaggctttcttgaatagccctggcaagctgttcatcttcctctaattgaacacttgaaagcagttcttcgtcttcctcaactttagccggttcttcatcttcatcttcatctgattgaagtataacctgaactggttcttcaacttcatcttcatctgactgcattgtagcaatacattcaacctcctcgagttctgattcagactcggattcggattcaggttctgaaagtagcaattgtcatgagcataataatcttataaaatttagtacacaatcaaatactatcttatctcccatcatgtgttacttaccagctacttttttccctttataatcttgttccgaaagggatagagtaagtgcaagtgcaatttcctctttgtcaaaatctgacaactcatcctgcaaagaccaaagaatagtaaccggcattgcttccattgattcagttcagagaaattgccaaaaaccaaccaaattattatgaaataaatccaagaattcatttacccctgaattatggttctcttcataggttccatgatagtgcccacgtgaggttttgtgactagaacctttaagaattttgttcagccaacccataatccaaacttgttcctgcaaatcaagtcacaaacatttttagctaagtgtcaaatgggattgagttcatacataacatggtcatgtagagaatatggttaaaagggtatctgaattagattaaagtagacttgttaataacctttcagaaccaaatttctagaccaagaatagaaaaaacacactcaatcacataacccagaattaataccaaaaaagtgcttcaaacccaggattctaatatggtatgacaactttcaccacctcagagattcttaagaatgcttttagaatcaatcattcagataacattaaagccacatatttaaaaaagcagaagttccacctacctatactcttaaatattgttattaaagaaggaaaaataaaagcacaggggtatatcccaatcttccaactagataaatagttgataaggcagatataatgaaacaagagaaagaaaacaagtagagtcagaaaagaaaccccacctacaataatagattaataataaatctgcaaaagaatctgatggatccccagatcagataaaatctctaaattccatgaatgcataatcaccaaaccataattaaaccccaaagaaagaatctttccgccatgcccagaaaagaaacttagattaagaattgaaaagagatgaagaaagaaaagtagtgagtgaatagaggaaaggacttggatccacgtccaaaagggaaaaaaggtgcgaaattgaataagatcaattgcaaaaatcaatggagactttatatataaaagttgagttataaaagggaagtagtgaatatgaaattttccaccttccttaaaagccaacaaaaaaaagatagagggaatcaaaccaaagtttgaaggttgtactccctaatagtagtgatgagtgttgttatgttgaattttctttctttgtttctaactctttgtgctttttcatgtggaccctcccaccaaatttcaaccacatttcacaaaatgtcaaaaaccccatgaaagctttccattctagttgcataagggaagagagagagtacagaattcctgaaatgtgatccctttgatttgagttacagttaccattcaccattagtggaagtgaataattctctcttctatgtcctgctcaaacttagattcagacccactttgacacgtggagtacttgacttcttctcccttctattttttttttttgacaagcttctcccttctattataatctcacaaatcaattaccaaattcccaaaccttttctcaatttctcattttttttatatataattatgtaaattttaattttatattttttttt

SEQ ID NO: 79745 - DNA, 1870 bp, Cannabis sativa
ttttagtatcgcggtgcgggtgcggtttggaaaattagaaaaaccgcatgtgcgggttggtttgaaaaaatggttaaaaaccgcacaacccgcaccgcgaacacccctactggttggtaaggtaacacactagaaatgatttaaatttacgctctgaaattagtgactctaactaaatatataaagattacactttttttttttgcccaaaagatcacacgttaaacacagtaaagtaaaatttaacatgtgtgttagcatgtaatttttatttatttacatactaaaatttcaaaagatatttaaattaaattagttgaagaaataggaaataatgtaagaaaaagagagaaaagaaacgattacttgttccaattgacatcgactccgaaatctctgatgaaggttttgactagattgacacattcacacgtggcaaatcctatatggacgtttgtgcatgaattttaaagccgtcgttttcgttctactattttatctacatcctcacatcattattttttattttattgacaaaaataatgaatcaatgatatataaatgaaaaagccgtgtattttataatttggatttatcctaattttaatctttctctgattttcatgccacgattgtgtacacaatatatacggatagttattaaatgttataatggcgacgttctgaagattccttatatatttttcgtcttcatcttgttgatgactgtatgtagcattggtgatttgacccttgattttatcccattttctcctcacaacaacaactatattcaaattgtcaaaacacccttctatctccatatttcagacacatacagaaaaaatagggaaccgttttcttatgtgtatgcagaataagcgaaaaggagttacaacacatacgtagaaaccaaagataataacgggtaatgcaatgatctcttctttgatttacattatatgatcatgcatcatatatatctcttaatcctgatgttttttaagagcagggaaattaagcgatgctgggaaatggggttgttgggattctttcagagtcttcaaacaagtgggagagaagggtacctttgaccccatcccattgtgctcggctccttcatggtggcaaggataaaactggtatttctcgcataattgtacagccatccaccaaaagaatccaccatgatgctctttaccaggatgttggctgtgaaatatcagacgacttgtctgattgtggcctcattttgggtattaagcagcctaaggtttgattttaattcccaatctttcttaatttgcagagaagcaggattcaaacttactcaggcacaattttttattttttttcataaagattaattttgtgatttttcttaatttgagagagaccagtgttcctacttacatatatttgtaataattttttaaaagatacatgtagaagttagggggaccatagcatattccatttgattctatgctcaatgagtataaagttgactttattgtttatactaaaaagttcattgtgcatgctattacactaaaaagtgagcttagattgagaccatgaagttctttgaatattctagtgtagattgaaggagtttgacatgtcatgttctgtttttgtgcagatagagatgattcttcctgataaagcatatgccttcttctcacacactcacaaggcccagaaagaaaacatgccattattagacaaggtatcatttgttgtgtataatttgattgagtctttgttgtgtgttgacacttgacaatttattgtatgcatacagatcctagctgaaagggggtcattatatgattatgagcttatagttggagagcatggggcaagg

SEQ ID NO: 79746 - DNA, 2120 bp, Cannabis sativa
tatatatatatattaatccacattcaaagttaattatagtcttaatgtttgagatagattgtgtatataacaatttgcgtgtaatattgatcacctgaatcacattgagccagtatgtcaaacatactttattgtctctactccccaagaagttcaatgcactccatgcagttgtgtttttgggcattaaagctttgtcacgatgaaggtaaatgtcactataaacatattggaaagcaccaagtactctctgctcaacaggagtagcttggtctccaagtaatctcagagcattaggagcatgaacagccaatatgcacccattatactcttctttagaaccatcttcattgtgaactacacaacctatgaaaaaaaatctcataaccaaattaataataacttcaggaaaataaaaaaggcaaatgtaattaagccataatttctaatgtaaaatgagtttgagcactaacccttatcaatggttgaaatcatttgtacctcggaacagattttaatttcacaacctctattctctagctcttctcttaactgtttagtttaataatagtaatttttaataataataatgataattgaattccgtatttattattttcataaaagttacttactttatttacataacgtcctttgacagtataccatcgaggatgatcataaaactgcataagccaaaaacaacaataaaattaaatgttattactaatatgtacatatatatgtgtccaaacagagtagaaacttctatatattatacctgaaagagatggtgattgcgacaaatcgaaagggtagagaaagcagagaaactcataataacttctgaatggcatgaccatattgagcaaaccattggaatctatatatttgcatacacaataaacatttataatattaaatgttattactaatatgcacaaatagagttgagttagtagaaaagtttaagtgatctcacaagaaaagctttcataaacaagtcggagtaaccatgagacttaatgaagtcgcctaacgatttgttttggtctatgtccgggttgttctcaagcatatcaacatagctaatatgacccaagaaaataaattagagaaagaaatcaaataaatgtataataaagaaaaggaatacaaagtaaacagagaatatgtatatagttgaattgacctgtttgcatcattcttgaacttaacaatttctctaatcatttggtagaagtaaggattaaagagatttttcttttgagcaaataaacttgagaggccatttcgagtaccccactcatatccttctccttcatctaagctcactgagaatgacatatctgatgtctccatctcaattccaagcttctcaaaaaactccatcatgttaggatgttctacctgtcaaatatttaattttttaaaataagagggggaatcaagttcattcaactgagaacaaataaccaattacaatggatctcacatgtctagtcccatgaaacattaatgttaaagcatatgagagagaaatgggaatgttaaagcatagtcttcccaaacaacacatgtaaatgtttcacattgatataagaaagagtttatctttataaggctaaggtataagtccacttattgtcatatgattttgaggtagaatctccttagatttgtaaagtagacactatctcttatgttaggcgcgacccacaccatatttaacacttgtaaagtagactctctcactgtatgatatgtgcgacttagaccatatcggtaaactataaattttaaagtgctatgaaatattgaaattctaattataaagtgtgacagttagtagtcccgtgatccgtaagggcaaatattgggtaagctgtgcaaccacacatcgcctgggaaagatcaagtgggatgattctgagactgtgtaggtatgagactacacagttgaggagagcttaaatggactgattgacactacctatatcaacaaggtgcatcttgtttttcggtatagcccatctcgaaagaactccacatttaagcgtgcttggcctggcgcaattttaggatgggtgacctcctgagaagttttcctaggaagcgtg

SEQ ID NO: 79747 - DNA, 1985 bp, Cannabis sativa
tataaaattagaggtaaatttgattaattaatgaataaaagaggcatttttcaacttacccctattcagttaccactttcaatctctaaaaacagaatatgtaaaagaaaaaaggggattatccaaaaaaagacacaaatatgtatatataaatatggttatacaaattttaaatatttttacaatttgatttcaaaaaaataatattttttataattttatttacataagattattttaatgttttactattattttgttgttgattttttattatttgtatgttaatttgatattaggttattattacttttctattattttcatgtatttttttgttatttcttgtgcctttatagaacaccgtaaaaaagatagctttgaaggtaaaagtgtaaaaaatttactaaaaataatgaaaaaaaaaaaaaaaatcaactgaaaatgtaaaacaagtaaaaaagaaaaaagccataaaaattaaaacacaaatattgatcaaactcataggataaaaaagaaacgtacctcacgtaattttctcttataaaaaaattaatatagctcaatttatttatgaaattacaagtgaaatcatcatgcttaatcaacaatgccatatttgccacatttttgtagatacaaccaatagttatttttcttaatgttacacgatccatcatccctcgtatcattttttgcaaattttgtttctcaattgggcctaaataataataactagaatttaaaattaatttttaggcccatacttttgggcccgttcatcgatccactctctcatatccttcaacacaagagtaacgttctcatccgtctccccttgtatcaacgagtggtacatcccatcgtagatcttcaaagtcttgtccacactggatgctttctcatacaacagctttgatgacgaaggacacgtcaccccgtcatcagtaccatgaacagtcaaaaacggtgccgttactttagagaaattatcctgtatgtactggcacaccctagccaactccctcatagtccccaccctaggtggacccgtgtaccttctcggattagatgctatgatcttaagcttctcagggtctttgatcgatttcccaaccattttcttgtcaggcatagcggcccacgtgtcagccacaccgaagagaagaccgtagaggaataatctcaccttactgggcttcatatcctcaggcataacgaaaagtggtgccgaaaagatcagcccagtccacgcgtcgggatctgattggaagtacatgagcatggtggctgcgcctcccatggactcgccgaaaagaaaagccggaagttccttgtaaggctcgctacggcgaacatggaggaagaaagataaagaagtggcggcgactttctccatgtcaccaaggtagccacgtagaccttcggatcggccgtggccgaggagatcggcggtgaatacggcgtatccccaggtagcgtagttgatgcagatcttctggaagagccagccggcatcggagccgtagccgtgagtcatgtaaacagagcctttgagttttgagctggtggaatccaatggaaggaagctttgtgtgaagatcttgccgtttggtgtttcgaaatatgatttggtgtttcgcaccccttgggaggtatagtactcctcctctggcatgtcaccccagaaatttggtggcgcttgggacgccatggcttctcaattccgagattgaaattcagaaaaaagagagagagaataagaaagttgagtttaatgggtaaggatgagtttgatgacataaaagaagactgcatatgatgagtttgatggggtccattggagttggtgatatatgataatttaatttaatttttattaataatgattattgtcattgggatgggtaccctgtgtttttagcaattctcattgaaaattgagttgttttgggataggattataggagagagagagagag

SEQ ID NO: 79748 - DNA, 948 bp, Cannabis sativa
tttttttttttttttttgcaatgcggttgaagtgcttagaatcggcatctttttctttcaaaagaaaataaaaatggcatcttctaataatattgtaaaatagaaattttcaaatggttttattattcccatttcaaaaaaaaaaaaaaggtttattattcgttaaattttctggaataactttagagtgggacatagaagtctaaatattttagtagatttcatctgtgtgattcattggttgtggctgtcatttgctttacagatgctaaagtcatttaagaaattattttgaaatataaaaggaattcttttcaatatactgaaaacaaacaaagaaatatgaataataaaacaaagaatgataaagtgaaacattttaaaaggaaaaactatttaccacattgttcgtatacgagtaaaacatgagaaagttttggtgctaatgatacttcaaatgttacaattttctggtttttatcagttttactaaaacttagtatgaattttgtattttattctaaaaggattctagtgtcactagaatttcttgttatctcaaaagttcagagaataatatttttaggaatgttacatgtgcacgtccacaaacttggtaattagctttacaaagtggagttgagaatatgtacctaatctttagacaacactataatttgtactggaagtctcttattcttattgtcgcagtttgggaattgagaatttaggccgccagcatcttatataatgctttccttataattctttttcccattacatgcattctatacactttattaacatattaacatactttcttctatatgggtctttcttctatgccaattaacatttgcttatttcatcatttcttaaacactttcttgcgtgtttttcaaaaaatatactgcttggtttattaagcagttcctatatctaatcgtt

SEQ ID NO: 79749 - DNA, 2051 bp, Cannabis sativa
  modified_base (1078)..(1095): a, c, t, g, unknown or other
gagagagagagagagagagggttccaccctacccatttctctctctatatatatttatcctaatttctagaatattatctatacacacctatatttatagggagtcacggccatctcttatatatataggttcaattcgtataatttattctaaatgcatggtacatctgtgatgcaaatataaatgtacgtatatttatatggattccatatatatagataattacatggtccagctaaatcaacgtattcattatatatttcctatacaggaaaaataacgtatggataatacactttaaattttcttatatgcgactgacctagattttatttgtaatatatttactaatatagtagtatttacgatcttaattttattattttgacctatttttctttattataatcaactaattatttctacagaatttcatgtgtgtgacacacatatatatatatatatatgtcaattgttagacaatattatcaattattttttttgtatttatttattaattatgggtcatcttctaccagctagattcataataaccaaagctaaggttttaatatttgcatgcatattttttgttgtctaaatttacaaatacttatataattttagttcccatgcatgcataaataattatcctatttggaatattctttttcaatatatttgatcgatcaaggtctacctaggatcttgaatcaagatcgatcgcattatatatattgatcattaattaagatcatcaaacaccgattgccatatctccaaccaaatgaaaacttacattaattaaaattaaaaaataaaacacaaaaatgggtaattaataattatatatatcttaattattaccacatgtatgtactttggacaactaaaagaaccccaccctccaatgtttccatggcactgaatttgatgccaatcgatgaccatatatgatttagacaaacaaccttgtaggtaggcagtcatatttgtgaccacaataaaaaataccacatcatttttttatttttcatttcgaagagtttctcaaggaataataataataataataannnnnnnnnnnnnnnnnntaataataataataataatatcatggtggcatgcattaaagtttaaccatgaaaattttcacataaaataaaagattgtttgacttcataaaataaaaattgtttttaaattttaaaaataaaaaacaattttttaaagactaattaggttgtaaagtaaaacgaatagagtgaaagaattgaattgagtgcattaagaaatgaaagcactaaggccagagtttatatacaagtgcagaaccaaaatagaacaagaagcaaaacaaagaatcagttacaaacataacagaaataactaaatgtaacagaaagttagttggataagaccaacggactttgtttctcttgacagcccccctcaaatgaagtgtcctctgaagaagagacaccgagtttgcttcttaaaataggaaaacgactgctggaaattggttttgtaagacagtctgcgatttggtattgagcaggaacatgctgcacttgaatctctctattgatcaccttgtcacgaacaaaatagagatcaatctctatatgtttagttctggcatggagtatagggttgccagctaacatgactgagctgatattatcacaccagatcagaggggagttgtgacagggagatgcaattcaataagaagagatttgatccaggttatttcagagacaactgctgcaaggctccaaaattcagcttcagttgaagacctggagatggttggttgctttttagattgccaggatatcaagttattgcccaagtaaacacagtaccctgttgttgatcttctatcatcaggatcagatgcccagtcagcatcacagtaagcttcaagcttaaatgtagagactttgtgtagatgaaatccatagttgagagtaccagccaaataccttaagattcgcttgactgctatccagtgtgactgaaggggattatgcataaattgaca

SEQ ID NO: 79750 - DNA, 1289 bp, Cannabis sativa
  modified_base (435)..(438): a, c, t, g, unknown or other
  modified_base (614)..(622): a, c, t, g, unknown or other
gattttaattattagaaattgttacaatactcatttatactatttaaataggtattaagacattgtagaaatatttagctcataaatgagttataaaatgtaatattgggttttctaaaaataattactttataattgatgacatgttgttttatggttattctcctcagtataaagctagttttgaaataacatttaaacatacataaatttattaagtatgttttcaattctcttgtctaatatttttatcccagtaaatactaattaaagtgcttgtatcaactatgtggtgaagcaattttaatttttaaatataatccttgaataatataaataaggctaattatgatttttgccccttaaattttgacatttaccaaatcatgtctcctgaacttttaaggtcattaaaaatgccccatgaactattgnnnntgttggatttaaggattttttttaaattttagtaaaaaagtctaacatggatgaaagtttaggggccataatttagtacattttaaagttcgatgggcatgatttggtagatattaaagtttggggagcatggttcgttacataaaaaattaatgaaatagtaaaattgaatgaannnnnnnnnaagtccttaaatccaacaattttaatagttcatggggcatttttaacgaccttaaaagttcagggagtatgatttctaacatatcaaagttcagggggcaaaaaatcctaattagcctataaataaatgtctttagttcactaatacatatgttttatcaaagagaacacattgctaaaaaatcttttttaggtttagaaatccaagaagttattttcattcttctttaattttcgtttaagtgcttgttgtagatatattaacattttaacaatcttgaattggatttataatattatcatgtggtagttttctaaatttgaaattaatatggtatttgtggagaaatatatttataactagttaaatattaaataaaaatataactattctttgtgctcgttctttctcatgtttttttttcttctttttgaattcaacattttggcaataggtaccttaaatagatttaaaaatatataaaaaaaaatatttatgatgaaactcttttaacatttaaaattgttatacatatgacttaaataaaaaaaaatagcgataaaagtatcttatcttatgattttattgcagtcgtactctttttttagttgtaaagtgtcaattaagcttgttaagtatcagctgaaaaatatgcggcgatatattt

SEQ ID NO: 79751 - DNA, 2383 bp, Cannabis sativa
agactagaatgattattgatagaccaaacttgaatggaatagtttagtcttgaatttttcatttcttctcttttaagattgtcttctagatgccaatctctaaagctgggaatgcatatactttctagtgcatcttagtgatccactcacatgactagtggccaaagctttagattgagctatggagtgctcttaatttaggttttatcatagttcatgaatgttttccaaaacgagtaacttgactttaaggaaaatgtccaaatggaaactcctactgtaaaaagtatcacaattattctgcaaagttagtaaaatggagtttctcccaattacatgtataatgtacaacccattatccactgtttgaagtgaactctcaagaaaccttatattgccatttattatgaattgcatttgcagccacaaaacagtctgattctacttccagcagcataactgaagggatatcatctatgaattggagtcttaagtatcatccgttgataccctatagacgtcaatgggaagtaataccatgtcatttcaatgtagattcatgtacccaaacccaaatgatcataatttctggttattgggtgggaccggattttgatgatggctggggatatgtagaagcttttgttaatccagttacttgatcttttttggtaatttttagatttgcttctcttttactggattcttggtttctatctcttacctcatcgagttcccattgctcttttaagttttcgttatttcataaccacatttttggcaaatctcactgcctcaacacttaaatgatgcatacacattacacactctaatcttttgtttggttgaagaagaaaaggggaagaaagaaaactttgagaaaaaagtgaaaagacagaagacaaattggttgtttggttaggaagaaaagagggtgggtgagaaaaatattgtaaggcacctacatagcagcaattattatagtttctgggtcaagaaatattgtaggattaggcggggatcctattttaaaataatcataatgataaaaatgtggatgagaaaaatagaaaaacaagaaagaatagaagagcgggtgataaaacaatatacatttaaattgaaatgactatttgaccttatttttattccaaaataatgtgtataatatattttgtaattttactttttcttaccaaaccacaaattacctctattttattcacgatcattttcttttctttcagttccaatttgttaaaccatatgattaaagtatttattttataaatctattaatgtcttaatagattactttaccaggaagagtttacccgaaagagttgtattggaagcaacgatttaggatgaataaattgaagcatggtgaccaaaacaccaaaattttccataaattttcgtcggaaatagagaattatgtcaagagtcttttctctttctctgacccttctcttgataacataaccagagctctcaatggtattgataaagagctttccactcttgataaggttcccctcttggaagtttttttggatgatgaaatccaaaaagtttttttccaattgcctctagataaagcccttataataaatggttttaacactaatttttatcaaaaaaattggaaccttgttaaatttgatgtcatcaaagctgctctcgattttctcaatcatggttaggagattgctgatttgaataaaattcttatcaccctcatctctaaagtcaaacttggatgcaccatcaaagattttagaccaataagcctttggaacatcgtttacaagatcatatcaaaagctctagcaaataggcttgaactagctctcaataagcttaccagacataaccaaagtgcctttttctcgggttgccttatatctgataacataattgttactccggaggtggcacatgccataaagctccgaaaaagggtaggaaaggctggatggctttaaagctagacatagcaaaaactttcgatagggtggagtggaaattaatctggagtatagaaaaattttgttttccccaaacttttattcattttatctctagatgcatctccactgtcacttacatattcaacttaaatggtcgtgtcttgagtacagtctgctcgtctagaggaatacgacaaggggatcccttgtctccttatcttttcctttatgctctaaaggtttcttgtcccttatctgctagtaggagcacctcggtctgttgtctagtttaaaaatatccagaactgctcttaccatttcgcatcttttctttgctgatgatagtattcttttatagtcaagccaacatccagtcctgtaatgcaatcaaggacattctcctccattat

SEQ ID NO: 79752 - DNA, 1012 bp, Cannabis sativa
tgactctggtacctacgatactcaaggaaggtatatatacatatttacaacttatttcatttatatgaatcaataaataaataggatttattctgtcgaattataatctttatagaattatgctcttagaattttttttatgttgtaaaaattctctcttaattacaaaattgatgcgaatatcttcatggagatattttgcttattttttaaataatttgttgatataacaacattgtaatttagtttaagagtccaaataaaaaatataatatacataataaaagtctatttataagttataatgagaatatatatgtgcattttgagaaataatatttgtatatttaatattaataaattagattttaagtagcttgaaattgttaaatatgttatttctattgcaataatttatacataaatataacttataataggcacataattaaattattttaaaaaacaagaagatagtaaatcatctttattatgaattaataaaaatataatagatgataatgtgaacgacttttggaatcgaataattaaagaaaagttttgtttttatggttgagagtaccataaaattgacatatgatcatcatttgatcatggattaattgtgtgtttaattatatttataattattaattaattaattaggtttgttggtgagaaatttgaagagattttcaaaaaacatgcaaagacaaatccagaggcattgacatcaaaagaactggatgagatgctacacactaatagactccccaaagattatcctggatggtaataatcattgtttattacttattctcttctttaatattattaatttataaattcatatatatatatatatcactctttatttttattatttatttttcctataaatatcattttaaattttgtactttataaaaattattaattagatcatttattcttgtattttttagaatagtattaaatagattcatggtcaattttttaccattttaaaaaa

SEQ ID NO: 79753 - DNA, 2188 bp, Cannabis sativa
ttttgttttgataaaaccaaaacaaaatttaaattttaaaaaacaaaaactatcgtaatataaaccctcaaatcttccaaaccgaactctctcattcaaatttttcttcccattttttaatctaattaatttcatgaatcctcctttcttctacgccggcatcgagctgccgccgccgaactggatctctccaccaccggacgatgctgcggcgatcggagcagttgagaggatcgtcggctactgctttaagaacaagaggcttttatttgacgctttgacccactcgtcggcgggggtgctgatggactccacggcggcgtcgtaccagcggcttgagtttctaggcgatgccacgttgggactcgccgtcagcaactacgtctttctggcttaccctgacattgatcccggccacctctcattgatccgctccgccaatgtgagtaccgaaaagctcgcacgtgtggccgtgcgacacggcctctatcgctacgttcgccgtaatgctgcagctcttgatgaaaaggtaaagtaaattgttactgttttgattgaatttgggattttctgaattttcaactttatattattattgtttgttataaatatgtgagcattttgaaattttaatgatttattattattaatattgtttattttttttttgggttaattaaaatttttgtgacatgttgcaaattatgacttaaaaattattaatacatggataattattgaattagtaaaaataaataaaattaaataaaaaactttttattctaataataacctttattctaagagagttttatttaaagcaggggaatgtgtttttggggtttgcatgtatatctaatttgttgattttatttttccttctctaattatttctgttaaatttggttacaagtaaccagttaccaataagtgatagttatgttagttagacctattgccagctcaattatccgaactgagttcatagagagatttgagggatgttaaagacttggtgtgtgttagatcaccaatgtctcgagtaaatgtaattcatgaagccaagcttcctggtttttgagtttttaatctctttgtttaggttgtaattgtagctcagttcattgaagatcaataaaacagaattaagctcaatcttctccctcatgtgttgtgtctttaatgttttcaatttgagttgattctcattggttttgaatcaagttagctttgttgatttcagttttcggtttgctcatatgctgggtttgtttgcaatgattttttacaggttagggaattttccgaagctgtatgtaaagaagaacatggagttgcacatggtgggtcaataaaagcacctaaagttcttgctgatatagtagagtctatagctgctgctgtatatgtagatgtcaattttgatcttcaaaaactctgggtggtttgtactaaaatcttattcctttcacttctgttaaaagtcttcggttggttaaggaatttgttgtaattcattgtgtgtgtttgtagattttcaggggtcttttggagccaatggtgacacttgaagacttgctacaacaaccccaaccagtgaccatgttgtttgagctttgccaaaagcatggtaagcaagttgacataagacattggagaaacgagtccaaaaacgtggcgagtgtgtatgtagatggcaagtttgttgcgtccggttcttcagagcacaaggagatttctaagctaaatgctgctaagttagctttgtgcaagctttcgaaatcactaccgaataatattgatggtttgtcgcagatcatgaatggtattaaagagtcatttgaaattgaaggtgcgaaacagaagctacatgaactttgtggcaagaagaagtggcctaaaccaactttcaagtaagaaaatttttacttcattacgaaatgcaagatacatgaattgctaattttttttttagtttgctaaataggttgagcagccttagaggggcccaaaataaaaaatgaaaggtctctttacttaaattaagtgtattataaacaacaaatatttatagattgattggttaaggtatatgacacattatgcaatggtagcttatcaatagtgtagagtgtagtgtagactgcagagtttcccaattttaagatatactgatatccgtacggta

SEQ ID NO: 79754 - DNA, 4510 bp, Cannabis sativa
aagaaatcgggtatgcatgcaaaagaattatgcaaaagaattttaccaaagaattttaccataaaattttaccataaaagaaaaaatattttgtcaactaacttgacaaaaagaactttacaatagaaaaagaaatcaaaggtctctaacgttttaacttcacacaccacaattcactttaatataaaatataattaataataatccccttcatttatttatatttattatgaaattggaaagttgttattttttttggaaatggaattggaacgttgttcaaagtttcaacttttcattttacatattatttataaatttgtattttgatttgtttcagtactctcctctttgctcttactcttttcattttcaggtaaggattaactaactagtaatctacttctactctttattaattggctcatttcatttcatttgctgttgtttgtttttacagttcacaatccaatttgggtggatttcaacttatggataagaaaaggcttaaaacatcatcatcatcatcatcaatggtggttggtggtgatgacagaatttcgaaactacctgattcagtcatctttcacatcctatcgtttctcccaactgaagatgtagttccgacatgccttctttctaagcgttggaagcttatatggtattcagtccccacactctatttctccactgagcggaaacaggactcagaaaagttttacaattatgttgaaaaatatttggaacaccgcaagaaaggtatgtattttatagaaaattcagtcctaactagttttaggcttgatctggatttttattatcaaagagacaaggctcacgtcgtagataaatggttagcatttgcagttgagaataaggttaaggaaatgtatctatgtataggtggttgtttccagtactactgcttacctaaaataatagataatgcaacatatttgactattttgaagttggatagtgtgaggttggatacttcttatgcatttagttttccatctttaaaaactctatcattggaaagagttcaacaatcggatactacaaaagatgatgtggtacttaagtttttgttgggttgtccctgtcttgagaaattgctggtatttgtttattccttcatatgcgttgatgataagcttcggctgcaaagtttaagcctcaagttcttgcaactgataggtacaagttatggtaaattacaagttgaagccatgaatcttgagtctttggtactcagtggtgcttgcgatataaatttctctgcttgcgagaaaattagaaatctcactattttcaagaatacaaaaaatgttactcatgatgttttcgagctattcttaaatgctcttatttctaataatcctcttcttgagaatttgactttgcgcatctgttttacacatgactaccatctcaaaatcccgggtcaacacctgaaaagtttcaattttaaggattatgattcagatgggagcaagattacaattgaatcagctccaaaattgtcatacttttgttacgaaggtcgtattaatctaagcatttcactagagccatctaattcgttgagtggaaaaatagtgattcttgagaaggaacatgttgtatatgatgcgatttggtttactgatttgttgaattttcttttgaatctcaattgctcttggaatattgtacatctacatgctgaaagatttgaggtacttgtatttatttttatttgattttgtggttttaatttcaatgtagtcttatttactatttgtgaagtaatatgtttatatgtttgcaatgtatgaaggctctcatttggccagaaaagttgaagagagtatgtcgttctccattgctcaattggaagcatctcagagttattacgaaacgtaaaaagcctgaaagagtatccgatttgcaagactcattgatatggatttcacctactttagaaacattgtctattaacaaaatgcagatattttagttgctttaaaacattgtaacttcttttattagttttagattagaaaatggtactgtagtaggtttgtagtgatgatgaacttgattactttactttgcattagcatgagatatttctttcttatattttattgtgaactagttgatcatagtacctgatacatatgaaatttattagctaattttctgaatgggaaacttcaaacttcaagagcaacttaagaattggtgttgaaataatctaaggctgcattattttcattggttaattattattctatgatgagttactccaacctaacatatagtagtatataacacaattgtaagaacaattggcataatcgataattggtctaacaattgtaatgtttcttgttatactcattcctgaacaaatggaaatagtttcacaaaataaaataaagtaacattgagtgtgcgggagtgttaacccggaaattttgcctggtgacaggacatcttgacatgtgacatgaaggatgccgtcatgaagatatggagttccttggatgtagagaataaaacttggttaaaaaatagagagcatttttggagatattatataaggaataaaaaatcaaacttttgatttattgtgtcattgtcccaattggagtcaaaatatatacaagttccacatatattactatcatttagaatcaaacatcacaaaatgattaatagccttttcttgttcatctttaaaatcaataacaagatgaagaatgaacaataagcatatgatgtagaaaccaaaaggtgtcggttcaaattaaatgcatggcaagttcaacaatcacaattaaatacaattcttctttttctgtgttatcaaacaattgaataccaattcaattttattatttgtaagaaattggaacgtcattccaaattgctctgcctatttattaggaagttcatcttcttttcatgtaagtattaattaactaatcttctcttcacttcttagtattatcttaaatttattgactcatttcatttgctgtcgtttttacagttcataatattccaatttgtgttggcttgaagaaaaggcttaaaataacaacaacatcatcatcaatggtgggtaatgatgatgacagaatttcgaaactacctgatacactgattcatcacatcctatctatcgtttctcccaactcaagaagtggttcggacatgccttctttcaaagcgttggaagcttatatggtatttagttcccacaatcttttttccctatagtactattacctattgtagtgaagttgaacggaaacaggtgatagaaaagttttacatttatcttgaaaaatatttggaacaccgcaagaaaggcatgtattttatcgacaattcagttgtactaactagttttaagcttgaaatgttagtttactataaaaaaagtaaggctggggtcgtagataaatggttagcttttgcagttgagaataaagttaaggaaataaatcttaccataggcgaagacagagacaacggaggttattactactgcttacccaaaatacttgacaatgcaagatatttgactattttgcagttgtatggagtagagctggatacttctcattcatttaatttcccattactgaaaactttgtcattgataagggttcaatcagatactggcgaggatgatgtggtatttaagtttctgttgtgttctccttctcttgagaaattgcgtttatgttattatgaattcttgcgcattggtgataagagcctactgcaaagtttaagcctcaagttcttagaactgacaggtacaacaaatctggatggcttacaatttgaagtcataaatcttgaatctttggatctatgttgtgagtctacatgcaatatagatttttcttcttgcaagaaaattagaaatctctcatttgatgatactagtgatgatttacgtttatcactaaatgctcttatttctaataatcctcttcttgagaatttgactgtgtgtaccggcaatatacatgactcccatctcaaaatctcgagtcaacacttgaaaagtttcagtttaatgaatgaaatcagttttaagaatggtgatacagatggaatgattagaattgaatctgttcctgaattagaatacttctattatggaggtcatatggatctaagcatattaatagatatgtctaattccttgagtggaaaaattgtgatttgtgagagaggatataataatggctatgatggatcttggtttactgatttgttgaattttcttttgaatctcaattgctcttggaatattcttagcctacatgttaaagaatatgaggtacttatatatattatatttatttttatttgatatagtaatcctgaaagaatatcagatttgaagaactcgttgctgtggatttcaccttctttagaaacattgtccattgacaaaatgcagatactgtaactgctgagtacaagtttaagaatgggt

SEQ ID NO: 79755 - DNA, 1957 bp, Cannabis sativa
agtcattgatctttaagcttcaatctccagcgatagcttcggtatggaaaattgggcttccaaactctctcagctctctttagatggattttgctattttcacaaatgagtgaagagctcggggactgagatcctatattcataggtgagatactgcatcaatatctgtgccacattaattgtcagaatattttgacaattaattcaaaaaatcaaatcaagtaatgaatatcgtagtttgagcatatatagaatattaaccaattaattgtgtcaagatttaatgaatataaaatattcatttatctcaaaattaatttattggttttattctataaataaaaaatattataatattctctcacttggtcagtatttagatttaacactcaaacccatcgttcctcattacataataagtatatgaattatagagacatgtcctcattatatgacaattattatcttccatgtattacaatatgtttactatataataatgtactttatgtgacaatgtagttaagcgaataaatcctaaaccttatgtttattctggtcctctaaaattttctcaaatatagaattaagatgcgcataaatatgagaaaatatcaaaataaaagtttcattaataataactttatttgtacaaattacataaaggaaccaaagtcccttgttctctacatgatccttaaatatatgaggtggcaagccttttgtcataagatcgacaatcatcaattcagtgcaaatgtgttgaatgacaactttattttctttagcacgttctttaatagctaagtacttaatgtcgatgtggttgacatgtcaaagacttatgatcggtttgagtgcagtttcattgatcatactcttaaggcttttgggtatggaaaaaagtttgtcaattgatcacaaaattcttatcttcagtgtccttcttgattttattgaatggtggttcgctaaagcaattttcccttcccgtggtattcgacaaggggaccttctcaagctttaattccaatggcaacaaaagaaaagttatacttcacacctcttaaagtgatttttttgaaaaataggtagagatggtaccatttttaagtccaaccaactagcactagcagtagcggtatgtttgaaattaaattttaatgttgtgaaggtcagatagaaagacataacagtgaatcaaatatatggagaaaaaaaaaagatgggtcaaagtatatttgtaagattgctaaaaaatgtgtaaaatggaaagttatcataatttttctgttcagaagaagtccagtttccttcaaagaaaaaagaaaaaaagtgaagtccagttaaatgaattttgctcaaggccaccaattgttttgggctggcccggccaatagtaaccaacattattatgagatagtgtcgtacactagtagttagtcgtttttttaataattttaaattataatatgtaggaatctgcttgtctgtagccttagacatcggctccaaatttattattgtggagaatgattcgagaatagttattaatgttattaatggaaaggagtcttgttgggcacttgaaaattatgtttatttttgtactaagtcttctttctttattagctgtaatttttcttatattagtagaatttgtaattttgccgctcataatatgactagatgggcgtttgctaatcaagtgcttgggtctattctggtctcctacttaccggaaaatctaatttgtaacgaccgtgaggtctaattttatttgaatatataataaaaacacttttattcaaaaaaaaaaaaaaaaaaaatagagtgtcataacaatagtatattattattagaaatagtcttgcattactaagataaataaattatttctctcattgttaattaattttgaaatgtatcttcgcccaccttatcctacacattttat

SEQ ID NO: 79756 - DNA, 2061 bp, Cannabis sativa
atatagacctacaacttatataatcatctgatttaagatcaatagttcaaaaagtttcctcattcatgtttagattctactatagttttaccctatataaataggagaattttagtataggaatctttgtttttaccttatgctatagaaaaacaaattgaactaatcaaaccttaaagaaaatagaatgtataaagtttctgttggcacaggagctagtgattattttctttaatttttttttgagtgaatgtgattatttcatcactttcactattattgttttatttattaacaactactatattcgttagttgcaccctatttattaacagttactatatcgtaagagtatacaccttatatcttaataaccacataatctaaaatcaatgataaaaaaagcttccaaattaaaatatagatttatgctaaaaattgttgtgtacgtgtatgttcacataaatgtatactgcataccaaattaaggaaaataatattaagtatatatctaaattaaataaattgttatatatctataaataaaatgtagtcaaggtctttcggtgtaattatttccttttattttgtgtgagaattagatacaattgtatctattttctcactattaattgataaattttatttaatatattttttataaaagaaaattgtacaaattcacttatttataaaagtatgtagttaacttattatttgatttgttttatatatacaacaaatatattgaggtcaagtctaatattatgttatttaggtgagatatgacaataacaacacacttgattgtaatgttgactacaaatgagatacgatgatgagaacagttttgaaatcatatgataagtctttttattaatttatcaatttttataacaattcgagggctcaaagtctaacatcatgttatacaagtcgtgtctgacttccattataataacgaaatttggtaaatacgagttgaatcggtctgtttgtatacacctaatttttgatacaaaattatatgaaaaattgaattaaaatttaatacaatttattacttaattgtcattaaataaaattacaatttatttttttatacataatttaaaaatttttaaacatccgccgcaaatcgcaaattgtttactaaaagataaatttataattattattattaaataaataaatatcatcttgtaaatctcacattaataattgtgtctcaccgcaatatatattttaaattagatgaggaagatataaatattgtaaaaaatatatatttaattaatataacctctttaattactatttaatgaaatttatatattatataaactatagataatataatataattttatttatttatatttatccttttgtgattaataattaattatgtaattataattggtattttcgttggggttatatacagtaaatgtttttttttttttaaatccgaatatggaagtaaatttgtctaataatattaaaagtttgattttaaattaaaatagcatattttatggccaaagttaagatataaatcaaaacttaattaaaaaacgccatattattattgtaaataacccttgaaaagtattagaactattattttattgggcccatacatagaaaagcagacagatcccaatggacttcaaggtattgggttatgtgttgagcttcggctctggtgcatcaggagaacgtttgttactgggcccagaaggaggaatcggtcctttgggcttcattccgtaccatttctcctcagattgagaaatagaaactccattgggcttctgctctggtccatcaggagaacgtttgtcactgggcccagatggaggaacagggcccttgatcttcatttcagaccattgtggatcaggaatagctcctttgggcttaaacgttgggaagtcagaattatgacctttactaggcccagatggaggaagaggggctccattggaattatgacctttactaggcccagatggaggaagaggggctccattggaattatgacctttactaggccca

SEQ ID NO: 79757 - DNA, 1284 bp, Cannabis sativa
ttattattattattattaaatttcgttttatattgcggtcgactacaattttttttagggaggatcaatggattgaattggtttcttgaaagctgtatttgtagataagaagaatgatcggaagaaacccaaagatattaattaatagaactaataaattaaatcttacaacaaaatgtcccgttcagctaaaggccaaaataaaaataaaaatcccataatacaattattaatcccatctctttctttatataacactatataagtaatgtatacagatatttagcaacaaaaaaagtaatgtatacagatattatttggttcaaaatatctgataataaatatccaatataataattctctctcaaaaaaaaaaatatcctataataaattatagttatttgtatatttattgtattctttcaaaatattttttattctgaaccattcttcaaaatattttagttttatggctgtatttattttctttttaattattaatcatttttatacgaaattttccgcccctcttaaaataataatctaaatcctaaaagtctgctatatcattttgaaattatattcacttattttataagttttagatatctcccctattattattttttatttctataaagcatctttcaatattggagactgttaatatttttctattgttttataattaaaattaattgttgattgaatttttaatcgtagagttgtaataattgagaaattaactaaaattgtaataaatacaaatctctttaaattttagtattattatttattttttagtttaaatttcatttattatgacttcatttactaaaaattaaattaggaagaactagaagtattgaaaacaaaaatgttttagtatatccttatttattagtagcctgaaaaaatttttagtgtatatttttttaataataatttaggtcataattatttaaaattattagtaaatttttcattttttaatagtttataatattaaaattaaatttaaatattttattttacatatgattattttttatattataactattcataactttttaaaaaattatagtttatcataaataattataacataaaaaaaactcaaaaactcttattaatacttaggccaactccaatgggactacaaaacatcaattatggtgtgatattacaccaaaaccaattccaaccgaacggtaattgtataatcatttttaggtttttctacagtgttccaccatgtttgggtgggcactgtcttatata

SEQ ID NO: 79758 - DNA, 2072 bp, Cannabis sativa
aaagagtctcaaaaaaaaaaaaaacagtaaaggcagccagaaagttgttttattacggatcttgataactaaacaggttgactatttaatccgccgccaagaaatatttgatagtataaaataatgtcataaaataagaaaaattaactgttattagcatgcatcttattctctaagtatgataataaagtgcaatttaccaaagcattttgcataaaaggaaaataaatatcaagtgactaggatcctgtcaatcttaacacagccagttaaggttttaagattttgtgggatacaacaaacccctgaagaaaacaaacacacaaacataggacttaccataaaagttaataatctcatttggtaagaaaaacataaagatgaccaaaaggcaccagcatataattttcatcatccatccaccatggtgcaaaccatcacggggatctctctgagttttcacaccaaccatcataacagcgaagatggtgaagaagagaaaatttcccaaactaacacgcaacactgcatctgtttcaaaccactccctgcttggagtgtgatgaaaggtattaatccctgcatcacaaaatacaacatagaatacaaacaatgttacaaacccatatagtagcacttggaaaaattggtgagcacacgtaatgtcaagccaattgaagcttaaaagttaaaaccattgtcatctaagcaattcaatctaaatataagaaaattctaaactttctatgcagattaactccgccacaaccaatcaataatcgatgcttaaatccatttttttccaattaattcaaagcatataatatgattatgaataaattaaactttagaaagtattggaatttgaaattgcctgaaaaatacccagaaaaaagggtcgcatgtaatacgacgccaaaaccataaagcaatcatagagaaagaaagacaaactgacatgggattttctccattagaggagcagcgacctcgcgaagcatccatgagacgatgagagagagggcgaaaagaccacaataagcaatcctggcagagcggcggctgatccctgagaccaccgtacggcaagcgtcacaggcgcaagcagcgcaacatgaggccaggcacgaagcagcccacatcttcccttatcttattatcttaatttctttattatttcaaaatcaattagaatcaatcgaaaaccctaactgaaaattcagaacaattattgggaattgagtggaattgaagggaagaaagggagatggtgtggattccaattccaaaggaaaagacttttttgctttttgatcaggtcaggtcatcagctttgaacgacaatgtggaatccgtgactcggtgagtcagctcaaacgagttacaaaaggagcagcgaaacagtcgatgtgaggactaattgggaggctttaggttatttttttttgttgaaaaaattaaatttcaattactattaactcaattatcaaaaatcctgtgacttcttaatttatactctttaaaaaagatatgttggaatctcttttatgatttttttttatgttatttgttatccttttttgttagtacagtggtatttgttatcctcataataaattttttttaatactataaattatttattatgattattatttaaaatttaaaataataatattataaatataatgaaaatagtcaattaaaaaataatagtatctaacttttggccctctcagtaataatattacaggttaaaatattaaaatataactcatttaatgaaatagtatcaaatttgtttaatttattctattgttatgaatggtgtgcaaggtaaatttaaaggagagaaagggttaaggcaaggggaccaatctctccataagtgtttcttgtcataatggagtaatttatgaccgtaacaaacataaaaataaaaatataagagtttcaccacaaattaccataaaaaaaaataattatacatacaacccgttaaaaagatatacctattactaatcacattagaattaacattatgcctacatgacctatataaatagatatga

SEQ ID NO: 79759 - DNA, 1494 bp, Cannabis sativa
aaaaaaaaaaaaaaaaagagccaattaaatataagaaaattccatttaaatgactgggcctaaaacccagcaaaaaaattattgggcctaaaagattggtgtggcgtacttaagtagttgcttaaagccctgaaaatactacctgggctgggcctactaacaagctctaaaagttgtaatttcttcttgaagtgtctactgtctaaccagttctaaaacatatataattggatcttaattagtattacgtattaaaatgcatgccacaggttcttaactgtaaatcacgtattaaaatatttcattcttggaagccagaaaaaattaatatgtttgcaaagtgattattttttggaaaatttacacaaaataattaaaattacattttttacttgtttacagatcattttttaggaagtaacattatttttcatattgttgcaatgttatactatatttatgtaacttaaaaacaacgtgttaataacgttatttttagaacaacctaaaaattatccgtaagagaaaaaaagtccataaaaaagttattaaaaaaaaatccgtaaaaacgttaaccttttaatgttttggggtatttttgaaataatccctcatttttagaaatttttacacaaagtacttaaaatcacactcttttttttcttttttacatttttaatgattttgctttctacagattttatgcttgtaactctttcataaaacaatattgtttttaagttgctttcatgtaacagaaatatgaaagaagaaaataatgtaaaaacaaaaaaacttccatatttttataaaaaagtaaaattcataaaaatgttaaaaaaaaaaatactttagatccgtattcttgtaaatgtttgtcattttcaggtatttataaaaatacccctgttatttaaagaccatcttcttttgggcccaaacttggcccattacttcgaaatttgtatttaccagataataataataaaaataaaaattattgctaaaccccttttgggagtaactgtaatttgtagggtttaagctctctctctggttcacagaaaaaccacatggtgagtggttcagtgacagtgccccatcatccatggcgattacgggcttaggtttcacttgcccataccaagttcctcttcgaaaccctctctttcataacttcattcgcaaggcaatttttcctctttaactcttcttcctctatatatgtcatacatatccgtgtgcataaatgtttaagcgccaatttcttttaacaggtgtgtccacgctcggtaacgtcggccattgaagcacttgaagggccaaaacatatcacaaaagatagtttttcagattcttgtgattcggttcatgaaagaggtaaggaaaatattttggttgtttaacttgggaatagcaaaagaatggatttttagtcgatattgttattttattaggggattcagggaatgaaaaggtgcggaaatggaagaa

SEQ ID NO: 79760 - DNA, 1934 bp, Cannabis sativa
ttaaactataacgccaaacaggctatcactagatttcttatgaaactctttcattctcagtcagattgcactactaaaaaaaggatttatgtgactattttaaataattggatatacgttagttcgtaaaactgatgtctatgctactgagtatcgacacaaaatgagatggaataggtgttggtttatgttagttcataagattgatgcctatgctacagagtatcgacacaaaatgggacagaataggtgtcagttacaaacgatcattattgagcattatcgatcttttggaaccgacagtaaggaatataggtaactgttctacatggtcgctaatactttatccatcaatgtcaaactaacacatacaaaataatgcataataatttcagatccacaacaacaataatacaacagtaatctcatcacatctgagacaagccaccaccaccccacgcttgagaaaaacaaaaagaagataggagagagtttacgattaacacgagagagagggagggagggagagatctattgaaggtggtccaaggagatggcgatgatggtccgataatcagatagagagagagacatcagcgcctgctactgcagtcgttgggttatttatttgttatagatatttatttaaataattaaatatgatttaattaattaggaattaactactataaatagaagcctaatttgagaaatcaaaataaattttttcatactgctattttcgaaataccaagaggagaaaaggaaaattattttttttttatctcaaacagttctagatcatgtgttgagattccacactaatcaaccaaaagaatacaacttacaataagttttgaggatacctgatagtcatcaagatgtatatattattttctaatttaaagtatacatctattgagctatggtacaatgataatcaacgtacttaatttaataacgtaaaactaacaattttttctatcggttctaaatcgtcggaaaaattagctactacttactagattgaacaattactattttttatttactaaaaaattgaaaatgaattataattattttggtactttttgtaattcattaacgttctttgcaatcatactttgtattttttaaggacctcaaatcacaattcaaattagttcaaaaccacgaaataaacgatatcactcaatcacaaaacaaaaaaaaaattgtggaaataaattattgttttcaatttaacaaagggacattatgtcacaaaattttcttaagaaacagaagaagtacatccgtcctttttttttttttaatttaaatttttacattcccatgtatgctaataacttttggcacctaattcttctagaaacaaagtcatattgtggtgtgaagacccactttcttcaacaactcttttgcccatctcccctaactttttagctcttttccttctctctatactttcttctccttggtcatccaacactttctctatagcaatcttaattgtctcattctttaccattattcggtactcttctccttgttctatatactttgaccccaatgttacagctattttcaaaacttgtgcaaccaatttctcatttagaagctggttagcaaatagtggccatgtcaccatgggaaccccaacacttatcgcttcaagagttgaattccatccacaatgagttaagaatgctccaattgaagggtgtgataagattaacacttgtggagcctggccccggatcaccacacctcttcctttagtcctttctttaaattcatattccttaaaccaattctctagttcttcatatctattagtctttgattcccttacaacccaaatgaatggtttatctgaggcttccaaacctaaaccaagctctatcaactgtgcaagtgttagagtaaatatg

SEQ ID NO: 79761 - DNA, 1805 bp, Cannabis sativa
gttagcttcttcagttgcccattcagggttgaagaccaaaggagaatgatgataaagccctccattaacagaaccaacaagctttctatttgctctaatagtagggacgttgagctcttttgcacccttagtaatttccaccatctataaatagccaaagatatagaatgagaagtaatgattagctagtgtattattaaccatataattgattaaatttgtgacctttttactactgaaaaagttggcatcaaataactcaaatgcggttttgagtggcaaagcttcttgatcaaagctttcctcatagctacctttgttctcactgtcctgatcacacaacagaaaagtaatacaacgctgttaaagaaaagggaaagagaagagtttgagttagaaagaaattgcttttacctgaaaataaaggcatgagaatgagcttttactttctggcacaaaattttccaattgttttttagagttatcatctgtgtttttaacatcatgttcgttttaaggttggggaactactaaaagagaaaagtaatggtatattatatatgtatatatatatatatgagaaaatctgtcttgttaggaaaaaaaatatgtgtggctttgcaaagatatctcttcaactcctttcatataacaacaaatatagaggaaattaggcgaaactatccaacaagaaaattttaaaaaactatcttcaaattacaaatgatgaaaaccaatatgtacatatttatgtattaatgtgttgatgaacatgaatgaaaagaaaatagtaagaaaaagaaagagttaccattgtaatttgagaaaggtggattgtacttagaaagaaaggaaattagagaggaagcaaataagtactaaataatgagctagtaatattgttatattagatttagtagctatacaaattatattcagtatttttttttttttataagtgatactttataattgtttagtaatatttttaaaaatttttttttaaattatataaaatttaatagttaattattaccaataataatataacataaaatttttagcaataagtgtcaaaaattattgaggtcacaattgtatatataaaaatgtgtgttagatcattaaataaataaattaaatttatatcgtctattttataacttaagaacatgattgtcatgattttaatatgtaaatactaattagacaatttctaatttgatgaggggttaaattaaaaataatcaaaaagaattaatttaatgtttattccattattaataaacaagtattgttccttatcttttacatcgcttcagataaagtatctttattcttgaatcctcatcattaaaaaaatctcaagttttaaagagaaaattttgatgtaaaaattagaaaatcatactatttaaaatagattttatggattctgatatgtttttgctaatatatgattttattgtttaatctataatagtacgtgtcaagccaatttaaaagtagaagacactgtgtacttttgcatgcatttcacctgcaatgcgaatgcaaatgcaagctgtgttgcacccacagacccacacccacctgacctaatcttccttctaaaagcatcattcatcgatgcaaatactaagtagtagacacaagctactaatgtagtcttgtcttgtacaatgtacatgataaatacacctttttttttttaattgtactcatttcgttttataaccctacattgtccccatttccattaataataacaacagctgcacagatgagatgagatgccatttcac

SEQ ID NO: 79762 - DNA, 1758 bp, Cannabis sativa
gttgtttcttattcttttctttgttgaataaggaatcagatatctagaaacataacaaatgggaaggacggtaatctaagcaatggattactgttgcgtactttcacttctcatgctggaatttcaacttcgggacaaaacattaacgttaaaggttttgtatttttactatagttttgctgcttttacattttcatttcctctattgcggtaatgataaacgacaaggttatcatccatcttgcttgtttctaaacccataggaggtattgcaggcttttcagcaccgtacattgtttataagggaaaagctgcgttctctgttactcctgttctcccaacattcactaagctagatgtgtgtgattctgatcctttattctttgatctttaatttatctcaatagtcaggaatttaacttgtgtacattttcaatcttttatttttgcttagtctggacttcatgtggttgaccgcgggggttgcatgatgttgaagttcactcctgccattggtgagcgcaaatatgattgggagaagagacaagtcagtgatttatattccacttgttattctttaatagtttgctgtctgattgcgaagagtgattatgcataaagagctcacttggcaaattttctctgctgggcttgttgtctcctgtcttgcatcttgattaactaattgatatttgttttctagttgtttgctttgagcccgacagaggttggatctttgataagcttgggtcccaatgatacctgtgaattgttccatgatccttcgatgttatcaaggttgatttctttcgtgttttcttgtgaaactactatgaaatctgggatgggaaatttcactttataaaaggaatcaatgctttcttagtctgacttaagccacctcaattatcattatctacttattttctaactggaaaacatgtcgactccttaaatttatataaattttgtgatgcagtaatgcttttgaaaatagttagcagtagatttatctagaaaattgtgaaaataattagatgttggatttatgaaaagaatatgtattgtagtaatgctggacaagtgaggaagagtttgacggtcaagcctcattctactggcggtggctatatgatttccttgagtatgcaacccctctaccaagcttttgttttgtttaacaacagtcttagaaaatacctgtgaaatctttaaacaatgtctgaacttaatgttgataccatcttttttgtgattgcagctgttgtcaacaacattctaaaatccaaggattatatcagtgttccattcacaactgctgaatttgcagttgtaaaggcagcttgcagtgtatgacataccagaaacaattcaatatatatattttgtattgggatgagtaaggagagaaaattgatgtattttgttgtggttttggttttgatgtgcagtatgcgctgcctcatataatgggttgggatcgggtgacagaaaaggttgaaaaggtcaatagcggaaggcgaacaccggatattaagtttgatcggggacaactcatggattcagagtgggacaaatgaaagctggatatgtcttccctcttttgtaacagatctgtgtgtgttgttttgtgatgtgtaaacccctgttttattctccaattttccagggataatgggatgttgaagtaggacatctcaagttattgaactgcatctgtcgtactacaaaaactaagggaaactaagagaaaatgct

SEQ ID NO: 79763 - DNA, 790 bp, Cannabis sativa
ttttactgttttttgatataaggattctaatattactgttgagaagctgaatagagagaatccgtcaacctcttgtctcacgcatactataattagattttcgaaccattaaaaccaaaaagcccaaaaaactaacaaaaaaacaaaacaaaaaccacctcaccttcccattccaccaaaaccacttttatcgtttttatcaatttgtttcctatttttccaattttacaaaaccaatatacccaatatccaaaaaaaaatttcaaattcctcctttaattttctggttcttgcggtctgacgagtcattagcggtggcgttgggtttttgaattaggagcgtacacgtgtaaaaatggtaacggctgtgatggaaggggagtggggcacgtgggaggagctcttattgggcggtgccgtactccgccatgggactcgggactgggacacggtcgccgccgaactccgagcaagagccctttgttcttacaattataccggacaggtaaaaaaattaaaaaagaaaaatcttttcccatatggtaaaattagattacattaattaaaaaaaaaaaagtctggttttaattgtttatctgtgggtgtgcgtttattttaatagtgaatttaatgtagttttttctttttttattgacaattcatcgctttatatattttaattggagattttgaccattaaaaacgaatttattcatttgtccaacataaaaaaattacttatattttgtgtatttttagttttgcgaggcatttttatcgtttattgtac

SEQ ID NO: 79764 - DNA, 1062 bp, Cannabis sativa
acatgtgacctaatttctgactttattgagacaattctcaagattacatattacaaattgatggggtcaaatctaaaattaaaagctctaatcttattcctaatgactatttctttctacactataaaaaagactcaattaagttagaaattcattaaagaaagcttgacttgatcaattcaaatgcttccttataagcttcattctttgggtttctaaataaaggtgagaaagtgtgctatctaacttgttgtttgtacattttgtcatttggatttatcttgtttcttttgattggtgttatttttaatttgagagtttaagagcatgtttggtattgttttctgtttttagttttcaaaaaattatttttagaaatgagaataaaaaattatttttgaagttttcaaaacacaagtcatgtttggttaatattttttaaaaacaatattttgttgttttcaaaaaacaattttctgtttttaaaaacaaaaaatatttttttaattatgatgtcaaacatgcactaaaactctagatcttatctctctgacactttcttataaaggaaggatatatacttaaaaaaattaacaaatgtgaaatgttgttgcaaaatttcataagggccgcaaggataaatgtacattgtagacctaatatatatgtaccaaagttccatattggtaggtaatatacactcaatcaacttaataaggcaaacacaattaattcctctaataaaccggttttattagtgagttaggtctaataattttactagtatggagcacaaattcacttaatttgctacttcaaattaaaaaggcaaaagtaaaaacaagaaaagagatgtcaaaacaaatcttttttttctttggttacttttatgttttatttgaaggtttttttagtttcctttgtataaaaatagaggttatatcgctgtaaattactctaatatatagagagaatgtcttgtcttatgacatgtttttgaaagtttattcgtacatttgttattctggctattagtttttctgattggtttgatcgatcaaa

SEQ ID NO: 79765 - DNA, 2732 bp, Cannabis sativa
taaaagaccaagggctaattgggaatatgagaaagtgtgatctagctgaaccctaatacctctctctctttataaataccctcaaaaaccctagcatcactttcagtcgtctccagcagcaacccacaatgtcgaagcgaggtcagttcattttccaatttgttttgttttcattagaagttagcgtataacttagcaattttattgtcattccattgattgcgaacatagcttgagtttgtgatttgtttctttacctgtttagtatgagatctacatgcatatgtgttagatcattagaaatgtgagctttgaatacgttttataggtgggttttgttgattattaacaattaaggaagttataatggaaaatttaaaagcttttattgcagaggaatttgttacactgtagatttttctaagcggtatttggttttcattttgaagtaatacattataacctgttagtttttttggtatagggcgtggaggttccgcagggaacaagttcaggatgtcactgggtttgccagtggcagccactgtgaattgtgctgataacactggagctaagaacctttacatcatttccgtgaagggaatcaagggtcgtttgaacaggttgccatctgcttgtgttggtgacatggttatggccactgttaagaaaggaaagcctgatctgaggaagaaggttttgcctgctgtcatagttaggcagcgcaagccatggcgccgaaaggatggtgtctttatgtacttcgaaggtatactttttaaaattttgtatttcagctgtttagtaagttatttgctaacaattttctaatttcgtttaaagttttgcttttgttcagttagtctagttgaattagcttgtaggaaatttttgtgttgtgcagtttccgattgaatttgattggtctgtttgaattatgttcattaaggattgtctcttgttattgtattccaagtaaagtttgattagttgatgccaagtaagataatgatattttgttttctatttactcatctaaatgtgaggatgaatctaaaggcttattttgggtattgttcgaagaaaagattgatgtttatgtgctatcctgatgcatgtgtacatccatgtcttactattcagtgtgctatgtgtactatgatgttgatactttctgaaccagctaaatctatttgcagaatattttattgaatgcacctgttgtagtatcttgctttttgcagtttgataatttttttatatgtattctcatttttgatgtaatttattatgtgtgtgtatttgtttttgggtctattgtaaacttaagatggttgtattgctggtgatgtggtgtggagaattgtatataactgttccttcacacttcccatacccagcaatattgtaaataccaacctcaccccaatacccggatggtaattttgtttactatccctgtcaaggttgggatattttagcttttcccactactttcattgtgttttaacaaattttttcttatgtttctttatgtaaaatgaaacttttatcttgtctttttatttacaaatattggagtactagttagtatatatacaaccagacataagtcatgtatcatcctttacatttacggctgatacggttacatttctggaaaatcaactgtgtccatcgttacaggtgtgccttggctttttaatgctcacatctgctccattaggattctacatttgttttctttaattttagttttttaagttgcttctgcttagtttttgaagactcattcttttgcaagtcaattccttgatgctttaaaaaagtttgtgattcattgtcaatattctaactatttgtttgctataatttcattcgcagataatgctggtgttattgtcaaccccaagggagaaatgaaaggtatagttatatgaactaaaactcagttatcttctctgaaatgccaagtttctcacattggcatgagattttcttatatggtttccttgataatattctagctttacttattgtttcttttgttgatttttttagggtctgccattaccggtcctatcggaaaggagtgtgctgatctatggccaagaattgcgagcgcagccaatgctattgtttaagtgtcttgactctagccttttttctttaggatagttgcagacatttgtgaaattcaaactcgttttgcttttttttagcaaggtttggtatacatttaaagaagttttgttgatcaagagttatcctacttgtttttgtcctgcattttatatgcactctcttatgaagttgaaatttaccttattattttgtgactgttgtttcaattatatcacaaactaagcctaatcaataagttggtacacaatccttagtgttgtagtgttatgttaacctattaacatgaaaaaagcaaactatagacaactaacttgtttaggtaaccattatgttatgtcataaaacccccccaaaaatttcaatgtaattcaactcttttgtactttgatcaactttataagaaacttaattcaatttaattgagattttagcttctcagctctgagttgtcaaatgcctcgatgtagaaacaagggtttcaaaattaaataacaaaataaaacgtggaaacatgatagaaatgaaaaggggagttggcaatatttagtcaaacatacctaccacacatgccatgcctaaattgtata

SEQ ID NO: 79766 - DNA, 2317 bp, Cannabis sativa
  modified_base (2078)..(2078): a, c, t, g, unknown or other
ttttttttttttgggaagacaagaatgtatgtttagtgatgtaccaaaatgtatttttttaaggcaattgtacaagctatttgctctaacatttgatattttgaaagattttataatttaattttaatttattttttttttgaaaaaaataaaagtataaaacataacttcaatttattttatagaaaattacataaagaaaatcaaagcaagacaccatgaaaatttatttatatttcttagtcttgtacagtaattgataagttcatacttttaagtaaagaaaaaaaaaaaaagtaaagaaaagaaaagaataagcgctcattctctatttttttttttttttgaacacatctaattttctacctttaaatacacttgcatcgcatttaagtgtttgaaaacacaacaaattcaaatttcaaaattcaaagagagagagagagagagaattcgactggactcgacgatctgaaaacgaaacgagatgaaggctttttacaggcagaggaagaagagaggctccaccgccaactccaaaactaagtcaccttcttccttctctcccaagacacctggctccgacgtcacccaggcccctgcctctcttcacctacaaggtactattttttttattatcgtgaatctcataagccccttcttagaattcttattagggttagggtttggtatgggttgatttgatttaatttgatctgttatttttttaaaaaaaataaaaataaatagaggattatgataaggatgaagaggtgttaaggcaattcgacctggacatggcgtttggaccatgctccggaatgaccaggatggctcggtgggaacgtgcatctcgtctcggattgaatccacctaaagaacttgagcaactcctcaactctcccaatgttcgcccccattgcatttgggactctcgcatttagaatcaacttacttattttgtttttgtttagttatctaatgcttggcgccactgaatgttatccaaaccaaactcaacccttttggcctattggttttgagtttggatgtcaaatattatgtaagaactgaaatctatgaagtgtttcagcctctgcctcagaggctgatgcttttaaaaagatgtttctatgtgtggtttcacttttatgaatttattttttggataattacttgccatgattcatgaccggtgaagatatttattgtttttctttataatttatcattattatatgctaaatttgttaacagaaatattcaagcaggcaaaatgaaattaattctttagtacagataggtatattatcttttgtttcttcttgttctggtcaagtgtgcaattgtattctgtgcttctattcttgagtcttgatgttccttggttttgagatggtattttgttgagcaaagttcagtcaattagagaaaaggaaactctcattcatgtacaagcaattcagttgttctgtatcccaagatcctgttaaatttactacatttttcacccaaagaaaaagtattgattgagcaaaactagtgaaaagtttttctaattatctgtctaatgggggaataactctgctttctattctcttctatggaaaatcgatgcaacatttcggtgcatcacttttgcagtcattaattaagttactgctcttcacataaatcagattttattaggacaggctcttggtgggtgaacatgtttccaccagaactcagagtgcacattacagtatttaagaatcaacaacatttctttacaaatgtttcatccatttggagtctagacatacaataaaacttagtggagtccatgctcagacctcctttgaagccaaaagtcttgctcataaagccaaccttcactgggcagctgttgttggcattgctatctctaccaggatcaccacgaggtgagctctaccaaatgcaacaagtacacacaaatgtttacaaaagtacaatatttgtaacaaatgtcaaatttgtaagcgtttgtaagtttgcagaactgtggcaaatgcttacaatttcataaatgctgttttttttaaaaaaaaaataanaaaaataaaaataaaatttgtatttacctcaagattttaccactctgtttttatacatttgtccctctgcgttttgtgttcctattagggcagagcgtgccaaataccaggactaggcttggcagactagcgtgacatcctaaatgccattttaattatattttaacattcaacggaatgaaaagattatcgatcttttaacgacctttagtatataaaattggctaattagtaatttt

SEQ ID NO: 79767 - DNA, 1498 bp, Cannabis sativa
atatagggcataaaacccaacaccaacaattcttagctgacatttgtgtccaaaagaaacccaagtttgtttttcttagtgaaattttgtgtacaaaagatgttgtggaaaaagttaaaaatcggttgggctttgagggaagcttttctgttgatgtaaatggtagaaagggtgggctagcttttttatggaaggataaaactgaggcccaattgctcaaatattcccaaaatcacattgatcttgttgtgaatattcttggaatggtttcatggcgtctctgtggcctgtatggagaaccgaatcggcatctcaggcatcacacttggactctacttcgaaccatggctggtgaatcgaatctcccctggtgcattattggcgacttcaataacattctcagcaatgaagacaagaaaggtggtcgcccatatccctcctctttgctcacgggatttcaagatactgtcaatgattgtaatctcattgatttggagctcaaaggctacccttacacctgggaacgaagcataggagcagctaatgcagtagaaatccgtctagaccgagctatggttactcaatgttggttagatgttttcaaagaggtatcccttactaatcttggcttctcttcatctgatcattcccctttatttttgcttcctgaatttactgctgccactattttttcttctccttttcgttatgaaaatgcatggcatcgagagcccttatgccatcaaattgtgtctaacgtctggtactcaaacccgactgtagacatcatgggaaaaattgcaatctgtggtaagcagttggctgattggggtcgaaacttgactggaaatttcaagtctaggctgaaaaaaagtaagaaacgaattgctcagtataaacattctgccaccgattttgatgctgaaaattttatggtagaaaagaacaattattttgaaatcctagcacagcaagaactctattggaaacaacgctccaaacagttctggttacactcaggggacaaaaacaaccaatatttccatgctacagctagtgctcgaaaaagatcgaaccatattcaacaattgcaagatgctaatggttcttggcaatgttggaatactgatatggcaaaggtgataaattagtattttgaggaactatttcaatccacggattctttttctcctctaattattgataatgttagaagctttgtcacaatatctcacaatgaagccctcttgcaatcgatccttgatgaagaagtaaaagtggctgtgttctctatgcaccctgataaagcccctgggcctgatggcatgggtcctggtttctttcaacaccactgggatattgttggttcggatgtcactaatttggtgaaagagttttttgcaaccgaggttttaccagaagggctcaatgataccaatcttgttttgatttctaaaaagaaaaactttgttacaatgagcgatcttagaccgatatc

SEQ ID NO: 79768 - DNA, 1458 bp, Cannabis sativa
aaaaaagaaataagaaaataaatttctcaatttttctcctatcaatagaaaagcaaatcaaggacaataggggcattactactactacatattataaacatctgtagaaaatgaagaaatttgtgggcataataatgtttgtgatgatggtggtgcaggggtgctatggtgatgaccgttgtagagtagccggggaatactatcaatgggcagaagcgaagatttgttgtagtggattggtatgtgtaaacgtatatttcaaaaaaaagttgtggatgaggtccaataattggttcgggtcgacaatgcgtgcctgtttctgactgtgatcccggcggtgctgcatgcaacccgttcgggaaagcgatgtacctggttcgggatattgtattccgaatgccaatatattaaatgagttttttcctaaaaataaaaataatgatattcgtcatcctctagtttgatgaatagtacgtactaatactattagtacgtactactactgtatgcatgcatggttatatgtacgtattattcatgtctactattttaatattattattatatgttttgttatgttgtatgtatggaaaatataagaaactatgtattataggtacactcctatatatgtacctaattatataaataaataaataatcaaataatagtccagctttttttttttcttatatatattgtttagtttattatttcgatcttattataccattatgctgtatagaattttcaaacaactgcatatggtatacatacatatataggcatatatattagatgtgttatatgtttttgagaaatggaatgtataatttttttaggggtaaatcaatcaattatattgctcactaataaaaaattacaataaattattctcctttacaaatattttcaaaccaacttctatctatatccctcacgtctaatatcaaagactatctattcaatttacaaccattttaaactattttgacagaatttaaaataatgagcactatctattcctttgttttccactcttaagtaaacgaaagcattaaaaattaaagtataaatctctttcctcaacttgctacctttgcatttctgaatctgttgtgatattttgcacacgtatcgttacaagtaataaactcaccaggagtgaggtcgatctcacagaaattgtacttaaggaaattaaaattaaacttttacttctatttggttaaaaattaagaaatttaaaaataagaaaactagtaaaacacaaataattgaagaaaagtgacagttaattaaaattagggcttcaatttcaattgtgattctattgattatatggtctaatatgattatttttaattattaatttctatgcaatagcaggtttactaaggtaatttatagtcatctcagatatataaatttcaattacatgcaaactttctactctcg

SEQ ID NO: 79769 - DNA, 1454 bp, Cannabis sativa
ctctctctctttctctctctaaacaaaacacactcattctgtctgtcatctaattttatcgtcctcgccgactttccttcgtctctctctctccactgtcacagttgccatatcttcccgtattagctttccttcttcttcttcctaccattttcattttctccaaaaatgtgagattcgtgaagagtttttaatgccgttgggtttcacaatattgttttaaagcgataaagttgctttctttttcatatagtattcctataaagaagggttttttatttacctagttggcctgtcggtgccggagtacgtctctgaaagtttttttttttatatataaaaaaatatagtgatcaaggtaaaattaggaaaaatgatggtgagaaatgtggtgattggtatgttgtttgtgactgtaattgctccgattgttctctatacggatcgacttggaacctttcccaccttctcctcctcctcctgtgagtacccgttgcttttttccccttttcttcttctgggtcataaatcttatatgggtttcgtttttatcttattttctttgcagcttcaaacgattttgtggaagatgttacaactttcgtaagtgggatttccttgttttttattttgggtccatttttcactgggaagaaggaaacttaatctgtaattttttttcatttgcttttggacaggctttcaatggcgagaccggtcgtctcaatgtgctttctcaggttggtatttctatgtctctttctgaatttttaaattgggtaaaggtttcattttcagatcttctatattaaaatacccattttgaatacaggaatcatcttcaaaatttaaggagtccattggaatggtctattctgataactctcaccaccaatctctttcggattccagtaaagtaatcctggaaagctccaccgacactggcaactcgaaaaagggtactacttctgatattgttgtttgtaggttttgctgattttgaattggaagtataagcaattctcttcattaatatatgtgtgttgttttgatttagatttgttattaggggaatcgagggagcatgcttcagccagggtattatctactacgaatgaagaaaatcgttcaatgagtgaaaacgctattaaacaagttactgatgatgagattgaagatggtaatcaagtgaagcctgatacagatactgaaggggatggaaaggatgatgccatgggtacagactcgaaagaaattcaaaaacaaattaatgatgtgtctggtgatacggtatgcagcttttttttttgcacaattatttctttcgaattttgttgaccctttggagcgttagatggaattttgtttatgttgaaagataggcacttaattttcatgtctgattgcgtcattatatgatgagaagtatccacgtgtgataagatctcttgtca

SEQ ID NO: 79770 - DNA, 1210 bp, Cannabis sativa
agcaacatcaattaggaacatgaatcatggggttgaaaaggctgaaattggaagagaatcataccttttcttcaggaattccatcaaagatcttgacgcacccaccataaaagatggtaagctgagccgcaggtgcagtgtttgaagcagattttggcattgtttcagatctcaaacatcaaaagacaaagaaaccagtatatcatgtcagccgaatatgaattttttagtgaaagaagaaaagctcaaaggctcttttgctaatattatgtgtttaaatgaaaacaaatgctacccatgaggactgaggacagaggacatgagagaagagaacaaagtgatcttgaggatttttcaagattaagtaccagaaccaaaagtaaccaaactatagaatgtacaacttttactattgcagtaaacttagtgaaaggaacaaacaaatattatgtttttctttgcagctaacaaaatattatgtggtgattgaataatttgtggctgggttttgggattaagtcaaatattttgagtggagtctacagctttggaaattgagccgagagaataatacatactgaatctaaacactgtaactaaactagatagacaataattgagaagttatgaacctgggttgacccacaaaaaataagaaagaacctactaccctagcaaatttaacctgccaaatagaattaagtcaatgactactggaataaccctgaagtcaataggaactgtagtttggtttggcaagctaaaacctaaaaccaaaccctttacctgaacctaaaaccaacccttcactcaaaacttcagcagaacatgtggcacatagtcgatttgtgggttctacaaagtagaaaaattctcctattttttcatttgcttgtcaaacttctgaaacccaacaaggaatttcaacagccaaacaaacaaaacaaagaataattgatgattatgcaaagctgttctttcaagacacatcaaaacacataaatagtcaataaatcagaaaacccacaaaagaacaatcaaaaccttaacataaaaatgattcttttactaagaactcgtcccatgtaaagagtacaatacctggattcagacaaagcctgagaaattgatttggagtcatcattcctgtccagctctttttcttcctctcccttcttcagctctacatgggaaattttaggctcctctt

SEQ ID NO: 79771 - DNA, 1177 bp, Cannabis sativa
cagagtatgattttctgttctttgattttttttttctcaaggtttgaggtgactaaaaccatacaatttttctagaagattttgaggtgaattgataaaagatattgtaggtgaaacatgtggtacttgtatagactttccaagagtagttatgagtgaaattagtgaaagaattacgttgaaatagataattttttaaatgtattgaaaaatttatattttgttgtctatatatgactacatcatttatgttaatttgtttgtttgatcacctaaccatataccacccgaattgatggtgttgtggagagtaagattgagcaagactttgcccactacaatctttaaagtggagtgactccaagagtaatttgcatcgcattatacatcatcatcatcattagtttaatttatccaaagtgaagtgattagataaagcactaatttttttgggttaatatttggtaacttaggtcaccaacaatttttgtattgttccatagtgttttttttcctttcctgtctcaatttaattacccttttgcattattttttcaattacgaaaaacaatttggcaaaccactaaacaaatccaatgaacattgttttgataaccattgcttaagcaaactttttatttgtatgttatgttcaaattaaatcttttcttgtatatattttctttcttcctttatagaatacttttctgcaagttgaaatttctttaaataaagaccatgcatgcacgttactgctattagccctcttcaatacaacaaacaaacaaaacaaaacaactacaaaaacacaaccaacaaaatcattagaaaacagctcagcttaattgcttttcatgggaaatgtttcaatcttggataattatgttaaatgagaaccacagatgagctgtggctagaaagatagacatgcttattatactatcagcaatggtccctcgtgtcaaagatcatttctacgaagtcctaaatggagaataatgtgatgccaaaagcaacctacttctccccaatcaggaactgtttcatcatagcttcactcgtttccttggcaaggggaaacatgtgtccagcacctgctagttcatggtacttaacccaaggaagcttattaacaatatggcgctgcagcactaccgggacaagcctatcttcatca

SEQ ID NO: 79772 - DNA, 2171 bp, Cannabis sativa
gatgcgggaggaaggctcgggtcatatcacgggattcaaggttagccgttgtagtcctcctatatctcatttaatgtatgcggatgacacttttatattttgtaaagcgaataaggaggaagtggagactgtgcaacagtgtatccgaacctattgttcttggtctgggcaaagtctgaatgtgaggaagtcagcctatgtcttttctaagaatgtggatgaagcttgtaaggcggagattgttagtatgttgggttttcgttgcatggatagagatgacaaattcttgggcaatccgatcctttggtcgaagagtaaggtgaaggacttcacgttcatcaaggatcggctctgttctagaatcgaaggttggagatgtaaacttctttcccaagcgggtaggtccactctcattcggtctgtggccactagtaccccggtgtactctatgtcgaccttccttctcccaaaatccttgtgccatgagatggatcaagctattaggaaattctggtggacgggcagctccgagaaagaccgttaccttgcccttaccaattggaataccttgtgtacccccctggagaatggcggcctaaattttaagagatttgaagatatgaacttggccttggtttctaagcttgggtggaaattagctaaaggggaagattctttatggactagggtcttttgtgctaagtattgggaaaatggtactaatttgttttggaatcctgaatcccccaaatccctctcctttggagctcgtagcatcctggcctcgcgagacctcattcgtaaggaatcgtgtttccttctcgccaatgggagaacaaccaatatgtggcacgccccatggattccttggttggattgggatcaatttagagctgccttcaatcctatgatagccccgacaaccacttttgtttcttcactcttgaacgaggatagggagtgggattcccaacaaactgctacttggatggtccctagtgtggctagttctctccacttgttacccatgcttcccattaaccatgccgataggttgatatggaaggatgctactaatggggaattctctagtcgggtggcctatagatcaatcatcaaaggtagaactggtgataaagatcctatttggggtaaaatatggaaacttaagatttcagaacgaatgaaacttttcctttggaaacttggacatgacattctaccttttggagaaagacttcaacgcatctttggcaacgaattagtgtgtgcaatctgtgatgaacaagaggattcggcggttcccctgttttgtcattgtcctctcgctaaatcgctttggttggcaagtccgtgggggatccggagtgaagagttgaacttcagcagccccttgcagttaaccaagtggctgcttgagcctatccctttgttgcaacaaggaaacattgaggtggaggagtttatgaaatttggagtttctctctgctttactctttggacagctaggaaccaagcttatcatgaccatgtccaaccatccttcttcaccatatttaatcggattaagtgcttggttgctgagcttaattcggtgttgaccattcctcaggtgatgcctacgggcaattctaactataatgaattgcaggaattgttgcagaatgattttgtggtctttgttgatgcggcgtgcaaagatctcagatcagtggctggtatcattgtaaccaagtctgctgccgagtttgttgaagccttctctgttcagcttcaggccttttcgcctctggaagctgaggctttagctcttcaccacgctgtgcaacggtgtatcactcttggatggcataatgttacttttgccgtggattgccaacccttggtgtatggaattaagtctcggaggacaccggattggagggctgcaggtgtcttcgcgcagctgctggatggtctggatcgcatcccgtcggcctcaatctcttggattccccggtctaggaatgaaatggcccataagcttgctaaatggtctttcaactcttatcattttggttttttcaatgctgaggagttggcacctcttgttgccatctaaaactgtttgtgttttggcttgtttgccttttttctatgaagttttcttttccagcaaaaaaaaaaaaaaa

SEQ ID NO: 79773 - DNA, 815 bp, Cannabis sativa
acccccaacacttgcctagaactctaagccaagaccaagattttattgattgtcaccttcagtttgttagggaaaattgacttggcgtgagagaagaatgaataaaatttacaataaaaacttagaccagtcaaaggcattataacaaagcagagctataatggctgattttcagggtgaaaaaataaaataaaagtcttgattgtgaccaccagtagttttccacgtgtagttcacctaatctaatagatagattagatggatatatagagtagagagagagagctcttatccaaaagtcaaatgctaatgaaccagattttcccatttgaaaataatatacaaaactagttaggccttaagaaattactccaaaaagaaaaaaggggttatgctttacactctcttttatcaatattatgtggtaaaaaatgtcatggaaaaacatcatatataggatttgaagctaacctgaatgtttaagtggcatctaatttgttggtgcagcatccactgtcaatgaaaatcatacaaataaataaataattgaataagtatattgagaagaaaaaatggataatgacaaatatttagaaggaaaaaaaataccaaaataagtcaaacaaacaaaaaaaaaatgcattatttcatacttaattggcaatactatttgcaccagtagcaagtgcttggttttcaattcttaatccaatgaaaatgtttcatcattttgtcatttagagatagtttttcttcagcaaaatatcaacttaattagtcatcaagcaataattgtatttataatctctgtatta

SEQ ID NO: 79774 - DNA, 1225 bp, Cannabis sativa
  modified_base (1177)..(1182): a, c, t, g, unknown or other
ttgattaacatatccaaccaagttgtatatttcaagtttcaacaattattgttaataatgttttaatttcttttttgtttaaatgaaatgatttatccaaggcatatattgggaaaggctgcaagcataaatattgagttaagagacaagttcctctaaagtcccttaaaagggacatgttgcctatttgtcccaccacatccctcaaacccggaaataattaataattaatcactcactaactcaaatacatatatatataataaagacaataattcttttttttttttatattattaattttaatgtcaatattattattattactactactaatataagttttgttagagagagtgagagagagaaataaactattataattttgtctttgtgttcattgaaaattgatgtcattggtggtttggtgatcttgtttgctcaccccatgtggagagggagaccaatttggttaatttaaatttccatggttgcccttggcctgcacaagttcaaagaagactatcttttcaaccccaaattttcaatttttcttttgaataaaaaaaaatatttttttaattatatatataaataataattagaggaccctaccaaatgaagttgataccttttccaccacctaggatttagcaatttttttcatggtgttgtgtggggtatgttaccaaatttttattttattttattctattattttttttaaaagagaaaaataaatccttaaaagaaatactaataaggttttagttttgattttaggtgggataccttgcaaacaaattaagagaaagtagcattttgggttggattccatgtgaagacaaatcatgggcaatagggattactttttggttttttttggtggagttctagggcttaggttaggctaggctagactactctcttcaattgaattgcttccatgtaagtaagcacattttttctcctttgtactaaataggaatataaagctttttttagtatatattttgagtttgagaattgctattaagaccatggctatatttagtgtaaaaaataattttatggtaaatttacgggtaaatagtggcataagtacctaaaatttatgtttgcaagcgacatatacctaatgtttatttttagcggtataagtacccaatgtttgtannnnnntaatttttttctaattttatcagtacagactctgatattgtct

SEQ ID NO: 79775 - DNA, 960 bp, Cannabis sativa
atattcttaaattattctcttaatgcacatatacaccaaacatttctaagatagaaagttaattagttttttttcttctcaaatatagaaaattaagatttgactattttcaaatctctaaataaagaaaaatattgctgggatctataaaataaacaattatatatatttatatatatgagataaattccattattattagtaaatagatttgttacctacctacctcaccttaattagacaaactcctttaacatgagacaattcttatatctttttacaaccctataaaaacaagaacaagagaaaagtaaatcattattattattttgtaccaaaaatgatgataatcaacaacaacaatcgccatcatcaaagccaaatgataattccattatttgttttagtcattttattttcttcaattttagatcataataattccttattatgcgaaggaagtagagatatcgatattcctttgcctacaccgccacaaagttcaagcgatgtagttataataaaaaaccgtgtgaaaaaatcggacttaactgttcattgcaaatcgaaaaacgatgatcttggtgttcatgttcttaaatacgatcagagttatcggttttcttttactcctaatttttggagatcaactctcttcttttgcgggtttaaatggaaaggagaatttcattggtttgatatctacaagactcatcatagatttgtttatcatataaactcatggattattcttcccactggaccttgtctttataattctaatcatcaagcctatgattattgctatccttggaatccagacaagaaaaagggtttacaactctttccggctcttaattaattaaggatggagttagccatactttctattatgtcgtattgtattgtataatatttcaagtcaatatttaatataataatatattttatataatataa

SEQ ID NO: 79776 - DNA, 1221 bp, Cannabis sativa
taattcggttccttttttattttctgcagcaactagtttctaacatatataattgtttgtttattgtataacatgtttaatatttctatgtgggaatcaatacaatttttaaaattggatagttacaactaacacacctaggttatgagtaatttgtgaatctttacagtattattattattatattttaagaaaaataacctcaacaaaagatctaaattaattaggcttcaattttcattatgtggtgggtctccaattatgtttttggcttggctaactcaatgtagaagtcgaaaaaccaaatggatttccaaattgtgtttaagttgttgaacatttggcggtttatggttaagtcttataagatatttatttagtttgtaataatcttaatgtttttaaatttttattttgtaattgctcaaaatcttgctaaattagctctttctcttgatgatgagagggtttggtgggattactcaaattgatgtaagtctttgggcttggatttgacttaggcctaatgagaagttttttttcattcaataaaaaaaaacaagtgaaaattttggatatatgcaattatatcaaaagtggaaaatgtttaatacatgcatatccatttcttgtacttggaatgcatataataagataagacataaattgcatgagatattgttcctaacaaatacaaaattaaataagaaataaatctgagagctaatcaccttgagaaattacctgaagaagattgaattttgagtctctttccattccatatgatattattatgaattaatgtaatggatagaatttagttaatacatataaaaagccaccttcatgctccattttgatataaaaatccatacaatttctcaaattaatatcttaattgcagaaaccatggtatacactattttctgtaaaacaaaacaagatttttttttttttttttgacattttaacattttttacttattattttcttgtgagcagggtctgtttggtattattatatgcatagtgatcacactggttccaaactacactactatggccacttcaagtaatgtggcaaacattttgaattatggagctgttggggatggtattagagacgacagtttggtatatatatatatacatatatttcttctatatcatatcacttattcatatagatttttttacttggttttgtggaatataatgtag

SEQ ID NO: 79777 - DNA, 4665 bp, Cannabis sativa
aacaaaaaatttcatattaaacttaaaaattgattttttttttttttttgtacatttatattttttcttataatttcattacatttttcttttttcaccaaaaatccaattcattagtgacctagatagaatatttttaagctagtctttttaggtgtggatatacttataccgctaatattactcttaatatttctctaaatcgatagcaatattgctcaagtacgtgtacataaagaattaaaattaaataaaaataagtaatcattaatgatactatggatctaaatttacggtgtgattatcaaatggtgggatccaggtgctattatggatgagtaatttcacatcggtgtatcccattatcatcatacaataacataaaacaaatataattaccaactggaaaatattgctcagcccattgaatattttctttttttgcattacaagcaataacgatctgcttaccaactaaacagagattaatttaaaattaattaataatattacaactgggccgctggacttcagcttatttcttatctacttttgtttcttccaatccattatttttttttatttgtgttgtgtatttatatgtgcgtcttctgatatctttggaccatgacagggcgtgattaactcacatatgagattaatgagaactttggtctctatgaggtactagaaaaggccaggtgtatttcatcttagtttgattcaatagttgtaaaaagatttgtgtttggagcgtttcagtaattagacacctcatacctgtatacaattataaaatgtgtttatagcgttacattgttaaatttcacgagtatattccggaattatgactagtaattagacacctcatacctgtatacaattataaaatgtgtttagagcgttattacattgttaaatttcacgagtatattccggaattatgactatgtttgtgttaagtatattggtcatatcacatttgaagagattaggagttacattaatgtttgtcagtgaatgattatgtccttatttaattataatcacagtatacatttatttaaattagtccaaagaaaatatatggtttttgtgatatactaaactgccgttatttacagcatacatttgaaaactgaatgtacatatatattaacaaaatgaatagtgagtagtagagtcctggagcaacaaattacaatttattcaaataatagccaaaatatacatttcttcaaaatttggtaaaccaggtagatggaaggatatgagtgtttgaatatggtggtgttgcatcatatgagattttaaaaatatatagtaatttactccctaaattttcaaataccagtaacctcttgattaaaataacaaatagccccctttggaaaagcttcatcggttaaatatagtaacaaattgaataatatacgcaaaaaaagtacaaaaggacaaaatgataatcaacttaattttaaggtctaaaaacagaaaaggcatgaactaagcttaaacaatcaactaattagactcataatgtagccatgaactaccataaatccggctcataaatgcgtagatgaactactatataaatcaggcaaggcatctcaggtttcaaacacacagttcatatcttttcttatatatagatagctctatagtacagtctaaacattccatatggaaaacaaaatgatgggttggtttctgcgtcttctatgtttaggtatgatggtgttcatggtggtcaattcttctagaacaagtcctagtcctagtcctagcccaagtgctagtgctagtgctagttctagttctgatgatataacatgcaaagatgccattacaaaattgatgtcatgtacaggctacttatcaggctcggacccgccaacgccgagcgttagctgctgtttggcttgccaagacgtatttcaagcggccaacaccaccgcagtgcgcagagacctttgtgtgtgtttgaaggaagctgccattgagtataaaattgtccctgacagagctaaacagcttccccaactttgcaatcttcaaggccttgacgtaccccttgaccccagcgtcgactgcagcacgtacgtaatctaattctctctccatctcaattttgttttttcttatacaagtaagttatgcatttgtccttacaaaataatatatgcgtttcaattagagaagtgttatttcttagtgattctttttgttgtgattgtgcgcagaattaaactgtactaaaaagggtagagatgatggaagtgctattaatttggtggagaaaagatggccaaaatttgcccccaactatagctttcccttttgttatcctagttatgctttggaaaggctgtataaataaagggatgatttagatttcgatcttttgctcctttttaattttgctttatattttattttcatttacatgcttaataatgctggaaaagtcaaaatttggccttagtttactttgttcagtagcaatgttaggtcttaatcaaacaatgaattctatttttgttagcaaaaaaataaaataaaataaaactggtcagataagtcatataaataatctcaaatgcccttgaattttatttacttatttgaaggaaacccttcattacttttacatcttgtaaacaaaactatgcattttgggccaagtaaagaaaaaagacacttcagattgtgaggccttctattcttttcttcttcttattccattctctttcttaattaagttctctggtaatagtcattattaccttcacaactttaatcaattgatgtttttaagcctcttcatccattatgaagtagttcaaactcaagatttcatgaagaattagcttaataaaggagtcctcttgtctgaacttcattgctcatgtgtttgacctttgaaccagatcaagatcaataagctgctggatttccaaaagagaaaaaagacatttttcaatcaaatactgtggtttttatgaggcagctttactctgttttaactttcaatttgtttgattaatatgcactgtcatgtctcaggaacccttgaattgtttaattttttgccaaactcaaatagctatgagctaattatttatatatatacactaaaattgtatctagtcttattgtgtatcatgagatttaaggcctaaaagaaatttgcaaaattttcaagtaaatcactctagtacaaaatgtcaaacaaaaggggagaaagaagtataatttagcagagtacatattttaaaaattgacatgtaaatcattatacatgatatagatatataccacttagaagatttaagaaataccaattgtcttattgagtagccaaagcaaaagagcaagttgaatcccaaaaatggagtgaagccatgttctgtccagcatgaatccaaacactgtaattcctgctttgttattctccaaatacgtcactgcaacaaaacacacacatatcatcaaacacatacataggatagaataggccttgctggtataaatatatacatataattcacattacactaacctaaagcttgccgtttgtgaaatgatatggtgtgagtgaaaattgggaccaacttggtgtcgttcaaatcatcatcatcatctccactccctgattcctcatccgatccatactcgccccctataggaaaaacttgacccgaagaaagttgggctgctgtcatggccgaagttggagtctcctcatccaaagaatcaaaggagttgacagtagcacatacatgccattttgcagccaaccctgtgagtgactgagccttgtgacttactttagtcgcgctacgcaggcatacgtaaagccctgtcactatgcttgtagagcatatctgcgtgccaccaaaacagaacaatatgatttgagtgagatcactagacagtattttattagctaaaagaaaaaagagaaggaattatttatattaccgcaagttctccagctttgaaaacgttgacatgagaacttgacttggttaccatgagcagagcaatgagttgacttaaagtgactaaaaggagagagaacaagatgaagagtctatatctatggctaatggtccggagatttcttctgatgctgaggtgttcgattaggataagacccacttcagtttccttctgaaaaactcgtgcaaaatcttctagtcttagtatttgaagataacagataaggcggaagagaacacagacaaggaagattagtgtgattcgatatagccatgaaaagagctccaacatgcagaaaattgtctcgcttagaacgaggttgccgaaatatggaatttcctgtgcgcctgagacgtaccaccatattttgtatgcaaactcagcagcagagtacaaaagaatgatcgctaccagaaacttcagagattccttcacaaagaacaacaaaaataatttcagataacaaattaaaaaaacaacaagaaaaataatgaaaaaaaaaaatgtcatgaaaaattattcttttgtgaaaaaactgtagataaattatattttttttttttgtgtagttcaatcctccgcgaatgtttgatcaaattcaactatatgggtattagaaagtctacagtatatgttacgggaagtcttatatgtttt

SEQ ID NO: 79778 - DNA, 3792 bp, Cannabis sativa
aaatatttaaaattccgtacaaccatatttttatatttttttttttgtttatttgtgaaataatcccttttatgggatttccattgatttatttattaatttaattcaagctcacaatatctaaaaattacaaatggtaataaaaaggctcttacaaatcaaaattaaaattatgaaaagaaaaataaaaaggcactcaaaagtttgtaacaaattagttacattagttacaaattatgacttggtaaatgcatggagtgtttcattgagtgcttttctatcataatcacctgtgaaaacacagttgcctagaggacccttaagaagaatcagtcttagtaatccatcagctactttcttgtcaacctgcgccgaaccgaaaaaaaatgttagtaaacgacaccgaacaacgagcaagaacaaattctcttttgcttaccgccataacggatttgaacatctccacggtcatgatttcgggaggggcaataggtaacttagcttgttctagaatgttacgaactcgctttacaagtgactcgtctatccacccgagtctgtaggacatgtcaacagccataacctaagagtagaataggcaacaaagttagttttgggagatatttggtgaaatgtatatttagtatttgattattaccgtgccggctgcaactgcttccccgtggagccattctccatagcccatcccggtttctattgcctacataagacacgaaaaagacacaatttgaatgagattattaagttcggtttaacaatttcggaaatccattcattcttttcatttttctaactcgccttagttctgttatacgacaaggtcttaagcagaaaaccgattacaggattcccgaactggaaaaaggaaaaggaaaagagaaacgattatggggtaaggtactcacatggccaaatgtatgacccaaattcaatgttgccctcaaaccactttccttctcgtcttgggacacaacctcggccttgttttcacacgaacgcttgatagcgtaactcattgcatttggatccctgcaatgaaaatgtatattgagtattgagtattgattagattcgaatagaacttcgaaaaataaacctagttaattttcttttcttgatatttgtattgtatacctagccagcaatgccttcatgttcttctcctgccactcgaaaaactctgcatccctaatcaaaccgtacttaatgacctctgcaagacccgatgccaattccctttcgggcaacgtgttcaatgtgtctgtgtctatgagtacacattgaggttggtaaaatgcgccaattaaattcttccctaaaggatggtttatcccagtttttcccccaaccgaagaatcaacctattcaatgccaataagaacagttagaggcatacatagaaaaacaaaaacaataaaaatactttgatcggtgacaaacctgtgccatgacagtagtcggtatctgaatgaaattaacaccgcgaaggaaagaagcagcagcatagccacacatatcaccaatcacaccacctccaagagcaacaaatgtacattttcggtccaattgcgactcaatagccttatcaaagactttcatgagagtttcctattaagaaagaccaagtacaattaccacaattgcaaaaagagagataattaaaccgaaagccaaataggagacctaccatgttcttatactgttcgccatcaggtaaaatcacactttcaacagtcacattcgggtttcctctggtcaaggcatcaacaactttttccaaatacaatggcgcaaccgtagtgttagtgactacaagaaccttcttcccatgaacatgcctaacatgaaataagaaagcaagaaggtgtcaaaaactctttctgctcgaatcacaatactaaaaattacactaaaaagaatattttttattattagattagttttttaataaaatacaatataaaaaagtgttcaaatgtactaaaatgtcattccaatggaatgatcttttcaccattttggtggaatgactattccattttaaaatggaattccaatgcatgatgataaactatttaataagtcttttatcaatttttttatatattttaaattttattccattctatttttatgttttcgttcttcccagccaaacgccaccttaatgccttatactaaattcagagagagagaaagagagagaacttggtgaggtttgagctgttattttgctccaagattctacgagtttgatgcgaaaaatcttggactcaagttgtacttgtattcatcacatattgaataaagattaaagcctttgtggttgaaccacttaaaattgctagtgttgtttactgttttgaagtttaattctcattagtttatgcatattcttcatctgttttcattttagttcagttcaatcttgattttggtgattgtttacataaatcaaagtttttagcttaatggatatatgattctcaaacaaaattaaaccataactaagctaaataaaattcccaaataccaccataaacatgtatttttacagaattgagcaattctcatgtcaattcagaaaccaaaactctatgtgttcgttcggtataccgtattacaaggtattgtattgtattaaactgtattcaatagcatacttttatgtaaaactacatacaatattggcttttatatgcatataaatatacaatattttgatataaattgaaatttagcataggattatatcaaaatacgatataataaggcttaccaaacgaacctgaaagtaaataaacatggtttatataatccaactccaaacaaagcagttgaatcttcaaaacattatgaatcaaagtatgttattcacaatagaattaaaatttatctattgtattgtaaatactaaaagttctctaagctcaaaacaaaacagttcatgaatcaaaagttctagcttcatgaaatatatgattctcaagcaaatatcaaccataaaaaattcccaatttctagagagttgggcaatttccaaaatccaaaagattgaaactttgatagcaaaaaaaatataggaaatatgattctcaagcaaatttcagccataactaaactacacgataaagcaattgaatcaaagtttcttgcttaatgaatatatgaatcttcaaaacattatatgaacagttcatgaatcaaagattttagtttgaaaattcccaatttctacataattgggcaatttcaaaaaccccaaaagattgaaactttgataagcaaaaatattgagtgagaaaaatcacaaacctttgaagaagctctggttgatcaagaagaccagacccaatataaattggataactccgattacccaaatcaacctcaacaatggtgggagcttttgaacccaaagactgatccataacctgggccaagctagcacatatcctggaactggacctggacaaagccgagttcgcaacacgagtcaactcaatcgaactcggggaaatagaggaggagcgaagtgagagggagttgggagtgtggagacgaagaaagaggtcggaggagctggaatttgggttaaagattgaagctttggtggagagagatgagcagaaatggtgggcagtggaagccatggatggtctgatgaggttggaggagaagagaggtgaggctaagagaagtaggtggtttggttggtgggtggctttggcatttttggttttagagagagagagagagagtaggtgagga

SEQ ID NO: 79779 - DNA, 1670 bp, Cannabis sativa
gagagagagagagagagattgtaatgaccgcttaactttaataaaagaactagaaatgattaaggtttaatttcataaatggacttttttttattatttttatgattttggagatatattttaattttaggtgtgctaataataaaacatgtgaaattttatggttttcatattttatgctcggtaatggtggaacgcgatgtttggccaataaagtcacttttacttatggtttagtattttaaaaatgtcagggtgatttagatagacattgagaacatcaagaatatttgaggtttagatttgaccaaaattctctttaatagtaagattacttttggtgaagaaaatgacaaattgataagttaccctcttttgtccttagtgaaattttaagaatattctctttatttccttagtaactgaataacagtaggtatgtctttattaattagaaatatcaaataagttaagttagaaaaatcaacacaataagatagctttctctctcttaaagtctctctccctctcgacctcttttggaacccaactgaaagctagggctttgttgattcaattgctgggtgttgtagcaagatttctcttagatttttaaggattaaactcaaggtaagctcctacacttttttctctttgttttcttaagttccaagttaggtttgttgcttattttctggattagggttgttttatgatttaattaggtttattggagtttttcaaagtttgtgtttgatgattttagttattttaagttgaattgagtgcttgttgtggtgtttgaacaaagtttgagctttagagctcaaactttgctctctcatggtgatttatgtatttgaggttattgttcagttcttttgcttagattatgttctttatgacttgtataggtggtctggaaagttttttgtgaattggggttgaattgagttgtttttgtggtttttgggggttgtgcactgaaccggacaaccaattcagtttggtcctgtagaactggtctaccgattcctccccaggcagaccccatagaacttgttttccgattgggaactaatttttcgactagagcactttagggtaccctaaattttcatgtttttttcaatatttagggtattaacatgttatccatcgatagggaaacttttatttttaattttaagtccccaaaaagtgatttagcatatcactcatcagttttatgaatattatgacttaggggcctgtaaattgtcgagcagtagttgcactcaggttgactgacatacattaattcagaaacaaggtaagattagtatattatatgcatatttatgattacctgttagattacattaaaatagcggtatcagcatacatagaattatattggataccgatgaatgtatgtttggcataattattgattaacgctatcacaacggtatgactagagtactgagtatatgtttatattatggtcaatagtactttcgtacaaacgttctagactcagtacgcgtaggatgcgggatatggttatgattgggtgtatgggcgtcttattgtaatccggattatgtatatgttatacttatgcttttcttactgagtctgtcgactcacagttctacgtttatgtgtaggtaaaggcaaggctaaag

SEQ ID NO: 79780 - DNA, 2124 bp, Cannabis sativa
  modified_base (2033)..(2049): a, c, t, g, unknown or other
acagcattatgcagtaccacaaattgaagctgaaattatgattctatacagacatattgtccaaacaaacacaacaaacagcacatacctattgaaaacaaaagaaataaaaacaacggtgactaaaagtaaggttttcttgtatcttcatcacccgattacatctgtgactaaaagtaaggttttcttatatcttcatcacatgattacatctgtgactaaaagtaaggttttcttatatcttcattacacgattacatctctgctcacatctctgctcagctctagtgaataataataataataataatctatttaaaacataaccttagaatttccagtggagttttttatttatttatttatttttttgtatggcagcaaaactctacctaatctccttcctccgaccttacttcaaactctttacctaacctggtttttccaatacttgattaggcatgaaatatactaaacttagggcgagattttcaccaattaaattttgacttcttgtaaagagtggcaatacaattcacaaaatgcaagcatcccacataagaacataaaatgtcgtattcaagttatcatatctataagacttcttatcatccttttttcaaacattaaattgatcctcagtaggtcctactctttaacctttaagataaccaatgtagtttcaagccaagtagggtagtttcacaggccacaaatataattttttgagtcaagtaaaacaagttgtcacaacttgcaagatggtaataagtaatttatatatatacaattatatatacacatagtattatatgtacacatagtattagaattagctgaacaactaattctaattattgataactcccaaataaaagtagactcccctacctttcatcatcaaaaaatttgcaaatggtacagtaatattttgccatggagagcccattgcaagagggtgttgtacatgtaggtccaaccggttgaatcttcaggcagcccatgcacatcatttctgtcgtcaatttcctaaattgtttgagaaaaaaaaaagtcaggatataatggctcacataaaatgaaagcacttgtactaaaaattacctatccatagagtgatcgctcacgttgtcatggcaaaatctacaagtgaacaacttgccacagcaagcagaacgaagtttgcagtttcttttgtagtgctcacacccaaactcttttttctctggatctcctcgaaatgagggtgagcgtccagcaacatcttcacaacttgaagtttctcctgctactgttttgggtaacttctgctgagctgctatccagcggctaaacaaaagcagtaagtattggtttaggagttgtgacttgcagatgaaaccattgtcatatcaaagcttgaaaaatctaccctgtatactaacctagtcataagattctgtacaagatacgcttttctccttggatcaagagtcaaatcacgataaaccttcctaatctctgcctcgagctcattttgattcattcggaaaatatctttccaaccaggcttgaacatttgatcactctggtccaagctttcctgatattccaaacctagcgagaaaagagtgaatttggaatcagctcaaaattgtttcaaatatcatatccacaaacaaattacaaaaatctttaccacatgaagaagaataataataaattaccaaatcatagtttgcttgcattttgtatgggagttgcagtacaaaacaaagggtattgtagaaataatagatagcacatgttttattgtaaatacctaaagtgggttgtacagctacgttcaggttgtaaaatttttttttgatcaagaaggaacgacttcattaatcaacaagcaataacaaacaatgcccagctgaggaggaaaaaaccagctgcaaactcaactattttttacaaataaatgctctatgaagttcctcttatgtctattcaggctccctcttttagctattgttaatctataaaacatgatttttttaatatcnnnnnnnnnnnnnnnnntgtgctcgagtaaccattgaaaacacaattattaatgtttgaccacaaccaataaatcatggcagccatgacaac

SEQ ID NO: 79781 - DNA, 3292 bp, Cannabis sativa
aaaaaactgttcaaaaaaaaaacattaaaataagtcacctttttttttgtttttaaaattataattctttatttaaaaaataaaaagtgaaacaattttataaaacataattttgaaaaatatttttaatttttaattttaaaaactggaagctaattaaaaaaatgttacctaaccaacttagtgtggtattcctatatgagtttttgacatgttgaataatagtactatgatgttatatttaccataatgatatcgtgtcaggaactgttgacgataacagaaatttctagatctagtttaggttgaaggttgtttatcatttctatatgtagtttgaaatctgttttgtactaatgtttcatctttcacagatggtccctaatcgcaggcagaataccaggaaggacagccaatgatgtgaaaaattattggaacacacacttgggaaagaaggtaatgatgtcctacgataaacttaatcaaaaacactacctcagaaacaaagatgatcatcacaagtttatccctaaatccaacatcattaaacctcgtcctcggaccttcagaaaccaattacccttgacgaatactacaactgtttcaaaaaacaatattagctctgcaccagtaccacatgtagtagcctgtacacgtagccagcatgggcctgttttagaaatgaataataagaactggggctgggagagcttattagacatgatcgacagcgaggatcaacaatttttgagctctggttttgatgaagaatttaataatgttgcccataactctgaatttgaacctgtttctcatcgaccttcagaatcaaaaatcaaagacattagtactactactaataacagtagtatttttgtcattgatggctatcaaaattgctcaactgactttaccatggacatggacctatgggatctcggaatcactgccacatcagtaccagacagggaaatgcatgagcaaccttaaaattattactatactaattataataagaatttcacaacatcaataaagtattgttcactatgtcatagtggtataattattagctagatagaaataattctcctaataataaagttttaaatttggatgttgtcttcagaaaaataaaaaactggaagttctgtttggcttgacattttgggttgtgtatatttattttattttacttatctcattatattgtcgacagcttattattcattgtgtcgactaattttgtcatacataaaagatcctgccatactgttgtacgtagactgagcagcgcgcgcccacagataaatttgactgggtagtctagaaatgagcgatgcaaataagctttgcgtatgtaattgatctggatgggacgaatagctaccaatgcaagttgctagatatgataaaatcagttgaaacaggtagacaggaatgtgccatgtgtgatccggcacagtatccgacaaaacactagctccaccacaacttaattaagaccattttgctattggctattggctatttggcatctaaattttgaaaaataaataaattaaatgtttatttttatatttaaattaatggatactttacatgttgagcattgctattaggcaccagtggtgcgtagaaatttctcgacatgtcacgttacgattggctagcgatacttcctaaaagctattatattaaattatgtgggacccgatatttagttggactaatagcgatactgacacataggagggtgctaggcaccactggttctctttaacatttctctttacatgttacatcttaagtaacattgcattcagtaaaaagaaaagaaaaaaaaaagctttaaaactctctagggatttttccctcgttttctctcgtccttccagctctcttttattctgagtgatgcaatctctccataacttctcttatcaatccttctgcttctactctcatcccatgattattttgcgtttattgtttatcactcctctctgtagccgagatcctcatttaatgcaactccctccagcctgcgatatgcaatctcccccaaattctttcctctttttttccttttttcccttcttccatgatcactatccatttaattcctgtcactcctcaatacgatcgtgacctccatttattatgtttactgaaaacgattggtttttctcctccctaggatcccttcgagcatttaataaccgccatttcctcatgcagattcaagtaatcatgattgtagcctggaatagagttgggctacgggatgctacgactgaaatggcatctctccacctccttccttcctagccaaggtgttcaaaggtactacttattattttctctttacataatgttgtgttttttcttcaaattccatctccctatttgcctggtatattcacttctttctggtattttattgtgcaaacattcaaaaatgtctgccacttctgaaaaccctaacctcaccatctacctcactgaagaggaagcctttgttcatgagttcgatcatgtttccatccgccctgaaccccaatctgactccattgtcaagattctctcatccaaaactatcaaacctaagttgattagtaaaactatgaaagaggcttggataactcgctttcctttcactgtttcagattaccattctagtgtttttctaatttagtttgggtgtgaaggagataggaggagggttgtcgagggtcaaccctggcacattggcaaatctctcaagctcttcgccatccctgatgggtttgacactattctcccctctccactccgatacattcccctctagatgcaagtccattttgtcccatttaggaatcactcatatggtcttgcccagtttattgtcgaggccataggtgaacttattgaagtccatctctcgtctctctatgactcgattactccttttatgagaattagactcctcttcgacaccactaaacctcttcataggggtatgaatgttcgtttcacaaagttggccattactaaatagctcaaatttctgtacgagggaattcaaaattactgttaccattgtggtaaactcgatcatacttatatcaaatgttataattttctacagcactgtgatacttatgtgtatcatccttctctgaactacaaagatactctcaaggcccctgcaaaatatatcaacaaaaagagtatttttgagttgtccaaacactattccctttgaagaacaacctttactatcgaacctttctagccaaggccttca

SEQ ID NO: 79782 - DNA, 2518 bp, Cannabis sativa
aaacaagttgtatttaaaacaacttctcttgtcctaattaccagaaaaaaaataaaaaacttctctcgcctagattattcatgatgaatgttacattatatttgtgtgtatgtttcatatataaatgttaatcgactcaaaagaagattaatgcttatctagatttaatacataattgtaatgataatgattaactatcctaactgaatcttaatgaatgggatttccacaaacatcacaataagaacaacctgcaaacatctcacataataatattagcaaagaagcaaaggtacatgactcccatataactatactttaatgatagaccaatccaaaaattattcctttcataaagaaaagagcattgaaaaagtgaagtcaaattagttaataattaagcagccttaggcatatgaaattagaaagctttgtagctgaaagagtaataactgggaaaacaaatggtgcacaacagattgtatgtatatactagtgtcatttcatcgtcttattttactacaatatatatattgatcatttgtataaaatgagagaacccaaatgtaaaaattcatgtaatttttttttttcacatttctggtacctcaacagggtacatattaattatgtccgaccaagtgtttgcttcacttgaatcaagatttgaaatgcacttccaaacagcactattgcacttgaaaccactcccaaatgcaatttgccaaacacggtctcctttcttcactcttccttttgcctccaaataactaagctcataccaaactgaagaagaggaagtgttaccaaatctatatagtgtcattcttgaagcctctacatcttccttattcaactttagactatcttcaagagcatcaatcacacctcttcctccagcatgtatgcaaaaatgctcaaaagccatcttaaaattcggcacgtaaatcgttagctgcctacctgaggatgaagatgagaatgaggattgccacacttgcctcaacactgcagacaatccataccggaattgttcagaatagggtagtactaaaggacctaaccatgaaacattgatggttagggcttttgcagcaacatgaataagtgatcttgagattgataccccttgttttccatcatcatctgaatgttggaaaacagatttgtaagcattgtcatctgatcctgtatgtgtcctaacaaggtgttggagcttgtacttagcaattggcttatcgatttttcggttcgataaaagaatggctgcaccacccatacgaaacaaaacattggataaaagcatagacttgacttggccctggtaaccatttggagacacagcttccatgctaagaaccaaagctatggagttattgtgaactttaagcaaatctttagccaaacttatagccaaaatcccagcactacaccccattccactaagactaaagcacttgatatcgcttctaaacccgaacttgcttatcaccatggatgaaatagaaggagtagggcaaaacaggctgcagttggtgacaagaatgtcaatgtctctagggtttatccttaagttttttctctgttttgagaggagttgtttcactataggaaaaagtacttgttcaatctctgccttgcttgccttgatagaaggagtagggcaaacttcatgcactgaaatcggcaagaatgtctcgtttccaatgcctgatcttcgtagcaccttctcttgaaaatctttgctttcttggttgaaacaaccacttctttcaacgtgctcgataaagtttgatggtgaaactcgtagtgtgttcggtggctgataacatgcgaagtcgagaaggtaaactggcttgggttttgtggagaagtagagaatcatcataaggaagatgattaatgttgttgttattgctagtacagctccatggtggagctgtggcactgtattttttatggtaatttggtctgtgattgtagataaaattttcagcattaccccactcatattactcatcataatatctatatataaattaataaactctagattggttaagcagtggagtttttgagtttaggattatgcatacgagtcccaactattgtagaagaattgaccaatattgaggaagagatcgacttggtagtataaacaatcaaacaatcaaggagagagtttgattatgaaattttttttgtatgagtaaaagaatattatggttttaattactgtatatactttttatattacgtgatagatatataggtattttattttttttgaaggaagataattagtttcatttcaacctaaatcacttcttcacgttttctcatttttatggttacatcatatgtatcatacacatggcctgattttctgttttaataatttagtgattaaaatattggtaattaagtagaaaaatattgatgcatcttatacatatgagggccaacaaacacttagacgtatacgttagagtattatttgtgtatgtacatgtgtaat

SEQ ID NO: 79783 - DNA, 2154 bp, Cannabis sativa
ggctggtcgctccactgtggccccccgaccataggcacagcgaggctcagtccttccaatgtcgagttccatccacaatgtgtcaagaagcaaccgacggcctggtgagctaacacctctagttggtcacaccatgttacaactattcccgcttcagtttcaccttcacctattgaacttaggaactctttagggagtttcttctcaggttcttttaaaacccacaggaatggcctctggcttgattttaagccccatgcaatctcttcaacttgttttgctgaaaggcttgccatgcttccaaacgacacatatatgaccgcgtgttgtggtttcgtgtcaagccatcttaagcacttgtagcttgttggtttccatagactggctccgtagcttgtgtctcctttgatttgttggtctagataggctgatggcaccattggaccaaccatttttaagggccaaagtcctaccatagcttccatcagcttttgtcaacagaaacagccaaatgagaattatgtgtttacatataatatagagtgatattgttaaatattaacatttggttcgatagtgttaattatttatctattttttcactcacacacttaaaaagtggcatactttaatttatatattgcataatttattacccttttgtccatacatgaaaaattaaggtaaaactatgagaaaacacccatgcttgttaataaacgatcaattttttacatataactacgaggacaaaaaataagagtctacataaaaggagagaaaactttgcaatgaatgaatgcttatctgtccttgatgtgaaagatcatgttaaataatttataattattaatttgtaattttttttaacccccattttcttactctttctacattaccagatattttcaagaaaaaaaataataataataaactacagagcaaaatctttaacgtcatctatcaataaccacaatatccttttgtcaatataatttatttcttttaaatatcatatacatgttgttcttctattattatataaaggtatacaagtgtaagaagtacctcagtttctagctgttggaaactattacaaaacgcccaatcaataccatccaataactgaaacatttccattatgagagccaaataaggagatagatcgccaggctgagctagaaaactgggcatctcagaaaacccaagtggaggaagtccagacattttgatagtagaaattacttttcccttctcaacaggaaacgacaattccccacgatttaaacgacaatacaaggaacacacagaagctgagtttgtcatgaaaacgacaccaacaataccgaactgtctaaccacatcaatcacccaagtaagcatacagtcataaacgacacaagtcacaggacaatctgtctcactaaacttcataataagctctgttagagtctttgaccccatggctctaaatgactccaagtaggcttctaagctcgaagctagctcgaatccaccaccatcatagccgtccgatatgggttcaaatccaaccgctgtggtagtggtggtggtgttggtggttatggatttgagagtgtaatgggtggtggctagagtggcctttaggcctttggaagctaagattttagcaaattggagaagtgggtttatgtgaccttgagctggatatgtgaccacaactacgtggggcacattgcctcttccttggttcattttttttcttcttccaaagcttggagagagtttttattttatttttatctttgttttgttttgaagaagtgaagagaaacaagggagatgttttagtaaagtagtttacgtggggttatgtctaggtaaaggggacacattgaagaaggaaagaaacaaaaaataagaaagagaaaatgatgatacaatagtaagtttgtatagttataacataatgcgatggcaatataagagcattatttgtggcatcttcattctaaaagtactctaatgttatgcaacaacaaattaacacactagtctcaaacaatatttattaatatattatttattttaatttggaagagtattaaattatttaattttttttaaaaaaaaattactcacctatcgttgcttcaccacaacaacaactgc

SEQ ID NO: 79784 - DNA, 3383 bp, Cannabis sativa
agtgacatgcccttgagcatgcttagccgagtgactctttcttgtgcatgccgagtgacatgcacttgtgcatgctgagtgacatgcccttgagcatgcttggccgagtgaatctttcttgtgcatgttgagtgacatgctcttgagcatgttggctgagtgactccttgtgcatgccgagtgacatgtttttgtgcatgccgggtgacatgctcttgtacatgtcgagtgacatgcacttgtgcatgctgagtgacgtgccattgagcatgcttggccaagtgactcctccctgtgcatgccgagtgacatgctcttgtgcttgccaagtgacatgctcttgtgtatgccgagtgacatgctcttgtgcatgctgagtgacatgcacttatgcatgccgagtgacatgcccttgtgcatgcttggccgagtgactccttcatgtgcatgtcgagttactcctccctttgcatgccgagtgacatgatcttgtgcatgtcgagtgacatgatcttgtgcatgccgagtgacatgcgcttgtgcatcccgagtgacatgcccgtgagcatgcttaataacttttgagcgcttagagaagaaaatacgactatgcattcggagcaactctttgagtgtgtccctgctaatctccggattaatagttggctaatctcgagggttagcattgctaatttttgggattaacaaattctatagtacatctcttaataaaaatttattttggtacataccatctatttcgctatttaggaaagtcttttcgtttatttttttttatgatcgtgtaagttgcagttatttatgaacacctataaaattttaaaaaattacgaatagtttccattccaaaaataaggtttaaatatattgatgcatgagtgattgtattttcttaaatgtgtggcaaacaactatttaaattttatttttagtattgtaaattactaaattttttttaaaaatttattgatagtcttacataaatacatgaatatcgaaacatatatgggtaccaaaacaatcattgttgtagtatagattttaaataaatacataaatatcgaaacatatatgggtaccaaaacaatcattttggggtgtagtatagattttacataaagtaataaaaaattctatggtagactctcttcgtattttcaacattccaatagttttaattttaattttttttttatataatagtttatattgtacttatataacacaccctgtaaagtgttgaaaaaattaaaataattttatgcactagaaataaagttcaaataagggtaaatattattttggattatgtgttttacaaaagttactaattagatcttctgttttgttaaatgacaaaatagaccttatattttttaaaatagttaaaataggactctaagctcaatttttaacaattttattttgtaatataatcaactttaagacaatttctaatacgtataaatacagaaaatgtaaccaattttgtcacaatatctctagatcagattattattaagttttattttgacaaaaaatccgttcaaagtcttatatgtacaattttgaaaaatacagagtttattttgttatttaacaaaatagaggatccaattagtaatttttgtaaaacacagaatccaaaatagtatttatcctttacataattattatataactattttattttatatgcacgtgaaataaatattttttatattataaaatatttcatattttttttaaaaatttggaagatgtattataaccatctagctatggaaacaccaaatagtgcatcactttctaaagcaccctaataacaataacaaaattagtcataataaaagtagagtatttcttcaaataaaatctctagggtttcactctcactcactcgctcactctccaaccaaaacaaatacaataacaaaatttctcgatttggcgggagtccgagaaagtctgctaaaagtctaagaaagtgtgcgactgaagttgagatagggaggaacggattatggggaaagacgaggaggagatgaggggagagattgaggagaggttgataaacgaggagtacaagatatggaagaagaacaccccttttttgtacgatctggtcatcacccatgccctagaatggccttctctaaccgtcgaatggcttcccgaccgggaggagccaccggggaaggattactctgttcagaagatgattcttggtactcatacttctgagaatgagcccaattatcttatgcttgctcaggtccagcttcctttagaggatgcagaaaatgattcccgccattacgaggatgaccgcaccgatgtcggtggatttggctctaccaatggcaaggtatctttttttgttaatttgttttgctctgtttggttttcgaggaaatttaggcaaagcttgaatgggtaggaaattctggtctatcgtgtaatcatttcttgggaagacttcgggtcagttcagaattcggaaaaatctgctgaaaaagtaaaaacaaaattaaaactgaaaattaggaagaaacataatgtggaactctttaacatttcaaattaggtttgaatagctagttcatgttccgaggtttgagatgtaattagtttagtttggtaaatattatgaatttcaaattactaatatttgtatgcatttttgtttataagatttgttctttactgaatattttgccatactctggatttggaccacaggtacaaataattcagcagataaatcatgatggagaggtaaatcgagcccggtacatgccacaaaatccatttatcatcgctacaaagacagttagtgccgaagttttcgtctttgattatagtaaacatccatctaagcctccattagatggcgcgtgcagtcctgatctaaggttacgggggcatagcactgaaggatatgggttatcttggagtaaatttaaacaaggtcatttgctgagtggctctgatgatgctcagatatgtttgtgggatattaatgctactcctaaaaacaagacccttgaggctatgcagatttttaaggtgcttttatttgtctatgttggctatgtttatatattagattttgggagtgaagtaaaacaaattccaagaaatgctactctcttgttttaatttaaacaaaaagtgaggcttttttctcatagctaaaagagttcagtttgatgtaattttatagtgctatactattgagaacttttacagctagagtagaaaagagaaaccaaaaatatgtttttttttataaaattataaggatttttttttcttttttcaaaatccaagttccagacaaagttgttatatatatatat

SEQ ID NO: 79785 - DNA, 3967 bp, Cannabis sativa
gtgttctatgttatatacaaatagatcttgggttaattgttaatttatctaacaatcggttattaagccttcttcgtcgattattatagcatatggcgtcagttatatcttaataattgacgatatagtgtatatatgacgttagttattatgaaataatcgatgtgtacattatagcgtcagttatgtttgattctatagtgctgcatgtatcaacgtcggtagcgattttgcgaaaattgatgctgaaagactttaaaaactacctctaaaagctaaatttatagtagtgtgaagtgaaaattttgaaaattttaattaactttattctaattaattagattattttaaacacttcatatcaaacatccttctagaatataaagataaacgtgaaacctattttaatttctttttcacttgacatagtattttcattgtatagataattgaaaatataaaaatgaatggcagaaatttgcatgcatgtgcatcaataatacactgtacgtcacaatgtatttaatgctttgtcttacaagaatttatatttatggagtaaatattatttttaaattttatattttacaaaaattatagattagatttttttaaaaaaaaataacgaattaaattttatatattttataataatactacaatttttttaaaataaattaaataataattcgatctagaagtactataataaaacttgttacatttagtatatacatttatgatgttagaaattatcttctagttgattacttaaaaaaatattatcgaaaattaaatttaaaattctgtttatattattttaaaaaatataaaatttattttataattcaacaaataaaaatttcaataattaattttgacgaaaacacaaaattaacccgtatttatgcatatacaacaaaatgaaatgaatacgtggccaatatatttgtctattcacatacagcaaatggatttatgcatatactacaaaatgaaatgaatacgcggcaatatatacattattatagagtaatcttatgggttttctattattatgtcattttcctttttgtttctttatgttttgttttgttttttatatctgatatctctcaccctttttattatttttctttaaagattcttgttttctattccactccattttttatttaataaaaaaagagaatgattttttttttaaaaaaaaaaatcatttatttttcttacctatatatttttatttgtgtactttttgcaattttgattgttcttagttttttcttacatgtttatttataaactaggaaataaacggtataatttacatgcgatggcatattatttattgttaattaaattataaaaattaatcaaattttaaatttcaaaatttttgaataattttcttaataattgagtaattattttatttgtaaaaaaaaataaataaattaatattgtaaaaaaatttaattattatacaattttttatttaaaagataaagtaaattaagagagagatatcttcaaatgttatagtaaaaaaaaatttaaattgaagaatcctcaaataaaatagaaatctaaaaatataaatgttaaatctataaaaaaaaaaaaaaaaaaaaaaatcatacgatttcaaaattattaaatacacggtacaaggggcttttgtgaagaacagacttcttgctcacaacatcatgattttccaagatctcctgaagggttactcgaggaagaatatttcagcaagatgcattatgaagattgacttaagcaaggcttatgacacggttgactggcagtttgttgaagatctcctaaattccctatgctttcctactagattcattgattggattatgacttgtttaaagggaactagttataatctgcttattaatggaagaatccaggataacttcaaaggtgaaaaagggctgcgtcaaggagatcctatgtccccgctcatctttgttcttatcatggagtacttgacaagattgctagcccaaatctctgggaggaaagggtttggatttcacttcttatgcaaacatttgaagctaactaacctatgttttgcaaatgatcttattattttttgcaaggggaatcttaactcggtcagatgtgtaaatgaggcttttatgagtttctcccagagtacaggtgtctctgcaaacaagaccaaattccacatttattttggtggggttaaggatgggtatcaaagctcagatcctggaccttgtaaaaatagaagagggttccttccctctcaagtaccttggggttaagcttcgtccagccaaatggaagactagagactgtggagcaattctagacaagataaacaagaacttaaattgttgggcgagcagaaatctttcgtttgcagggcatgctcaattgattcacacggtcctcctcggtatcagaaactattggatgagtattttcacccttccaaacaaagttatagctgccattgatagaagatctagagaatttttatggggtaccactgggaaccgctctaagttgcacttagcttcgtgggagaaggtgtgtctccttaaaaagtatggaggaattggcttttgtgagggtaaaaagtggaataaagccttaatggccaagttcctttgggccattgcaagaaagcaagatagcctttcggtgaagtggataaattctatttacctaaaggaccaaaatgtgtggaagtacccaatcaaacaggatgtgagcttgtatttcaaaaagctaataaagctccgaactagtactaatgagatctccctttcgcttgctgaaaatggaggtaagttccatgctaaacttttttataacttacaagaggaagctcaggaaatgaattgtagtagagctgtttggaataagctcattgttcgaaagcacaggtttattttttggcaggcttgcaatgttcaactactcacccaagatcacttaagcaggtttctaagcctcccctcgaacctttgtccggtttgtgagattgacatagaaacacacacacaccttttctttgattgtgtgtatgcaaggaaaacgtttgctgagataggaagctggttgggagttatagaatggtcaaaggatgcggagcacattcagcaatggtgttccagggggccccttgatttcaagaaccgagtgatagactctgtttatgcagcatcgatctacatgctctggaaaaatagaaatggttgtatctttgatttagtttgtacttctcctcttaagttgagcatggagattaggaagatttctcattatagaatcttgagtatggcgtgtattacccctaaaaagcaagataaatacattatagaagttataaggggctggtagtttcggatgggggctgctgctgtgttagcaggggtttggctctttgagtctttgtttgtaatcttgtaatctgtttgtagttgtttagttgttttcagttttgaataaagcttttttgttcaaaaaaaaaaaaaaatacacggcacatgtgatattattatttttttatattctatttattttatataatttattttagtttttcaagaaggaaacttattacatgtatttttgcttaaccttaactaataaagtaagatatgctattcaaaataaataacaataataaaagtaagatgtgattaactgagagattttgacggagtagcagaagacgtccttctacaattaatgtatattacatatttttcgtaaggaataagctgccaatataaatatcttcttattaagcggtgagattcaaatgttttctttttctcttttattttatttttttaaaaaaaatatatgactccttctatagtttttgactttattattaattgaaataataaacgtgattgttgagaattatggagttccatctcaaaaccaattggctatgagtgga

SEQ ID NO: 79786 - DNA, 2418 bp, Cannabis sativa
cccttgcttacagttatactaaattaattgtaggtattggaaataaagattagtaaatttgttgtggcttacgacccacatcaaatttttggtgccattaccggggatgatgacaaaggcctcttctagatcctaataatggctttcagatatctttgacttcactaacatgtaatagatgtatacctctatgtttttacccaggacattcttgaatatcttgtttaccattcgctaatatatggctttgacattcttcataccgaatggcatgaccttgtagcattagatccctttgttagtttggaaactagtatgttcctggtcagccaaattcatatttattttgttgtagccagagtatgcatccataaaggttaacaacataaatcctaaagtggcatcaaccatttaattaatgtgaggaagtgggaaatagtctttgggacatgctttattcaaatctgtgaaatctatacacatcctccatgtcctgtaatgcttggggaccaacactgggtaggcaagccatacatggtacaaggcttcctgaaggaagtcaatgtttgtcaacttttccacttctgtctataccacctctgatcttgctaggtctaatggtctccgcttttgttgaattggttctacattgggattaacattcaatggtggaaacaatctgttctttaaccgctgggggcaagttctttcccacttggatgaccttggtcggatcttgattatcaatacagacttcctctatctcctacattagctctatgacacgttccacaccgatttgtgggtccagctcatcgtctaggactacccccagtgtgtcctgagaagatgttccagcatcagggttatttctttccctaagcataattatgatcctggttgaaatgttatagcaactctccgcgcttcttcggtctcccatgatagtccctatgctttcggtattgttggggaattttaagcatagatgccagattgatgttactactttgaaatctatcagtaatggtcttcccatgatggcgttataagctataggacaatcaaccaccacaatggtgctatatttgaaagaggagactgcattacttctagagtcttctccgattatagtcaatggcagttgtatctttcccatggggatcaacgtgtctccattgaaaccctgcaactgaatcagatagggtaacaagttggcctataccaaaccaatggcatgggaggctcctttaaagatgatgttcacagagctatcattatccactaagatttgggagcctcttttgttgggtatctgagcttcaataacaaatgagtcattatgtgcgaaatgcacatgtcgtgcatcatcttcagtgaaggtcataggcaagttcataaatcttgtgcgatgagcaagtgattgcactaaatgacaagcctcgccttgatttaatttgttcaggttgaacttttgtgcattttgggtgctctcagcaatatgttgtccacctgaaatagttgttacttgaccgtttagggttggtaatgcagctccagaaggatatagaattttgggactggggaccactgcgactgttgttgctggagcagattacgttcccagaaggacttgcatattgggagcttgtattccaagatgttacgggtggcccactccctaaggagggtttatggctccttactatttgggaacgaatagctacccatgtgcgaccgcttgtcccacgtaaatgacaagaattcttacccaattggtaaagtgctcattccttaccattctatttcatcttttaagtagtcgtactcattgcttgtgtgaccgatatcaccatggtattcacaccatttgtttgggtctcacctatgttttctgcccttaaacattggtggaggcttcctctaatgcaccatgttataggttgtatttacacattctctcaagtatcaatgagactcttatgtattctatgtatcttgattcttaagttttacctttcttcacgaactcactctgatttggtcgctttgaactcctcttacttctcgggtaggttacattggactcaagagcttttggcgttatgtttgtttgtctgggagcaacactatatttggtatgtgcagctccgtacccaaagaaactagcctacccagctagctgtaaagaagtaattggtccatacactgtaggattagtaagggtaggtggtggaggatatatggagggagttaccacttgtgaaggttgggcatttgttgcttcgacggactatgcaggaagtactccatacgattcggcatcctctaagtttatgaatccctgagctcgtactaagaattcacttaaagagtttgcttttttacactggagatctccccataatagagatccgg

SEQ ID NO: 79787 - DNA, 1646 bp, Cannabis sativa
agaacctatccttagtctcttccattattttaacattataaccagcctaaaaagtgaaaccttagtctatacgagctactccccatggcagagaaacattacccttaaataacatacataacttttgtctacctatttatcctaataactttcctcattcctccaccagtaagcataggggctactccaagctaataaccaacattttatctgtgaatcctaaggatccataccaatctaaaagatacaaaaccactaattaagagaccacaattaggattaatatcttcaacttgtagtgggttcccatgaagagtttctcaaaaacacaagaaagagatgaaacttaattaaaagcattcaccaagctcaacttctcaactaactgcatctttgaaatttttccctcctaatttttgtgacacttgttttaagaaatgtctccattgcttgaaattaacatcatttacttggatagagataataacattattaaaaaaaggaattgtagcaacacccttagccaatattccctaaatttctactttagctattaccccttgcattcctaaccaaaaaatcgtagatgtgattctagttccaaaacccttactgtacttagtttatcaatttaatacaatattggtgatgatcttatacagatagactaattggaattatcaatgtgggccatttagccttgtatatcattaagaaacgtacaataattttgtggtgaaagcttcttcttgaagccttcaaaacaatctctaataggattatcaacctgattcgaggacctaatgatatgaacatcaatattatttgaattatgaattttgggaacagtttctatccttacactcctgagctttgtgagtaattttactacaaagaaagtatagaaaaggaatctactccaatttaaaggtataatattgccctaattcttggataaaaatctacccttgccacccaaaaatctatctcatgctcactgcgttcaaaagattacgaaggacctttctatactactttagctaaaactaacgacgaactacaaattatccttttatgagtttattaacgtgatagttaacctcccactccctttcatctttaatgtgcaacctcgttgtaccaactagattatcaatggagcccatcataatcaaacctcataaccaataaaaaattataaaagaagaagaagaaatctcaaagaataagacatggaagacctcaatggccaaacattggctgagaaattctcttttttcaaagctttgttagagtttcatcgagagtaaacaatttatcaactaatatagttgctttatttttttaaaatgaatattttattaatcaatctaaaagagaaacacactgatcaatttaatcaccagtgttaaaaaagaaaaatcatcgtgtagattaagtttcgccatgtattgggccactttattaccctcttggggaacaaagtgacacaaataaataagataaaatttcgtaaaatattggatatccccaacaataatatcatccacaaaacaattagcagtactacaaaatgtgtaatttgcgtaggtcaatgcgtctccctaaaatggttgacagaagcaaaaaaataggcagatatttta

SEQ ID NO: 79788 - DNA, 2166 bp, Cannabis sativa
cacaaagtttcaactttgcgtcctcggtcaaagaaccaagccaacaagtgcatggcgttcaagcaaagagagaggcgccacccttcagcaagtccaccacgctcgaaaaaacagctgagcagagacgtatagctggcgacctctaattgctcttgtcgtgctcgtcctccgtcaacaaaccaatgaagtaatggtgctcgcccgttgcgatagtcaactgcggtatgtatttcgaagttcttcctgaggcatgtgtatcgatacgactccaggaaaagcaccaacccagcttttaggaattgaaactgagcagggcaaggcttggcatctccaaaaatcctccttatagtctgtctcagaacatgttcctcaaccccaaaaatagaagcacagtgcaaaggaggcacacttgttgcacaagcataaaagagaaatgtttgccctctgttatcaaatttccagctttgtaagtgatgcttctgcaagttatacaagttcttctgtatcctttcaaacaatctaacataatttgtccaagcagaaagagcttcagtaaccaattggttgacaaaatgtggccaacttatgtagattaagccacaactaatagtgacgagtgcaccttctttatatgacagttgtatcccaatttcagagtgcaaatttagtggcaactgggaattacctcttaactccacctggctatccttgtccaaagttggttctctcactcttttgttttctattctcaaattactatttatagaaattgggtgccacagtccattctctaacccaaatctatgtgctgtaatagtcaataaagtgagcattttgagagaataatgtgtaggtaaatataacccatagtatatggactcatcactcacccctgccagtgagatatcatgaatgtcaggccaagaatacatgcatatgaaatggatcacctggttaaacgccaaatcacgatcatctaaggtccaactcttgtgaagaagtctttccaaaaacccgtccaaataaaccaagtcaacccagaataaagatgaaggagagaaacaattacttgagacaagtgattgaaaggttgtgttaatcgcttgaactgcgagtaccacacagtcaactcttcaacctctatcaaaaatccaacgagcagttggtgtctttcccacttcgtcatacccaaaagctgaacgtgaaagctgtgttccggccaccacgccacccgcttgttgccgcctgcaactcgttagcagcgattgtatctccgatcccacaaaatgaaagtcgacatctctgattgtgagtaacccaatggttgctgtcttagccgcttgacaaagagaagctattggaaaagagaactccttctcatgacaaagaggtgaagaggaagatagagaagtgtgttgggccttacctgggtcccaaaagattgatccattactttgtaaagttagattaaaagtttttccaagatggacctcgttttgaagggtgggatctgcgtccaagttggctgacccattaattgaaatttttaagtcaattaatgtgctgaagtgggccagatctggggtgaaagctaataaattgggcttggacttgtagtgatgggacttaaatggagaaccaggattccatatttctagcccaggaacatgagaaatgaagtttatatattatatatttgtaaaagtgggccagtaaagcatttattaatgaattgggcttgggcttcaaataatagggtttcaatgtaaaatgtttaatacccttcccaggacttgtcttcttcgatggatgaagaccatacgcagcttcttcgttgcttgaagatgaaattttctccatcggtagcatcactagtggtagaacccactccgacgacgttagtgattcttccttcaccagcggcgtcgtcaacatctcttcctttctcggtgccgttccccgctgcacttccttctttggccttatgtcctcttcatcgtcagtgacaaacgaagggacatccccttctgacttgaaaaacgtggttgattcatctacggtcttcaaaacctcagcctaaaatccagattggttgactccaccattgctgaaatttcttgccattttcatttgttcttccaccatgagcgctttagcaatgacctc

SEQ ID NO: 79789 - DNA, 2783 bp, Cannabis sativa
ttacaatacaatacgacctaatatgacattatttcaaacgagcccttgaagtgttattaaaatattctttcttgtaatatgatgatggtggtattgcccaactcattcgtgtctaatagcaaagctttatcttttataggaagaaactcaatataatttattataaatatttttatgaaattattgagcaggagtaataaaaatacttttggagaaattcagttatctgaccaaacaaccggatgatgctggttgcgttcccctacactacgttatgcttttgcctcccccattctgccacactatggcattggagattttgaaaatgttgctagaaaaggatgaaagtagcgccttcttaaaaaataaaagaggcatgacaccgcttcacattgcgcctttcaacaattttattggcgacaaaataatgaatgaaattttgttaagatgtccagatagttacgaagaggttgacaatgaaggcaaaaatgtgctacaccacgcggtgataggtggacatttcgataatgtacaattcatcttaaaacattgccattaccttttgaatagaaaagataatgatggaaacacacctttgcttcatatgggtgcaacattattatcaccatcatgggatgtatgcattgtagaagctttgttgtctcacccaagagttaataagatgtcactcaacaaagacaacaaaaatatttttgatgttcatcttcatgattacaacttaaccgaggtaccttaaaatttatcatgagtgctttattctcataatcatcttcttgtaagtaagctaactttgaaacatgtcatgtgattatattactatatatatgacaggaaagaatatttatgttcttcgataaatactccataaagccttatataggaaaacggatcctagatgtcgaactcaatttcaagaattttaaaaaagagatgaaagaaatagtatgggagcgcattgaaaagcttaaagaatcaagtctagttacttctacgttgatcacaacagtgactttcgcagcaggatttacgatgccaggcggttacataagcggtgaggaggcaaatcaacaacaaggcactgctattcttaggaataacacagcatttcaagccttcgtggtaacagacacaatagccatggtgctctctgcttcatctgtttttatcaacatcttatttaatacattattttggaggaaaggatcttttgatgatgtgaagtcgaggtactttggaatatgtatgaagttaacaatggcggccatggcatttatgatgatagcatttgtcactggtacatatgcggtgttgtcactctcctttccccttgccataaccacttgtttgattggattgtctttcttcctaattatcattttcacaacgagaaaattgatacatctgtaaaataatctccatcacttcttcctctatgttaagaataaattttaccgcacattaacttcttccacttgtaattttttgcaatatatataaagatggtattttatctttttgcatctgttaacaagttggttgttgaagacagttaaaaccgttacatggttgttagctgttagttgtgtttgtttacacgtgtccttgtattgtgagttagttaggaaagtctgttatagacttcttctaatgctagactataaatgttgtaacacttgttgataatcaatgagaatcttttgctaagtctttccttctctttcttctccttcctcttatctttctttctctattttgttctgttcttggtgttcttcaatggctagaaacttcaatatggtatcagagcagttccctcctttaggcgtgaatggtgaccaatgatctggattctactgctgaagccaatcttgcttttcgaagattcaagcaatttggccctggcaattcccaactcagtaatacttctgctcagtttaataggattcccaatccgaatatcaggttcaataatttttctcccaatcccagtcagaattcaataggaagaggtaactttaatttcaatcctatcagaagtaataagtttggctttaattttcctaactggcctcagtgccaactttgtttgagatttggtcatgttgtacaagactgtccctttcgattcgacaagtctttctcaggaccacctttagctaatggcagcagcagctctccatccccacctcagtctcaatctcagattcaagctcaagcaaatcttgcaaccaacagcacctacaatgatacaagttggtatccagattcaggtgctacgaatcattgcaccaatcaagctcaaaatcttggaaatagtgttgaatatggtggttcagatgagctatacatgagagatggatcaggtttgtacattaaacatgttggtcaatctcatattgtttcaaaaaattcttctataccccttgttcttaacaatttattgcatgttcctgaaatcactaaaaaccttatcagtgtgtctaaatttgctcgtgacaatggtgtcttttttgaatttcatggtgatatgtgttgtgttaaggacaattcgactcatactatcttgatgatggggaagcaaaagaatggcctctatttgtttgactctacccatgccaagattgtccctcccattcctaagcaacctgccaaagaatcccacactagtaccattaagtcctcttccagactccttagaagtcaaaactacctgcatggtcaccctcaataatgccaaggtggctgtgtctaaatgcattcaa

SEQ ID NO: 79790 - DNA, 1625 bp, Cannabis sativa
attaaattctggtctgaatgcattatgaccgcaacttttcttataaaccgaacccccactcctttgctcaaaaacaaaactccttatgagctattatttgacacacctccagattactccaatctgagaaactttggctgtcttgtgtttgcctctactcttatggctcatcgcactaaatttgaacctagagccaagccttgtgtcttcctaggctaccctcaaggtgttaaagggtataaactttatgacatcaacaataaacaaatcttcatatctagaaatgttatatttcatgaaaacatatatccatttcacaacttaaatacaaataaggattacattgatcctttctctcatgtggtttttccttctactaatatttctaatacacctgtaagtgatttccctacagatgcatctacacagcagcccacattacaggtcactcctactgccccaattgaccaggaacaaccaacaagaatacaaactccagtgtctaacacaccagataacacaccagatactgatgtcacggcaccagcagccactaatgttccaccagtagccactaatgttcctcttcgaaggacatcaagacagatcaaaaccccagcttacttaagagactacgaatgcaattccatattgcaagaccaatcctccacacctcatccacttggtaaatttctttcttatgataaactttcagattctcataaaaattttattcttgctgtcacagctttatttgaacctcgcaattacaaacaagcaagccaatacaaggtgtggaatcaagccatgaatagtgaactatatgcccttttaaagaacaagacttggacctatgtaaagctccctccaaacaaaaaggctataggatgtcgctgggtttataaaataaagtataacagcgatggttccgttgaaagatgcaaagcaaggctggtcgctcaaggtttctcccaacaagaaggattagatttcttcgacactttctctcccgtagcaaaaatggtaacattcaagcttctccttgctgtctctgcaataaaacaatggcctacacttcagctcgacatcaacaacgcgttccttaatggagaccttaatgaggaagtttatatggtcattccaccaggcctatctctcccaagcacacatgccaacgactctgccctcgtctgcaagttacaaaaatccatttgtggattaaaacaatcctctcgacaatggtgcaaaaagctttcggatgctctcatcatggaaggctttaaacaatctcaagccgattacacattgtttactaaaggaacaggcagcagtttcattgctctattagtctatgtcgacgatatcatcatcaccggccccaacattcaccttctacactcattgcaaacttctttacataatcaatttcagttaaaggctcttggaccattgaaatattttctaggctttgaaattgctcgctcctctgaaggtgtttttctttctcaaagaaaatacacactccaattgttgacagatactggttttacaggctgcaaacctgctaaaacccccatggaccccaggactaaactagatgatactcaaggtactcctctcgaaga

SEQ ID NO: 79791 - DNA, 2796 bp, Cannabis sativa
  modified_base (26)..(29): a, c, t, g, unknown or other
tcctttccattccattccatttcatnnnntccaaccaaacgccaccttaatctcaaatcctctcaattttaggccaccagctgaaacccttctaccaaacatgacactatcttccaagcttcaaagccatctttagggccactactacccataatctgaaattccgactttgtttgaattaaggttcatattacacaaggataataatttgggaaggcagtgataatgtcatgggtcatagtggatgaaccagtttcatatgagatcactcaattaatttattattactatagagtgaagcataatagtatttcatccccttcaatttcaaaatgcactggcctttttacggtatcatcatctaaaatcacaaatttaatgaagattttattattattaatttatggcatggggaaaacaatgccacgttgagagctttaagtttcatatgattctttatagctaacaagttgcaagaacaagatagtttcgaacttattatgggtttcttctaatgtagaacctgattccctttgcggcttgggccttttaggggattgtttaagtggtatgtgggttaccaaaagaaactaagaaagtctgatagatagtcacacgtccaaccccatcaacccaaaagttaccaaacacaaataaattatcaaattctctctttacatgaaggtctttctttcaaaccaactcttctccaagaatcagctaagcttccccatttatattccaacaattgtaaatgaaaaatcacactgagtttccttcagctttaaagaaaagcaatagtttttaattatacagagaaaacctccaaaacatgtcaagagttgaaggcaatggagctactaagcaatatccagaacggactaggcgcattcccacaccagggaaagcaactatcattgcaatgggcaaggccttccctagccaacttattcctcaggaatgcttagtggaaggctacattcgggacactaaatgccaagatatctccattaaggaaaaactcgagcgtctgtgtaagttttgtaatttttttttattattattatttgaagtagtaagaagctagcaagtagtgactcatacatagagactaaaccttcatatttttgttctcttttgctaggcaaaactacaactgttaagacaaggtacacagtgatgtccaaggacatcctagaaaagtaccctgaattagcaactgagggctctccaacaatagcacaaaggcttgagattgccaacccagcagtggtggagatggccatggaagccagcctcgcctgcatcaaggaatggggaagaccagcacaagatatcacccacattgtctatgtctcctcaagcgagataagattacccggtggtgacctctaccttgccagccagctcggcttaaagaatgatgttggccgcgttatgctctactttcttggctgctacggtggtgtcactggtcttcgagttgccaaggacatagccgaaaacaaccctggaagccgagttttgttaaccacttctgaaacaacaatacttggtttccggcccccaaatcaggcgcgcccttatgatctcgttggagctgcactctttggtgatggagctgcggctgttatagttggaactgacccgctaaaaggtattgaatgtcctttcatggaactcaattatgctgtccaacagttcttgcctgagactcataatgtcataaatggtaagctctctgaagaaggtataaactttaagctcgggagagatcttcctcagaagatagaagaaaacattgaggaattttgtaagaagctcatggccaaggctcagctgaaggactacaatgaacttttctgggctgttcatcctggtgggccagccattcttaataagctagagactactttgaaactgagcagtgataagcttcaatgcagtagaagggccttgatggattatggaaatgtgagcagcaatactatattttatgtcatagagaatatgagggagcttttgaagagaggaggagaagagtgggggcttggcttggcatttggacccggcattacctttgaaggagttctcattcgaagcctttaatccattaaattaatatattataatatatctatatgaatttaattaaagctagagggaaagtggggctgcatctcacggattggtcgtttaaaagaaatggggttcaaggattttccttctaagaatcaagtttcttggtctgttttttttttcttttttcttttactgtgaataaagtgatgcaagaaaacgtggatcagagaaaaacaaaattaattgttttgttgcaattttattttaacatcttctggcttctttcaccttcttggtcattactagtgcgcgtaagcaaattaaaattataatggtaactagctcacaccttattttgtgagcgtctttgcttctaatttgtaaaattgctattttatatatttttacgtactcaagtcaagtttatgaaaaggatttgtcaagttgtaattcacaaatcctattatgattaatcaactttcaacttgtgacgttttatcaaactaaatttagggtggctaaatagtatttaagattttaagactctgtgttttgttaaacttactaattagactctctattttgttaagtaacaattaaaatgttgtatttttcaaaataatacaaaataaatcttgagtttaattttcgtcaaattaaaatttaataataatctaactttacggtattatgacaaaaatggttatatatata

SEQ ID NO: 79792 - DNA, 1047 bp, Cannabis sativa
actaaatgttataaggtgctaagcatgatttctcaattgtaccaataaagggtgctaagcatgatttctaatatattatgcatacatccttcttccttgaatgttgaaccctaagaatgttttatttgttattcaaattaaatattggccgcaaaaactgaccacctgacctaagtttcaagcaagatatttttagagatctgccaataattttctttccttttagatttaactgtatgattgggtccctttcaccaatcgataaacaacacatagccacacaatttactgacagacagaccaatatgaggaaaagaaaaacctttgtgattcattgtactataacacttcaatcatgcaaaagatattaactaaacatatcaacttaaggaaagatgtgtaaatttgatttgggttttgtttgtgtgtgtaacaggcaagatcatatgcgaaggcattcaatgcaacgctgttcttttcaagtgcaacgtacaacatcaatgtaaacaagatcttcaaatttatcacagccaagatctttgacttgccatggactgtggagcgcaatctcactattggagaaccaatcattgatttctagtagtgtcttgtttttccctttctttgttttaacttgtacagtaaagtttttccaagtccatgggaagttgtaaggcttactacaagttagctttccttggatgttttggagaaaggcagaggcagagagagagagcccacatctccattccggaataacatttcgtccctcaacactagcaaaaagaaaaagcttaaagaataaaagtaaagagaaaagatcgagctttatttacactagttatacaggacaaaaaaaaagtgaagaaaaaagccatatacattagcaattgaatgttggagaaccatatcatttatcttactttaattaaacgtattagtatattcttttttttcttatcatactcccttttcccaattcagattagttacttaaaccataatcaattgggacatctgtcgaataagtgatcatgcgtaaggttg

SEQ ID NO: 79793 - DNA, 2157 bp, Cannabis sativa
aaaactattttcagtaccagtttctttattccgcatttaattaatcacttaattaaataattaaactgggaacattaaaatacggaatttcattaagaaagaagataatacaactaagcaaaataaaagagacatatggaaaatccataatagtttccttctcattatatcctgatcaaattaccttatcaatattgtggagccattattttattgtaccctatcaatatttttcctttcacattttgcaaaagctaccaagaaataattactccaaataaatttcgaaagataataataacagaacataaaaaaaattaaaacttatgaggaaaaaaaagttctaccaactgttgagagacgtcatgcttctgaagttgccaattccacaaactcgtcagtacgcttgttaacaaatggttcaaggtgacttttaaaagttgttagaagattttcatctctttccttctacaatgcctgcaaatcgatgagaatgaaattttagtagttatgattatagaaaatccaacacaatatacatattatacatgaaatagctaatatcatagattcaatttctctaatcattcttaacatcaatgttgttactttctaaggctccttctcggccttcttacctttgttcttatccgacttcttcttcttcttcttaaaaccacagagcgcaacaaaaaagttggagctctatatcactgggtactcattgcgcctagcactcctacctcccaccatttccaatccaaacaccgaacaactccaaggtcaaagtcccaaaacataaacaacaggcctccaaccaaaatgagctactgagtgtgtctatgtgagaaagagagagagattgagagagaaaaaattttcaaaaaaattaggatttcaatgagaaaatggagtcaccaattttaacaataaaataaatatcgggttgataaggatctgaaaccagaggagcgatacaaaccccaagacaaatcgttacgaaaaagaaaacagaaacaacaaacccaaaacctagtgtttatcgattgtacctgtcatattaaaccaaaagcctgagtaaattcttcaaacctaaattggtggcagggagtattgatgaaatagaggaagagaaagaagaatcgcaacagacgaattgttgtcacagaagaaaataatcgcagtgttctatttctatattagtaaataaaaaaatacacaaaataatacttacaatttagaaaacaaataacatcttctaatgggtaacttttggtcacctataatagattagaaggagaaagaaacacaaatggtgaaaaatatccaaaaaagaatgtggaagtgcattttaatttgtaataaaattttatataaattaaaaaactaaagagtactatattcattacccaaatcttcttcaacataaaagcaattatcgtagaatttgtgattagggttttcaattattttttttttgacgtagggttttcagaattagaaaagtgtgtgagagatgagcgattgatgatgggaatgtttagcgattaatttaaataagatataagttaacagttctgttaaatcttcgttaaaattaatagtaaaaaatattaaaacatcgttcaaccaacaaaatctattagattgtcactttttatatataaagatatttcttgcaacaccaaccaccattgccgtgacataccaccaccactaccattacacaacaccacccaccatcaccacaatatccacaatttattaaaaaccatctcaatgtcagattcaaacataaaaaaaattaaaattaaagctgaaatcttaaatctcatattcaaagcaagaaaaaaaatttcagaatctcaaatctcaaacaattaataaatgaaaaaacaaatagaagcggaagaaatagtcatttgtgccgacgaacagataagcccaaacgtttctcagtgccgatgaacctctgtccaaacaagcccagacgtttctcggtgccagagagcaaacagagaccacgatttgggcggcaaaatccccaatacttttgttttggtttcactaaatccctaaaacctaaatttgtgcgggtaaacccccaaaaccaggaaactgttagcaatttaacacttccgtccaaatttagctgtt

SEQ ID NO: 79794 - DNA, 2533 bp, Cannabis sativa
aagtaaattgatagttgggggggttttgctgccaattactcttttttgaaccaacaaaaattttattcacaattgaagcaagtacaacctaaagccaacaaaagttgctcgaactcttaaaaaatcaccaactttctataaccgatagtacataattaacattttttttttactcttttacaaactaatcctaccactctatacttgacctccttttgaatctccttactaacactactgattgtcaaacacttagattcaaaaacacaaaggttcttgtttcgccaaacaaaatagatcattgctgctataacaaaattctgcagctgatttctcaagttaaaaacagctttcgggcaaccattttgaagctccttaatgtccctcgaccacttgataatcccataccaacagctaatagcagcagctattcttttagtgtacatacagtccacaaataagtgggcatgggtctcaacttccttctcacaaactgggcataagtcagtagcaataggcaaaaaatttctcaagttatctctggttagaagtcaattattgcacacctgccaatagatgaatctatgtttgggcataatcaatttatgccaaataattcctgcataatcaacttcttgagcatccagtaagtttttgtaaaaaaaagttaggctagaatctacctttttttacagcaagctttagattttgatcgtttgttctccctcgaaacctcaacaacatacttgttgttactgctcaaaaaaatgagatttttaataaatatggaaaaaaatttaagtttatttttatatagcataaaaaaataatataaaaatatatgagattaaaaaataaacaaatttaaaatatgggaaacaaaacaaaaaaaaacataaataaagttaatagaatttttaataacaaatatcgctagggcagacattgtcattaaaaaagtcactgtcaccagaaagtcactagaacagtcaccattgctgggaattcgccagaagagtcatcgatgccaagaaagtaatcaaaaaattcatcgaagttgtcattgtcgtcaaaaaagttgaatttttattgtcattggaattagtgtcttaaacataaattaaaaaagcattggttccataacaaaatgagtaaaatccaataacacaataactcaaaaatcaattataattaaaaaaaataaaaagaaattagttccaaaaatactataacataagtaaaaataaaacaagttccacaacaaaatgagtacaaacgaataacacataatacctcaaaaataagttatagttgaaaaaagaagttcagaatcagttctaaaaatactgagacataaatctaaatagaaccagtttcatagcaaaataagtaataacaaataacgcatagtaactcaaaatataagataaagaaactagttacatttatcaactagttaaaaatctgagacaaagaagctgattccgtaaagcaactgaaataaaatctaaaataatgtaaaaagaaaagttgggagcggttaaaattaataaaaatcactattttggtaccttttttcggtgcataattgcgccgacaaaggtgaaatcgtgcccctaaaaatgagcaaaaaaattttgatgacctatttgcacagacaaaagttttcccacctatcactttaaccacgcgggaaatttctctctattgtttggtaacttttgtcaacgcatatatgcaccagtaaaagtgaaatttcacccttaaagacaggtaaaaaaaatttgataaccttttgctagtacatatatgcgctgatgtcggcaaaagtttttctccaacactattgacacaccataaaaattcctccccttttttagacttttattagtgtatgattgcaccggcaaaagtctatgaaccaatggaaatggttcgcgacatgaggcggtttattttcaaacttttattggcgcaacaatgtacgagtaaaatttttggctgaatgtttttgctcttcatttagctcctttatttttaccgacacatttggccaatacgctgataaaaatcgcatttcttgtaatagcattaaagtgaactttggggaaatttttgccacaatttccaaaaaaaaaccatctagaagtccgaggacgtttagtagtgtaccctacttttgaaccagcagctttcgcgccagatagtataaatgtaaaaattctcatacaaaatctgacaagattataaaatttggtgtaaaggcaaagattgtaaattttgttgaatgatctgtcgttgtttaattggtacccaaaatttgaacttactatatatatcacatcagttcgactccactgggcttggacttgcttccatataggtgatgatgcgtaggactagtctgagaattacttggaatttgttcaacgcaggattcaatagaggtaatgcgtcttcttcgtcgtcttcttcaagtttttcagttattgtagcacaaactcattcccagactgtaaccaatgaggtggaa

SEQ ID NO: 79795 - DNA, 1449 bp, Cannabis sativa
  modified_base (34)..(50): a, c, t, g, unknown or other
  modified_base (1414)..(1420): a, c, t, g, unknown or other
cccccccccccccccccccctctctctctctctnnnnnnnnnnnnnnnnntctctctctctctctctcttcaatgcaacgatctcagctcgtggtcaactgaatttgaagttcattgtagatctcagctcatggttcatttgaagctctccatgaatctaattttgttttaggcttttttttattgtttagaatattgggtacctaaaaaagctttgggttaaatttaggtccataccttttattatgtgattgattttaatagtgattgttgaattataataagttatgtatatatcatttaagttattaaagttttgagattttttttttctaatgtttaaatcaatgtgtctagtgatgtgtatttttggatgagtgattccgataaaagaaaatttgaatattattttggtttattatttattatttttaatcattaaaaaaataaaagaaatgtgtaatttgtttttattaaaattatatacaaaatatttgcatagattatataaaacatgaaattaaataaataaaattatttttgtgtttagaaaatgaataataaattaataacaataataataataataatagatactgtaatgtgcaggtagctgttatctttagtcttacagggtgcgactctaaaaggctatacaatgacgcacattagtttatagtcacccatgagtaaaccatcacttaatatcttaagtttcttttaaaccgggtcagcgaaacttaattttgtaatagtaaatgtatacgcgattcaaaaattatataagtaatcactcacttcaataagctttgaggagagattataaataaaatttactttccatttcattctttagcttaaaaagatactctttctcttctagttactatcaactccacaaaagatcgatgaaagcccttagtgttctttttttcgcaaaatgatttaatgtcgcataaagttttggtgttcaaaagattcatacacgaaatctggtacctctccataaatcacatatggatttcatgatttaatatttaaattttattcttttgaattatgtactaagataattgttaaaaaatattattggtgtcgagtatccttcttggtgtcataccgctaattgtgtagttaagtattaactcttatataatttaagaaaatatttttaactaactaactagttgtagggcgctactcataaaaaatattgagtactactggtacccaataacaatactgattttacaatatttaatcataaactattcattagatctcattaatgtaacttttttttaatttccaagaacgttgttagttaatgtattggaggaaactccttagttttcaatgattttttttttcttactgaaatggttttactttatagagaaatgctaaagggcannnnnnntgcctagcaccttcctatgtgtcaatatc

SEQ ID NO: 79796 - DNA, 2999 bp, Cannabis sativa
gttgaaactcaatttgaaagaaaaattaaaagacttaggacagattggggaggtgaatatcaagctcttcaagaaactgttacagcccatgggatagattttcatcatccctgtcctcacacctctgctcaaaatggcagagctgagagaaaacataggcacatcgttgaaatgggcctcactcttttggctcaagctcacatgcctctaaaatattggtgggaggcttttcaaacatcggtctatctcataaatagactaccaactccaattcttaacaacaagtccccttttgagtgtcttcattctagaaaaccagattatgtttttctcaaagtatttggagttgcatgttttccatgtattcggccctatcaaactcataaatttcagtttcactccctcaaatgtgtcaatttgggttatagtgaaacacacaaaggctataagtgcttaactcccactggcaaagtctatatctctagaaatgttgtatttaatgaacttgaatttccattcaaatcaggttttcttaacaactatgctgctgaaaaatcagtgataattcaaagcaactcttggtctatatttccttctttctctctgcctacaggtcacacttcagcaacctttcatccatcctctagcatacctggaagagaaccttcaacaccaacacactctcaggtaaacagtcccaattctccattttttattcactcacctggtgcttcctcggtatcctcagctccaggcagtgagaggggaataaatgtcaatcataatgccacttctagtgcacctactgctgcaatttttcccattttgcccgatactgttgctgcaccatcagcagaccagtatcaacatcctgcacctgaacccgtggttgctcaagggcatccaatggtgacccgtgccaaagcaggcatcttcaagcccaaagccttcatgggacaatctctatggcagcctaacacttcaattcccaacagtgttgaagaagccctttcccatcctggttggaataaggctatggatgaggaaaatactgctcttaaaaacaacaacacatggatcttagtacctcctgcatctgatcaaaatcttattggcaacaaatgggtttttagagaaaaattcaattcggatggatcccttcaaaggctcaaagctcgcttggtggccaaaggttttcaccaaagacctggcattgattttgctgaaacattcagccccgttattaaagcatctactgttagaattatactaaccattgccgtcaatcgtggttgggaaattcgacagctagatattaacaatgcattcttgaatggcactctagaagaagatgtttacatgctacaacctcaaggttttgaagaaaagggcaaggaacactatgtgtgcaaattgaacaagtccttgtatggactcaagcaggccccaagagcgtggtttgacaaattaaaggcaacgttgcacagctggaactttgttaattctaaagccgatacttctctatttttctacaaacatggtactgacattatatttgttcttatatatgtcgatgacatagttgttactggcaacaacagcagaaaaatgagaagcttcattgctgaactgaataagaaattcactttgaaggaccttggtcctcttcactacttcttgggaatagaagtgttcagagatgaaaccggcctctatttaactcaaacaaagtacatagaggatctactaaagagagcaaacttcacaaacttgaagccttgtccaactcctgctgctgcaggaaaaccaatgtcactaaccgatggtgagctattatctaatccaacaacctacagaagcttagttggtggcctgcagtatctatgccatacaagaccagatatttcgtatgcggtcaacaagctcagtcaattcctaaaggctcctacttctacacattggagtggcatcaaaagagtcttgagatacttaaaaggaacaatgaacaagggtcttcatatcagctgtgatgaaccactcaacatcactggtttttctgatgccgattgggcttgctgcccagatgacagaagatcggttgcaggctattgtgtttacttcggcaacactttggtatcatggtcctctaaaaagcaagctgttgtagcaaggtcaagtacggagtcagaatatagagccttagctcacgttgctgctgagatttcttggatagaatcactgctcaaggagttcaatttcatcacacctactgcaataacttggtgcgacaatatgggagctagtgccttagcctcgaatcctgttttccatgctagaactaaacacattgaagttgatgttcacttcattcgtgataaagtcttaaacaaacagcttgagataaggtacatcccatcttctgatcaagtagccgattgccttaccaaaggcctgtcaagttccagattccaatttcttattaacaaacttggagtaacagagtcacccctgcgtttgagaggggatgtgaagaaatgaggaattctgtcattgtcaaattctgttattcaagtggtcctgctcataccaggtgtcaccatcctgtagcattttgcacaatgctgaattcaaggaattataccgttgaattgtaatgattaggaaatcatttattttaggaatattcccttttctgttttgatttggtttgacagctgtacagagcaaaatctgctcttatctttgtatttggccgatggcctgaaactctatataaggcaatgaaatacctcagcattaattgagctgagtaattaccaaatcaattttatcttgaatttcaacttggtatcagagcatttattgtgttctcacaatgtcagtcgatccccaaaaccctggaaacactaaccctgctcaaccatcagccacagctgctgcatcgaatatttctggtgcaagcccaagcaatactcagctccacaactctgtctctcacc

SEQ ID NO: 79797 - DNA, 3216 bp, Cannabis sativa
agagagagagagagagaggcgggaaggtcaaatgagggagacaattttggaaccaaaagaaaaaaaaagcctacatttcatagagtgtcttgttagaattattactgtagactaatataatcacacgtctaatactataaacacaattattaactatatgcccaatatttgtcaacaattataatgggatggttaataattatttattatgttagaggcacataagaacacccttaaaactataattaattggcttattaaattatagtataccattgttgaaccacttaagcctaattagtgtataaccctttaaggttataagggtatgacatatatatatatgggtagaatgagattttaggaaaaaataatatattctaccaatgttttttttttgaatagtttagatttacaaaaaaaattaggagattttttatttttacacttcaaattttttttttttatatttttatgaaataatacatagaaactcctattgcaactagcgttgcaacttaaattgcaacaaaaaattgtatagaaaaccttattataactagcgctgtaagcactttagaaactcaaaccgtaaaattaaaaaaataatatataaggtaattcaaaaaaaatttagtctattaaatgcataattaatcaaatttttcttatttaataattataatttccaagattaaagaaccaaatgacataacatagattcgaacgaaggcaccgtggttggcccacaatatcattcatcttcaatgctggcattgacaatgctcaccggagccgaatttcgccaaccaccatgaaggccaccgccaggtccaactcagtcgtagtgcatagatatagatgaagaatccaattgggacatttcatggtttttccctgcaatgcgctctttctcttccccggcgactttcgatcaaacgacaacgcttcgtacaaatctgaagaaacggtatcccgggaccaagcttccctgtgtggtccaaaacctcatcaatgaattctctcggggaaatatttctcaattaatctcttctcttgatctattagtttacaaagggattcgcttaccttccaaaactcttgctcttcttctccaacaatgcggaaacagtaggtcgcttagagaaggaaaatgggttcaccttcatttgaaggttactgggctgaggcgcccaggaacgcttttggaaaatcatttgattaatatgtatttcaaatgcggtagtgatgttgatgctcgcaaggtgtttgataaaatggctgtgaggaatttgtactcgtggaacaatatgctttctgggtatgtgaagatgaagaagttgaaggttgcccgtaggatgtttgatcaaatgcccgagaaggactttgtctcatggaatacaatggtgattgcatatgctcagaatgaattgtttcatgaggctttagatctttacagagagttgcggagatcatcaattggctataacgaattcagttttgcaggtgttttaactgtgtgtgttaagttaaaggaattagaacttactaggcagattcatggacagattttggtagcggggtttttaacaaatgtggtgctttcgagttcagttgttgatgcgtatacaaagtgtggtgagatgggagatgcaagaagatattttgatgaaatgccgataagggatgtccttgtttggaccactttggtttctggatatgccaaatggggacatatgaaatgtgctagtgaattgtttcatctgatgcctgagaagaatcctgtctcttggaccgcattgattgctggctatgctagaaatggtatggggtatgaagcactaacgttgttcacaaaaatgataatgtttgggtttacacctgatcagtttaccttcagtagctgtctttgcgcttgcgctggcatagctgcacttaagcaaggaaagcaaatacatggctacttgatacgtacgaatttcagacccaacacaatagttgttagctctctcattgacatgtacacaaaatgcgggagtttggtaactgcacacatggtttttaacctcatgggaaataagcaagaggtcatattatggaacacaatgatctctgccttagcacaacacggtcatggtaaagaggcaatacagatgtttgaagacttaatcagatcaggattgaagctagacaggatcacatttgttgtggttctcaatgcttgtagtcattcaggtctagtgcaggaaggacttagaattttcaattccatgacagcagatcatggcattattcccgatcaagaacattatgcttgcttaatcgatatcttgggtcgtgctggacgttttgaagaattgatgaaccagattgacaagatgccatgtgagccaggttatcaagtttggaattctttacttggtgtatgtagacttcacagaaacttggagctggggaggaaagctgccgaactccttatcgaattaaacccagaactccctgatgcgtatgtgtttctttccagcatatatgccatacatgggagatgggaactggtagagaaagtgaggcagcttatgaacaaaagacatgtgagaaaagaacgagctgttagttggatagaaattgataataaagtccatgcatttactgtatcagataggttgcatccaatggcaaaagccatatactcagttttgagagagttagctagccattctttaaaccttaacaccaagaggtaaatgtttgaggaatgcatctttttgtgaattgatatgcttgaggaataataattgttgatagctggagtcaatgtttttaacatgtaacattatttttagtcttcttctatttatcttcagatttcattgattttgaatcttcacaatcttgtatacttgtgtgattctgtccaaagttctaaataagagaccaaatataacctgtcatgatttgtctcttttgggacgtttggtaagagatttatacttgagaataagaatgtaaaacttaaattaaattttaatgaccaaaaggttattgttttcaagtgagtttattttttaccttaaaatagttgtaatgttaatctcttccaacacttgagtttcatataaacctacttgagtttcatataaccttcaagtctattattttcaactcaaacttacataataaatactctattaaataactttttattcataaatacat

SEQ ID NO: 79798 - DNA, 1536 bp, Cannabis sativa
aaaaaaaaaaccatatttttgcacaaaaatataaaaaccataaattttataatttcatcttattaataaaatatgtggtatttttaaaattattgaaaaaatatgtgtatttttgaaagatggttttcttaagtctatgaactggtgaaccctaaacgcagacttaacccgtcttagctccatatataaaaaagagtaatttacgggatacatatctaagtttaactcatagttgtaaataaatacccaagtttaatttttagcagtaataatacttaagttatatttttagaactttcgtaagtacatgcctgttaagtatctacatgtcattttcttattagtatatataaattaatttttaaataaaaataaaaatttaataacctgaaccaaatagagattgtcacgtggttgttgacgtaacacttaacaaccaaatatctacataaatttaaaaaatataatttttatagaatattattaccgtaaaaaattaaatttaaaactacacaatactctatagaaaatccgacaataaattgacttataacaatatatccattagctatatctctctatgaaaaatataaatattgtgaatagaatttcttaaagtaaaagacaaaattatgaggtccactataatggagtatggaccaatggacctgattctatatgggcccatcttcatatacagatctttgtattattggtacctaattggtaggtagctaatatttaaagatgcttatttaattttgagaaaatgagatctaaagattaaaacattccattttcaagtacaaataaacactccttttcaaaaaaaaaataaaaaagagtacaaataaacactcataaatacctttcatttggatttgaactcaaatatgcataacttatattttaagtacacattttattgtttataataataataagataattattatggatatatgcaaattgttttgtaatagaaatatttacgataatttttatactttgggaaagaaatttataataaaaaaaaattaaagaacaaaactctataagagctcgtttgatacgctgtattgtattgtgttggattgtgttgtattgtatggattgtattagtattacttaatacaatacaatgtttggtattgacttgtattaattgatcgtgtaaagttataatatattttcaatacacttgaccccaacaccaactacgtcaggccccgagtcctaggtccggattcgggctctgggttcgggtctgggttcgggttggggtcccgagtttgagtccgggttccggttcgagtcggggttcgggtcccaggtcggggtttgagttcgggtatgggttcgggccccgggtttggatccaggtccaagtctgggtcctgagtctgggttcgggtcccgtgtctcgagctctaagtctgggtcccgggtccaggtttgggtcggagattggtgttgacccggaatcctttgtaaatattataatacaagctaatacggaccatttgttatgtatta

SEQ ID NO: 79799 - DNA, 3836 bp, Cannabis sativa
gcattatagaatttttctaaactttcagtttatagttaattgatgtaaaattaagtatggcaacctttaaaaagaaaagggggtggtaattttatttgcacttaaaaacttataaatagatttttttgcaataattttaattttacataaaatacatatctttattctttaattacattattttttatattttttttcaaatttatattcttaaaaaatatccttagcaaaaaaaattaaaatataaaattctattagaaaaaaaaaatatacatgatttaaagaaaaaaaaaattaagataagtattaaaactaacaaagaataatgtgagaaaaaaagtaaaaaagaaagtatagggtttacaataatgtgagaaaaaaaaattaatttcagagtgtacttatcatctgggcaaacaaaactctcccaaaaaagtatgactaaaattacaataataacctcattcttgttatttattgttaagaaatggagaagtgcccaacaataaaaaaagaaaagaaaattggaacccttaaatctcatttctttgaagatatttaatcatcatcatcatcttcattcatgtaagcatctataaataacttgtctacttacttttacttctttctatatatatatatatattatatactcaactacttactatagtattatcttaaatttggttgtttacgttacacagttcacaatccatgcatcatcatcatcaacatcatcaataatggtgggtggtgatgacagaatttcgaatcttcccgattcaataatcaatgacatcctatcgtttctcccaactaaagatgtagttcgaacatgcgttctttccaagcgttggaaactcatctggtattcagttcccacaatctttttctccaataagaatattgttttcggaattgaatgggaaaatgagcaagaaaagttctacaattacgtcgaaaaatattttaaacaacgcaagaaaggtatgcatcgtgttcttggttcttcatgcataactagttttaagcttgaaatgaaaggtttctatcaaataagtaatgctcacctcataaataaatggttagcttttatagtcaagaagaacaagattaaggaaatctctctatccataggcaaaagcaatagaggttactattaccactgcttacctaaagtattcttaaacaatacaaaatttttgactaatttggagttatgtggagtaatgttggataaatctcattcatttaatttcccattactaaaaactttgtcattggaaaatattaagacatcatatactgtgaaatatgaacccaatgtggtattcaagtttttgttgggttgtccttctcttgagaaatttcggttatgttggcatggtttgttacaaattgatggtatgcaccggttgcgaagcttaagcctcaagaacttggaattggtgtatacatatgtgaaagacttgcaaattgatgctataaatcttgaatctttggtacttactagtaattcttcgatatttagtaattctttcgcgaatataaatctctcgacttgtaacaaaattaaagttatttcgatgaatgatctatcaataacgcatgttggggtgatggcgttgaactctcttatttctaataatcctcttcttgagaatttgactttgagcatcatgaatgtaccttgttactacgacgagtgtcatctcaaaatctcgagtcaacacttgaaaagtttctattttaagaattgttactcaagggaggccaaggttacaattgaatcagctccggaattagaatacttttgttatgaaggtactattgatacaatcatatcgatagagtcatctaatttgttgagtggaaaaatggcgatttatgaggattgtagagattatgatgcagagtggtatattgatatgttgaattttctttcgaatttcaattgctcttggaatactcttagcctacatgttaaagaatttgaggtacttgtattatttattttaatttgattatcttgagttatttaaatattgtattattgatctaatatgtttatatgtttgtatgaattaggctcttatttggccagaaaagttcaagagggtatgttattctccattgcttaatttgaagcatctcagagttattactaaagatagtaatcccgaaagaatgtcagatttgaagaactcgttaatgtggatttcaccttctttagaaacattgtctattaacaaaatgcagatattttagctgctttaaagttcaagagtcactctcatttgatagttttggaaaatggtatgtgtagtcctttatgggatggtggtgtttatgttaatagtggcttttgtacagatgatgatgactactttactttgcataagaatgatatgaaatttattagcttatagtacaataatagtacaatacagcagagaagaagagaaaacaatatgcagcatagtctgtaaggtacttgttgagatgtaaaacaataaagatttgtttttaactagttatttgttagtactgttttgtcttaattgtcttagttaagtgcttagaagataagctttctttattatattgatatgtttgtgtatgatatgagtttggtatggatttgatttgatttggtttggtagcaacaattttcaattggtaccactaagatatgcagctttaggttcactctctttttctctttagtgtagtttagtatatatactgtatattcagtcaattcttatagaaaaattattggaatatatttgtgaattattaaaaaattggaaatgcccattttgaagtccttagaagactatctcacattatttggaacatttatttataagtttttcatataatgaatgcttatttattggttttattaaaaaatataatatgcataattaaatgtcaattttaaaaatactaattttcaaaaatgagattttaatctaatgaacaataataaaagaaaaattaaaatttatgtgcttaattttattatttaattaaaaaattctctcattttattaaaaatatgtttatatttaacattaatttaatctctttctttaactcaaatcaactttatttttttttatttctctcttagcttgatagaacaacctcaaaattttttaattagatagcaaaattaagtatagaaactcaaaattttctattaatatctatttataagtaatattcattaagattgtacccatatatataaataagagtcctattttacatttaacatagtgtaattgacttctatatttaggcaataattattatattaataacatcaacattaacaatggtaataataattaattaattagatgaactatttctcttttcctctcactcacaatgtggggtgagattgagagattcttctgttttggctatctaccataatccaaattgtttacaagggaaaccaattcaacattctttgcctcttctatttcagtctcctcttctatgtcaaaattttccatgggaagaatgcaagatttagaatcatttttcggtaccaaaaatagcagcattagaggactaactctcaatatgttcctaatcaaaattgcaagccatagtttatcgaattgtgttcgagtaatcttcaacacatgaagtagaacgccaccaccccacgaagacgagagaagtccaatgttatcgatagacatcagcagagcgaagaaggtgccttcaatacccgaaggacaaagctttgtgctgagcacaagaagaggcatccatttaagccttccaatcatttgagataaactttcatcaat

SEQ ID NO: 79800 - DNA, 2040 bp, Cannabis sativa
aggccgagtcaggattctgggtaattagaatgtaaaactaaacttatatttgatataattttagtggaagatttatgattaagtgaaccctaattttaagcttgtttcgagatattcaaatatatataattaaccttcttcacatgtagccgtttgaaataatttactgtcaattgtcagtatatgtacttaattaattaatcaggataattaagtattaagtatctgttatgtatatatatatatatagtagtgtctttggacacatttatataaatacaacaattttatataaatatatatatatcaatggttttataattaattagtattgacttaaagttcaactattcagtgatagtttttcttatttatatataaaagatcctcttgtttttgtcagagaaaataaaatactaataatttttatataaaaagagataaaattagcaaagtctttgatcaatttgttctaattaatttttttaatatagtactaattaatttggaacatgcatgcatgaacaataaatattaatatatataccaaaaaagataattaaaaggcaataatgtgtacgtacgtactctgtcttaattagagatattattatttatttaattattttcaatatgtctcttatagatcgatcagatcttattataactagtggtaataaattaaacacgatattattaattaataaatgaaatcaaccttttacttgtgataatatgtataaatataaattaacacatttatgatatttatgtattatttagggttgtgatgcatctatactaattaattccacatcgagcaaaccctcagaaaaaacagcagggccaaacttgaccgtacgagggtatgagataattgatgaggctaagagaaggctcgaagctgtatgcccgtctacagtctcatgtgcagacattataaccctagctactagagactcagttgtcctcgctggcggaccaaactactttgttccgacaggtaggagagatggacttgtctcaaaccctaatgatgtcaacttgcctggttcaagccaatctgtcacctcggctgcccaatccttcatagccaaagggctaaccctaaaagaaatggtggttcttcttggtgcacacacagttggattcgctcattgcaatttcttttctagccggctttcaaactttcaagggacaggtaaacccgatcccaccatggatcctaagctagttaccaagttgagaggtgtttgcgcaaatggtaataatccaaagacgtttttggatcaaaacactagtaatgtttttgataacgagttctacaatcaaatacgtttaaagagaggggttctgaagattgatcaggagctggcgacagactctacttcttttcgtttggtttctaatttggcttcgaatccattacaattctctaggagttttgcaaatgctatggttaaaatgggaaagatcgaagttcttgtaggaaatgctggtgagatcagaaaaaattgtggagcttttaaccctcccaaaagtactaaggctcctacaaagactccaaaatctaagaagggaaagtctcctccggtaagcactcaaaactaaaaagaagggtccttattaaaataaaaaaattaaggtatagtttttgtccatattttattctttgtaagtgaataaataatttacgtgatgcaaaaatggtgttttatgcaatcatgaatgtgttgtaattgagagttgagttgtactataattaatatatataaaataaaatattattacttaccaattttgttttattaagtacttctctattgcttaaaccaaatgggaaagggtcttcattgtattgctatatatattagcacacttaaaaaaaactattgttctaataatattctaaaaagtgtactaaatctagcatatactaaaaattataccgaattggtacaatattatatcttgtgttaaatttagcccacaataaatattaattttttatttactataatgctactaattattatgatt

SEQ ID NO: 79801 - DNA, 1632 bp, Cannabis sativa
tttaatcttttgatttgtacttgtggagaggctggcttggctaggaaagttgtagaaaaattcattaagtcaaagacatttaactataggcctttcaagcattcttacaatgcaattttacattgccttcttgtggcaaaccaatataagctgatggagtgggtctatcagcagatgttgggcgacggtcattctccagatatttttacttacaatgttctaatgtctgcaaaatataggttgggaaagcttgatcagtttcatactttgcttgatgaaatgggtagaagtggtttcagtccagatttgcatacttataacattcttctccatgtacttggcaaaggagacaaaccacttgcagctctaaatcttttgaatcatatgaaagaagttggttttgatccgggggttcttcacttcaccaccttgatagatggattcagtagggctgggaacttggaagcttgcagatattttttcgatgaaatggtgaagaacgggtgtgtgccagatgttgttagttatactgtaatgatcacagggtatgttgtggctggggagcttgagaatgctcagaaaatgtttgatgagatgatcacaaatggccaacttccaaatgtattcacctacaattctttaattcgtggactgtgtatggctggtaaatttaaggaggcatgtgggatgcttaaggatatggagtccaggggttgtaatccaaattttcttgtttacagtaccttagtgagtaatttgcgaaatgctgggaagctttctgaagctcacaaagttataaaacagatggtggagaaggggcaatatgctcatcttctctcaaagttcaagggatacaaaagattttaatgtggcataattattgatggagttcttctggtattctcctgtgaaagaacttcactctagcctcgtgcctgcagccgctctgaattgactcaatgtatttgctgcctgtaccacttgtcaagctaaagagtgaagtatgcactaatttcactattcaattgctcctctgcaataaagatatcttgcaattatgaagcttgttttatccccatggtttcttggtttaactattttggggttgggataaggatcctaacttctatacttcaagaaaaaattgtaccgaatgaaatcttatgcttccattaataatatatctcatcatttattagaatcagcttctctttttgttattgaacttattacttttcatcttattctgatataatttcaagattatacattcataagcatatcctctttctaacaaccatagatattaatatatgtcagttaaccaatagtttagcaatttaaataatctgaactcctctttactccacattttgcatttacttcattcacgggacaaattttcacaaggtgataaatccaaaagacaggaattatcagcagactgagcttctgtttctcttgtgcagattgaaaccatggaactttttagcgcgatcaattcggattccacggcagactccagtagttcataataagcatttggtttaggaacgacaagctctggcttctgttgtgcataacctcttatgtaggtcagtcaccattgccctcataaattcaagtaacacc

SEQ ID NO: 79802 - DNA, 2069 bp, Cannabis sativa
agtccataaaaatgtgaagaatggcatttttcagcacaaatgaaaaaaaatatatatatatcattttaagtattttgtgtgaaaatccctaataataattgcattgagtggtatttgtgaaattaaaccatagcccatttcaactcactgatcccaaaatagcaactatcactatttttatgaatagaaccttaataaattccaaccttacacctatgccaatgatgctactaatagtttttttttttgtgagcctaagttccttacaatattctttttctttcctattttgattctcctagaaaatctatagtgaaatgtgaagtataaagaaaaggagtttactcttcttcttcaaagtccaaaagaaaatcagtcaagttctctgaatcttcaacagcctcgtccaacgacataccgccgccattctttttaggtttagttttggttttgccctgcaaaattatgagccaaaattataactaacaaccttgaaatgccctcaataagcaaacaaatagactcaagtaaattcaccaagacaaagtaataaagatttgttttgtaaataactgtttttaccatatttaattctagctaaataccattttttttaaagatatttatctattttcatattcaaaagggcttgaaacttttctaggcccatgtggaacacagaccacccagcccatcaccaactctgtaatgggctgaagcagagtatgatcagccaagcaggcttaggccatttatttagggaaatttacatggtatactaacttttatcatttttttacaaaaatactgccaagcggtattttatacttttttactgtatttttttataagtttcatactgcagtataatgtgttaagttttcactggtgttctactggtattttttagttgttctactagcgtttttagttgttctattttgtgttctactggtgttttataaaaacacagtatttttgtaaacttttccgtgtgacagtatttttgtaaaagttactccaaattacagtatttttataagtttccttttaattatgaggaatttctatttttatggttttttttggcgaagtacaaaaatatgattttatttttcagaagattattttgtgggaaaaataaaaaatatgggaaaagcaatttagggtaaccaatcagttacccttagagtaactaattattttatactattttttccatatttttaactttctttttttattttgaatttttcccaaaatctaacttttttctaaaaaaatccatattttaagataaattgtattaaaacccataaaatgtgtaattttcactttatttcttaacaataaggccttacaccatttgtcacctctatacgggcacatgtactatactagagaaacaatgtcagctgagataggtagtgagaatacaagaaatgatcacctttgacttgccgggagtcgttttcaaaatactccaattgcgtttaactttcccgtcatctacaacctcaacctcgacctcctcagcctcactatcctcactttcatcctgagaaacaaaagaaaattatagttagaaccgcattaacaagtacattagacaatggcggccccatttgaaggaaaacttgcctcgttttcaccaatgtcaacagcctgtgccatagcttcttctatttctggtacctgcttttgttgcaattgaaaattcagtaagaagctatacaacgagaaactaaatgagagatgatctctttataacttttctctcaagtaaagtcacaaaatttagtttcgaaacaaagattgcagcgtctcatgcgtaagtggcggaagtttactttggagaaattcgtggggaggtagctttattgtagttagaaagatcaaaactgaggtggttattattactcaagtaattgctgtaaatgtaaagaaagtcattgatggtaatgccattttcaattagaagatttgagagaaaatataagtggagccaaatacgaaatgaaatatctatgcttatcaaatgatcaccttaccacttgaggctagctcaa

SEQ ID NO: 79803 - DNA, 2850 bp, Cannabis sativa
attttcatagagttatcagtaagtaaagttgcaatagaggaacaggtgttccatcgattctacagcctccccacacaacaggcataattcatcttcaatgggaattctcctagtcaggagacaacggattggcaaagcattcgaaaggatactccaccaaagactttatgtctttctaaaattttggagtttcaaagtttattccacaatgtcggcgcaaccacacaggtaggggctctctcgtaagcctgcatcaaataagcagactttgtagtgaatttaccgctcacttccttagtccagatccatcagtcacttccctggccgctagacctacccccttttaggatgttggtaatagtctcatagtcaaacagggacttgagcctagcaatgtcccagtccccattaaaattaagcagatccgccaccttaaccgccctttcagaacaagaattaacgggtctcggatagaactctttaccatgaacaacccaaggatccgtccaaacattcgtatctttcccattcgagacaattttacaagcccctttcctgagaattgctttagatttgaccacatttttccagaaccaagagtcgaaatttttataggtggcctccagaaacggcttactcttcaagtatttagctcttaacaccctgcagcaaagagactgttcatcagtaagaagggcccatccccatttttccagcaaagcctggttcaattccaaggatttacgaaaaactgagtccacctcttgatttgggaaggcataagtggtcccaagccttcaagcacaaacaacgattaccttgctcacatccctgatcataccatcaattttggaagcaagtttttttgagagtttggttgtttgcatagtgtagactggcatggccagtcccacagatttgataagggtagcacgatcagctttcgaaagtaacttcaacttccaaccatgcaacttcgagaccaggttgtcaaggatgaaattaaaatccgcatccttatgattagatctaaaaagttggaggccaaagtaattaatgttcgtggtagccaagataagccccagtaattaatgttcggcagctgcttcttaactttaagtggaattttcattgttatgatttttataaaatgtgactttttcaaaaaatatatatatatatatcttataaaataaattaaaggaaaaagatatatcctaaggaagagctagttagctttaactatttttcgtatatttttttaatttttttataaagtaactttttgaaaagatttttatttttacacgtgataaagaaacccataaaatgtgtaatttctaattaagattaagtaatttgggttatagaccataaatagtcggagatactaacataattgatatagattttctcccttttcttctgttagttgctgatagtcatttcggttagcttatatagagttttgtttacttaaaaatttgtcctgatgacatagacaatacttttgacacgtggccaaaataaaacaatcttgggcaccatccaccgggactaatagtggtgaacttgggtattagaaactgtgttagtgccttggttgacattagtaggcgcccaagtaggcactatgatcctgcgaagatgtttccacctatcgtccttcgacaaagttcaagtcaacaggttttagtgaccttaaaacaatgaatcgtgaagttgaagatgtcaattggacgtcccagtgctcaacctgggtccaacatcagtgttgagcttccaagttgacatcatgtgcgccatctcgcatcaattttggttcccatcaacttcttatgggaatctgcttagccattgccctaagatacatatgagagacacgccctagccaagtttcagacttcggagatgagtttacatgaaatggcacccaggcacccgaaaagcccttatgggcgcctaggttgacaaatagtcaatctggccgcaccatggctggggtttaggtttttggagacatacttggacctcgattcctcaaatccatcaaggaacattgcaaggacatgaaatttcatcaacaacatctcgaaggagccaatgcataactatgggcgcccaggttgacatttcaacctgggcaccgattttgtttaccaagttctgcccgtgcaaatcagacgaaactaaaatatatggagcaattttcaccaaaaagaagatagagcatcaacgaaactaattttgaagatgtcgacccctacttgggcacccagtgcatgccccaaggccacagtgggcgcctaggttgacatatctcaaccagggcagaaaagttatccatgcatttcccttattttaattcatgaggaagatacaagtgctttcaagaagcaaacaaatccatctaggccccagtggaagagctgagcacccaaattgacatcaccccagtcacttggtgcccaagttgacgtagtcacaattctagtggttccgtcgatccgattgcgattctatctcgagcattcttcttatttttctctaaatatgagatatgagacttggaattatgagaaaatatcgttcgtttaggaagtcatcccacatgaattactaggcaccagtgtgaagcaattgggcccccatgttgacattggcctaggccttagtgttttgtccttcaaacaacaattttgctctgggcatcggtcttattttgcccccaaaataagatttgaacacttttgcaagtcaatatatatgtgtcacgagcaagttcactgacaaacatgtgcactattgatcacctgggtgacaccatgtcatctctagtaaaacattggg

SEQ ID NO: 79804 - DNA, 2159 bp, Cannabis sativa
taacattataatctaaacaaattttgggatgtgagtgggaaatgtgtacattgtatttacatcatgcccattggctctagactctagtggttgggtaagtgagtgtgagcaagggtctgggtttccaaccccaacaaggaaggctaagtgtttctacaaatataaaaattaaaaaataataataaaaaggagtcttcctctcatgttgctgaaacagcatcatagttcatccatataagtttctccaaatgacacttttcctagacaattgaagtgcatcagtaagacagatcatcctctaattgggaaaagaaggttatgtaagctttgcagcttcactttcattctcctgatccatgaggcttaacactattcgaattatttccatctttgaaccttaatgcacaaaaagagtacatatggatttctagaaaaacaatatgcaattggaccagaaaccaaattataaaaaataatactggacaataagatttaagctgccatttggttggaggtaataaaatggaatagaacggaaaggaaataatttttatttcattcttttatttagctgcattataaagtattagaatgacattacaatggaatcaattttacattattttgaatagaaggaaagaccattccaatacaatacaagaaaagatttaaaattttttttattaattttttatgcgttttaaatttgattctatttcattcctattcctaagttatcattacttccaaccaaacacttcaaatgttaacaatcatagcaaaattctagtccaagaaacaacactagaaaatattaccttattggtgaggacaaccaaatttgtctattaggagtttgtttgttcaacacatacgttcccaaatcaccaagcttcaaggttaacacatcattctgccatatgcaaaactcaattgcataagagcaagaataatagatcacattactcattttctcaagaaatttatcctcaccccatagtctatgtcaaagccctcaacttgaacaccatccccatattcctgtcaggcacccgaaaaggacacaaatcaatgatagctatgactctgtgattgccaaaaaaatatatgtagactaaacaaagcccgaataaaccacttgagggtagatgcttaaatcaaaaaagaacctaaagcccaaataacatatcataaaaaataaattgaaaaaatgactagaaaatttgcaatgcttgtagctataagaagtactaggaaccttccatttagacccactgaaaaaggtgagcaagtagatttcaagatcatgaatagtacctcaagcttttcttgaagatcatgtattgttgaatcagctagtctgtgaaactcatcctcttgcagcacagaactgtattcatattaattattagtaaactaaagataataacaaataattaccacaaaaattacatcatatcaacaaattttcatttcatctttctcagctaccaaacagagtaacagaatctgaaattaaagccgtaccgatagtcaatgggggcggggccttgagaactattatccgcattcataggtcgagagcagaaccatctcgaagtgaaggaataacatggtttgagagagttgccacagacagggagaggaattggacaatccagaagatgggaacatgaacagtagtaactcgaagatgatggagaagaaggaagccttgatagccgccataaccttctcaatggaagcagctttgaagccatggctgtctgtagctagctttgctactgtagttttgtaacaaccttctctgttctagctttcactctgtttttctcgtatatataagcactgtaatgctcttcaatggaggtaatgagaattcattcattttccagttttaatgttccatttctattagattctgaacaagagactaataaaccagaagataacaactagaaaaactgagtacaagctgagtaagcccaacaggaactacagaagagcaaacaaaactctaatattgattctctattccacaataccttttcactattagtaatccatatcccaaaaaaaattcttattagattattcattagacttcgactccatcaatttatttttaattggtgaaacgagagtactggaaattatat

SEQ ID NO: 79805 - DNA, 1828 bp, Cannabis sativa
aaatgaaacttagtatttatagtttcaaggagcacattagaagttacatcagaaaaaaattcaatgacacgaaatacattctcatttcatggttccttatagatacataggtaacaagagtgagttgaattgtgttgaaatccatggcttttcagactcatattctcttggtctactctacaatttgaaaagccctgagaaactattaaagtttagatctttgtgtccgacttcgttcggacgatctaattgaaatttcctaagcttctagtccctataaagattccaaaaatgtttcatttggtagaactcaaaattattgttctaaaaataacttattctcaaaactgttgtagagagaaatttgtaaatagtgaggtgaggattccattcatttgaaaggaagatatgatattcaaataagaagtaaaaatctatgataatgatgaaaaaaataaaagattattgtgtagaaatgcttacagatcatccgaaacagctgacttttgtttattatcatcaccattttcaatgcttgcatccaaaacttttgtagtattcatcatctgcaaaccctcctcaacaaaaccaggactgtcattctcggcccgatcttcattctgtttctcattttctaagttaacagaagatgcaccagagacatttccgaaaccttcttgcagcacactactcgggactccaacagattcagaactcttgctctgaacatcctcaattgccatgttcttttgacatgaactaacaattatttcgccatgtcctttaagaaaactatcttgtgctgctgcaaattcagaagaaccatcctgcaattagagagatggagatgttagacacatcaaacttcgggtttttggtccgatttaagtcccatccatccaacttcttcagacacttgctcgataggacacttctcaaaggttattacaataatgaaaaacttactatatttacagctcctttcgtgtcgggaaatgtcttttcggctgaagaggaagatagtgaactgctctctgcttcgatactcttgttcacgacatttttaatcttgacaaggttggttgatgttgtctgaatatcatcttgaacaccaagatttactgatatattactttttgttaactttttggctctcattgaaggttcctttgattttttcgtctctttctttcctaagccattttgattcacattatccacagcaacagatgatttcgattcggactgcaattcttgcacgattagcttaacaagatagtaggagccaccagtttgttgtgtaataaggtaaggaggaggaaattttccaccatttgttgctttataactgcaaaatacacaaataaaaagttcatcaaatgctcctatctgctcacttatttgtttagatctcaaatgttctttagtactatgcagatctcgtgcgatttttattttttattttttgcttactatctggataagtgtggacaagaattttggaattctgatgaacaaagtaacctactcttataaatagctcaacttgttccatgtgggaaaaaggaaagagcattactatatggaaccgatgcctccaaccccaccatattttgattggttttgcaattgaataatggttctcaagtactttactttaaaactaaaatatatagaacccgatacaaaattgcacaacattcaaacataaaaagatccaacattggtttgatatctacaatttttcagcttctactcaaaatcataaaattttcgcaggtcaattgagtatcgagtctcacatattatacttcagattaaaatatat

SEQ ID NO: 79806 - DNA, 4028 bp, Cannabis sativa
gggtctaggtttggggttcgagtcggggtccgggttcgggtcaggattgaagattggtgttgatcccgaatcttttgtaaatattatagtacaagctaatacagaccatttgttatgtattaaataatacaacatatattgtattaaaaattttggtcgtaataattaataaaatatattgttttatccaaacataatgttatttattatttaatacactacgacccttatacggcatgctaaataagtccataaattaataatattaagtcttaataaataatataagaaactgctaactaataacaacaagttatatcagtatagttatattgtacatatattgtctaatagaaatggtcatatactctaccttgtctccaaatagcttcgcccatatatatatgtagattctccattgaccattttaagagctatatatgtttatgaaaaccgatcgaaacccttgtcttttaataatgattccaaacaagatcacattatacttacataatttgcctattaaaaaaattgtcatagaatagatatgtagtgtgtgtatatatagggatgtaattcgattcaaatcttcattattaagtttataaggactattatatttttatatgttgttcttagaattaaaatgcatcacggcatacatcacaacattcaccaatatattatttatatataaataaatacaaattttatatatagtttttttagggtttgcttgaaatttgccaactacttagctttcagtctttcatttctaaaaagaacattaattatatggagggacaaggaactaggggtggcgatttgtgtaattcgcaatattcgtattgtgtcgagaccattgtataacgtatatgctcaacctgaacacgattcgtttaatcatcgtgttagaaaatgaaactcgaacacgatccgtttataaacgtgttgacacgacacgacatgtgtaactcgtttataagtatatttttttttaaacatgtcaaccaataacatgtttataacatattcaacacgtttatgatctgttaaagtacttaaataacttaaatatataggtcattaatagtcaattttgtgttagccgtatcaactcgaacatgacacgtataatacaatctcaatttatttaatgcaaacccaaatccactaattctcataccaattttaaatggtgttattatatttgacacattttgttggacctatgagagatggaaaggggccttaagccaacccaaaattttcaaaagaaaacaattacatattgtacatgttattattataaagaaaacaataattttaaatttggctccctcataattcattttgtttacattttggcccattccaaacccaagttctcactccatgtgtccattgttataagagaattattagacggtctctatagtcccaaagaaatattaaaaaataataataagaaaataatatttgtttacaatattcccatttattggtcaaatatcacacgtacgtaatgggtttgaaatcaaatttgactcacaatttcattgtgtccatttgtattgtaataatcttgagcctttatttagtgtggggcataatcttttttggctatgcaaaaagtcaagtcaaaaaagtactctataaattatatatatgaatacaatgaatatccaataataattaacattaataaaactatagcaacaaaataatatgtaataatctttagcaaaaaaacaataaaagtaacatatttatatgcatgtaataatgtgaaagttgtatcggtttaactttataacatgatcaatcttattcattaatagtcataatatatatagttaagataaaatgaatttgtagacatatgaatatataatattctatatctattgagagaataattaatttaattgattgaacatatacaaaagaagattgagattatgtatttttagtcattgattcatgcatgcaacttaaatgaacaatcattagtggggtatatatagatcatccattaatatatagctcaataggtgaaaaaaattcaccaaaagtaaaattagataactgaattaatttttaccattcacatgagaatattttattaatgagcatgactttaatatatataataaatacattcactataatataatataatataatataatataatggaatatattctaatataagaaatttcagtaatacatggggtatattagtagaccctttatttatttcagtattcacaaaaaaaaaattagtttaatttattttcatgatcgcgtacgttttacttatttaaaaccaaatgtaattttttaaaaaattttgaagagattaccgttctaaaaataaaatatatttttatagttattttttaaaattaaaatttttcttattttttaataattaatgttatgtgaactattaaaattcaccacatgtacacttgtgtactatattatgtctaccgtgacatttaaaatatatagttttttgaatggaagagataaatagctagattttagtagttttactactaaaaaaaatcaattaagtgattactttttaaaaaatataaagtataaataattttacctctaaaatttctaaattaaactaatactgcacacattaaggggaatgaattttttttttcaatgattaataagaggaagtaaattaaacattataataatgaaaaacgttgtaaataatttggtatataataatactaatgatgactttgttcaatgaatccaatcaatgtagccaggagcagacttataatggatcaagaaactagaaaaaatggaagtaaaacatctttttatttaattaaatttgttatttatatattattaatttgaccaatttgtaaatgggccacttcattcattaatatatagacttaagaaagtacattgttttcaatcaagacatgacagtgtccttagattttagtggaacaacattatctctatctctatctctggtggttattaggataagtgaaatgctaaaaggtatctgtgctgctaagcaccttcctacatatcaatatcgctattggtataatttagtattaggtcacatagtttaatatattaacttttagggagaatcgctagccaattgtaaaacgacacgtcttaagggtgttaggcaccactagtgcataatagcgatgttcttaagataaggcatctaaactacaaaattactcaccctttccattcttactagctatagctaccatatatcttgaggagaagtggcaactacaacattttataacaatctcatagttaatttttatgtttatatatatttttatagcagtgtaaattttttaaaaaattctaaatagtttatgtacagtattgaaaatagagtttctgatattctaatttattgtgtgtattcagaaaactttaagtatatttttagcacggtaaagtgttaacaaatgcctttataatatgggaaacttacaaaaatactgtaatttaagttaacttttacaaaaatactgtcacacggaaatcttttaaaaaatattgtgtttttataaaacactagtaaaacacaaagcagaacaactcaaaacaacagtagaacacctaaaaaataccagtgaaaacttaacacagtatactgtagtatgaaacttatagaaaaacacagtaaaaaagtttgtaagaaaataacaaaagttagtataccatgtaaatttctataaccctatatcattttgtcattttgcttgaatgttagttggtttgttgttaccatcttagggagggactattaatgttgcatttgtatcaaatgtatatcagttgagatttttgttgtcaaagatcaactagataaagatttttatcacttaaaaatttaaatgcaataaaatgaactatataaaaatttgtactactaaaaatttatataagaatttaaatgcaacaaaaataaaatatacaattttttatcgtaaattt

SEQ ID NO: 79807 - DNA, 4165 bp, Cannabis sativa
aataatcagaaacaacatagaattccttgtctgtgagtgatataacttataaatcataggacaatcagggttgttacagctgtttaatagcccccaaatcagaatattttcaaaagcaacaagatattatgattagactttattgtcaatatcaaaatgttttcagcttcatagtctatgatagtttgagctattctgttttatttagctagcatttcatggttcagacaagaaatcattcctccaaaatatggaaattcatttggaggtagaaaaaatacatttatgctattataaaacaatcttatgactgtaccaagagaaattcttactttagagggttagccagcaatctctgcccaatggtaacaaaactattctcctgatttgacataaaccaggccagagatgagacactgcaaaagttcacaaaagacatgattagcaatacaaactcccacgcattaattctttgttaaccagaccagcaaggtggcgaaatcacaattgagattaacaccggtaaataccttccagtgaatatatgctcccttagtcccagtattgttggtgttctcacatcaccatgtttttcaaggagttcttgcaacaaatttctcattttgaaggcttcttctaaatagttatcctgtgggatacatatatatctcaatctgattagcatatgctgtttcaaatgctacgactataactagataatgcaccaaaacatataatttattgtaaaatagtacttggttcatatctatagtttgcaatgcttcaccacgtgtgaatataatggcatgattttgattctccggtttcccctcacccaacattgcaggtcctggtagctttatctgatatattaactgcacaagattcataaaatcagtctcaaagtactaattagagtaagaaatgcttgttctgtaagaaatgcttgttctgtaagaaatgcttgttccggacaaaggctaagagaacttgcacattatttatgattcaattataataataagagattctaagctttttaacttgagacttaacctgatctagattttgcactagctcagaagaatcacttcgcttagctggcaccttcacaagttttgagtaatagactttctgaacttctggtttgaatttatttttactagctccaatggatttttctttacttgcctctaccgatttgtcttcactaactggttcttcaacctcatcaatgtaagctactcgaagtgatggataccttccacacaataaaagaaagcagatataaccatgaatatcttataaagtttgaaatacacgaagataaattattattttttgaaaaaagaggagaggtcgttgtcttagactgaccaccctctagtatagattaaaactcttacttttggcggaggaaaactgctttaaacagagtaaaagagagtgaaaaaacgaaaacaacaaagaaaaatacagagaaaacaaaagatattacaatccagaacctaaattacaacaggactctccattctctactcaaatctagaaaagataagtcttggaaatgcttggttctgaagacccatgttgctgtccagaacttgattttatcccaaaccacttccgctgagttttctatatcttcaaaaattctggtatttctctccaaccaaatagcccaaaattcatatcagctactacttgacattactttgtgtggacggctagcagttatagtttccttttttttttgaaagcagctagcagttataattatttacttggttcttaggaaagttgttggagaggaaaagtggcaagtttatatatgttagtagttagcataagaaatgagatagatggtaatataattagtgtttgggactgagtggaagcaaggaaaattggtgagaaaattgtagagagctagaagcactcataggaaactctaggccacttgaaatgcctactatctgtatttggtgtatttctatgatcaacaatatattgaaccaaagtatttctaagataaactacagataacatacgttctcataagtttcaaaatgtcattagcacgacgttcccctgctcgtttgtcaatgccatattgctggcatgacacaacatatgcgaacttcatatcagctactgcttgacattgtaccattaatgacctttcacctagctctgcattgtccgattcagcagccttgtagcctttcatgagatctgcatagagaagcaaataaaatttagtgaagtgatcatatatggagcaaaaagagacaatgtacatgtactttatacagcaaattcgagtaccagaatccttagccatgtccaagaaggcctgaagttccattgcttttcggtagtacatcatgcctcgaacttaaaatgtaggagtggcaagacaagtaagaaaaagtactaacaatataatataccagtttacagtaagtaacaatagtacctaatataatcaaacacacatgcgtaagtataacaagatctacaaggcagaattaaattaaaacatagatatagaaagagaatatgcgaacctgtttttgtcaatgtctgacccctgtatgaggcccatagacaaagtttttcttgtagttccacagtgctcatgagttcttcttcacttaaacaattaacacgttcaagaaagtttgtccattcatctgtaaaatagtaaattcaacatgtaatttaccaagactaagtacacttgtacacaatataaagagttggaaacatataaaaacctggaaatattttttgcaagtaaaagagaatagaaactccatcttcattttgttcttccaattgagaaacagaaaatgttacttcctctgtgtagtatggtgttagaactctgccaaaacgtatatagttgattactttctatttaaatccttcaattaagtgctgttgtcttaatttgacataaattatatgcaattacaatatggaactttttaagataaaatgaacttacgagaaggaaatcatatttcgaactttgggagcaggaggcatttccataaacaatgaattggagaagaaagaaatgcgccttctagcttccaaattagatggtacatccatagcagactccttctctgtgagcaagagatgaatccttctaatctgtagactcaaatttgatcaaaattttagccatataactaattttattcaaactgggagatgagatgcatggtatacaaaataaaatagggtggtgataaactgtgtataggagaattcatgcattatataagaatagaatgatagtaagcttttcaatgatcattcattcatgacaccctttcagcaatactaactttttctttccaagcatcggtttctgaggtcacaggaaacctaagttcactgaaaaacttgtattgttgatcaagcggcatcatgccctcatccttttcataaaggccaccaccatggctagactctagcaagctgcatgaaagaacaagaaatacaaaccaataagactctcaaacacatgtattactaacaacactttttccaaatcatttaccttggcgattcatcctccagtatgtctcttgtaacaatctctagcatatttagcaagatgattgaaacctcatctttgtcttctgctttgttatctaactgcattagccataccaatatcattcaagctatcatcttgaaatagagaccggtagggaaaataaaatcttgacaagaaaagttaccaaatattttatcagaataacaaattgttcatagaggtcaggcagagcactcatgttcagttctgatatcaaatcttcttttttaatatgctcatcaattgaggagaaaatattgtctataaccctggagagacaaaaagtgattagggaaataatgacaagaatgtcattcaaccatatttatgtagtccagttccagacaatagacagggaacttacgttgtttcacggtgtcctaaaaccagaaaacgaatgatactttgaaatgatgagtaacactcttcaacagcacaaagcatatactcgtccttatttattctctttttgagctcattgtcttgtgacctttgtccactgctatcttttgccatgtccaatgctattggtatctgcaaagaaagtac

SEQ ID NO: 79808 - DNA, 2741 bp, Cannabis sativa
tgctgtataaatatgtatagattttgctctgaattatttatatatataatatatatgtaaatccttaaaattattcttatatccatttcaataatcagtattcagtatatagtacccccttaattaacatgtatatttaaaaataaatatggttatattatgtatatttaaaaacaaatatggttgttatgtattatataatttcatccttaatagataggtggtttggcattattatattccttaattatatatacatatatatcgttttaatctgtaattataattccgtggcaaagttaattaattaaaattaaaaatgtatgttaaataataaaataaacaataattaccacatatataagctggaaaaaagaaaaaattggatgtttattttatttgctctatgtataaactgcaactccaagaaaatttactataaattttattggacactaataaaaatttaaaagtaattgtatatctaatcaataatactatataaaaagatgatatattaaatttgataaattgatatacatgcaatttcaattcaatgaggtttaacctaaaaaatcaagcattaaattatccaaaacacatatagagagctttttaggtggagatatcacgttttctatttttcaatatactttaaaaaattatattaaatttttttattatatgatgttatatattgttgtaatcggtattctgtctatatattttgataaattctgaaaaatttacaatgtaaaaataaaatttaaaataatatattatatgtgtaaaataaaataagtacatatcctattaaatatttaaattatatatttttaatgcagtaaattatttaaatattttttaaaatagacaagatatgtatataatattataatatacaccatcaatatataatttctctatatattaaaaacaaaaaaatatttttttttctatatatattaaaaatgaaagataaaaacaatctttagagtaaaccagggtttgattctacatcataagtcaacatgattagccataaagaagtaataaagtaaatgagtcactgcatttattatctattttgtataaaaagaaaacgtccaaggcagttggaccatctctataaatggattgattttcccaccacaacattactactgaaaatttacataaaatattatttttttttaaaaaaaatcacacttttacattcaaatattttttgtatacttttaacatatcttactaaaacaatacaaaaataacaaaaaaatcgcataaatttacctaacaaagaaaatataatatacaaaaaacaaacaataaataattataaataacaagaatacaacataaaattaatatgaaaaatattaaaacagtattttctgtaaataaattttaaaaactgtaaacatatttaaatttatatacaacaatatttttgttatttttgtgtatttctaaattaatctctgtattttttgaatagaaaatgctaagatgtcttgcaatttaacattagatcttatttatttaattattttaaataatttttttttattatccattaacttccgttaccaaactagatagcaaatcaattgaattaaactccaaattaaaacgaaaatcaagacataataatgaggctctagcaaaattataagctacgacattagttgatcatttaacaaagattatagaaatatttctcaaaagagcaagcaatcacttacaatattaataacatgtccaaataaatatattatagaaaaaagaacttggcggggcttgcatgacacaaaaggagtcagtatttccagagacaccagttgccattgatgatttatcccaacagagtctcacgaacttccatgattacttcaactaattctagtttccacttgtccttgaaagaaagaattacacaccattcaatccgtttatatctcaagctaccacgccatagtcaaaaatattattcccttcaaacaaaattgcatcgacattgacttattagcctatgataaaattaaatgctcaaccccatcacacgcctggacaccaagctatgacgattgtagctcaaagttttgagcatgtctgcattgatcaggatacctttttgcatatataactatgtcaacagcccctcatcatctttttcttccacaccaaattatttttagcacctcgtatagcacaacaaacaatgattaagacacaacattgctcgaatccaaagccttgaaagaagttatccaccattcaagaaaaaattgactggtagtaaagttgtgttaataccaattctattctagaaaaattgcgcctctggacatgatactagtccatgaagaatggtgttgtccgccccactacaaacaggacacaaagaacgttgttatgtcctaaattttattggcaggtatactttgtatatcagaagatcatttagtttagaaacctagtatatctcacatttttttattcttgatcgttgatggcttattagttagattcttaattgaagttgttgttagagttttcttctattttattattataaatggtttggtatgcttataattgatgattttgtgctttgagttatatattaatataatagattttgtccaatttacctagggaaatttgattttctatgcttagaaaatcaaaaaatttgatttataaaccaataattaaaaccctaaaaaaactattccttt

SEQ ID NO: 79809 - DNA, 2165 bp, Cannabis sativa
atcggtttaggcataacagtaaacagtttttttctttttttttgttatatggagatggtgtatacatatatattgattgttgttatataataaatttctcatcaatttgttattttttttaatagtttattgtaaggaaattcttaaagttaattattttttaatatatattttatttataattttaccacttaaaatttttatttacaaaaatacacataaaatttgtttgctcagaaaaataactaaaaagaataacttaaaaacaacgaaaatttaacctcacaaaaattataaatcaactataaataaactataaaataattaaaaaaataatctcataaaaacggtaatacatgtaaaaaaaaaaaaatgggccttatttccctctatttttcttgtgctggtattaatgtggtccagcattggacatgtggctcactcttagtagacggctagtattgttgatctcaaggtagatattaccgttacaattgtaatgatgaagaaatcatgaggtgtacgggagattctcttttctgttagtattttttttataattgtaattgagcatttggctcctctattgtttttggtcttttggtcttgcctgtaaatagaatttactcaggctatcattaattgagctgagatttttcacaatcaatttacctttattttatcttggtattagagccagagcctcctcgccatgtcaatagactctcaaaatcctggaaacaacaataatgctcaaccatcagcctctatagcagcatccactgtgttgggtgttagctcaagcatacctcagctccaaaaaaatttcgtaaaccatttcagcaccctaaaccaacctttttccctcaaacttgataggcataactacagcctatggaaaaccatggtctcaactatagttaaaggtcatagaatggatttctcaattgcactaacacttgtccacctgaatatgttgctgcaggaacagttatggaaatcatagaaattgtagaatctcaaatcgtcaaaccaacttatgaaaactggatcatcaacaatcaattgttgatgggatggttgtatatctcaataactgagactatagcaatagaagttatgggagtagccactacaatagggttatggcaagtcatggaacaactttatggtgcacattccaagtcaaaaatggacgaaaccaaaaccttgattcaggttaccaaaaagggaaataatcctatgacagagtatctcagacaaaagatgaactgggcagatcttcttgctttggctggagagccataccccgagtcgcaaattatcacaaatgttctctctggtcttgatgtaaactatctcaccatagtgcttcaattgaagctcgaccaaaaacttcctggcaagaactcctagagttgttgctcaactttgacagaaagatagagagactacaagtcttgtcttcaaatggcaaaaatatcaataccctgatggattcccaagctaaatttgcttagaagccacaaaatggaggataaggaatatgttctggtaactacccccaatcttatgggaggcagacactcaaacataggaggatgaaatcgtgctagaggaagaggaagattcaatggtagaactggagggtcaaaacccacttgccaagtctgtggtaagtatggacattctacagccgttttctacaatagattcgatgaacactacatgggtttctaatcccaacaatggagcacacaacaagaacaaaaatctttcaacctttgttgctactccagagatcttggagagtgaagcttaatttgctaacagtggggctagcaatcacatcacctcagactcctcttctatgacacggaaacaagagtatgggggaaaggagagagtcacttatggtaatggcactcaactctctatctctcatattggtaatggaactttgtatattgatttcggtcaacatttatagctcaaagaaatgttgcttgtccatgaaattgctaagaatttattaagtgtatcaaaacttactcatgataacaatgttcatagaatttttttcttattgttgtgttgtgaaggacaagctaacaaggaaagtacttcttcaagggatgcttaaggatggtctctaccaacttcaa

SEQ ID NO: 79810 - DNA, 1082 bp, Cannabis sativa
aaattagaaaaaagtccttaaatctaacaatcttaatagttcagggagaatttttaacggccaaaagaatttaggggcatgatttagtacatgtcaaagttcgaagagaattgctatttgcatgaagaaaaaaaatatctttattccttcaaccttacatctcaactctattgttgtgtaatgatgaagcttaaattgagctgaaccaaagcctgtttatcaaacagaccagcacttttcttaattggtagcagggtgtgattttcaaaagagtgtcatcagttgttgtcgctcaaggctggtgtgagttcaaatccttacttttgagaaacagttacaacaaacaaatatgtatagatatatagagctatacattacattaagacacttttccggtatattttaaacttggaccatattactggctacagaaagtaatagctgagcaggctagattgggccttgatagagtgtctatagtctttgggctcactaaacctgttcatagtccaattgtttcttgctgatagggtctgtctgggttttgtaatgggctttttaaggttgatatgcattatgcaattttcatacacaagatgctacacctatcatacattcatgacaatgtacctagttttatgagtacatctaatatgttgtagttctatccaaattcgattcatttatatatttaatggtcgatcagttctatccgttaaatgtatttcatatatatttattacattaattcaaaattaaccaatattttatacttaatatattttagatcgaatcgctgccatccaatttttttagattcaatccaatccattccagtaaaaaaaaaattaatcataaacatatatatatattttttaagtataacaatataaaatctaactacttatttaaacaaaaaattctattgcggataagtaagttagcctatctcgctagaattaagagcatttgtgcgaggagtgttttgagagaggtagccccctttgtggctactttctagactttgtttggttttgttcaatcacaccttctaacttatcaaaaaaaaaaaaaaaaaaaaa

SEQ ID NO: 79811 - DNA, 2301 bp, Cannabis sativa
atgggaagtccagacaaattatgttttcttaagaaatctctatatagccttaaacattaaaaaggggatctagatatgaaaggattcgtgactaaagagctcaggccaaactcagaagataccatatgctacagtgtgataactaaagtgtcattcacttaatgatcaagaaagcacattgacatcaagtttcacttcatcagagaaatgatatctaaaagagagatttaagagaagaaagtcaacatcaatgacaatccaattgatgctatgaaaaaatgtgtcactcaaagctataagtccaaacattatttgatgctcaatgccataaacgactgctatgcttcctaaggaatcaaactcacttcagtctgtcactattatctagactggtttcttgaaactaaagggtagaatttgttaaatttagtaacaagtaaccaataaccagttaccatttacaggtgacaggtatgtgagttaggactactactttctagaaagaaatttagagggttgttaaaaaatttattgtgtttgatcaccaatattgtgtcatgtagaactaaattaatatgaagcaaagcttcctagtaattttgagattaatctctcaatcttctctttcgagttttggccctttagtgtttctaatttgtatatattgattctcattggttcttagctgaattcactttgttgaattttttgtttatgtcatttttgattgagagtttttgatgagttcttgcttgtggtgatacaagatcacaacagtactattactatacataatataaatatatatatatatataatatattaaaatctagttccaatatatgaatgcatgcataacaaaaaattgctacaagagagtaaaataattataatataaaaaaaagacaggatatatagttagaccataaaatcacaaatgatttgcagagttaagagaggtaaatatttaatgtgttctaactcggtcgcacctgtcggccaagttatttcttctttttctttttatctttctaatatattattttaggaaagcgacctttttcaaattaaaaagaaggcttatatataatgtaaaataaccaattaatttgtttatcccgtgattcataaggaaaataccaggtaagttgtgtaaactcacactgtctggggaaggtcaagtaggatgattcttagactatgtaggtatgagactacacagttgaagaaagcttaaatagattaattaatactacctataccaacaaggtgtatcttgtttttcggtagcccatcacgaaagaacttagggtaaggtaacctcctgagaagttttcctaagaagcatgcgagtgaggacaaagcacgttggaaacactcgtgttggtctgtagggtcagtcgtcagtctatgaagcagccagagtgacgtacttgtgtataagagccattcgtttcgcgggtgtaagggcccaacggaggcttgaagcggggacgttacataatactatagctgtttttgaatattattgtgtaccatatagttatgtttgtaagttgtgacttattttgtaagtatagtagtttgtgtcgagtatgttttgtttggtattaatatatggtggtggttgttttgtgtttatcctaagattgtcgtgaagtaatagtgacacatgatctgttccgcagttagtagagataagttttttcttcataatataatatttcgaaatatttttcgttttaataaaaattctcattttaatattactattaagtagtgtactaattaaattttatatattttatataggtatgtttttattttactcacttggtgaagatgcaaggacttcaaaaaataagttttattacaattatctttcttcaaattttactatattattaatccatatgtcataattttaaaattgttattttaacgtttatttattaaattattaaatttatttatttgatatttttggtctaggtatcaacttttctagcaacagttctcgctttcttgattggattgagatggactcaaggatatctcttaatgatgattgcatttgattggttgttggaattggactccctctcatttcttttgagcatgattgtttagatttgatctctaccttttttaagaggttttctttttgtaatgatttaggctctctatttgatatatatttttagtttactgtccaatttttctaaggcgtctctttttcatgcaaatcaatcggccattatgggtatgcatgaattagttgcacacgcacttagggtggat

SEQ ID NO: 79812 - DNA, 1552 bp, Cannabis sativa
tgtttgtaattttcttcaagatagcaaattagacccgcaacaaattaaatttatatataataaaaaaaattaaaataccaaacttagaaagggctgatagagcctataaataccaccccttgctttctcccaattccatcaataatcattctcacacctcatcaaacaaaaatattctaagtatcctctaaatttggtcactatgaatactcgagtgttcttcatgctcgcttttgcactcttctttgcaggtaataataatgataaaccatctataataatacatagtccttgctgatcagttttctcctggttaaaaatgtagcacatgtgcgtgcttgcttattacatatatttcttgaagttgaagcatatatatacatatattttttcagaaatagttttatatatacttataaattatacgttataatatgcattgcatggatatatatcacaggggcaaatgcgactaccattaccataaaaaacaactgccaaagaccaatctggccagcaaccctaaccggagaccagaaaccccaactctcaaccactggtttcgagttagcaccgggagctagccgttccgtggacatcccagctggacgttggacaggccgcttctggggccgagaccgttgctcaaccaattctggcaggttcacgtgtgccagcggcgagtgtgggtccggcaaggttgagtgcaacggtgcaggcggagccccaccgaccactctggtcgaactgaccgtggaaggaaacggaggacaggatttctatgatgtcagcaacgtggatgggttcaacttgccggtttcggttgtgccacaaggcggtagaggtgaatgcaagcaatcatcttgcccggcgaacatcaacgctgcctgcccgggtcagctccagttcaaatctggaaacgacgtcgttgggtgttttagtgcttgcgccaagtttaatgaggacaagtactgttgtagaggtgctcatgataagccggaaacttgtcctccaagtgacttttctaggttcttcaaggcacaatgccctgaagcttacagctatgcttatgatgataagaccagcacttttacttgcttcggtggaccaaattatctcatcactttctgcccatgaaacatattttataattatatcatagaacaaaagaataatcaataacaatgttgatcatgtatgtttgattacattgccaagttatattttatacgaataataaaagtttcttttaaatttctaccaacgtttaaatatagttatttttattgttaaaattccaattttcttcgttacatattgttaatggtttataatacgagaaaaacaatagtcttgtattggttgttgggaagtaaggtcgagtttcagaggtgataaaaagtggtccctaatgtaataaagctgactgtacccctacagaaatcttcaggtttgtaagtatgtgggccgacttttctgcgacaatatcctcctaataaaattgaaaaaaaaatatcatagacaagatatttttgttggttttttttttttt

SEQ ID NO: 79813 - DNA, 3692 bp, Cannabis sativa
tgtgttcatatgttatttttctatagcttttattttttctgtgttgaattattatcgtgaggctcaaatttggttaacgaaaatctacgttaacatacatatataatacttttgagattttatgaaatattttcattgataaaattatgaaaacattccacttgtagtatttcgagtatagccacttagattctatcttccaaaaaaagtactcttatttttcgtgttttttgaataataaggaaggttagtacaacagaagagacctttcactcgtccttctgttatcttcaaatccaaataaactgctgacattaatgttgaaactattctctctatggtaattgaaggtcagctattattttacttttttagttttttttcctaatgaagctaatgagaaaaattgatttatttatttcaatggcaatctgataatcaattgtagcatatagtatgtatatacatatatatatatatttatatattctcatgtaaacttttgttgctgtaattttaagttttgtgtagattatttttgttgtggtcatagtctttcattgtcttttattctttgagaaaatgtttctttctatttatgtgatgaagtcaactattttatgattagtttcatgttttaaaagtaaaatcgtaaattattctataataagctaaaataaatgatgggagttgttagtaattttagtttgattgtattgatccaggtaatggctccaaaacagctaaatatgaacttttttcttggtttgaacaaatgatatgttacgaccaacaaggaaatagctccaaggccttttgactgcgaatgggtaagtctattgtgttagtttgaggccattatatagtgtaattttttttaagatttaaatttagaccattttaaatatttatttgttaaagtgacattaactttaaaaattatgaaatatgacctatatttttagttttatgatagagtatagacatttttttaatttaaagctttagagcatattttcttttactttttagaattggatttcttttttaaaattttcaaatgtaattgcttttaattcattttgtaaacattttccacttaatttactattcttaaaacatttttttagaattaccctagttttggatattccaatttaaatgcttgggtaccaagtaaaaaggtatatacttgcagtgcactcaagtggcatcatcacgaccgtacatatcatcaactagacccagcacgatctcaacggtcgtgatccaaccgctcccgctgtgacggtcgagatcatcagactgcccatcagaaattcccaagcttgaaaagagggtcctgtcgtcttccacgcgaactcatcgattctaggttctgttacagaagaaaacgaagttatgggtggaggaagaggaaaaggaagaggaggagggagaggaagaggaagaggaagacccaacaatagtggcagcaagagcagcggtggtggcggaaggaaaagaggaggaggaggaggaggagcaggagctttgttcattgatggaggtttcttatctgattggtccttcactccatcgccttctcgaggttcttatttttcttctcagtgtatatatatttctctttggggttgatgatgagcatttgagatttgggtcgagtaaatagaaaggaaaggggaaaatctaaagttttgatgtttttcatttccgataacatatagttatgggatagggatgattcgggtagagtttatttttcatcgagattgatgattctgctggttaatgggcagaaaaatggggctgctattgattttgtggttcctttgtaagtattattcatgattttaaaatttcagggaaaaatcccagttccggtaacaaatttgggtccaaatctgaaagcttgaatcgaacaaaatcagcttctggatccaaaagtgggtctcgattgtctggggggaacactattgggtttcaatacccttcggttgattttaaggttcgttctattgcttaaagattcctcttctgttcccttttggaatttggttactcgtataactgttgcctgaaacaaagtagagttatgttttgaattggttttcataacattccctttcaatggattgatattcttatagagaaaataaaaatggagaagaaaaaatgaataaggaaacatggaatttaggctctcatctttttggggactaaaggggtaaataatttaactgttcaggtctttgcttctcgaaaacttctcatgtggaaatggtttttctccccaatccataagaaaatgattggaggagtaaattttaattttcaacttacattcaacagacattgagatgatagctttaaacaacatatgagagttcagattcgctgactggatggagcaattttattcaatatttggggtagtgattgttgagctattcatcatcaatagacatttctgatgatggcttaaaaacactatgaaaccatctttttcttttttttttttttttaatgaactaattttgatcgactgtgtatgtcttattatttatgttagcaaatgattcttcattcttgataagtcaatgaatttaaagatgcattgaaatcttaataaaggattgtttgtcttatcttttggagttcacagataggctcacgttttgagaacaataaagaagacagtaatttggacgattctctcacccttgctttagttgattccaaggagtcccagatatttgcttatgtagaccagacaccatcttcaaagtcccaagatgtggcttatacttatgattacagttcaggttttaccttaggtgacagctctcataggggattggggtactctgatgaacttgagggaaccccaagtgatgatgaagcttccttagcacaaaatgaagagaaggaaaacccacttttcaactccttgccttccgagcaggatatggatgcaaaagagagaaacaatgatgaaataggtgttgcgaatgctgaagaaccaccagcagtgatgtcaactcctaagaaaaattctgggtttttgtctattggaggtgtgaaactgtacactcaagatatatctgatgaggaaagtgatgaagatgaaggtggggaatcagctgacgaaggatgttcagggtcttctgagacggggtcatctgaaagtgatgactctgaagacacatctgacagtggttcggatgttgacgatgatgttgtagaagattatctagagggaattggcggccatgaaaatattttaaattccaaatggttggtaggacatgaatttgatgattcagatgatgatacttcaagcagtggctttgataacactgtaaagaagttgagtggaattgctcttcaggaagcatctagggattatggaatgaagaagccccaatcaaagcagaaacacagtacagctgtaagaggttcttggtatcaatctttagatgactgtatgctcataaaggacccaagaaaagtttttgctaaaaagaagcatgttgctcgcttccctcagtcttggcctttaggggatcagaagagtaaaagttccagaactattcctggtataaatttgattaaatgcttatttatgtattatttcctttgcattgttttcacggtttaacatgaatttcagtatttgtctttttttgatt

SEQ ID NO: 79814 - DNA, 1560 bp, Cannabis sativa
atgagtgtgatatataagagagagctttcaaagtttttggatattaaagatgagaaatgagaggatgtggatgaggattgtgatgatcagatgaacaagttgtatataggtcaatgactcaatacttaacatcatattaaaaaattaaagtcaaacaaatattaattcacatgacccacataaaacccaatcagtgtttacaacaaagaaacggctgggaaggaattaaaaatatcctcacacttaattgactttcctgagttagataagttgttgtgtttccaaaaaataattaataatacaaaaaaatacaaaacttgcaaaatgattgataatataagttataataataattaaaaaaaaaattaccgttactatatatgtactcaattttctttgtctcatcctcccaaactttccattttctcatctgcaattcaataaattcaatcattagaccatattaattttatagaatatgtgttaaactaaagtgataaacttaaaaactactcactttggttctaccaatagccaaggtagtaatgcaatatataatatggaaaagagccaagacaaatatgaatatatgaagctggtgaatcccatatttagacactaaagcaactttaccctgcacctcacacaaaacacacaaatcatgtttcaataatcattaaaccatatatattaattttatattattacttcatgacatgacaccatacaatattcaaaaagtccttcaaaaattcagaactcattaaaagcaaaagtactactactaccacacacttttagtatacgtcctatcattaagacataattacattaattaattgttttcttacattttctgaacaataatctattgtttttgattttggtttatctgattccttagcctttttctcttcattattttggtatgggcaaggatgccaagtgtttgctgcactttttggaatacatatgtcagcaatgtaatcttggaatattgttaagagcagcgaaatgaatcccaatagcataagctctgcaacacacaaaaaaaaaaaatgaaaacaaacccaattaaaattagaccaaaaaaaaaaaaatactaataaatgcacaaaagaatatataaaataaataaagtagatgtatgtacctaatttaatcttctcaagcgcttcctgaagggcttttttgtgtttggattctaaccactaaaaaagataaataaccataaataaccataataactgatagtgagaacttaaaatatatatacataattgtaatgaaacttacttttcctatgagatgaataacatgttcaatgattatagatatgataatcaacacaaaaaccactacagcaacagcccaggttggagtttcctccaaactacgctcttcttgcagatcagccattataataaagagtttatcactgtataaatatatatatcaattataatatattataatataatgatataatgaagtatacaaaaagagtctcagaaaatgtacaagaaatgatatggagaagaatggaaagagagcaaagct

SEQ ID NO: 79815 - DNA, 2338 bp, Cannabis sativa
aatcatctcgaatgtgcaagggcccttctgcatcaaaaaacgaaacaaagcaaaaaactcaagaataatgaaaaatgcataataagtcaacaaacaaacataagagactctggtccgcgttcaacaattgacatcgttgtattttaaattcctgagaaaaaactgtgtaatgtccccacactctagaaaagtaccatactagaagaaacacaggtagttcatcaaggtgaatggatctacctagagttttgtgagggtggaatgaagtgaatggactctctactatatcatctactctaagcaagtagtcattgactgaatactggagatgatccagtttcagagattaaggatcgaacccatcctttgcaacacgatcaaactcctccaaatgaggagcatgtgtcaaatggaagggagaattacctctaccgaacatgctagcacctagagtatgtctatctaaaaagatggcagcgaaacagacttttagctccctagccttattcatgggttctagattcctcctcgtccactcctccatccaccacttatctttcttgacggcctactttacccaatttgcaactatctcaacaatggcctcctttacatcgtatggatcggagcaaatcccacaagaattgggaggagttgtgttctggtgtggggatagcagcctaaccctcctaagcttctccatgatcatcgaaccttctacttttagttgctccggatccatactgcaatagaacttttacctctctcagaaaagaggaccatgcagagcgaggaaagttatctgaaaagtagataagtaaaggttggataagattccttaaaatctggagggttatttaaagggaaataggtgggtaaagtttggtacttacccgtgacattatagtccaacgtgagagtcagatgcctcttcagtggaaactcgaacatgaagaactagtattctgtgaagttgtgggggtgtttctaatagctggttggacataccaccttcaatgcgtagaagccaatcttggtcttgtccttcctcatcatatttgactctaatttataaaaatacaagatctctttcagagacaggagctctatagattgatctttacaaagaatatatcgtctgtcatctcgcatacctaggtttcacaaagtttcttgaggtgcgtaacatgcatgaaccaaaggactcatgacaagtgcattctaattagggaaagtgaaaggtttgcgggctttcacaacctattgccttggaattccaaaaggtcgaacccgttcacagttccgcactcaacagtgaatctgaaaggaagctacaagtctccatgactcttgaaccctaaaggcttgggaggtaaatattatctatgtttctggattagtgacacatgtacttccaaggcttaaaattaactaagataggcccattcttagggccaattaagttaatggatcgacccataagggattggggttacgacttcagatccgaccacaagtccaactcatagacatgataaagctgaaccatattggtcccagaaggaccattttcctagaagacaaaaggtccattaaagtgtatccggataccttcatggggtaatccgaaataggcatgaagagacatttagaaaccatcctacatggcatcctctagacacatggtcctaccacgtcagaagtttgtcccctacgtcagacatgttagtgcgcgcactaccaaaaggagcattctttttgtccaacaccatattctctaacatacattgtacacgacgggctgcgcatgacacctgtcactattaaaatggttcccacacatacaaacgaccgttatctcataaagtgagcattacttaaccgacccaaagtcaatagaaattgtattctatctcatcagtgggcttagttaacaaattaaaccataacaagtttatccataaatttgactcaagcctgtaaataggacattgcctcttcatacaaagggttcgaaaatcatttcacaattcaagggctaaaaagtagggttgaactttggcaaagaacactcttgtgtaataatactctaaagcttttcaaacttaataatattgactcgggaacttaggctcattaacacctgatcaaccacgtaaaaattcgtgttgcattacctttaatttgttcttctttaaacataatttatttcttaattggttttcgagaataactgtaatatttaacggtaatatttaactggcgtgtcaaatttgcaaagaaaaataaacataagggggttttgccacaaaaaaagataagggggttaagtgtaaaa

SEQ ID NO: 79816 - DNA, 4187 bp, Cannabis sativa
tgacatacttcagacatgatgacataaatataaacaagatggatgacttacatctaggatagaagatacatccaaaattggtgatttacgtccaagattgaaaatatatctaaaatggatgacttacattcaaaatagaagacatatacaagacaacagacttaaatatcctacttaagaaagttacacgtcttgaatagaagagataaaacatgaacacttaagataaaataaatgacacttgtcaaagtatgtaaaaacaactcgtaagaaataatgggcatatgtcaaagtacacaagaaaattatataaatagaatagaattcttttggggctaagaagaaaaatcaagaatgaacaggaataaaaagttccaaaaaataatacaaattaattgagatttgccaaaaattgtcaaaacactcgtagtattaggaacaatgttcttggttttctacttttcttgctatggaggaggtggtggagcctattgtctccaccatcaaccttgttttctattcctctttgattttgattgttttataatttgaaaaaaaaaaaaaaaaaacattatcttgtacgaggtgtaaggataccattgaacataaattgaaaaggtagttacgttgtaacaaggtgattgagtgggtcacgtgcccctcgcgtgggaaaattgcagacacgacaatggaaacgcatttttatattcagaaagaatcaaattaggagaaagaatcaaattaggagacccattgttttcttcttcttcttcttcttcttcttcttcccattctaagttttttctcttttctctctcggaggagagagagagagaagagagagaaaccaaactcgcgaaatagatattatcaagattacaccacttctctccctctagggtttcattttcagtcttgttctattaccgcacggccattgctttctcccaaagattctttctccaatttctatctttcttcgtttttttccgattccactttcaggtttcgtagatattgaggtcagactatcttctgctgattttgattcttattgcttggtttaatttaggttcgcattgtgtgtgtgggtgcattgctttaggcacaaattttgatgagttcttatgcttttcttctcttttctttccaatggagtttggacagtagcgagggaatttgtactttttttttttttggaaattcatggagaatgtctacttatccagttagttaacatgttgctacttagctatagctttattgagatgaagattttgttttctttcgtaaattcaaaaccaaatcagaagaggtgacattgtcttgccaacttcactcgactcgacccttttgtgttgtataacgatatttatttgttttgtcatagttgaattttcaattttgtgtaggctcttgccccattgtatgttaacttatggtgcagagtacttttttgcttcccaacaccataatgggtgtagcgttatgaccatagaaggtaattttgctggtgttagcttaacaaatatacggctttcaatggtattctcacttggaagtgggaggatggcggtgatggctaggcttttagcagcggggagtttttcacaaagtgtagcagcaggtacatttggcatacatgtatacatatatattatttatatatacatgcacatatactttttcttcttttgtcacttgtgtggccttttgtaaagagacgagaattgagaattttatagtccgcttattgtacaatcatgctcgtcatcatttttttctaaatattatattattgttttggcagaggaagctggacatcagaaactagctgctacgttgctatataaggaattaagagaggcagatgagccaaattttcttgatgaagaaggtaatttgtttatttctttatactttccgcattttaattcattagctatattctttactaggaagctaaacttccacaatagtttgataaaattagatggtgtggtcaatactaagtagaatatatgttaataaattatttggcttttcaaaatgcaagacaatacttaagttgtgatttttaactttgttctattaactttgttctttttgggtgcttaattagacttttattgatttctgcctggttttagatatgcatgtctttggtttgaagcccatgtctgatcctttgcatttggtaagtctacagtttatattttaccaaattaccatgtactaagaattcttctcaactagaagagaaattcgctattatcggaaaagatagatgctttttaggttttttttttcaatgaaatttaacaattctaagattttgctttcttaacatgctttcatttgcatgcatggacaaataatctatttcagtctctgattgcttaatattgatttgaaggtatgctgcaatacttgtaagagaccagtccaggctagtcaatatgtagctcatgcaggtttggaggggattaattattttttgtttgtattattccatcaaatttcgtgattccatgatatattcaagaaacgtactcctttgcaactcaaaacacaatgaagaagtgtgtatctcataaacacagtgacacaaacacaaagaagaagcatttagagtttattatataagctttttagcttcaaatctggattcatataagcttctgtggcattttattttatcatatatcaatatattataggcccaactttaattcaagatatcatgcctattttagggcttttttaaaagaaaaagaaaattgaaaatagggcctgaatttaatccaagatatcatgcctattgtaaggtctgcctttttttttgaaagaattctaaggcctgaatttaattcccaatgacttgtctcatgtattacccattccatttctatgttttccttgtctgcttatgcttctactgaaatagtttttctttttcctcccttatggatctctgcagaattttgtagaatggtaagttctatagaagaatccatgttggatgttactggcagtgtggggcatagaaaagccatgagaaaagagaagagaaagccactcaatgcttatgctagtatcctttttctttttcttcatgacttacaacatagttgtgaaagccatggctagcttcagcaattgggtgtgtgagcgtgtgttgtggtgttgggtttaagttcctgcagttgtctcttatccaaaaatagaaataataaaatatttctggaagcagactgttcttaaatatttattacaaagtcttttcatttttgtccataacctattttagaccaggctattttagttcgggaagtggaaaggtctaaatctatcatagtaggtgatactgttactgcagaatctcggttgaatgggaaacctgggacaaattcttccttcacttttgacagaaaaagtaatttcatcttgcccttagtttgtctatcttattttgtatagtttcttgtcatgtgataatttaatatatcattgttttaatctgctaaatttcttggtaatgaaacgattacgatgcattgcttctttaaaggagtgttcatcacttatctgtggttgttttaggcaggatgaagtgtgttatatgagggtgacattgttttctaattcccccaattgctatcatacatttttcaagtgtatttatataacatcaggaggcaataaaaatcatacagggatagccttccccgattgattttgttagactaccattacgacaagtattaatatttaaattgcttgcttgattgtcttgctgtctcttctaggaaattcagcctatggagatgccgaacatttgatgcatggttcagcagttagtcccggagatgatgataactcagctggcgtaatgactcgtgcactaaagcgttctaaattgtatgttttctttccctagaatttttatttacactgatttgagaatgttgatttcgtgcacattgtttcaattaaacattgtgccttataaatgtacccagccgttaatatttttcttattgcaattgctatatttattgcctctgtttttaactttttatgtccactccaatgagatactttattctactctcattttggaagttttatatgacagatattatataactttgggttgcagatgtagtaatttgggttgcagatgt

SEQ ID NO: 79817 - DNA, 1869 bp, Cannabis sativa
tcactttgtcaaaaaaaaaattataaatattacatatttgtcacggcataaggctccgatcgtgacaggttagataaggagaaggtatggaatagtactctaccaaactcataaaatattgtagttatacaattattatttttttttttgtttatttttccaatgaaattataacttttcaaataaaacatagatgacaaataaaaaattataattaaattaaatttggtaccacataaaacatacagtacgttcatatatcacatatatcagtgggactatagtatgcttaatcataagtaaagccctacaattagaaaaaaaaaaaactttaattaatgggtcatgacataggcatggagtagttttatgaaagcatatttatattttgaagtttcctttacagttacagatcatattatcttcatttagtttttccgcgtggatcccactcgacattttgcttttgtgcaacatatatatacatacacttgtgtggatggtgttttttcctttatcttccggattcattccatttggtagagtacatcgtacttggaggaattgtgtgaaagggaaatatatttcacatttgcaatcaattaaaataaattgaatacaaagaagaagactcttctagagatgttttatgctatagtccctcataagtatttgttcattttattcaattttagttacaatgaatattaaaaaacggtgttttataacacttttatttttaattttttgtaatcataacaataaaatgagaattttttattgatagttttaaggtaaaacctccttaaatttgtgaagtaaactttctctctggatgatagatgtgatataagcctgtatttcacaccttcttctctaagtagagaaggaaaaagaaagcaagatatatatagagaaaaataaagtgtaatgccttactaacttaggcgtgttataatgttttttttatttactatgtacgcctttgctaaccgaaggatttattgaaaagtatacttaacaaactttttaaataataataaaattataaccaaaatacaatttacaaattctgggatcccatattattttcaaacataacaaaatacacaacaacaaaagtgtcgcccaatgactaataaaccgagcccatatcgtcccgaaggtctgaacattccaagtctaactgccttgaaatgtacaatattaatccggctctaaactcactgctgctcagcatttgctttgcccttaccaacactaagaaaacaaatatgtgagtcgacagactctaaaagaaaagtataaaatataaacatataactgacctgtaattaggcactcatacacctaatcacaaagtctatttctaagtctcgaatgttctagacaaaagcctagcatagatatatcggtatctcagtgaaactctatgtacacttcaccaataccgtgatatgttaatctgatggctttataatttgcctaacatatatctgtcgatatctcagtgcaatctatgaacactttattagaatattttatatttatggaataaaataaaggaattgattttgagataaataaatatttcacattcattgaatttggacaaaattaattaggggatattttatatatgctcagattttggtattcattacctgatttgatttcctgaattaattgtcaaaatattttgataattaatgttgcgcagatactaatggagtatctcacctataaataaagggtttcactccccgagctctttattcattctgtgaaaataacaaattccatctaaagagagttgagagagcgaggaagcccaatttctcataccaaagctgtaaagcccgcttagtt

SEQ ID NO: 79818 - DNA, 3430 bp, Cannabis sativa
  modified_base (809)..(813): a, c, t, g, unknown or other
  modified_base (910)..(915): a, c, t, g, unknown or other
attattgggtttattttttgaaatttgaatgaagcctaatcgtgtaaaaaaaattcaaaaattggagatataccatttgttagagagatatgattgttaagttaatcgtgtaagactaaataaaaaaagaatcgttaaaccaacaattgccgttagataagcactttttatatataaagatattattcaaaagtaatataagatttgtttgcagaggcaataaatttctcttaactttccaatgctgtgaaaaacaaccagactagttgttgcattcataactgatccatttgctaagttatcttggcagatcgttctctggaagactcaaccgaattagcttttgcagcatatatagactttgtagaagacaccctccaagaaattttcagaggtgtaataaaggtaaatggagagctgtcaaaatatggattgatggatcatttgagctcaagtctagaacctctaaatttgggaaagattgagttgatccaaactgcctaatgagtaatgattaagagagcttagctttacaactttcccagtatcattaacaggattagtcttcaatcccaaagaagatgaagagttgcattttattccattccattgacaatattgaagaacattgtcccacataaattaaatgtaaaagtatagagccatatataagaacatgggctactcttccacacctatccaaatggtgcaaagacgctggtgagcaaaaacagccactattcgcacgagatccagatcgtgcaaagacgcttgagatgcgaacaaaaataagtgagcaaatggcatgnnnnntgataagatgattcaagattggtgagtaaaaatagccaccatcttgaggggaggatattagagaacattgtcccatatggattaaatgtaaaagtannnnnncatatataagaatatgggctactccactcatcaccaattggttttgagatggaatcccatgattcttatcagactaaatcaaaataggaaatccttcaaagcccccaaatcatttgggtaaaattgataggctttcaggtttcatagtcagagcctaaaattgagtgggagaagaagaagctgtacattgacttaggcctgtggattagtctcaactagaattgagtgggagatattatatcattaaaaagttccatatcataattgatataaacttaataagtaacttgaatacaaagtattaaaagaaaaaaggcaaattatttcttgaggtcaacaagggtgatgaagacataaaatgtagtgagatagaatgctgcgagtgcataatttccaggaatactagaaaaccaacctattttagtctctaaaagcagactccttagctctgtcttctcgtgcaacaaggcgtttgcaccagcgacaaaggcacacacaaaaaaaaatatggaaataaagatgaaagatattgtgaccatagtaggatatctaaatctccttccaaagatcatggaaaacattgcaaagatgaagtggattaacaaagagcctgcagaaaaaccgaaagccatagaatccgctatcatgaaagctttgaaagctccaaggccttttttagttttgtattgggcagcaccaggcatggttatgactgcttgaaatgtgatacctgcaatgagtgtggtcaccaccaagttcatgttttgcatgtgttgtaaatctacaccactattttctttaattggtccaccaaattcggtcttttctatttgggtttcttcacttgtttcttcgttttttccatgttcttccaccatcctaaatccagtgtcttgcaaacttagaagagggtctttattcttggccagccgcaattttagtccaacaataaactgccaaagggaatagaaaagttgtccaaattaacgcttaaacagcctaaataaatcttatttagtcttatatctataagtcttattgtagattagttttagatagatactatagttacaagtctatagacaagtgaatacacttaagtagaggacataacatacctttccaattataaaacccgtaaatgttgttgatttgagaagaatctcaaacgcagttatccccatcttattggtcattctcttgttggtcattttattacttgtcaaactattcataattccataacgagaatgaatagcagcaacatgtagagctgtatttccttcattgtcttgctcatttataagataactgaaacctctctcattcagtaaagtacgtaccgcagagtgacaattgtgttcagcagcaatatgaagtgcagttcgatctttgttgtccaaaatctcaccaatatctgaacattcttccatcaattccttgatcacttcaatgtatcctttccttgccgcgatgtgaagagctgtcatgccttgtttatctttgatgtaagcaactgatcttttaactttcaagaataggtataccatgcctgtaagtcccatgtttgtagcatagtgaagaggagtccatcctaactcatcttctgctttttctaaaatctgggatccacatctctctaacacctttatagcaaattctaataattaagaaagtagggacagaattaatgctgatgaaaagttactttgggtaaaatcagataataagaatacataacagaaatatattgactacttaccgtaaaaatccttggccgtggtaacttttcttgaaagcagccttgcatcaactattacaacatagcatacataaacgtaaatgtattagtgtacgttgtagcataattccttgtaaaaccaaattagaaacacatacacaaaaaggtagagcaaacaacagtaagtgctctgtttgactgggcttttgcttctaattttagcttttcaggaagaaaaaaagctactaaagttggcttcaactttttagagccgaaagctgaaactcacttattacgcaaacagcagcagaagtgtttttgaagctccaaaaacacaaaatcagctttccataataggcataaaatctacttggttcttctatcttcaaccaaaatgggctaattctggagacacacaagaaattctcctcctcaatccctctaattctcaaaatactgacagccgaacaaattacaaagacaaggaattcactcaaactcactgtttctcccaacaacacaagcttacatattgttagaatatggtattaaattcctacacactatcaatgcaactaatgaaaacaactaatatcaagcagaaacagattagtattccacagtataagagtgccaaaagatgtttagatggattagagatgatgaaattagatatatacatacatgaagggcaagaacgaatgacagcagcatgcatcacagtcatgccatttcctcctaacagagagcaatgaggaaaagtagtgtccaaaa

SEQ ID NO: 79819 - DNA, 1234 bp, Cannabis sativa
cttattgatagtggagctacccataatttcattgcctcttcgttggtgacaaagttcggactccccatctctgcaaccgatccctatggggtgcaaatgggcacaggacaagccgttaagggagaaggcatttgcttaggagttccgatttctctacatgcagttgagattgtggaggattttctgcctctagctttgggaagtacagatgttatattgggcatccagtggttggagacattgggggaaacttatcacaactggaaggaaggaatgatgcggttcaagttaggagggaagagtgtggaactgaagggtaatccagcccttcacaaaacccgggtgtcactaaagacgatgattaagtctctacaagaagaacacgaaggcatgtgggtggagcttggccacacggagttgttagcgaatgaaagtgaaattccggaggctgttgtcgggttgctacagcagtatgctgaggtttttaacatgccaaacactttgccaccgccaagacatcgagaccacgcgatctgtcttcgccccggtgtagcccccatcagtattcgaccataccgttacccacatgtgcaaaaagatgagattgagaagttggttcttgaaatgttgaagggaggaatttgccagccgagtacaagcccattctcgagcccggttttgttggtaaagaagaaggatggaagttggcgcttttgtgtggactaccgggccctgaataaagaaaccatcgctgacaagtttccaattccggtcattgatgaacttttggatgagttacatggagccaaagtcttttcgaagttggatttgaagtcggagtatcaccagattcgcgttcggccagaagacattccgaaaaccgcttttcgtactcacgaaggccactatgagttcctagtaatgccattcggcctcaccaatgctccggccacattccaagctaacatgaatgccatcttcaagccttatctccgtcggtttgtgctggttttcttcgatgacatcttggtgtacagcccctccttggaagctcatgttactcacctgcaggtagtcctggacactatggctaaataccaattttatgctaacagaaagaaatgttgttttgctcagcagagattggaatatttgggtcacattatctctgaccaaggggtctcggtggactccaccaaggtccaagccatgttggattggccacggcccacca

SEQ ID NO: 79820 - DNA, 1365 bp, Cannabis sativa
aaaaaaataattttggagagattttagaccgccgtgtcaccgcctcacatacttctctttttatatatatatatatagatagatactgaaacgtaaaaaatgttattttccataaaaatataactaaaaaaattctataaaaaaagtccatcaaatggaaataaatgtatgttttagtgaaaatataaaagaaaaaaaaaaagaatcacgagtacttagtgtaaaaattcatttttctctatgagtttgaaacaaaaagattatacactaactataccatgaaaagtaaaaatttgcatatctcaaacaaaagttatagttaattttagtaaatttattaattcaattttgtttattacataattcaaattaagttttaggcaattaggaccctcaaaaattgatgacatgcatatattaaattacgtctctcgaattttttagaccgttaaaattttctctgtgcgaactattgtaatagttgtatttaaggactatcttctaattttactaacggactcctaatgtgaatgaaagttaatggaggcacaataggatacatgtcaaaatttaggagcataattggtacatattaaagttcaggagtacaatttaacacataaacaattcgtacgttaatcaaattgaactgaattaaacataaaccttgaatctaacaatcacaatagtttaagaaaaaattttaacaatctaaaatattttggagtatgattttggacatgttaaattaaggaaaaaaaattctaatatttactgcaatttttttaagatctatatactcatataaggcttagtctattaccgtatatagaaataaggaaatagtgcagttatattacaggatgcattttaaatgcacaaaaatatgtaggtcaaatgtaacataattataaaatcaaatatatttttttttatcaaattcgtaaaatatacaaatttaattaatatatatatatatatttttgtgcaattgaacattacatcattctataacaacaaaaactattactttaaatttagtcacaataaaatttgtgattaaaagtgaaaaaattgtaactaattataaattattattcttatattatgactaaaaggtccatagctaaatgtattagctagtcacaaaaattataatttgttgtgactaattaaatgtattttataatacttgttgtggctagaactaaactagtgtcaatttgtgtctaaatactatattttaattataaataatatattgttgtgactaaaagttccatttaaataaaaaaaatatatatattttgattaaaaagttgtcagtgacagattttgtgatgacaattaactatgctttataga

SEQ ID NO: 79821 - DNA, 2087 bp, Cannabis sativa
aataacattttagttcaaaaaaaaaaaatatccttttaataattccttgtttacccatctgctattgcaacactgaatatttttgttgatatagtgtctaatatgttcatcataaactgtcataggatggactgattttgatcaagggacagggagtggatcactggtggggcattggtatgatgaactaccaaactctgtgaaggaaagagtgcattccttaggattgcatcctttggtggaaggaattaatcaatcagcaatcgatgctcctttaatgcaagctttggctgagaaatggtgagacactacagatacatttagttttgagcaatttggagaaacgacaatgacacctcttgatttcagtacgatatctggattactcgtgagtgggaaaaatatcatatatgataaaataattcacaggaaggatgagaccatgaaccagattggtaggggagccactactttcatgtcacaacaccataacaacaactggaggcctatggaaagcgtgggaggtaagatgcacaagacaattacgaggttcatctttatagaagggtgtcatactaatggcttcaggttatccaacagagtttgtttattgatatggtgactagttattttgtttgcagatctgggctatagaatacttcccctgtctccacgtaattaatgtattccccaagatgattgtgtggaatgacacagaccctccaaggatggatcactcaaggctgattcatttttagaggaaaaaactaactgacatacctttccaacaggtatgcatcagttttgataggcagaaatttggaacaacaaaaattttactaccattaataaatttcatgttttattttaaagtaacaatttattgttttctaacttcaaatggttggtgaattggaatccttggggtgaaattgagtacgaaccgagttacatcaaacaaagtaaataggcaaacaggaggagaatgagtggtacctcgcagagcgagtaatacgcaaagttgtggatttaggccaactaatctcccaaaaaaacagccaaaatcgatgctgtcaagggggaagctaatgtggataacaacgccatggtctttcatggtaagccagctgcaagaccatggtgttgttagctgttaaaatcttcatggattcctatgaaatgatcaatgcttatgtgtcttaggaaacttggttggaccaggatagaggagagccacatctgaatggcaaaactgtgccagtataggtaggcttattagcttataaatagttactatatatactgctaaagtattttcagcttgtgtaaatgtttggttaaatatcttgtgtttggtaaaacactaaggacgtcaccaagaatattgctgcagtggcaaacaagctagaaaagaacatacacttaaaattctcaacgattacgcaaatataggatttgcaccaacaaagaatggtaatgtactacggcaatatcagtcaataaatactagagatcatcctctccatagttcattacatgatctgttttgattgtaatttcacaatttatgggttgcagggactaggaggtggcacctcaaaggagaaacattagtttgttcaactgatgaattgcgtttatagtatttaggtttaccaaccatgtaatgtaatttctgaaattagtttcattgatagtaaggtcatgcaggaataatattacacaattcagatgagattgtgtaccgtattcaaacttttcagtgtcatgaccaacttcattcagtagtgtctgtttatattcattgaaaatcatctctaaaaatgcaattataccttctttttccacctcacggaaaacaattttcaaaattaaacctcctatcgcccaccttaactcaaagttttggtactaaaaactattacacatcacctaaaactacacgtggtccaaagacaaacctatagataaaatataccaatcttatacggtacaattattacaaagcgtatatatattataaaacataatcataatgtttagttgattggtttatatataatttccactagtcaattgttggtgaa

SEQ ID NO: 79822 - DNA, 2733 bp, Cannabis sativa
tgtcactcatggtgtcgaggcaatacggcattgccagaagctcgcggagatcgcggtttcggctttgggtcagaagccggtcggagatggtcaagtccggcgagccaagaaggctttgaattcattgattgcggccatggcggtggaggacaaagacggcatcggaggtaaattttcagacagagcttggtcgtttgggcgaaaaggaggggcgggatccgcctcgagtaaggatcgaaccgtcgggcaattcaggtctctctggtggggaatggctaaagggtggtcggcggcgaggcagcttcaagcaatgtcgtccaacttggtggcgccgcgtggggctgagtcaaccgggttagctcaaccggtttatataatgagcactgttatgatgtttacgatgtgggctttggtggctgcgattccctgccaagagaggactggtttggcgactcattttccaataccaaggcatttgtcttgggctcaacccatgatcggattacaagagaagatagccgatgagtggaagaagaaggagaagaaagggtcatttgggttattggatgagatacagaaattggagaagctgggcttttcattgacggaattcgccgagtcttttcagtttcaagcagagtctgatcggctcgaagaggtggcgacccaggtggccgaattggctgaaacttgccagaagatggaggagggtttggttcctttgcagcagcaaataagagaggtgttccataaggttgtgaggactagaacagaggtccttgaagtgttggaccaatctggtaaagtgtctaccccgacaatgtaaaaataattaaataaaatatatgtgtggtttaatgcttaatcactcactaatagtattgaggtaaaactaaaatcttcatgatcccttgttcaaatatgatcttttgaatcctttttttggttcatgaagacatggactcattgaacctgaaaggttggatcatagtggtgtgtccatagcggtgtcaaaatattttgattgagcttatagcttaatttaaccactcagggtgtggtgaagtttgcttgatttttttttctttttctttttcttttttttaagcttaatgtgaattcttctctttttgagtaacttgtaattttgttattttggtttttttgagtacataaacactctaattaaagaatgtagataaagataaccaaatttttatttgttcttgttatgttccccaattcacgatggagatgattggaaaatttgcacgccattaaatgacagcctagagaatgtggttgccatgttcatatgtgttctggtttttctttctttttttttttttgaaagttgtggttgtcatgttgtgggtggtgccgatttcgttggaattagtccctaataaaaggtatctactgtacattctacaaagagaggaacaattatcgacttttgatcacattaattatatatataaatattttaggtatattggacttggtataggccttcctaaaaacaataattcataatgtttctttgaataaataaaaaaacaagtgaagtgaatctataaatataacaaaaaggtattctaccaaatgcatgacgacagtgacgacttttatcctatacttgtaccgaaagaaagagtaaacaagagaggacttcgtcagcttgattcttcttggcgcaaatagataagcacttgacagtgatgactgatgaggttaaatatattttactcaggtcactcttttgtatgcaattcttgattatattattatatagttacttcttttttcttttcttttttttaatggaaaatcaaattttattaataattaacttctcctaccaaataagagaacaactcagttagagaacaaccataatcaagctatgcttgctaaacaagcttggcgcattttcacctctccggactccttggttgctcagctcctcaaagccaagtactttaagcgaaacgattttctgcacggtgctattggtcactcgccttctttctgttggcgtagtattctctggggtcgggagctcctgcttaaaggcctcatttggaaaattggggatggcacctcgattaatatttctgaatccaattggcttccttctcatgataaagtttttttcaaacctgggatcctccctccttctcacacagtttcctttttccttactgatgatcgacattgggatttagacaaactaaggacttactttgatgaggagttgtgttctgccattctttcggtgcccattgatcctcataattctgatagcctcatctggaatcatcatccctctggttgttttactgttaactctgcgtaccacttggctaactccagctgctccactcctggcccttctaatccctttacctttaaacgttggtggacctctgtctggtcttccaacattcctccaaaaattaaacacttcgtttggaaagcgttccaccacatcctccctaccagccttaatctttttcatcgccagtctgctccctcacctcaatgctccatttgccactcccaaattgactccaattctcactctctaattcaatgttccagagcaggtaaaatatggaaaaactcttcttttcaccaattttatcttagtaatagaaattgtgatatcaaagaatttatgcttaggggttttgattgttttgataaatctgaattgtctacttttttggg

SEQ ID NO: 79823 - DNA, 1881 bp, Cannabis sativa
agggggcaaaaattataattagcttaaaaaataaaaatgtgttctataactatttttttttagttttaaaaacaaaaaacaaaaatgtgttttgtaactacttttgcttttttatttatttaagtgagaaataagaaattgagttgagagaaattaggtgagggttcaggtttgggtctaggtctaaggtccgatgtccaggtaccaggtcctatgtttaggtctgaatcacgggtctcgagtcagggtctgggtcctgagtcctgagtctgggtttggggttcaaatcttggttcgaggtccgattgcgagtttgggtctgggtctcaagtcttgaattcgaatctagatttgggtttatagggtccgggtctaagtctggatccagggcgaggttcgggtaaggtgtaaagtcggggttgggttcctcgctcgagattgagatccaaaatattaatagagagagagaaatacaaatagactattattaaaaaaaaaagttgtttaaaaaattattgaatgtggtcttttttatttcagttttataatcaaaaagtaaaaataattttatagaacatattttttgaaaatatttttatttttttgattaaaaaaataaaaagctaattgaaaaagtattgcaaaacacatcaaaaagtattactaaacacagcaatcacaactgttgaggtaaaatatatagctaagagcagtctcaatagctactcttctctatcttttaaaatagctcactaaaatctcactttatctattttgcctcacgcatttacattaacccataaatcatattctttatattttatttacatcatttaatataatatttttaaacatcttcattaattaaaaaaaaaaaaaggaaaatttacagcgaaagtccccaaaaaaattaatttgatgtagattagtccctaacttctagaaataggtgtaataattgttattaggatatttttagcctattatttgtgttattttaaaagttaattttcttctttgttatcattttttggaatagaattacgcttgttttcgtttatttcaggtttcgacacttggaatgtataaattggtcaaatctcacaaaaagatgatctataaaatagagaaaattgtacaagaaaataaagctgaaacttcaagcttaaattaaactacgttctgattagattttggagaaaatcaaagcataaaagttctagatctctcttttatttttccaaaacatcttgaatcgtccaattccgaacaatatcgagagaattatggtcaaaatactattagtcgatgcagcagaaaacccactacccaaataaaagggggtcatgcctaggcatgaatcatgaaaatctcatgccgcggcccacccctcctaatcctgaaaaaaaaaaaatagattttcagggtcttatatctttttttgttatcattctttggctataaaagaagtggacttcaatagttttcaataggactgaacattttgagcgggttcgacccagacccagtcaatccgcaatttttttttaaaaaaatattcaggcaggtcgggttcaacacggtacctttcggggggtttgcgggttaagtttttaggaccactgggtttcgggttgaatccaaacccgcccaccaacctgcatatttcatatattatacatattttttaattttttattacattttatatattaattaaaaaataaaaagaattaaactaaaaaaccctcaacttccttttaccttttactatggatatggctgtattttaaaatattttagttttcacttttatcatgattcatgaacatgaatatgaagtttgatttgaatctttgataaataggttgtttgtttgtt

SEQ ID NO: 79824 - DNA, 1567 bp, Cannabis sativa
  modified_base (1018)..(1019): a, c, t, g, unknown or other
gcaaataattggttggctttaggaatggcagatggcttacgaagaacgggatcccattttacctggtctaacaaccaagatgggaaggaaaaaatttactcaagaattgaccatgttttcaaaaatgaataatggattgacatgtttcctaattcttttgctaacatgaattgggagacaatgtctgatcattgttcttgtgttgtttcttcatttatcattcaagacataggaattaaaccttttaggttttacaacttatggactgatcatgaagaattcaaaaggactgttctggaaagttggggtcagccgatttaggctacaggttttaaaagcaattcatctcaaaagtctaaggttgaagcattagctcagaggttttaacaaaaagactagagatgtggagattaattattagcatgccaaggatcagttgctgagaactaagttagctgctcaagctaactcgggggatcttactatgctggaaaatgaaagagctgcagctgctagtttcagtgaaaaagataaaatgcttcacagctttcttctgcaaagaagtaaagtaaattggctaaaaaaaaagtgatgagaataatgtgtattcctatgtctatgtacaataaggccttagtaggctttatctcgattatagttaccgagtttaacctgattatgccttgctcgcataaccctattcatatttatacgtaatccatacattacgttccttcgatggtttatcctagtgatacataccaggtctaacccagttacgtcttatacacataactcgtaatatacatgcatgcattcaatatataccataacatataaaatcttttggtaataaccctaacttgcatactaagtaattacccatataacacgttacaatatactcaaataacatctattaaggatcttaaccctaattcatatattctctggattagtaatattaccatatatcatcgctttcttacctcaaaatattctagggtaataaccctannccgcattaaaattaaactcaaggtactagtttactgagtttagcttaattatgctttagacacataatttcttattctaacatatttagcatggcataacatttaacatcttttaactactagggtaataactgtagaccatataactgctcattttagggtaataaccctaatctcggttattgattactcataaccacaatataaaacatgagtgtcaccgtgcttaactctacgtgcaatctactgtcttacctgatgtcctacaaaaggggaaattctaaatccccgggtgctcctgaccaagtgccggcaatcctagtcacaacttctgggatttacacatatagggctaatccctaattccacatttataaaatatatactttgcattcaaaacacagataatcaaatagagctcagaacgagctttcctacggtatgtagaactcccaaatcagagtccggatcacaaagttatgttattcgaagtttgcatttagatcttcacagaaacaaaagggggggccgcggcgcccaaatgctgg

SEQ ID NO: 79825 - DNA, 2032 bp, Cannabis sativa
  modified_base (1968)..(2007): a, c, t, g, unknown or other
atgccaaatctattaaacaaaaacaaaataaaatgatgttaaattttaactacaaataatgttaggtaacaaaattttaattgacaattaatttttgagtttaatttcaattcaaaattcaatttacaattaagagcatgttcaatgagaatttatttaaaagaagtaataaattctacttagacttaccgaagaactcgccatctatagcacagtgtagaacagtatcaccattatgccttctacaacaagtaatcgcggtttcatgccgagttttcttcaagattgagttaagataaagaaaagcgtccttcttgccatgaagagaagccaagaagagaggagtttcacccatattattctcaatttcaatcaacgaagctgcctgatcagaatagggtttggtgatggcccgacacataggaatgttcccaatcaaagcagccaaatgaagagccgtatttcccacctcgttttttatttcaagaggttttgagtacatctctacaattttctctcccttttccacaaccacaaatccatcatcttcaacaggctccaaccagatatcattcttctcaagaatctggattccattagtcgacttttcttgctcagcctttactatttgattcactagcttctcaacaatctcctcattaccatcggccacggccacatgcaaggcggtgtagccagatctgctgatcttggtgatgtgagaaatagggttttctaagtataatttcaccacttcttcccaactccgttgcatggctcctcttatttcaccaaccatctcttgcttcatcttagctacattcttagcaatgtagcaattggccattgttgccttgttaatgttgatgagtttggattttaattcctatatgtatattgtatttgtgtgttaatttgagaattgttctgatcttgcaatttactttttctttaacatatattctagcttattcttacgtgaacaattaactattcatgaaattatactttccttttatgtcaaacttcaggatacattagttagaaatcattaagataatatacattattataaataaataaacatgatgagtaatctttgaagaatgtacgtacatcttaaatttattcaaccaagtcaaatttttcgtctcatataactttttttttagtttaaaacatatttttattagccacaataataaattacttttatgacagttaaaatattatatttaattacaaaattgctattatattttttaaagtaagttataagtcgtgattaattttaagttagttcagatttttgcttctcgaattttagtacataccaaattatatcgctgaacttctttttaagtcattaattaaaaaaacattctgaactattgagattattaaattcaatgaattatcttcaatccggttcaattgtattactaacacagcgattgcccatgtagtattaaatcatgtaccctctgaattttgatatactaaattgtgtctctcaaacttttacaaaatcgtaccccgtgaacgtccacgttaggcttccattagtaaaattggacaaaatttttaaatctaataattcggcgaaaatttttaacgcttaaaaaagttcaggatataatttggtatattattatatcaaaattcgaaggacaaacaccttaatcaaccttatttattttaatgatgataaatattgttgtgactaaaaggaaattttaaaacaaaataaattatgatttttataattaatattttttttaattacaaactatttagtaattaaatagttacaattatatttttttagtcacaaatgttctacttctaatcaagaattgtgctgcaactaaaaattaaataaagatttttttgtaatgagtacacatttattatacttattataaaaatatttgtatttagtcataataaaacttgtgattaaaagtnnnnnnnnnnnnnnnnnnnnnnnnnnnnnnnnnnnnnnnntcttatgttgtgactaaaaagtctg

SEQ ID NO: 79826 - DNA, 2683 bp, Cannabis sativa
aagacaaccagaatcaatcaaaactgaggctgttttgaattcatgaaaaaaaaagtgtagaaaaactactacgaaactaaacttcaaccgaaaatccagtttaatttgcataaaactaatgttccaactttaattttcagattcatgaaatgcagatctcaaacataaatctctttttgaaattcttaattctagagtccccaactatgaccacttaaagacctttggatgcctagcctatgcttccacacttggagctgctagatccaaattctcacctagagctattccatgtgtttttctaggttatcctatgggaatgaaagcatacaaattgcttgatcttaacactaataggatattctgttctagggatgttatattccatgaacagatttttccttttgttttgaatggtcaggtttcatttggttttcttgatttttttcctgctgatgcttcccaaaccagtcctgctagacaatatgtttcatatccattgtcaactcctcctacacttgacaatgatgatcttaattcaacccaacagactgtccatagcagacctattcctcatgtgtacctcataatgatatccttgatttgcctcagtaggttgttaatagcaaacctactcgaaatgttcacaggccatcctatttagaggattatcattactatttgtccaccaattctgtccacacacaagaactaaaagcttctactaaatactaatcattctacttctgagattgttgattacaacaggttgttaccacagtttagagctattgtgttaacaatttcaagccattatgaaccagaatactttcatcaagctcatggcatacctgtttgggatcatgctatggacaatgaaattgaacctcttgaagctaatgacacttgaaatgttgttactctacctgctggacagcatgctataggctaaaatgggtgtataaaatcaagtatgatgttgatggttcagttgaaaggttcaaggctcgacttgttgccagatgatatacaatcaacaagagggagttgattataatgagacattttcccctgttaccaagctggtttctgtcaaactcatacttgcattggcaaccattcaaggttgggttcttcaccaacttgatgtcaataatacattccttcatggtgacttacatgagaatgtgtttatgactctaccacctaggtatagtcctaagggagagtttccacctgatgctgtttgtaaactcaagaaatccctctatggacttaatcaaccctctaggcaatagttcgaaaagttttccacaactttgattgaagaaggcttctaacactcaacatctgatcactccttgttcatccaacataaaggctcaaccattatactactcttggtgtatgtggatgatgtgatccttgctagcaatgacacaacaacattagaaaagttaaagctcaacttgaataacagattcaagttgaaggatcttggtgagctaaaataatttatttagtccgatcttgaataatttggtcggattgattagcgttcaaaaatgcaaattacaaattggatgtacgattgaatgggtttagggtatacaaaagagaaatgctaaccttagagcatctccaatagagagctataaatgttttaaaatattttgctaaaagttaattccaatagtgatgtaaaatacgtgtcaaatttggcccaagctaaaaattgtgtcaaatttgacacaaaagataagattgccaaattttagcccacaataaatactactttttttattatatatttgccactcattaatactattcattaataaaaaaatgtttttacatttataagttattaaaataatataaataaagttaattgtttatatatttttaatgagtattaatggtattattaacttttataactaatttatacctctacattagaacacaaatataaaaattgaagtaaatataattttaaagtatattttaaataaaatttaactcaaaatatagaccatctattaaaaatagtcttaagtaccatacaagcatcacaaaatggacataccacaatggagaagagtaacatgtctaatatcaatgcctctttccaaaaatatgtcaattagtgtaatgtgagcagtagacaaattaatggtgttgacatgtagtcactcacgtgctgtaatgccatccgcgtaataatcttctcaactaataaaaccaaaaacatatttaatccacgcgcactgtaatgagcgtgagtgagtgtccaagtactcaaaatctggccaatgaacaccttcttcacatatagacaagtatattacaattaaattacatttatgaacaatattaattcacatcttattaatttgatttatttattaaaaaataataaaagatatgaatagtatttaatattttttgtacgtgtggatatcactattaataaaaccaattataaaataatttgtttaaaaagtactaaatattactaatatctaataataatattcttatttattcgtcacttaaactaattaatctcatttaaactcaattttatatattttttttgagataaaatagtgacattttattggcaaactgaatcaaccattacaatatttaaaagatcatccggagcagtactctcggt

SEQ ID NO: 79827 - DNA, 2572 bp, Cannabis sativa
cggatcggattggatccaaaatatgaaatccgcacttagtgcggattggatattgtttgaccaaaaaagtacggattggatcggatgaacacccttaatgaaaataagatgaaatcaaaggacaagttattttaatccgacccaaatagaagcaaataacaatgttttattaagaaacaaaagaaagaaaaagaaaaaaaaaatgtgggattgagccattgagggaagaaaccaataaattcttacaaattttcatcctaaagtggagcctctacttccacaaagaaaagaaacctcgcattacttaaattcacaattataaattctacacagtaaaatggtgcttttgctagctctagtgtttccaaagctcctccatcggaacaccacggtcagcagcaacttcgctaaactgcctcattttctgcactgcaacaaccgtggccctggcattgttgagagcattattgcttccaagttgctttcccaatgcattctcaacaccagccatttcgagaacaattcttacagcacctcctgcaatcacaccagtaccaggagaagccggcctaagcatcacctttgctgctccataatctccatcagccctgcaatttgtcgtgttaattcagttggttagttcaagatgacattagacaaaaatcctcctaattttgtaacgacaaataataaattttttttcaaaaaaaagcatataacaatcaccactggatcttatatgcaggtacaacaaatgatattattggatcgtattacagaatggcaagcaataacaatcaccactgggagcttattcatttctatactaaatcagctgaagtcagtattattggagatccccacaacatttacccaaacatttttttaatgcccatgccacaccactcatgttagtcgattaacaatgcagccatagagaatccaggaaactcgagcgtcttccaaattatcgtcttgagtatcagccatggctttatggtaggtcattatcggcccagattcatttcaggtggtctctaggaattcagtaagcaaagggagaaaaaaagaaaaaaaaaaatcctttgtactccatggcgctggatgaaatttaaattaaggataagccaaaagttcagttatctaacagcaaccttatctccaaggctaacataggaatagggccaaaaccataacccctttcagcttatatgaagctgaaaatatgtcccagacggccaaaatcaagggggcagatacattgtgaaatatatagtatatatatattcctgtatttacatttcccgtaatataaacccttaaaagttttcggattacaattaactaagcaagcttcatacaccaatctgaaagttttattttcactcaacaagaccccatatccgcattcaaccaatcttagtacttctcaggttataaagcagatactcaattccatattcttatcaatcttaattgcatcactatacacaaacttgaaaggacaaaatttaaaccaaatgaagcatgatataagaaaataaaagttcaaaattacatacctatgcgggaaagtggagtacttggtcaaaggaacggagatgatattccttctagcattgacggccgacttctggacagccccgataacctccttggccttaccaacaccaaccccaacttgtccttgcttgtcacccaccaccacaatagccctgaaatgcaattgctttcctcctttgaccaccttggtgacccttctcacctgtacaaccctctcctcaaacccatctctgatcttctctttcttcacttttgaaccaaacccaccaatctttttcaccttggaatccattacatatatatcgtttcccagaacacttaccccactgtaagccgggccgtacagctcctcgtatgctgcggcgatttcatcttctgtttcctcagggccctcgtcgaaggggggtggttcaacgaagccttcgggaacttctggggggtcgtaagtgacctcctcttctgggtcgtcactgacgaggaataaggtctcgggttcattggccttggctctgaagtttgcggtggagcgcgaagaagatgaggagaaagaagaaaaggaagaaaatggtctggtggaaatggtggttgtaattgtggtattgggaaggagagaaaagcgcggagaggagtggagagagagagaggatagggaagagagggctgtggaggttgtgcttgccatggccatggtgatgagaattggttgtgaaaagggggaagtagaagttattggcagtgagctttgtcactgatcttatctactgagttgcagcccaataagatggataaacgacattcgtttgaactatcatcactccataccgggttataattaaacaaaattttattctgcaaattatgaagggatttattattagagtaaaatatgtttatgtaagaaagtaaattatattctaattaaataaaattatgctagaaaaaaaaatcaaaacactaaaaaaatatcaatataaaaacaataacaataaataatacttaatactatatt

SEQ ID NO: 79828 - DNA, 1053 bp, Cannabis sativa
atcataggtaaattctattttaccagcgcaatactaacttttgccagcacaaaaatgtgctggcaaaagtcacatttcttgtagtgcggtcggagttcagggcaaggtcgggtccgggtcccaagtctcggtccggtcccgggtcccagtctggtcgcgggtcctagtcccgatccagttccgagtctgggtctcaggtccgtgtttgggtcccggtcccgatcccggtccggttccgagtttgagtctcgggtccgtgtttgggtgccggtcccgggtcccggtctcgggtctggggtcccgatctcgggtcccgggtctcgttctcggtctcggtcctgggttcccggtccctgttcgggtctgtgtctaggtccaaaggcatccaagtctgggattcgagtcttgaattaagttttttttttttatttttttttatttttttttaaatatattgaaatcgcgtcgaataagatccgatccagaaaaaaattaggcagagcagagcggatctgatccaagatccaataagtatcctaaggtttcgaatcagaggtgatccgtcggtatcggagttccaatccgctctaactaaatggatgcttttgacatgtttattcagaaacatggcagatcaaaagttcaaagagtgctaatttaagttgtgaatgcaatcgcaacagactttactttaaagaatttaaaggggtaagtaatgatgaacaaagatggatttggtggactaatgaagtgcttgatgttagacatgatatgactaaagtatgcacatgcgtagtatgcatgtaagaactctcaaatatggagttcaggctttgagcaaaaaacagaaagaaacagaggaaaatatggaagtgaattaaatggaaaatgaaagctcaatctgaaacatagattgagtgtgcctttatttatattagtttcagtacaatacattgaatcaagattacaactaacttaagcctaactacctctaactgacttaaccgaaagtaactgataacagaataactaactaattgttatattccaaca

SEQ ID NO: 79829 - DNA, 2941 bp, Cannabis sativa
ttttttttactacacacctcattttactttctaaattacatattttcacattcttataataaattattttattttattactataatttaatgagcatatatatatatttgttgaaatatttatcattaatttgtagtcttcaaatttggatgtctcattgtattgaatatatggattaaaaggaaaggacctcatatatatatatgggctcttatctatttggttttgggaggtgtggttgctaatcttttctctacttgtgagaattttttaatttgtttctttctcttaatactccaaattcttatattatatatattagctaaggctactcagtcatggcccacacaagatataagttatatctgtttttctcatgcaaaaagatattagaaaaatcaatattataccttattgaaataggtattttagtagatttttttaatttattttaatatttaaaaaaaatttaagtcaatttttttttttataattatatatgttatagttattttagattgcctataatttattttttttaaaataatttatagtgtcgaaaataaagtttaaataattacttattataatttaaattttgttttaaataatttatagtgtcgaaaataagatttaaacagttatttattaaattgcttattgtataatttagtccttaattatatatataaaaaattatactctcctaaataccaaataattaagaatttatttaccaaaatatttctcgttagaaggtttactacaacacacaaataaagttaacataatttagcccttaataatacacaaaacaaaagaaataagaaaaggaaaaagtatacatgtatataagtgaagtgaagcgctttagtattaaaatgggtgtctacacatttggtacactgtgttttatctaaatataagtttggtaccctgtatttttaataatgcttatttggtaccctaaattcatatttttttgataaaatttaatcaatactatcaatagtctaaaattttatgaatttaattgtattgattaaattttattttaaggtattaaatatgtacaatttaaaaatataaggtaccaattaagtattattaaaaacatagggtactaaatatatttttcataaaaacataggtactaaatgagtatattcccctattaaaatagacataaatataaataaaagtaaaaagttggaaaagaaatgaaagaggtacgtgttagctctaaaatgccaatccaatatattataaacatgatccgaatatgatgctctaaaaatattctatatatctattctatctattattctctttcttcatctcatctttatgtttctcactatctcctctagttaacacttaattttcttttaataacaaataacaaaaaataatgtcatacataactaataattcatacaaagaataactattaaaaaaacccacatcataatattattcgacaatattattccgaataaattaaatataaaaatattaagtcatttataaaaaaaaaaacgttaaaaagtacccataataccacgtaataatactattagtgtaatttaatatcaaatcccatttattttaatattataaaaaaattagtaactaattataaattaataatactttatcgtgctactaaacactatatatgtctcatagcaatgcacttttaaaaaatataaatcactctgttcaaatacaaaagcaaagttgttagtgattatgagggaaccaaatgtaaaactaatattttaaggggagccaataattacaaaaataataactaaaaaagttgggaaaaaatgggttccaaaaataccctttatcataattttttcttgttctctctctatctcttccctttcttgatctccctctctattatcagtactagaaccccactcgacatcgtctctgcccccaaacctaccccgtttcccttactctttattctcatagaaatgcgatcgaagccccattcgcgacgtctctgtgttccttattgtcaacaatttttcacgagcatatgtgatttttctcttttttaggtaatttatagtcaaactcactacacttttaaattttgtacgatttaactcttatattagaaaaattatggctaaagtctctaatctctaccattgtcttggtcagtactctttctgtccactttggtctattaagtgtcaaagtggtctgtcacagtgtacaaaagttatacgtggtaaatttttattggtacacttaatattaataattaaaaaaataaattaaaatatttaaaaatttagaaaaaaaattaaaaaaaaaatagaaaaaaatcaaaaataatttatttttctcattctttcttcttcctaaactcatctctttctttcatctctaattttagatccatacctgcaggtagtttccacgacactagagcaacaaaggatttatctttccatttgcttcttaattttttcaaaaattctccctaaactataaaaattgttgtaaataacccatatatacgtagttgaattttagtcatttatttaaataatttgtttatataccactaacataacgttaatatatttcagtttaagagttcagataaaatataactacatatttaacgatctaatgataaattataagagtatgtatgtgcatttttaaagttattgtttgtatgtttgatgtaaataaactgaattttaaatagtttaaaattattaaataagttcctgtattgcaattatactagtaactttacataagcaaattatttttaaaaaataagaaacttagtaagaatatttacaacaatttgcataatttagaattaacttttgcgataaagaatagttcaggaaacaaaatcctacaaaagttatagttcttggggaaacaatcatattta

SEQ ID NO: 79830 - DNA, 2024 bp, Cannabis sativa
tccccattacaattggcttttggtcaggagccaaatatttcccattaagaatctttggttgtacagtatatgttccgattgctccaccacaaagaataaagatgggtcctcaaaagaggttgggaatatatgttgggtatgaatctccatctatcattaaatatctcgaacccacaactggaaatatatttacagcacgttttgctgattgtcattttgatgaaacaagtttccgagctttaaagagaggggaaaagaaagagctggaaaaggaaattatatggaatgcacaatcattatttcaattataatttataatgcaagtatctttcttaaatttttgcaacctctattttttaacctccaacttttgcacataatttacactcccttcgacaagtcaagtgtttgtatctcatctaattcatgatgccaactcaataatcaaatttattggatagataacctatttactaataggaaaagcccccattttcaaaataaaaaaaaaatacaaatatatatattatattttttatcttacttcaagtttttatccaaaacaatcgttactattagtgtggatttcaccactaaaaatgaaatattaaatgcctcacatatgggggccatcaacttttttttcttttgaatagttgggtgattaataacaaccttgaagcaatatatatatatctagaaactagactaccagagaaatcattcaaagttatgaaaaatacttttttgacgaattattaattgatcctaaaaagccaagtagaaaaaaatttaaatgtaaaaaagtaaaaaaaataataataataataatttaataggttcagtactatgaaattattctatctaataaaataaattgaaataatttcttacttatggggaataaaatactattagtgacaataaatgttattgactaaaaactagtatttaatgaattgtcaataattcaaaaaaaaaaagaattatcaataataatgtaattttttatctcacaaaaataataataatgtaatttttatatcatatagaaatttgtagtatcaatagctagctatacagattgatttggtacggattggctgttaaatctcaccgaagatctatgacatggcggtattttattggtctaattatttttaatttttaaatattaaaaaatggtaaaagtaaattaataattataagattgcgtgtatttcaacacgaaaatatgaatgaaaaaaaattaaaaaaaaaataacaacatatttttatttgatatattgtaattgtacacaatcaaactactgattattatatatttttacagttttattctaaaaataaataacaaaatagtgagaatatagataaggtactgaatttcttactgtgcaaagaatgaacaataatgacaaaatatatactcttaagaatgtaaactcgaacttctatttggtataaatttagtgaaaaatttacgactaagtaagccctaatttatttttgagttaatctcaaactctttaaattaatgatctcaatcaaaaatcttcaagtgaaactcttacaccaaacagccctttaagaagataggataacaggtataccaaatgaaaagtttccacctttctcatttgatggacttaaccaaataaaaaagtttcatgataataataacttaacatagcaatattcttcaagttccaagttggttgcttttttttgcccaatcagatgaaatttcttcattctttcaccactcatgaagttaataaccaatgatttgactgaagcaagttcttttgtggagatacaaatacaattatcaactcaggtaaagtagacaaatccattttctttaatcttgggagtcttattagagatagagaagttgaattttcaacattaatatctaactctaaatcctcttcttcaataatctcttctaaggaatgacaattccatatctcaacctcttcaagattctcaaggcactactaaaaatacagtagacagta

SEQ ID NO: 79831 - DNA, 1885 bp, Cannabis sativa
gtaccctatgataatataaattaatatacaagtattattgaaaatagagtacctatgcttcaataaaacaacaggtaacaaatagttattttattaagtgataataataataataataataatagtttataagtaataatgacacaaacatattattctcaagagattctaagaaaatattgtattattcttttgagtagtaagaaaggaaaaaaaaaaaaaagagttccaatacatgaaaagcttgatacatatttcactgcatttaaatgacaaaactgcaagaagagttttcctatgctaattgccaatgaaaagcttgatacatatttcactgcatttaaatgacaaaactgcaagaagagttttgctatgctaattgccaagccgagccatatcatatcatcatattttctcatatttcaccatcccagagctcttggagactcttataaggacttaagctttgatgaagtgcaaaatccccccggagcagcctttgctgtataaacataatcatgcaagatatatatcattgcttgtaaaagcaaacttaagtgaacaagttgaaggtaagagatttagttttacctgatggattcctgaaaatttagagaagagctcttcgggaattgaccagttgaacaagctcagattttccttgatcctagactcgtttacactctttggaagaacactatgtccactttgaacaccccagcgaagagctacttgagctgttgacttatttagcttctcagcaatctcaactagtaacggttctttcaagatttctccttttaaccaagaccccggtgatccaagaggagaataagcctgtaaaaacagaacgaattcacctcagtctattcgaaatttcaaggccaaagaagactacttcctctaatggcatattcaacaaactatggtctaaaagtaaacaataaaagtctaattcaatcaatacaaagcttgtaaaaagtattacagtaagatgaacaccagtggatttgcacaagttgtgaagggcaggttgctgccagacagggtgacactctacttgattcacagcaggtggaattttggcataggaaagcaagtcttgcagctttttagtcgagaagttgctcacgccaatagctcgagcctggccagacgcataaagtctctccattgcagcccatgtctcaggaagacacaatggagccatgacttctggggcaaatcctgctgacccaggctttgtcctaaatggccaatgtatctttaagaaaaaagccagataccattttcagaaacatcacatgtatacctaaagtttattgatagaataaacaagtttccaaggttaatttagaggcatattatacaagatatagatcaatgaaatcaagctgcagatcctctaatgttttgctcaaagctttggggacatcttctggtgcatggtcactacacctacaatacaatttcagaagcagtttgattcttcaaaatacaagatttttttactctcagttctctaatgtgtttgataatagttaagatatataaatagagagataccatagcttagatgtgataaacacctccgaacgctgaactatcccagaggaaaaaagctcctttagagctacacctacctgcaaattgttcttcacaccataaggaaacacaaacaaatgtttcaaaagattattggtatttattgctataatgaaaagccacaattaaatcattttcacctctttttcatttccatagacttgagcacagtcaatgtgtctgtaaccattctacatgtaaaccaatttttaatcagtataaatatatacaactatcccacaatgttaatgatatgaaattagaaaatggtttaccttga

SEQ ID NO: 79832 - DNA, 1560 bp, Cannabis sativa
ttgttaatttagtgacaaactaacgcattgatatcctttatagggagttattgcagaaacacttgggggagacataaatgaccataaatttacccttatggaaggtgtaagtgacacgagtaagactcctggtactagtggaaattgtgaagatctcgcaggggatgaggaaggggacagatctgtggcttccgttgaagatcaactacgaaaagaaatgactgtgtacgaggtatgtatctacattatatgtctttggcaatattgatctgagtattaaattaccctgcttttagtgtattatcaaaataccatgtaacaatgcctttattgcagaaatttatcatgggtatgctcacaaattttgggagcatggcattagatcgaattcataatactctaaaggtgaggaagaacgtgtccaatcaattttttacttgggtttggaaaatttatatggctacaaaatggttgtgcatgaaataactatatctaaacggtttactggaaaaaatgctgcagatgttctgtgtagctgatccttcttatgacaagactctccaacaattgcaaggtttcttatctggactagtttctgaagaaaagttagaactaagagatggaatgtacactctgaagaagtagtgatagaaaaaacggacacttgggtaaatttagggagcaaggaaatcgtagtagttaagttaaaaaggatctttaggggaaattttgtaagattctaattatcttgtagtatgattatctcaattcgattttgctgtacgtgtatatcaaatcaatttgccttttaatgcctaataattttaaaccttcacaagatttactgaatctttatttcctcttaaatagtctagtaatttgcctaataaccctctaccgttttccagcttgaaactagtaattattccttgattttgcctgatatataatgatattttaactggatcgtgagctaagctaataattgttgtatcatgcacgggcagtttttatttgtattcaaaaaattataaaagtgcttgattttgttataaataaatatatctggatgtctagattttctattaattgttgtaattacaatttcttttcttagtttcatcatttacatatttgtaaaaataagagtttattccattgaaataaaatactgaaaaattattattcttcttattattcatgataattttataatattttattcgtatgagtttctgtccaatataaatattatttgttaaagtttttgaattattttaaatttataatgtattaaatatatattatccaaattttcattaagtagacatgtggcacgatcggagaggagaatgtaacctcgacaagagttattcaagataaccaagaaaaggaacatctcccagacttgggaggcaatgagagacgatgacctctaggagtaacttccctttataaaggacatggagcgcgataaaggtcttggagacggtggccacgtcaacgtcttgcaaaaatcactccatagacagttacacctttttctgacacatgatcaga

SEQ ID NO: 79833 - DNA, 1751 bp, Cannabis sativa
aaatagaaaatcatttccttaattagaaaataatttccataaataaaaatattctaatatatcctactttttccatattttaactctttcacataatatcattttaatattaaacagaatatatattttagagacttcgatctttcttaaatatttctatcaaataaagcatatttttatgggaaagatcttttcattatttcatatgtatcgtcgtgtcatcacatcattatatatatatgctaattagttcaataaccaaatattatatacatgataatccgggacaaactattagaagttgtagagtttgtggcggtttaatctttttaatttttgtttcacttgtatatatactattgaagtttaaattttgatgctaaaattctctaaacgatttagctggtagtaaatttaagattacatatagttaagtgtcactatagactgtttatatatagtgtcatgtttatattagtacacctaatatttttatttaaaaattattttcaaaaatcattttgcaactaaaataaattataaaaaataaaaactaaatcaattttataaaaataaaaatattataaatttacaaataatttttacaatttttttaataataatattaagtgtactaatataatataatatatataaaaatatatacataaacaatctatattaataaataattgtaaacaataaatgaaattttaaatttgttactaatttaagaggagttttatcactaaattgaatttaaaaaattaaatgaaagtggagtgatagttcagaatatttaacagttaaaagaaaaactcatataataatggtattggtagctatcataattatgaacatgcggttaaattgtcttatgcatagtagaagccgcctcgccacgtcttggactttttaaacaccatattttgagagagtactcaataatttctttatttatttaatttcacaattcggtactacattttctgaaagaaaagagcaattggtactagataagatgagaattatggaaaatggctcaccaaacaaccccatgtgactttaataatccagaggactttagacttgaatttatttaattaataaataataaaaaatcaaaccaaaaccaaagcttcactcttccacatatctgtctcactctacatatatatataaacaagcaccccctactcaaagatcaaccaaattaaataccaagaaaggctatttatatatatatatagtacaagatagagatgaagatttgtgcattgacaattgtgtccctgctgttgttgaccatagaaggagggtcagcagagcaatgtggaagacaagctgggggtgctctgtgtccaggggggctgtgctgcagcgaatttgggtggtgtggcgacacatccgaatactgcaacgataaatgccaaagccaatgcggatcaagtcctgggggtgggggccttggtggtctaatttcaagggccacttttgataatatgcttaagcatcgtaacgatggtgcttgtcctgctagaaacttttacacttacgacgctttcatctccgctgctaaagcttttcctggcttcggcaacactggtgatgatgcaactaagaaaagggagatcgctgctttcttagcccaaacttcccacgaaactacaggtcagtttaattattaaattataacaatgttctaaacagagataagatactgctagtttatgaactagaacacattaatt

SEQ ID NO: 79834 - DNA, 2233 bp, Cannabis sativa
accaatataaaaataattcaaaataactttaaaaaaaaataattcaaaataaaaattaataaattttaattattaatattattttttaaaaaattaaatatcataatattattataatatgtacaaaattttaatcgtatacaaggagtcctatcataatagtatacaccttacatcataataaccacatgatataaaatcaatggttaaaaaaagttccctactggtagggaacttttgctaggtcctaccataatcttgccctataattatgtataaaatgttcttttttttcttcttcttcttttaatgatcttgatcatatatggtattaaataatcactaaattcattcaaggaaaatgagaatgaggctcattagattcactgcaatattttggttttacacgttttttgtttattaagttaaatttttgtaaactacaatgtatagcccctgatcttaatgcgatgttggttctctttttttaagcactattgggatttggtaggaaaagacttttgtgatgttgtctctagttttttcaatacgggatctatacacaagggtattaatgctacaaatttagtgctctttcccaagatttaaaactcgaagagaacccattattataggtttatttctctttgcaatgtaacgtatgaggtcatttctaaaatcattgcaaacaaaataaaacatattcaagactcatttgtcctactcaagctgtttttgtgcttgtcagaaatattcaagacaataatgtgatcgttcaagaaattatccatactttcgacatgaaaaaaagtgaagaaggtttcttagccattaaaattgactttatgaaagcatatgataaactgagtaggaaatttattgagcatgtgctttcttgctatggtgcttcggacctgtttcgcaaccggattgaccagtgtatttctctaccaccactcttaatgtctgcttgaatagaggtcaggctggtaagattgtgtcatcatgtggtttacgccaaggcgaccttctctccccttacctgtttatttaggctacgaaaattttgtcaaagcttttagaggatgccccgtagaaggatattgttaagggcattagactttatcgagggggttcgatactttctcacatcttctttgtagatgatttaattctggttagtatggccaatttggaagaggcgaaaggctactggcattgccttgagatttttcgctcttggtccggacaacaggtcaacaaacttaaaacgtcaatcttcttcagcaagaatactttcgatagggtgaaaagagtgatcagagaagctttagaaattggatgtgtagtgggtaatactaaatacttggagctcctcttatttagattcaaatagaaggatgcatattataactttattttggataatcttacctccaagcttcggggttggaaagaaaaatctttgtcaaaggttggacatactactcttattaagtctgtgggtcttttcatgatggcatgatccgtgatttctggtgggggttcaagagaggaaatcatgggcttcacttgaaatcttggaataaattgtgcatttccaaatcccgggggggtctcaaattttggaaaactaaagagatgaatcaggctttcttggttaagtgggggtggaacttattgattggtagccagtctttttactgccaaatcttggaagctaagtacttaaaagggaagaatttttttaactgcaagtacaaagactcaaactcttgattttggaaaaatatgatgaagaccaaagccatcttaaagaaggtgcttgtaaaatggtggttgatagcagggatactagaatctgggatgatccttgggtctctcatggtaaagagttttatttaaagtctaatggatctattgcttatggatttaacaaagtggctgatcttctgatagattatggtgattaaaatactcataagttgaactgcatgtttgacaatgaaatggttactaccatattaaaaggggaaagacctttaggcctgagtaaggataggtgaatttggaccaagaaaagaaatgagaacttctcatgaaaatcggcttatcttatccaagctttgtaaagggctcctcactatgaggttgcccctccctttggaacaagttgtggaatagtaacatcttggaacgtcataagatcattttgaaaaagtaattatataat

SEQ ID NO: 79835 - DNA, 1629 bp, Cannabis sativa
  modified_base (28)..(30): a, c, t, g, unknown or other
attgcataaaatacaattcaatataatnnnatacaatacaatacgacctaatagttacggcgttctaaacgagccctaactgttcggttgtttaaaaataacgtgatatggattaatgtatcttcgttgtatttgaattgatatatatttagattaaataaaaaacatgttaaatgaaggtcccttccctcattttttatgagatatttttatcttattcaatttcaggctgtcggtcttaaatttcatgtccccgaggaatactttgtcgtgtgaggaactcggtggcctcgggtggttgctgctggtgcaaaattgacagtgaatagttcatgagattgtcttgaaattatgtttttacatgaatgatttctctaatgattttaatctaattattgtatagttaaaaaggactaaaaagtttaattaagtttaattatgaatgagtggatttgttgagttgactgaaaatgattattacatataaatcaaaataactcaatatattataataggagtgttaggaattacattcagaaaattaagacaattaaaataaatgaaataattgaaaatcaacttaaaccatttgtcttttgattagtcaaagatttacttaaagtaaatcttttttatttgtgtcatgagtattttaataaattgctatgcttaactaaccatagtcatatatatattgaataatctataaatatataacatcaatcaacatatattttagtcttaaaaaaatgtgggttctctagtcccattactcctctagtataatttacaagattttggtgatctttacaaggtggccttaccttagcaagaaattaagtcatttggcattttggtatggtttttgttgggaaaaaaaaaaactcagcaccaaaattcacacatggagcaaaattctgatgaaaaaaatattcaagaactaacataacacgagtggtaaatcaaagaataaaatgatcaaatgaaaatgctttaacaataaaataaaaagtgacacagatcattatatattgatttggcaccaataccatattagtcttctaggtcaaattatacatcttcatacaatttgattcaaatagaaaaatttttgagttgagtataagttgatcaagaatctaccatatcgattgaaacttaaaacctagtaccaaacactcgaaatcaaaaaacttgaaatctaattttggtagcacttgaacttaatttttttaataatttttttgcaaccgagtttaccaagtttcagctaggcaagtgcactaagtgagtcgggttttcaagcctgaatgttcagtcatgatctctgtaattttggcaaatatataagacttgtttgggaaagttgatcttgacaagcttgcatagatgttacttcccagacaagcttttaatgggttacttaaataacatgataagtttgaagaattaagtccacaatttttgtgtaacgtccccgcttcaatttgtcctcactcgcatgcttcctgggaaaacttctcaaaagcttacccatcctgaaattatcccaggtcaagcacgattaactgtggagttctttcgtgatgggctaccgaaaaacatgatgcaccttgttgatataggtag

SEQ ID NO: 79836 - DNA, 1915 bp, Cannabis sativa
taaaagaggataatataaaaagggtatagaatgtaatttcctctaaataagtgaacactataataagacagttacaggcccaatggacttttaggagtgggctttttgcatgatgattaggcccaactaatgttgaaatctacaatttgactcttctcccaagggtgtacgcgtgtctgaataggacagctgcatcggatccttctctaccatctcacataacggctattttttttttcttctttctgatcaatcaaactccattattacattattcaacaaatttcatcacaaaccataaagttagtcggcacaaaatttcaaccgtccgatcaaaaaacacatctttacaactcatttcattcaaagcaaccgttactatatctttcttcactctctctattaagtaaagaagaagaatatactttactcagcaatgaccgtcgacaccaagaagatcatgaagtttggtctctcacttttcaggagaggctttaattcttcaaaatggtaactttttctttaatgggttttactctgtttccatttttgtcttcattttcatcataaaaatttgatctttaattattttgatttggtaacagtaaaacagctgctaaaatggctgtggctaggattaagctgctgaagaataagagacaggttgtggttaagcaaatgaggcgtgacattgctttgctccttcagtctggtcaagatgccactgctcgaattagggttcttaacctctctcactctctctctttgagtcacattaggattaggaattaatggaattttcaatctaaatagttaagactagtttagttgggaaatactatttatatattcaattgagcattatgctatacatttagtttattacaattttatggcttctttataatcatgacaaacattttaggattaggaattattgagattatgttttcatgcattttttccatttgattaagggtaattatatgttaacaagatttataaaaaaaattgaaatcagcaaaatatactcatcagctattaggatcacttgaactgtcagagttgtttatgtgtcatcggtgtaaatttaggatttcttgaatgattgtcagaattgtttataaaggcacttttagaatttaacttaaatggccacaaaatttataacttgttatataagttacttttacaattgattcatttttcttgatataacttttacattagttttcttgatatatttttctcagcattgtgtagtatacatttgttatgatcatgagagttgttttttttttcgttctatgctgtttaccaaagagagctaaaacttactagggagtgtgttttgtggttgtttaggttgaacatgtgatgagagaacagaatatattggctgcaaacgagttcattgagctcttttgtgagttgattgtgtcaagactttctataattgcaaagcaaaggtgatgacttttattttacttgttctgttcattgttcaactgttgaagacaatttctttttctctatatctaatgtttttctccaatttacagagaatgcccggctgacctgaaagaaggcatctctagtttaatatttgctgccccgaggtgctcggaaattccagaacttgtagctatcagggatgtttttgagaagaagtatggaaaagatttcgtatcggctgctactgatctacgacccagctgtggtgtgaatcgtttggtaagacattggcatcatttcggaattacttacatgagtcagatttttcttgtttacaacatattctgtggtgtttatttgactgagttgtgttttttgtttacagctcattgacaagctttctgttagaacacccactggtgaatcgaaattgaaaatcttgaaggaaatagcgaaagaa

SEQ ID NO: 79837 - DNA, 4073 bp, Cannabis sativa
actaatgttgctggatggtttattgtcttattgtaaaagtaataaattttcaaaaatttaattacatatacatttaattttctattgctttaaaaaaattttgtagtgtaatttcttttttctgtttcggtgtgccaaattcagcattgcttccaaccttgaagaattttggaaggtttaggtgctggcatgatttctaactttactcatatgtgactcatatgtttatcggtgatagtagacactacaagaaatttaactatgacaggcgcacttttcgtccgcaaaagtcaataaaagcgcctggaaactttttccaaacgcaaaaaatttcgtcctcacgcgcctacaattgtgcgactgtgaaaattcgtgcggacgcattaattgtacgcacctgtaaaagtttgcgcctataaaaggtactttcatttagaaaaaaaaaaataaaaatatataatgtattcagtggcccttgtactagcgcctgcaaaaagttaatgtctaataataaaaatattttttatttttgaatattttgaagctgtaaaattttgaatatttcagttatttttatagtaatattatttcataattcaatatactaaaaattaaattaaactaaaattgcaaataaagattataataaaattgataatattaatctaaatatcaatacaccaaatgttgttcaatgctacacaatattcaagtacttaaatagtgcattaatttgaagaaaaagttaaaagctgtaacagtcctacatattgccatgccagccgtcttccttcaaagttcttctcaatctaatacagttataatagtagtaattagctttacaaaattttagaaaacaaaattaaaaatttagaatagaaaagtttaaaactatactcataagtggaaagtgaaaatagaccaactataatacttttcactaatttactaattatggtaaaagcataatcaagtgcttaaaagcaactattattattagcagcttttgtttataagaattaagacaaaaccagactttaagaaacaatccaaaaccaactttagcttctagcaatacagaaaattatcaagaatttcctagaacaaggttttcatatttatctcattcaatgaaagaaaaaaatcaatattattattacataaaaatagagagtaactttctgaatccaaaagtcgaaaatataccactgcaatagtaaaataaaataatggttggaaatcctaaagaatgaaaggaataactaaaatacttagattcagacttccgagtgtatgaaaggaataaatgtcaagccatgtaatgaaaggaataagggtcaagccatgtcattagaggaaaaaatgtctaagacaaaatatataatacttgtgtgtttaatttcaattttaagaacccacactctgcttagcagtttcaatcattcactgttctagttaattaacatacaatggtattgcagaatatctccaaattccttttatagagacatctagaaaagaaacaattaaccaagtattaattaaagctgagaaaacagaagtaacaagacaatagtaccttccatacaggccaagtagtagccataggaactgaatttgccacattgaataataagtaatcttagatttcagacattagaaataggcgcgtattaatatttctaccactttttgcaggtgcatttaatgcgcctaggtaatttctaaaacttactattgcgcctctattgtatttattgatatatacacagacgttttaaagcatttgtgcgcctgtattataatactttggtggacgctttccctgtgaagcgcctgaaaaaacgctttccctgtgaagcgcctgaaaaagtattgtttcgtgagatacatgaaaatgtaacccttaacacgatatttatcacatgttttaataataattattaaaaagtttataatgttaattttaaataactatataaattaattattaatttcatgaatgattccaattgatcattagttaatttatatattagtatataatgcaacatttacaatagtagaaaccatgtgggattgtttttttagagactcactaatatgtcaaattactaaaaaattataaaatatattaaaaatgtaaataaataaataatatagaccaattcttttttatgccccatttacttttttattattttcttttatatatatatagatataaattaaaaattattcttgaactgattatttttaaataaaagttctgtataaataaatatataacactcttagtgaaagaaattagttagagaattcccaaaatttatttttatagcttttctaattagttttatatgaattatttaataatgaataaaaatttaaattaataataatatagagcatgcaccattattagagtggacttcacaattaaaagtgtcttgtaattttttttttctctaaaatttagctttcaaattaatcccagagcacatttaaagttgagcatctataataatacatgcctacttataaatatgatcataatcaaatattaaaacatatatgagtttcatttcaaaatcaatcaataataaatagtatcaagactagctcaaacatgagcattttggatcattgcaatttatgaagccaaatatattttatatataaataaaagttcagaagatagaaccccaaataatttgataaatgataatagaattttggtgtggtcccaatacaatatgcacagccaaactgaaattacttttcttttcctataaaagcttgttaatttgtgttaaaatctcaaaacctatgcttaatctcttcttctctccaccacttatccctctaaaataccaatttccaatcttattctcagcacaatattgtaatcccatttcttctattgttttctcaaccaaattttctatctcttcttttcttattttgtttgaaatcctcaaatgaacttaatatgtaatagtttctcttattgttagagttcccaagaaaatatcctcttgagtgagatatgactgtaattttagttttaaaaacaagacaaaaataatactattagtctatagaatttgagggagcaactaagcaggcccggcccaagcattttggccttgtgcaaaattttaaaattaagctctttaaaaaaaaaaaaaaaaaccgtatacattaaaactacaattctattactagcattttttttaagattcattcataaatttttaattataaattttttatttacgtatatataattggaaaaaaaaaatagaaaaaataggccttttctttaaaaaaaaaaatgggccttataaaaataggggccttgtgcaatggcccaagttgcccaatacttgagccgaccctgcaactaagaaaggacctcattttgttcgtaggtgggcatccaattccctgaggatcattacagcttttgctttagaagctgagccgagggcaattctcttggctcttacttgggcagatgagaaggattggatgtgcattcacattctctcgaattcgaaggtgttctgtctatgaacagaggcccccttgattggaaagtttttaatttttttaatcgaggtagttaatttaattaagaagtttttagcttgtaagttcttttatattaatcgtagttttaactctttcgcggatggtgtaactaagtgtgctagagttgctagccaaccaactatttatatcaaggggagagatgtcaccatgtgatttccatttatctttcttaatcaatgaactcgatgttctttcccaaaaaaaaaaaaaaactaagaaactgtgttactaatttgtttttacttttaccagtaaaatatttatatttttgatatttagagaaattataatttattttttaaaatgagaatttaataattatattatagttatttgaaaagttatgatgaatagtcaattattatagggaaatttcactttttgcccttaataatatacccccatattaaaatttataccctcccttaatttgtacaaatttagtccattgatta

SEQ ID NO: 79838 - DNA, 2232 bp, Cannabis sativa
ctcttgtatttgtataaatagggaataaacaactcagaaattctcattcactttctctttctctcttcatcttcttcttctttcttctcatttactttatattattttatattattttataacagtcctcaatattattcctattgttaattacaaatacaatttagtccaaaatattcgtacaaccaaataccaaccagtcttcccttactcctacccccatcaccacccaccgaggcaagagacagctccttcctatagacagcccatgagctaatatacaatcttcatttctctcatttatgtccttcctcatctccatcaattcaatttcaattcagggttaggttaggccttaaatccttccatggaatcatcttcatcttcttccatcctcagattcttcaggtgcagccactgctcatccttcaactctcgctgtttctgttgctgttgttcctaattcagcaattttcctttctattgtaaatattttatatataaatatatataaacgcattcatataatctcatcctttctatatagtctgttgtgattgggattgggctctagggttttgcttgttcctccgtgattaatcatggacatgtcacatcctcaatctactctctccctagggttttcatcccacacatcttcgtctccgtcgccacctcctccttccaaccgaacccagattgtcgacgattcaatttctctccagcttgactccagcctgcgcaacccgatccactcggtctcgccagttccgctgcagttgctggagccgcagacccaggccgagaataacggtaaattcgagagggaaatcgatgatgacgatgatgaggatagggaggttgaggttcggattctgggccactccatgtgcttgaaacggaggagggatagtgaatcatcctcgtcgacgaactcggctgcctgtaataattcaaagcgagtctcgtttggacctgatcttgagtcccgaagaagtgccgtccgggcttggggagatcaaccccttcgtatcgcggatcctgacgtgtttgatattatggagaaggagaagaataggcaattcaagggaattgagctgatagcttcggagaattttgtatgtaaggcggttatggaagcactaggaagccatttgaccaataagtactccgaaggaatgcccggagcaagatattattgtgggaatcagtacattgacgagattgaaaatatttgctgtgatcgggcgttggctgcgttcaatcttgatgctaacaattggggtgtaaacgtgcagccttactcctgtacctctgcaaattttgctgtatacacggggttgctgttaccaggcgatcggataatgggattggatactccgtcaggagggaacaccagtcatggatactacactccaaatgggagaaaagtttctggggcatcaattttctttgagagtttgccttataaggtgaacccattaactggttatattgattatgataaacttgaggagagggcgcttgattttcgtcccaagatacttatttgtggtgggagttcttatcctcgtgaatgggagtactcaagatttagacagattgcggacaagtgcggagcagttctattgtgtgatatggcacaaatcagtgggcttattgctgccaatgtatggtttctactgatctttgactcttttagttttgtttctgtctctaaattatgtctgattattgtttctatgtacaaaggatgatagtgtctttgacagttgcttttgaaattagtactatttggctttggtagttagaatgaataattatgaaacagtgaacaggcaagactaactagggaatatcctcttttcattttaactgttcggccattatttttgtgcaagctcatttttcttttcattttacgcttatatgtgatatgaaggatgtaggagcacctgtatatgaacttgttttttttcttgatcagacctgaatagaaattttccaacatgtagctgtaccacccatgcctggttaaaaaggggtatgagggtttattacactgcccaagataattaaaactaaaacttccatttcttttttcggaaaaagagacaaaggtcaagtgtcttagactgacctcctcccatttatattagggagcgcagaggaaagccacggaaacaaaaactttaattttattcagaaggtttatgtaaagtatactttgta

SEQ ID NO: 79839 - DNA, 2784 bp, Cannabis sativa
tcttaatctgatcttgcagagggcaactatcaaagtagatggtgattatgctttcgggtatgcaaaagcagaagttggagtgcacaggctggtaaggatctccccatttgatagtaacaagcgtcggcatacttcatttgctgctgttgcagtaattccaattatgggtgatgcttcttcccgtgtacaaattaatgaatctgatcttcgtattgagcggtatcgttctgggggtcctggagggcaacatgctaatacaactgagagtgctgtgaggatagttcatgtccctacaggaattacagccacttgccaaaatgaaaggtataaagcatgcttattcatttcctgcaaacagtctttttctccataactcagtttcacagtacttattttaagctataagttttggtacacagatcacaacaccaaaacaaagcttcagcaatggctgtactccagtctcgattagaccagctcgagatgacacgacaggctcagatgaattctcagcatacgcaatctcttactgatataacttggggaagccagattcgtagttatgttttacatgtatgctcttttcttttgaaccatacaaattgaataaaatagtttgatttccattgacactcaatgctcaacattcaaagctaattccatctactcttatgaatgcatatgcagccataccgcatggtgaaagatctccggactaattatgaggtgtcggaccctgattctgttcttgagggagatttagatggctttatcatgagttatttatcagcttccttggataaggatttagaatgaccggtaaattcgagtttttgtcaaaggtttatcgtcgaaacctggcatgtttttagcaatggcaaccgtttcgggtgcatgctgcagagtacaactagctccaatggtgagctcaacaaggatttttttgagggacttgcctatggagcaatgttatgatgttttatatattaaagtatatataacagttttgacagaaacactagaacatgattattactgatgtaatatttctatagatgatgaaagcaataagcatgacttgtttttcatctcgattctcaagtcaagtcttatagaagccatatattaacctcttcccttttgccccttatttatttgggaaaattacattttgtacgatttttgagaaaatgagctatttatggtaaaaacattaattataaatatgtaagactgttgttaaaaatttataaatattattgtatttttgtaaataaagtttaataactcgtcaacgattgttattggtcagaaactctacgtatgaatgattgaagattagaagagaagtttaatgcaacttaaagaaaagggaaatggtaaagggtaccagtgctgtctaacactctcctatgtgtcaatatcgatattggtctaactaagtatcgagtcccatataatttaatatgatagcttttagagagtattgttaaacaatcgtaacgtgacatgtcgagaaggtgctagacatcctaatagcaatgctctaaagaaaatcacaaagctgaaaggttgaccgttgaggaatcatagaattctcgtaaataaaattgggtggacgagagtagttgaaagggtgtgtgtaacgttggaacatgacaggatggtatgaaggcaccccaatggcgcaggtatacctggtgataatgaggggtttgtctcttgattctttttgtgttcctttagggtcttgcgttgttttcttagcatgagataaaaggacttactaaatttaaggagagtgtcgtccaacatgtttacccaacaaccaaaacccttcgagtttgctttaccctgacggcgcagggacctgcatcaccagatgttgatgtcataagggtggaaattgttgcatgtttttgtcttgcttcctttaaaacttattgtctccaactttttattaaagggccaaggaggggccttggccccccttccaaaaaaaaaattcttataaaaatatatgtacatatttaaaaattgcatactcaaaatgcatataaatacatgtatacacttgaaaaaaaattggccccttctaataagttcaccaattctgccactgatctagaggtcgtcttaaaagcctgcagaaacacatggtggtctagaacctgtgatagcagatgctgatgtggggtcattggctgagagacttgttctcattgtcgtttggatcctttactttcaaactcttgatgagcgacggagaatttttttttgtacaaattttcacgttaacattgaatataatttatatatttttaaatttaaaatagtttttataatatttaatattagttggaccaatatagatgtgttacttatgtacgcatggactctctttattgatttaataacaataaaaaagtgtaaatttggtttgaacaaagaagactcggaataaataacaccaagaagatttggtttgagcaaagtacctaaacaacaatcaagatgtaccatttaaaacttgtatgaagttttgcagttgcttgaaaatagggttggtaggaagaaaactctcaacgaagctcatagaatttcgcaacacactagggtgggacactagagggttgaataagtggaataaacaaaatcacacaattaatcaataagtataggattcaatgaaacattagaataaaaagtgacaatttagaactaacaacaaaactaatgccatcacgcatgtgctcaaagaacaattgctaatggggaaaatgt

SEQ ID NO: 79840 - DNA, 3199 bp, Cannabis sativa
ttttttttttttttttataattgggttttaaaatttaacatttaggggtattgaagaagagcattaaacattgggaatggggatggagattgttgtaggagatacgaattaatcaatttaatatcagtgttaatatattggggttataatgggttgggatcggcaagaatggtactgtgtgttctttgtgcgattttggtatgtttactactgtttattgatgtaattttttttaagtttattttagtcaatttcaaccttactgagtctatttttacttattgtttgttgattagcaatgataaagggaggatgaataaaagattgtgttgtgttttgagtttttatgaatttttgtttcgagcaccaccaagtgtttgattatatgtattttttttattgaaaaattacaactttcattaaaaggaacctaaagagtacaagttacaatcataaagagtgttaaaatcagcattccacacaatttctttatcaagccttaaaagctcttctagctactctattaacatctacattgcaacccctaggaataaatctaacagtaactttagagaatttcgataaagaaatacaaatattatcaaagaagtccgataacactcagaattcatgctctattacacataatcttagagacaagcaacttcgaatttgactccacaatagatatagaaaacttgacagctatacaccaatttgaagcatgtttaagggctaaagcttcagcataagttgagtcggatgatcctgggattagaatggccaaaccaacaacaatgttctcattctcatttgtaaaatctttttttttggcaagatgacaaaatattttttatttatggtgaggtttatttgtattcataactgattttctcaccttgattatttatttttattgctcttttctatcttaagaaagaatcatttttcagctggatttttttttatggaaacttcttgtaagagaagaaattctcttatggaaagttgtttttatggaaactttgactattattattttccttaatgagttcaattgtttagatcagatcaaacacactgtttatggcatgtatcaagaccaaatacataatcgaacacgtttttggcaagttttcttttctggtagtagtgttccaaacccttttatcatatttatcacgtggcctacccaatttatcaattattctggccgccacatacgaataagtggccccagagtcaaacaaaacaaagaaataagagttattgaccaagagctgacttgtaacaactgaggggctaggttctgcatcagcctgagtaagagcaaacacccaactagagtaggctttgcttccgtcttctattcttctttctttagttgtgggcagtctcttttgtatgtcaagtcataccacaatggaaacatcccggccctttacactcacctagatgatgtttcttacagttgggacattttggataagtgtattgagttttagaaccaccctgacagttacataaaccttggttccctcagaacctcttgttctaactcgagctaccggatgcagatggtgtctttctcttatgatcagtggttgaatcactaccacccttaccataactagaggtaggaggaacagtggctccactaacaatctgtgtcccctgggactcttgaatgcactcaactgcgcccttaactcgtagtgctttctccaccatgtcagcataggtggtattatcatctactgtaatcatcaggttgtgcttaatcttgggattcaacccatccaaatacttttctttcttgctaaaattagttggcacaattctcaagatcaacctagccaacctatcgaattgagttgtatattctgtaactgacatattctctttctgagtcagctgagtaaactccttcctctttgcactacaaaatgctttattgcagtattttgcattaaatagctcttggaattattctcaggtaatagtggtgatgtccgggtaagtgccaccatatcccacaaaaccaagacatcctcttagaattggaatgttgcataagccactctatcattgccgatgactcccataaaattcaaaatttgagtgataacagttagccactgttcggctttcataacatatggacctcccaaaaagactggaggtgcctacttacagaacctttcatatagtggttccatccagttcataacagtaatcgaccctgcctgcacaacaggggcaggagccacttgcaccataggagcaggcattgcaggagcaccatgttgcctcaagcaccggatcttctcatcttgctcattaattctggcttgcattggtgcaaacctgttctcccaatcctggccagcctgcgatgggttaacatctccccaaccacgcatcctacctcttgggcctctacctcagccacaaatatttgggggaaactaaacttcctgaccgccattggattcgaccgaattatcctagcttctcgtgttctgcctggcgtccattctaatagaacaacctgcgaaactaagaactagcctggtcaaatcacgatcaagaataaattaataattaccacttacttaagaaattaaaacatgtgtctattcaattaccaggctagtaatatgcttcctatcatgcttttcttataacatactaataaaacaataagctactaaagtaatacatgcttactgaaccgtgagtcgagcttatcataatgatgattgtacatatcgtgatgatcttcgaagacaacttagtggctctgatacaaaattgtaacaccctactagtttaggtgtgttattgtgattttatattaattgtgtaatttgttactaatcaacaaatttgttgcaattgtgattaattaaaactttactgaattacccttttattgaaaacaaatatcttttgcataaactgggttcccgtatttaaaatatttacaaccgtattacaaaatataaaatacaaaagttgttgcctagcgactattcaaaatgcagcctactgtctcgaagatcgtgcgctctaggtctaaccaccccgacatgtacaatcttcatctgctcgtactcactattgctcagccttagctttgcccttacctacatatgtaaacagtgattgtgagtcgacagactcagtaagaaaagca

SEQ ID NO: 79841 - DNA, 1705 bp, Cannabis sativa
atcccggtaaaacatattccaacattgatgaattacattcagtaattatggtacttacccaaaataagtgtggtcttcactatactcatcctaatgctaaaacaggagatacagaatatccaactaaggtgaccagtcgccacaagaagatcaaactgacaaagaccaactccctaaagatatatagttgaagatgatgaatcaggagagaatagctctgatgatgtcaaagatgatcacctggatgcagctaaagatgatcaccaagacatggctgctgatggtggaaaaaggaaggacaatccaagcaagttagatcttgtggtcatcatggtcatcatgaacctattggacactgtccttcaaatacctggagaagtctcctttaggggagggaactcctcaagaaaggcctcgtttggaaagtggaaaatggctggtccatctctttgattgactctctttctttccttcataattttaaccctgctgattacaatgtttgttttttcattgataatgatagtagctggaattttcataaacttcatcaattcttaccctattatcaagcccaagagatcttgaagatacccattgacccttcatcaaatgataccctaatttagggacatcatccatcaagaaattttactgtcaactctgcataccacttacattaccatcttcctccaacattgaatgcctcaaacactggtggaaaacagtttggaatatcaaaacactcccaaaaattaaacattttacctggaaagctttcaaccacattctcccttgtagtctgaacccttcccagaaaaaatcctttcatagccccttctactatttttgccacaaagaagttgaatcagtcacccatgccccttctccactgttccagagctaagtctgtgtggaaataatcctctctcaaagccttctatgtagctaatcttaattgcgacaatactgaattctatttaagaggcttagatcatctaaacattgatactttcaccttatttattagtctaatttggcagatttggaacaagagaaataatgctctattcaaccgaactactaacaatcccatggaggtggaagactgtgtttgttcattgttgcaggactatcaagctgctccaactgtcatgccccaacctaatcctttggcatccaatgcatatgatcaggccctacatcttcatgatcaattcaagctttcgattgatattgcccttaatttgaagcagtatagaacaggtctgggagcttcaatctgagacaaccataaccagcagattgcaggcctttctttgtccaagtggggtgcttctacacctcttttcgttgaagcccaagctatgttggaaggcctctattggtgtgctgcaatcaaaattccacttgtgtccattgaattagattgtttacaattaatctctaaagtcaagagctcatggaaggacaatttgactttgtcaagtgtaattgagttaattcggaaatctctatctcaattccctaatgctttcctttaccacatctccagaaatgttaactgtgttgcccaacatcatgctagggaagcattgaaacaagataaggatcgaatttggagaatttaatttccctccatctcctgtagctgttttgtggtttcctaatctccccctctttatagttacttcaaaaaaaaaaa

SEQ ID NO: 79842 - DNA, 2947 bp, Cannabis sativa
tatttctgatctatattaataatcctaataaaatgaaactccaaactaaaattttcttttatgtgtgtctcaaaagttaaaatatataattgataaaaaaaaaaatgcgcagcaaatttgtactactaaaagacaataaaaaaaatgcccatcaaaacgataccattataagactaaaaaaaaaatagggaactttttatcccgattcttactttaaaaattgggataaaaattcacacatgaaatactaaggcaacatttgaaaaatacataaaaaaaatagtccttacaatactgtttttgtctatttgccaaacaaggtccttgttccaaatgtaaaagtggaattaaaagttacaggatacctttcatcttactttttattttttcatgtataaaaaatgggttaaaaaatttcttttgtcgtagttgttgttgcccacaatcttgctgagtatattttatttgtgggaactggtaaaatttggtggtcaagttatacaaattgtattcagactaattcaacatggttgatgacatgaatttctaatgatattcgcatttttctttttttttttagagctattactttttattagggtggagttttgattttcttctaaatatatgtaaaaggttggacattcgatctaatttaatatttttcctctcattcgatctaatctaattagtaattggatttagaaaataatcatgtgttccgatttaattagacctcaaaatctaatctaatctaaatattaattggattggatcgattttgtgataaaaattcaactacacaccaaattttttatataaatttaaaaacatgaagaaaattacacaaaacctaattgatattgaaaacgggaaaatgaatgagctattacgttttagggatttaagattatacacgtgtttagaaaaatacaataagtcaagcgtgatattcttttagttttaggtggagtttaattattataatttgttagtcgtttgtaattggatcagatgatataattagattagatcgatttatgacgtttatataaggagtgttcatccaatctaattcgcactattttgctcatagtacatcctgcactaagtgtggattttaaattttggatccaatccaatccaatccatgcaatagttcaaatctaattcaatctaatcggcaaaagtatggattggatcggttattttagattgattactttttaatatttatgaaaaaaattattttttttacataactaacaataaaataaaataaattattgttattttatgtatctaataacaaatttaaataatgaaagaaaaattgtatgtataaagaaatatttaattttattttaaattgtatgttttaaaaaaaaattatgtataacaatagaatatacatgtgatcttttaagttttgaaatatagttgtattatatgcattagatttttaaattattatttttttcacaatttaattgtatatataattttttaatttttttaataaatacgtatggattggattgtagttagttttatatgtcaatcaacaacacgtgcagatatccgtacgcagtgaattgaattagattggatcgtacgattagatcgaatattttatgaatactcataatttaaatagttgaaaataagaatattgtattgttcaattttaaaagatagagaagagaaactgaagatagttgtaaagagacaaaacgtgtccgtactgccatcgttttcttccatagaaaacttttgttgcattgatcatggtcatggatgctaatgcattcgaaggtaaatcactttgtttatttattatatcatttaatcggtaattgaacccctgttcttactcaacaaactcacagttgagtagagctagccctagtccccaaccgactgaatatataaattaattcattcatctattcttcattcctacttccttacattctgtcttcatagaaaaaatctacatacatacccattttatgatcataacatgctttttatgtcatcgttacggaatattcattctttagtcttgtcttgattttcatttcttgattttttttttccacaaatatatcaagaattatgacttttcttgttgttgttcgttttatactattgtataattgttaaattctaaacaaaacaaggtaaagcaaaaaacacgaaggttgagtctcggtcgaggaatggttcttcatcagtacagttcacatgggaaatttacaatttttctaaacttagagtgaagaggctctattctcatatattcaatgtaggagacttcaaatggtactaaaatactagttttatttgctactactgttcacgggtttgtaattatttgacccttttggtaataatttgaagatatttaaattgaaaattttgtaggaggattcttgtttttcctgaaggcaacaacgtggattatttatcagtatatctagatgttgctgatcctgtaaccgtgcctcatgagtgctgtagaaatgctttgtttagtttatctgttatcaaccaaattcattctgaacacacaattacaaaaggtattctttctaggtttgtactaagtgagtgttctgtttcatattcatttgcccatgctaatatctttcctttgcactttgcagcaatagaacatgagtttaaagcaggtgagaaggactgtggcttcacatcatttgttcctcttatagatttatatgactctagcaaaggttatcttgtcaacgacatttgcatagttaaagcagaggttagtgtgcatagagttattccttacctgttcacatgaactaatatggaaaatcattaaccactcatgaggaagatgaactcaaatggtatttggataccactagtgcctaataacaatgatccatcatagttattaaattaaagtatgtag

SEQ ID NO: 79843 - DNA, 952 bp, Cannabis sativa
gtgaagtacttacttgttaaagttgaaactaggggttttgaaatttaaggcgttaaaaagaatcgtgcctaaaaacctctgagacgatttatcagctcgtcaatgctcccctagaaatctgacgacaacagcacaacaggtaaaacaatctctaagaatgggggttgcgcttggaaaaagatttgatttaagtcagaggagacattcattgggatatttctagattcttgggcttaattctctctctctctctctctctctctctctctcagaaatctgggtaagaatatcgaaatgacaaaaatggtactaagttgacctctctcctatttatattcaaaattgtgatctgcgtgccaatgatccaatgacccaaatagtatatgagaaaaatacattcttcaagatccaatggtctgggaataccaacagttgtcgttaaatgctatgcacgaaaatcaaggcgtatgtatgatggcattcgcctcgaaaatctcattgacataatcgattatcattttgctacctgagacctcacacgctccctcaagctacatggcgcgcacggaccaagaaatcgatgacacatgtattccactcaaaatatgaaaggtccacatacatccacaactttctaccttagaatctcaaagggcctgagttgcttatggccccgcataccacaatgaattcggatggtggctgcaagccttcacaatgctcaagcctcgaaggcttaggggtagatggtattcatgtttctgggtggatgacgcgtatacttccaaggcccaaaatcaactcacatgcccatccattaggcgtaaaacaaagcaatgggtcagcctatatgcggagtcaaactacggctccaagttcagctataaccttgtctcgataaagctagacctttttggtttaggaaggagaatctcgtctagagaaatagaga

SEQ ID NO: 79844 - DNA, 1708 bp, Cannabis sativa
tatattatacactatattctttgagtactcgctattctaagggagtactcgcatatctattttttggtatccaagtagcctttgaatacacgcacaaaactggtgttgtcaaaatttgctcgacaacatacttctagataatgttaataacaatacttaatatttaaatatcaaattgcatatatcttaatatcacataatttattataatattttttataaaatataactttttagatagtgctaataagaatgctcaatatttaattatcaacttgcatatatctaaatataataattattatttgtaacgttgcttttgtaaaaatagttaaacaaatgctaaatcataatgtctagcactactacttaatgttatagttaagtgcaattatagtcatcactccttcactcccgtatttaaggtacttaattgattgtacataattataatttataaatataaaaatgaaaattcacataattataaaaaagattctgtacacatataatttctaactttttattatacctgatttttatttattacacaatgattgatttttattttttattttttttagaaaattaaacgttataattaataaatcaaaagtcatttacaataacaaagaaaattaaataagaaatttctctcattcaacaaatatcttcatctaactctaaaacatactttgctaatccatgtgtagcttgattaatatttttcttagaatgagaaacaataactctaacaaaaaaagataagagaaacaacgtaaataaaaaaattaaatccgtgtacatgataaatctaaagataaagcatttaaagcattgaagactcacaaagcatcagtttcaatatgtattatcgagagttgcaactgcgtgacccttaattgctattttttttttttttgcaaaacgacataatttgatttttctagtgttatctgttttttttttacgctatatatatcgatggtttatcgataatatatcggtggtaagcgtaccaaggttggagaagactcttatcgataatttttcaatggcatatcgatggtataacgatggtttctcgatgatttccatggctatgtgaattttttattttttttatttttttttttcatttttcaatttcttatcgatgggttttcgatgattttcatggttgtgtgattttttatttttttaattttttaagtttcttatcgatggtttctatttgatggtatatcgatggtatctcgatggtatctcgatggtatctcgatggtttctcgatggtatatcgatggtttctcgatgatttccatggctatgtgaattttatttatttttttttacttttttattttatttttcggtttcttatcgatggtttctcgatgatttctatggttgtgtatttttttttgtatttttttcagattcttatcgatggtatataaatggtttttcgataatttctatagcatcaaaaaattcacacaatcatgaaaattatcgagaaaccatcgatataacatcgataagaaactaaaaaatgcaaaaaaaaaaaacataaaaaattcacaccgttatggagataatcgagaaaccatcgaaaaattatcgataagagtctttcttaattttggtacacttaccatcgatgaaacattgacatattatcgataaactatcgatataacgtaaa

SEQ ID NO: 79845 - DNA, 1702 bp, Cannabis sativa
  modified_base (240)..(245): a, c, t, g, unknown or other
  modified_base (1635)..(1665): a, c, t, g, unknown or other
acccatgcaggaccccatcggacacggcatcgggcccatcggacccgacttgaaaacccaaaaaaaaatgcccatcggacccatgcatcgggacccatcggacccacacagtcggaccatcggaccctattcttccccagattcggaatagcccaatctctgtgcgaggcataaaaacccaaaaaaaattggtctttgtgcgcggcatcggaccttcttcttctccggtggtctttgtgnnnnnntgcgtgtttacggtgttgtggacggtggtgatgggccggcgttttggacggtagtgagggggattgggggttgtggttcggtcggttgagagagagagagagatagacgaagagagagatggggttgagttatgagaggggtagtattgggttttagataaaattgtcacatattttcaattttcatatgtattcaattaggaaaaaaattatcccccaattaatgcatagatattcaaattttcctaaaataatatcccattttttgcttttcttttttacttattttgaatagtttaatattatttgaataaataataataatatatcattttttttttacattggtggatggagtattcaaaattgggatatcctgtttctgaggagaaatgtggaatcactagattttacctatgtccacatttatttttctcttttacctcatctctatagttattttaatttatgaattattattctcataaaatattactatatattaatcttgaattattaatattttgtatatttattttagctatttacttctcaaatttaactttatgatgttgtatttattgttatattatttgataatataattgatagattatattgtcacaaatgtattattataaaaataatatatattaaaatatttagaagttatattatgagatataatgtgtcaaacacatatatattgtaacataaaaatctgaatataaaatttgtaatctatatcacttggtaatgttcttgattcgaggtaagttgcgattggggtcatccaagtaggagtattgtctagcatgttgatgccttcagggcaagcaatgctaggctctccatggtactcaacggggactaggtttgccttgtcaactattgcacaactccctagtcgagccaaagcgtctacaattgcgctttcttcctttgggatttgctttattgtgcaccccttgaattatgctaatagatctttaatcttgctgaggtaagctgtcattttttccctcaggccatatattctcccaaaacatgattgacgaccaattatgaatcactacaaatgtctaagtattcagcgggtatttctcgagtgagttttagttcaacaatgagtgcttcataatctgcttcattattcgaggctggaaacccaaattttatagcttcgtgcctttgttgtctccttggtgggtaattcctgcacaaaagagttgatcgatagatgacccatccacatgtagcttccatattggttcttgttttgtcttttgttctagttgttcccgctcttgtccttgctctggctcaacactgtttctagtaacaggttcttggttgttaatgttgggaatattttaccaagatctagatnnnnnnnnnnnnnnnnnnnnnnnnnnnnnnnatatgaatatctctaaaataatgacattaaacacata

SEQ ID NO: 79846 - DNA, 806 bp, Cannabis sativa
aaaaatcccatgaaaaagctcttcaccaattcttcaaacacagattaataccaattcttcaattgttgatgctgtttcagtttcaaactgacccttaataaacaaatggttagaaacttgtaatctagtcacctaccttgattctgggaagttcacaattggtggtttttttttttttcttttgaaaagaaaaatggaaacttgtcactagaaaaccctaaagactcaagctttttgtattatatattatcttatatctaaaaaggaaaggacttgagcatcacaaataagaggaaagtgaaaactatgaaagcgaaatggggtgtttaagctttctctctctaaagggtgtctctttctttcttctttctctctctaacaagttcctgaatggaaccagaggaaagctagaagagaggggagagagtgaggtggggcaatagcttccaaagtgcgaggtaaggaaggaatttgccaaaaagtggcgcttgcgtttggtaccactccctaagtgagcgcgtggggactgtagtggtcaactacaagcgacaaagtcacaaagtgccacactcaaacatgggcttcgaagtgggcctgggccgatttcaaaagtcgcgtccgcactagttttttttttgttttttttgttttttttttatggacaaagattttatttaacaagaacgttcatctattacaatagataataaatctgaaagagcattaagctcactaaagatacaacctgacagaaaacaagactttttcgcaacacagtgcgtggccttgtttgcagatcgcttaac

SEQ ID NO: 79847 - DNA, 1316 bp, Cannabis sativa
caaaatcgagataggataagtggggattcatgtcagaatatactaaagacagtcgcggaccaaagcttaggtcacttcaaacccctaaccgagataaaatatcctgacaaaaagagactgagagataaaatgtcccgacggaaagagactattctcagcagtctctaagcataacaccaggggataaaataagaacagggcataagaagataataaatgaaagtctcagtaatctattacaactggatatataaagcacgtggaggccgaagtcaaaagtaaataaaagatatgcgtcagctaatcaccaaaataaagacaaatgactcatgcatgcagaagaacgtaatgcataaataagagaaatttacgtagaaaatgcatgcattaagaactggaaaaaaaggaacccaccaaaaataaaaatctctaactggatttcttgacaaaaattactcacactttttggtcaaaacagacatttcaatgtttaaatatatatatgaggagtgttactcttaaatttttattataatttcttaattaatttctatgctcgaaaatatatattaaatttttttttttcaacattttttatggccgtattcgttatacttgcaaaacattattcctgtaaattttttaaaattttcgaattgtttaccgtgccaaaaataggtttgaagtattttgaatgcgtgtagttaattaaaatatcatgaacttttttttggtattgtaaactattcggattttttttaaaatttaaagaaatgatactgtaactaaacgaataccattataaaaaaaagaaaaaattgtaacatgtgatttcgagtgtctaatgagtatgagttgtacatatgtgtacttattaataaatatgtaattaaacccatggatgtacgtctaatgaaaaaaagtctctctttttgagtgttttgtctgttctctctcgttgagagcctgaccgttttgtcctatactgtccgattatttttgtttttgctgtctcacttggtacgtgctctgttatggcatcaagcagtaataatgtggaagatcttgaagagcgttggaaagaaatccaacttgaagaagaagaggcagaggagactttctatgaggataatgaagcagatgatgattcgaacattgacaccagatggtgtttggttggtcgactactcacagggaagatctctgactttcacatctttcaaaacatcatggctgatctctggaaacctggcagaggtatgtacgcaaagaagctagatcaaaaccgattcttgttccagttttaccatgagtac

SEQ ID NO: 79848 - DNA, 4802 bp, Cannabis sativa
  modified_base (4126)..(4127): a, c, t, g, unknown or other
cacccgtcatattgttttcaacaaaactacattttcttttcaatccatttcttcatcctctccacctcctattgctccttgtaccattatcatttcccccttctagtccatcttttactcctcctaccccatctagtcctccatctatagttctctcctctccgatccattgttctacacctttgtctgcaatttccattccttctccttctagtcattctcctagatcttcctcctcatcttctcatgattctcttccctctcttcccttagtaggtgatttgcattgtcctcatgaacataccattgccccttaaatgtacatcctatgataactcgtgctaagtctgacatccacaagtcgaatctgttttactctattgttgtaagtactcccgtcgagccatcatctttcaaagaggccagcgattatcttcagtggaacaatgccatggaaactaaatttgttgctctcatctctcaaaaaacttggattcttgttccacctccgcctaatgctaaaataattgggtgtaaaggggtgtataatctcaaacttagtgttgatggtttggtttattgatacaaagcccgcctggtggttaaagggtaccatcaaactttgggccatgacttccatgagacctaaaacctggtattaaatttaaacccagcaccattcgactagtacttcctttggctatctcttccaagtgtatcattaaacagttggacattcaaaatgcctttcttcttggtaacttagaagaaactgtttatatgacacaaccacaaggatttgttgatccgaatcaatcgaatcgtgtttgtaaattgttgaagtctctttatggcttcaaacaatagcctcacgcttggttcatcaaactcagtacaactcctcttcattagggtttcattgcttctaaggttgactgttccatgtttgtatatcggtctggctttattatgctcattgtgctcatatatgtggatgatattatagttactggttcatgttccactaccattgttgccatgttactgtatctaaactctcacgttgcagtcaaagatttgggatcattacttttttttcttggtattcaggttgcacaatctcatgctggtcttcatctctctcaaacaaaatacatttgagatctcctcaccaagacgggtctccttgagtctaagccggttagcactcttctttctcttgctcccctttgtatacatgatggcgatcccttacaagatgcaactgaatatagaagatcggtcggagctctccaatattgcacgtttacaaggattgatatctcctttcccgtgaacaaaaaaatgccaatttatgcatgctcctaccaccactcatctctaaacaaccaagcatatcttaagatacctcaaagatactgctcatctttgccttgttatttagccatataaatcgttccattgcactattttactaatgcagattgaacatcttgtctggatgatcatcatagcactaccatattgtatattctttgacatgaacctcatctcttgtttatcttccaagcaaaaggtcatttctcgctccaacactgaatgcgacgagtctgaatatctggagttagccaatcgtgcttctaaagtttcttggcctgagtctcttcttagggagctcaatatctctccccttggtgcaccaactatgcattgtgatgacacgagcaatttgcatcttgcctctaacccaatccttcatgcctggacagggcatgtcgagattgactaccattttattcgtgaacgagtcaactatggcatcttatctctgtcctttactccatcttctgattaggtggttgactgcctccccaagccatttgtcacttcttgtttttaagaacttcaaacccaactcaacattcttccttgcctgttgagtttgcggggaatgttaaatagtaattagctttattattaatttaatttttttgttcttttgtaattatcaagatatatttctttcctttattctttaaacaatttttattttgtcctttggtagtcccctccaaggtacctatatattgtatagtgtaaggaatattttgtgtgaaggtaacagaaaattttttaacattcaaataaagataaaaatttgtgcaaataatcgtataatcatacacatgaaatgataaaagaaaaagtggttaagaaaaaaatgaaaaaaaaggaataaaaatatttgtaaatcatgtaaaaacaaataatatatctacaacattatactttgtatgaaaaatgaaaatgaattattcaaagaattttcttacctatacttgagtaaatattaaaaataaatagaaaaaatacatgtataatgtatagaatgacataattgtaataaaatattaatatcatatctaattattaagttaaattaatttttctcaaaaaaataacacttgttatcaaactaaagagagtacagaagagaattttcttaccatctctaatagaaagatctaaaatttctactaaatttggcacaaaaaatgagtttgtgctaaatttggcccactattgcaattgtgctccaatacacatgatgtaaaataagaaaaaaaaaaaaaaaaggattatttcacaaatatacaaaaataacaaaaaaaatattacaaaaatacggttgtatggaattttaaacattgttacgatttttataattttatttacagaaaatacgatcttttatgttgtatttttgttatctgtgcgttattttttgttgttgtttaaatgttattttttgttacttttatgtactttttttttgttgttttcatgttgattatatagaaaactgtaaaaatataaaaaaaaaaatatttaaaccgaaaaatatacttttttttttatatagaaaatagtgtttcatgtaattatcccaaaaaatatttgattatattaatggtcatttaatattttattacaaatgtataaaaattattattttttattcctttattatttaattaatggtaatatagtaaataaagaatgtaaagtttagtaaatattatagtaaatagaaaaataatatttattgtggactaaatttagcacaaagctatattttgtgctaaattttatacaacttttagcatgtgctaaatttaacacactttttaaaacaccattaaaataataatttttctttaagtgtggtaaaatataacaatataccatattttcaacactccattagagatgctcttagcactcctcttaatttatacctcaaaatgataagcaaatgttttatgacagaaatgctgaacaaatagaagagcatcctccttcatccaccctgatattttcttcagaagctccttataattcttcatatgctgtaataatcatattactatcatatatagcacaaatcatagtataataaaacctcgataaataaatacactataaaaaataattctattttttttttcagttggctagtttaaatagagattcacctttaaattaggaaaattgtatgtattggcatgtctcatgtgtgagattaattacacataaagatgttgtggtataattcttctaaatgaaaaggtttttgcattcgtcagttttatcgtagtcccaaaaggagtcttgtggaatgatagttgggtccagaagggagttcccggatgactatcatgtccactccgggtttagtcttcaggatagctagcccttccttggaaaggagttctagctggctagttatccctcctagattggtagttctgaatagtcgacttcagtgaacttacatcctatccggaagcgtcttcagtaagtgcctttcgtccgtgagtccggaaactcattcatgatcccaaaggccccagtacttgtgttgacatggagacttcgctaaatgaggagttggttaagttagttatttctagctaacttaacaatctcatttcgtgcagccaccgactttaggatcttgatcctaaggctataaataccacattgacttaacctttagaaacatgactggaaattaggagttggagaactctattaagatgagattgagagagagagagagagnnagagagagagagagaaagaagattgagaggtagagagagaggtgcaaagaaaagagagatagggtttggattttgtaagaagaatcttctatagatgaagaagattcttgggtaaaagtgtgagagttgaaacactttgtgagaactcaacaggaaatctcgtctcgattgtattgtacctattcttgctcaatcaataaagaaaaatcacggtggtgttccagaactggagtagagccataaatcacatcgatctaccagacatgaaccagtatatatcttggtgttgatttttttattttctgcatttagtgttttctagtttttatcactctgtttgtccctgttttttatctccgataattgttcttgttgataatcttgtcattgctaatttggttgattattttaaagtttcattgatttgattctgaacaattagtttttattttcccacaaattagagcttggtaatcaatcaagaacgtagaatcgaggttcttttcgctgcaatcttaaagaaacttgaaagtcatcagtggcgagattcgaattggaaaaatttgatggaattggggactttgctatatggagagaaagtctgaaggggatgcttgtgcagcaaaagtttccaaggttcttggagacgagaagttattggtagaaaagaaacca

SEQ ID NO: 79849 - DNA, 2425 bp, Cannabis sativa
aaaatacatggtccattttgtcatttaacaaaacagatggtctaattagtaacttttacaaaacacaaagtccaaaatggtatttacccattattatttcatgtaaaatagtgtgtatacatattgttgatgcggttttttgttaactgatctaaaaaatttgtaaaagaaaaataagaggacttcaataaattaatttggctgaataaaactgcaataaataaaatagacactaagaatttatagtagttcacagcgatggtaatggggctatgtctactttgtttttattaattggatccaacacaccagagttatgttctcatgagtgtgtagacaataatacagcaatatatttttaggcaaaatctgtatcgagacttatgaatacaaggctcatgggaaatccaatattaacaaatttgataaagatggtggttgtaaggttcttgggaacaataaaccaataaaagtaagaaaaaagaatggtccctgatcttgataactgtgcaggtcaatggtgcttggaataaaggagacttggtgtcaacaaagtatgtaggaaaaaggtgaaggaaggtatgtaatgttcttcgtagtcctccagtgagcaagcgattctcctcacactatcctatcatcatctttatataggttttaggatttgttagtgatcccccacgtgtcaggatgtctcactaacaaatcctgtatttttttttctcaataatgaataaaaagttcaaaaaaataaatatctacaaaattctcacttatttctaggccaaaatctcacaaacattgggaaatggttattctcagctagagatgcactaaattggagtggagtgactagggatgtcatctctcggcttgaaattcatgacattggtgaaaagtgtttgagataggtgttttagggtggcacttctcgcatatgatgtcacgtgggctgtggcatagttctccaacatcccacacttaattacactacttaattctcgagtaaagtgtactagcctgtcttgtgagctaattttgaacctgataatttaagagttgagctatgactatgaaagacacttagaaccgtcttgaaattatctttccagttcaagtcgaaccaggtcatttggataaaatttgagagagttatgcttattttattgaagggtaatttgtgttattttgctccaaatgcgagcactgacacagccaaatggtagctctcggtcgtgcatgttccctgaccccttgtgtaaagaccgcttcactttaatacaataaattattaaataattaaggtttaattataaaattaagttattaaccatgatttatgtatttatggagattaatttaaatttagaatgtgctatttatgatatatatgaaatttcttattttccgtatttgtgcccgataacagtgggacgtaacgttgggccattagagagtcacattttcatatggtttagaattttattagtattggggtaacataattagatattggaagtatcgggaaatgatcaggatttagaaatgaccaaattatccttcggtgtcattaaacttttggtctatgctaaggggcaaaatggtcattttggctaggaatttctttttgtcttttatggatattagcatctgatttttatttagatttaattaataataagttatattagtctattgaaaagtgaagttagaagattaacctagaaagttctctctctcaccaattctctctctctccttcgaaccaacaagcaaccagctggggattttgattttcttagcttaattcagtgaattctagcagagttggagtgtttcaattcaaggtaatgtcattataataacatattattatagagtagatgtttaaaaatcaagatatttatgttcaaataaaatcaatatatgacagatttttaaaaatcaacacattatcatgatttttaaatataattagtacggtaatataaaaattttaaatcaaactcccaattgttatatatataccaccttcatgtatatacacaaaactaatttttcatcaaaataccttaatgccattacaatggcattgagataagaaaagaaaattattcaactatatgaatctcatttgttataaaaatttattttttgcgacatcaatcaccattctttacgagcaacaaattatgcaaatctcaaatcgtaagctaccatacataattttcggcaccaatagattaaaattgtatatgaaaaataacaagagtctacatacatcttatgtattatacaaacaggttgtttataagcactatacatattaataaagtgcttttacaattttatttttacagatgagattatattattattattctaaataatatgtatgatgcatgttgatatatatatatataaa

SEQ ID NO: 79850 - DNA, 2718 bp, Cannabis sativa
aaaaggaagcttcaacttctgcttcctctaaatcaagttgagctaccacctgatcacctatttccagtggttcagtgaaattaagctgagaagaaggggttctcacctgattcactttgaatttactccaagcaatcttagccgactcctggaaatcatgagctttagcctcgtccacccaacttctcgctgatggggtctgaatcgcagggaccgatatctcttccttccatgctggttcgagttcttcgcaggtatccaagaacacctccgatttagtcgcagcatcatcttcctggattgaagggagctcaggtctctcgcagcacagggttgcccttcgaactaggcttcgaaaccccttttttcctcttcgccatgggagggaaacaagaggatcacacgccttttccactattatttatgtcatatttttattggtacttcttattttatatatttcaatcattctttaaaattctttaaacgataaaaaataactaaaatttaataatattataaataaaaaaatcctaaaatctaaatttgtgactttctttcttcttcacgctcttcttcctctctccatcttcttcgtagttgattagtagcccaatgacggtggatgacaaatcaagaggaagagatgggattgagatttttgggtcctagggaagctgatggtgctcccttcatctcttaacgaagactcgcgaagggaagaacgaaaggagatgcgacaaagtgagagggaactttgagaaggaggattcaaatttgaggatggaatttgggaggtgaggtgtcgttcatggcctctattttctcgtcgatgctgagaaaagtctaggcttgtttgtgtagagagattcaacttgagagttggtgagtttttcttctgtttctgtttgaagtttcatcatttattgtttgagattgtgttttcttttgtattaattgttttggatccaagattggagatttgagatttagtttttattttgtgtttgaatctgatattgagattgtttgaaatatactgtggtgttattgttgttgttgtggtggtggttggtggtgctctaatggtgatggttggggtggtgggtcatagcaaggatggttgtggtgggtcacgactagggatgtacacggggtgagaaatttacaggaagtgctccccccgtccccattcaccttaaggattttaattcccaaaccttgcttattccccatcaagaaggggggggatcccctaatggggcagggaatcccctactttaaaaataaagtttattttaaaaatttaaatgtataaaattattaaattacctaaaaattaaaacattacacattatttattatttaaaatactaattattatacaaaaacacaacttaaaaattataggagtattttttatcttaaataagttaaactaaaattaacttgcaacattagccttggtcctcatagcatccgccatataggcagagtccccacttgccatcatggcaaacttgtgagctccgagtttacagctcatggtagtgctctgatccaataaatcagccaagaatggagccacgtcagttccaaccctagggtgaaatcttttcgtcatcttagccctattaatgaagccagggtaaggctcatcccacttgtcatagtcggaaaactcggcgttctacctagtagcaatattacaggctaactttcttatttcgtcatactcactgctatgcctcttttggtaaaacttctcaacatcctccagatgtgccttgccttcctctatcactaaggtaggcttgatagaagattgaagtgcggagggggaaatggaggtaaagctatgttctccctggataattgtgtggcagtagcaagaatgatattaggcgttgggggtggtggaggcgaatcctaattttccttggtggatctagtgctccttctaggtgaccttccattcttaatgaccttagacccctttcgagactaaacttttgtagcctatctccttgaggctaccagctgaagaactttctctttgatcttcacctttgcctctttattggcttcaccctctgaggtaccagatcactacttcttcgaaagcacgactggcccatcataatccgagctatcctgctcactgctccccatgggtacttgctgcaagggttccacattcaaaacgggctcaatcaagtcgataacggaagcagacaggtattccgtgtttggagccttaggagtagcctctttgtttgaagttggaggtgttggcttctgagatccactcccaaaagttttttttgttttgatcaatcagtaaattcattatcactagaaaatttacacactaccagcacctcagccgaggcctgcacaagcaatctatacagcaactgactttggtattccttgttctctataatctatacctgctatttacactatagacttttctttacaacaccttatgataacaaattgaacttcctggacaaaacaacctgctaaccacaaatagccaaactggcagcagtaacaagcagaattgtcgacagcaaccatgaaaaaacagcagcaggatttcacctcctgaaatgcaaatttaaaaaccaatccttgtcgctttgtttggttttgcttggccagcagctcagaactctaaattccacctcctctattgatttcctcaccacc

SEQ ID NO: 79851 - DNA, 2250 bp, Cannabis sativa
cgtttattttactttgataatgataattgaaaattacactatttagaggatgccatctcataagggtgctagaaactatacacatggtatctagcactcttacgaggtgtcatattgctattggtgcaattcaatatcgggtcctacttattttactttgataatgattatggaaaaatgctaaacattagaggatgctacctcataagggtgttagacaccacagtacctcatataaatgctcaaaaagagaaatactaaaagatacccatagtgcctagcacccttatgagatgtcatatatctggtgtaattcaatattgggtcccacttatttcactttgataatgattatggaatattgctaaccatttagaggacgtcacctcataaaggtactagacactatagtgcctcataaaaataaaaaatgctaaagggcactcatggtgcctagcacccttacgaggtgtcatatcgctactggttcaatttaatatcgagtctcacttattttatttcgataatggttatggaaaactgcaaactatttagaggatgccatcttagtggtgcctcgtaacaatgatctttgaaaaagagtgcttgaaaaaaaaagctaaaaataaaataaagataaaaagggagagaattataatgatggtccttaaagaccaatgaagaaagcaaaatcataatcttaaagatgctttgtaaatgaatgaatataggtgcttttgtttttctaaaaagacatttttgtgagcaccaagagaatttcttctcttttctctctctctctctctatttttccccactagaagcacaataagacatgacagttgtcccaaagtctttggaatttaacaatttattgagacaccatttttgtcttgatctcaagaaacaatggagttcactgaaaccagctatggctaattagaatagagatgtctatacctgcggctctcctataccagcatagatataccaatcaaaacctgagctggctaataataaccctacactacattattcttctgaatggttattcaaaaatgataagctggtctatttcatagaataattttctttgttgaaagagtgaaccataacaaaactactattgtcagatcctagatcgatatctctaacctgcatgcataaattgacttcaaccatacaatattctatattaagtttgactagcttaaagggtgtcattttcagatagctacaagcactggaagaccctgtggtgtattttccattgtgaaaaagtgtaaaacaatatacgaaccactattataaggataggattaaggagtacctgaacctaatactacatgacaaacagttcggcaccgcctttctttccacctagctcaatttaagcttattgagaaaatgaactgcatatgatatccagtaaagagaatatataaagtggacatgaacaaaaaagtgaaaaactaattcactaaagtaactttctgtataaacttcacactgaagtttggtaaagttaatcttccaattaatgggtgaaaattgacagtactattaagatatgaagtctattgattgttcatatcaagcattatgacttacatgcatctgtaaatatttctctttgccatacctgaaaaatagtatatgacaaagataactttataagatgtatttttattaaccgttttctaagatagacatcatactgattggaaatgatcatcaggacgatgcattgctgccatctaatgtcagtaacaccttgtataattctggacgtcgatcacgaaatattccccaactgtgtctttttgacttgatttgatccaaatcaaattgtgctatgagaacagcttcgtctttatcatcagcagctgcaacgatttctccagtcggtcctgttattaatgtatgaagacttgttaatatgtaatatacaaagaaggcataagaatacgccaacaaaccaacgaatgatacctgctataaatgagtttccgtaaaattttatttcactttttccatgctctgtctcgattacctccttgcctatgcgattcgaagcaactagaggaacctaatgtcatcaacaacaaataaattcctatttgcttcaaattttcaaacagaaatgacaccaaaccatgccataattttgtcaaaaaaatactcaattatgttagaccatgtaaaaggtgaaatagaatacactaattactattccattagccaaacttc

SEQ ID NO: 79852 - DNA, 2422 bp, Cannabis sativa
ctcagttctttgacttgaccaaatatacttatgtgcaattcagtatgaacctagtaaatagtaaaaatatttttctgctatttaaagatctttaaaaacaaaatggtgttaaaatgttgattgcatgccatactttattttattaaaaatatgagctggttgaaacatatcatattgtaagaagaaatataaatattattttaaattttatattttataaaaattattaattagatattatattttgttaaatgatagtttaaattttaaatttaattttcgttaaattaaaattcagtaataacttgaaatgaaagtattatgactagattgattatatttttaatcttacatctcttcgtggtagaaactcactttagattggttatattaaaaaagaaaagaaattgagttcagggtaatttgtactatttcaaaaaatgcatggtttaaattattatttaattaaatagagagtctaataggtaatttttataaaatagaggattcaaaatagtatttatccttaaaaaaaacatataaagatattttttttttgactatataagggagattagagagaggattatttattaattttttatttttattattattagtttttatttttcttaaaggaataattccattaaaaaggtccaaagccaaatggatggtgagatcaatacaaagatagtctttttaaagtaagctaagtagaaaattcagctaccaaactctaagaatttctaaagaaagagaccatttagctagagaatgagaaataacactactagctcagttacaatgagaaatagatatatgagaaaatgattttttcattcataaaaaatatcattaataacaataccatactcattgcagacatttatcttgttggagagaaacttcaccaggcacatgcaatcaaaaaatataatgatatgagtataacccaaccgcaaacagaggagaagactatggagaagggcagaagcctccgccacgtgaggttcaaaaaaggctgttgctggagtagtagctgaacataagaccattattttgacgagataccatcgcctccatgccaatcctctattgctcaaaacaagtactaccatcaacaaacatattatattctcccaaattcaactcaaaaaccaccctccctctgttactagagttatctagagacaaactcacggggactggcagaccgaagcattgggcttccttgtaacaccattagtagctaagagtctaactgcttaccatatcatcagaaatcagcttattggcatgcacaaatgtattataacgataccaaatcctctaacaaagagctagaaatttcttcaacttcttctttggaaagaaatccttaacaccaatcagaagctcttaaaaattggaagccatcttcaaactatctaaaccttacaaaccccatccttgacaaattaatttaagggaaggccataactacaagaaatctaatgtaatttcataattttgaaaacaaattggacataccttggaggcatttgtaccatatcaaaatacgaatagaatcacctctccctaccaaccaacgacaacccttcttccaaagatcacaccctaaaagatacttttccaaagaaacgaggaccttttagtttccttacatcagttattgagctgttgtgaaaataaattattttcattactcgcgtcaccaaggaatcatggaaattgtggagacgagcaacttgctagccaaaagagattgattaaataagaacatgtcacgaaaactcataccgccatccaatttgtgccaatacaaatgatcccaagtgtagcaatgcatttcaatattaccaccccaccaaaaataggcacacatactatggatttcattaataatttccataagaattcgaaacaaactcatagcatactagggtatagcttggataataaatttcaacaaaatctctctaccccaagaagaaaaaggcttggacttacactcaaaatgtttattcaagatcctatctttggttgacttaaacaaatcacttttactcttccccgcgaaacaagataaacctaaatatttgtcatggtagggaaccaaaaggactcctaagattagagccaacgacgcacaagatcatcaggcatgcagggagaaaagcaaactgcaaacttggtaagattcactagttgacccaactcaacgtcatgcaacaatagaatattcttgaatcgagtacaactttccaaattggcttctagaacacacaagctatcatcaacaaaaaataagttggatatcatagggccacacctcccacaagttaaactagaaattttatttaacctaattttttgtatgataatggaagtcagcccctcaacacaagcaaggaacaaa

SEQ ID NO: 79853 - DNA, 1429 bp, Cannabis sativa
tttttttttttttctatattgcattcttgtataacatgagtcataattccatttgaatttttcctggtgctaatatcaagtgtgacactttgggagatgcttttttttttttttttgctagcaagagtaactaaatattcattcacagttcacaatagccttcaatccaatcaagaagtaacaaggttggtaatggtggtagttatactaattaatacatgagcaaggtaaaatggaacctcaactaaatctaaatcaatattcttgttatcgtaaatctctcattccttaacatgggcactaaatcttcatagcacaaatgataacaagcgagctagagcaactgcaattataaacacagattactacaactactagtactagtacatttacgtacattcaagtcccattcctggttgctgaaaaccaaaatatgggtcctgtaaatcttgtaatccctcataaagagctgtttagatgtacaggttatgatgttcctggggcagtgatgcaatccagttctttgcaggtggaagaccatttattccattaggaagaccatctttaatgaaatgtatatctgaggtggctggaagaatgaaagcagtttttgccaagtgataggctgacaataaagtttcttttaggttcagctttttccagataataaaatcttttgatctttatgggacaaaagaattataagaatgtttttgattgtattatcatcaaagaaaattgacaatgacaatatataaagaaactaggtcacgagtttgggacataatttgatttgtaacgaatgtgtatgttatttgggatccagtggtcttttaagattttcatggaggcaccattgccaacttcagagattaagccttcataaacatatctcacaccttcattaagcatatctcactctaaagtaaactagtcctgtaaaggaagaagtaagccacttactagcttctagaaaagaggttctttaaaatacttagacctgagaagctcggcaaggatagaatttgaaatgacaagggatctagcacttatccatcaaaaaacttagaattacaatgatcggtctatttttctcaatgaattttaggagtccataagagattatatatttacaactagttgtaggaagcttggaacacgacattgcataccaaaggcatagcttgaactacaactttcaataccacttttttgctagctctaagaaaggttttgctatgcgttaagaatggcgttaactttattgtgaataaagttgatagaaacctttttagatctatgaagacattgatgtaagcctaaatacttgctaataaaatgtttatttaaagactaggtagtgtttggttggaggtaataaaatggaatgaaatggaaatgaaacaatcttcattccattcttttgttt

SEQ ID NO: 79854 - DNA, 2923 bp, Cannabis sativa
cttcacccgccgtattttgccgagctgactcggctttcttgtgtctaagctgcgacaccaagatccactgcgccaacaagctggcgtcgcgccacgagcgagtttgggtctgcgaagtctgcgagcaagctccagccgccgttacctgcaaagctgacgcggcttcgctatgcgtttcatgcgacgccgatatccactcggctaatccgttagctcagcgccacgagcgagttcccgtggagccgttctacgactcaaccgactctatcgttcgctcctctgccgcacttaatttcttcgccgtacctgctagtggcgcgtgctctgacgagaccggtggtggcgcgtgtcgtaacgatgaagcttctttgccttggatgatttctaatcctaattttgattctaagctcatggtggcggcaacggcggcggaggaggaggaagaacctaatgttgttgtgaaatcgagtactgataatttgttcttctctgaaatggattcgtttcttgattttgattactcaaacacgattcactctagctccataaccgatagcgtcgttccggttaaaatcaaaccgaatcctccatcttcgattgtaaacaactcagaaaattgcttcgacattgatttttgcagatctaagctctcctcgttcaattaccctgcgcagtgtctcagccaaagcgtaattctcaattccgctaaatcttgtttgtttgccgagaaagtaattagaaaaatttcatactgattaaatctccgttacataataacttctttcaggtctcatcatcgtcaatagatgtaggaatagtccccgacggaaactccatatccgaaatgtcattctctttcggcggaagcttgaatcaaaactcatcgaccgatccactgcctagcatttcagcatcaacgaactcgtccgagccaactcagctctgcggattagatcgagaagcgagagttttgaggtacaaagagaagagaaagagcagaagattcgagaagacgattcgttacgcttcgagaaaagcttacgcagaaactcgtccgagaatcaaagggcgtttcgctaagcgaaccgaaacagagaccgatctcgatctcgaaccaatctacggctcagccgctgctgcagcagcttttatagccgagtctcaatacggcgtcgttccaacgttttgattatggaaaaacgacgactcaaacaaaattcacctctgtttggatttcttttatcaaaatcttctactatgcttatttattaatttattagttcttcacaaaaaaattaaaaaaaaaataatcaaaaatcatgatcttgtacttcacttgatttgattcttgatttagaataatcgtacggtttaaaagtgttttctgaatattaattattacgtaatgttttttttttaatggtagagttacagcctttgataaatataaatatatatatatataaaatatgagttatattttttggtttttttttttaagagctaaagccaattagtgtaaaactctttgtatttaataataaatgtaatatttcaatcagtttcttaattttgattggtttaggcccccactataacttgttttctttatttaattatttcgtttaagtatgtttatttttttttaattttaatatcaaaagctgtgtatgtagtgcaagtaaataataataaaaaatgatgtaaaatcagtttcttaattctgattggtttaaggctacaccaacttgtttgttcacttaatttatttgatttaatattattattagtggtccgaaagtggcaagagttgtctaaccaatacaattatatcatttagtaatggttggactttggattatctaatagttttgtaataaattaagatagtggtgggttcaataataataataataataataataataatagaattagtattttatttttatattttaaaatagttttttgtaatatatttttatgaaattttatataaaaattcttattgtaactagcgctattgtataaaaacttttattgtaattaaagctacaattactttagaaactcaaaccgtaaattaaaaaaaaaatacagtatataaaataattttttttttgtgttatattatattaagtattagttcacatataatttaaaaaaatgactattacctatcaaatgtgttgagtattattgtccaataataatattctaataataatcagtaaagatactcatattctagttaattcatgaaacttgataaggttgtagtgaccttctctgtattattaattattatatgtatgacatgtttgactttctaagaaaagaaaaatcacatgtaaatgttctttttggtttctttttatagacacaaacaaaagactaaagcctttttacagtgagaagagaacaactgagtttccctgaaactctttttatttttgcagtaactatcatcaacacacacacacatatatatatatatatatattctaggctcaatcttctttgatatgtgtcaatgtcatttattgtaaattgttctatatactttgtattttgcttccagagaatattgaatacgataacatttcaattaatatatttaaaaagaaaataaaacaattaaaatgtatgattatgtattgtatgacatgttatgtacttagattgagttttaactaatgtactcgtgagttttgatacgatttattgtgttaagtttttactgttattttttttttacagttatttttaagttcttctactattgtttttagttattctgttttgtgttctaatgttgttttataaaaacacagtatttataaaaaatttctgtgtgatagtatttttgtaaaagttaacctaaatttcgatatttttataagttatgtatatcaaatctatt

SEQ ID NO: 79855 - DNA, 1855 bp, Cannabis sativa
tttatttttgtttgataggtatattttttaagaatatgaattggaagacaaaaattaaaaaaacataatacaattaaaatatgcattttatataaaataaaaattattaaagtggagtgtctttagaaatttttccagggtaaataaatttccctaaataaaaatatgtgatactcaatacataattacacaaagacccatttggtattgtgcaagatttgtttgagcttctgttaaattaaaaaaaaaaatatataagaaaagtgaagtgtgtgatagtggaaagagtcttacatgaataaaaacacttcgttataagtgtatataagatgctatctagtgatttgggtctgggccgatagggtcacccagttttgtgcgtaaggttgaatactcacacattagatcactacacgagcatgcaccgttgttcatcctaccttagcgggttggtgaggagtcactactatgaactaacgttactcccacgattcattaccgtttcttaacgttttatatttggatttgagcattttcatctcattttgtgcctcttccttttgcacaaagatttgtgctctttcattaaattcattaatgtttctaatggggcgaccctacagatcataccatagttctcctcccgcagatgataggtcagttgtaattccagcctgaagagctgtcaaatgaatgctatcatttagatttcttactttggctgcttctgtactaaagagactcaagtaagcatttagggattctcagtttgttacttgatattagtcagcgaggatgccttacgcttcctgtcccttgtagcctgaaattatttcttgaaaccgttggatagttgtttccaagaggttatggaatggttggtgaatttatcgaaccaaactactcgttgctctcgttagagaggttggaaacaaaatacaacggaagttgtttgaaacattactttctcgcattattttgttaaaatttttcaggtgtgtcacaagatcagttatcctatcatactgtgcgacgtgggggttctaaaatctctggggaaattgagaattcaatatgtcaggatgaaaaggcttttcctctaattgtagtacccttaacagaatcagatccatgggttgttgctggactttttgttggtaacctgcattctggtttaatcgatcacgaagatctagaacatttcgattcaagtgctcatgcaagtctggttgtctatagtttagatggtcgcgtagatgagggtcgcgctgcctctcgtttctctcatcgtaattgcttactgaccttgttgcagaataactctcagtttgataactttgagagttattgatgctctcttgatcatctcaataatagtggcgtgaaccctccccatctcgtgcttgcctctcatgtgcatgggttctagtcgatctgctctgcccatgggtccttaatcttgacccgctaggatctatactcgaccttgtttcttgaggatcttcttgcactggcctccatctttggaatagatttggcatgcgtcccctacttaattaaataggtttacatgttgtccctatcgttgttttttggcctttgaaggtgtctcagtggtcagtctgatcttagccgattgcctaccccctcgcatcgtgctgagagaattcttgattccaaagttttgtttgcctagtattcgtattcatgcgagatgattctcaattctcaggttgtagattcccacaattttcatatccagtggaagttcttggattgttgggtcgagtttcttgatttccactgtttcctggattttgggggatctctacatccactaggatgtccctcgtgt

SEQ ID NO: 79856 - DNA, 1250 bp, Cannabis sativa
agttgaaagagcaagattaaaggctaggctagtagcaaaaggttttacacaataggatggagttgattttaatgaagttttctctccgattgtaaagtggcttcagttcaagtcatacttgttagagtagccaaacataaccttgaggtagatcaaatggatgtaaaaacaatatttcttcatggtgaactagaagaacaaacctacatggatcaacctcaagggtattaaaatggaaatcctaatgaagtttttcttctaaagaggtctttatttggactaaaacgggctccaaggcaattaaacatcaggtttgatagttttatcactagtattggtttctaaaagagtaagtatgatctatgtgaatacttcaatcaacatatatactaactattgtatgttgatgatgccctaattgttggaaattgtaagagtgaaatcaaaaagatcaagaaaaggcttagtgaggagtttgagatgaaggatcttgtcaaggacaagaaaatttcgagaatagagattgataatggtcatcaaggggtcattaaactatcacaagcaagctacttaaagaaagtgttagcaatgtttggaatggataactctaaagctgtttcagcacctctagctcaacatttcaaattgtctcaatcttagaatcctcaaactaatgcagaaagaaagctcatgaaaaagttacttacattagtattgtggaagcgtaatgtatgccatggtctatactagttcagacctggcgcatgtcttaagtgttgtgagtacattcatggctaatcttaaaggtgatcagaggtcaactgtcaaatggatactcaggtactttaaaggctcacttaacctaagattaatctagctgacatgttaacaaagagtgtgagcttgacaaagttcaagcgctctctatgtctactcaatataaacaagtgataatattttaaaatcatttcttggttcatcagcttattagctttgttccagtttaaatgactattctaaggtggatttgtagcattttagatcaatcatttgagttgtctgttgctgatgtgtaacaagcttttcacagctttcctgattaggcttagctgacagttttacttaactgtcctatgtcgataagtagactttatcacaatcattttaataagaaagagaaaatacttgtctctatgaggattgtaacaagtaggggtaggcatccaatccaatccaatctttttttcctc

SEQ ID NO: 79857 - DNA, 1368 bp, Cannabis sativa
  modified_base (35)..(72): a, c, t, g, unknown or other
tttatatgtgtttattttatcattttagaaagttnnnnnnnnnnnnnnnnnnnnnnnnnnnnnnnnnnnnnnctaagatcctggtaaaatatatatcctacatgacatacctcttccatagttgtgtgcaactggttgtgggtaggcagatcttgtttttggcttaatggatttagtctgagatgcaagatttacctaaggtttcgcaatgccaggatcagaatcacccatttcatttcgtacttcttgggccatcaacaaagattcaacttcagcaacaaaatatgcatctttcctggtggacagtgaggtaataaagacagagtattctcgaggtaatccattgaatattgcttcgatgtgatcctgagtagagagaacatgaccaattgaagccagtgagtcaacaggatgcttgatcttgagaaggtaatcattgagtgaattggtgagcttacttttgcgaagttgagtgcgaaattggttgatcttggcacgattctgagcagagtagtattcttcaaggttggaccagattgcagctactgtgttgcaaccaaccatatgcgtgaggatcttttcggacattaaagagagaagccaagaaaccaggagactatcttgaatgtcgtattcaatgaattcatcagacattgttgtcgagttcatctgcagcggtgatgaacttaggtggaacagattttggatcgagaaacttaagaagacgatggcctttaatggcggcataaacttgatgacgccatggaagaaagtttttgtcatcaaatttgatagataacgagtggctgaaggagatactagttgttcttggcaatgaatttgaggagtgacctcgaagagttgagtcagaatcggtcatggtggaacgaaaggaccgtttcaggcatctaataccatgttgaacgagagaaaagagagaaacagagatcaaagagaaataatttcttcattgattattcaagttttgcaactgcagaggaaagaaacagcttatttacacacaggaaaagtaaagagacaactgaaaagtagttacaggaaataacagaaaataactaactaactgtattaacaaacttctcatctaacactttctaacaagtcgtctaatttattaatagactatttatcagtctaattatcatgacttcatatattatatatttaaatgtacaactagtacatataataatatatcttgtcactttcataactagataaaaattatacatcaaggtacatacaaaataattttacaactccaagttgcaattgaacgtaagacttctttaggaagcttttcaaatgatcattttgtgattctttatcactttgattatattagat

SEQ ID NO: 79858 - DNA, 2632 bp, Cannabis sativa
gagagagagagagaggtgtagagagaaaagtggggtttgaaaaataagaagagtatttctgggtttaatgtaaagtggacctatttttaaaattttgaaatgtataagtttaggaaattaatttcccccattagtatgtataaataatcaaatttttatataggcttaagcacgacagacataaaaagaacgaaagcactatacaaaaatacgaatttcttagcatagaagcacgacacgtaagctcgacataaaacactaatttaaatccataaaataattttttatttaggcatccatctactcttttatataaaagtgctttatttaaatgtatttttgttattaattcatctagtttttcatataaaaatatgacaagaacataatttttcttatcgaaattatgttaaacattttttttttctaaaaaagattatgttaaatattatgtacaactttatgtgaaaatttagtaatggaccacaagtgatattaatttaattattaaacatgtaattgtagtttttttttttttgtgattttgaagttaattttaactgaaataatctatttgtgctttaaaatataactaatttaaaaagtaaaaaaaaaaaatggcaatttgttatacacctgtgtaggcccatttgacaaatatgaattggtcatttcatataaaacaagttagcagttagcccgtttaagtctgatacgtgtccgatccaatacgaataatttatgtttatgggccaagctagacttactttaaaaatatggattaggttctgtattttggtaattaaaatcagtataaatattgtccacataaataaagtgttaatttatattttttataaaataatttctatatttttatatatatttatattattatgtgtttataaaattaaaatttaatttattgtgtaaattaaaatgtatttttatttattttaatataaaattttttaatttaattttttctatagcctgtatattataattatttaatttattatatataaatttaatgaaaatattattattatttttaattaatttaaataaagaattattaaaaaaatatttattttaataaaaattaatataataataaaaaatatatttttaataattttttacactgtgtgacaccaaataattggtgaatatattggagatgctctcagacaatgaagtaagaattattctattatatccaaagaggagagacttattctattctatccaaatcaaagatcaaatcaacgcacaaatcttcgattaagattctggcaagattacgatttattctactatatccatatcgttacaatctaattacttccattaacagaatcttagatctttagcaatgcttacaaagaaaaactatagttatatgtactcgaaaaaaaaaaaaaaaaaacatagctattcgaatttcaagaaattcacaattttgtcttaacatcacgttgatcgatcgtaactcattttccaatctttcccctgagcttgacgccaagaaccctttccatcttcgccaacacggcctggttcggcacagctttaccattctcatattcctgtaccacctgaggacgctcgttgatttgcttggccaagtcaccctggctcaaattcttcgccatccgcgctttctgaatcgctagcctcacctcgggtgccacccgattcagagctgcaggctcggtcccttcttcgagcttcctcacgttgacgactggtgcggtggtggccttcttgttggctccggcatcgaacttcttgattgtctgaacagcggcgccggatcggagtgcacggttcacggccttcgggtctcgtagatcctgagccttcggcttagacttgtggagaacaactggctcccaatcctgagttaggactccgggatttctgctcggcatctttactgggcttgtaagagatgggaaagaaagcttcttttccttttttgggttaaaagagacgaagttttcttgcaatttacagagataaagctagagaaaggctgagagtgattgaagaagaggaaggaaatgaaaggggtttatatagcggacggggaatctggaaggttcttcagtctcaactctctctggaaccttctctataattctctgtttgggggttacgaaagaaaaaggcgcgtaaaactatcagtcgaatcatagtaacgtggccatttttgattggttattttattttattttctctataggaaaataaattggtcggcaagttttattcttggataccaagcttcttctactaagaaaataagagtttatatatataatatactagtcaaaagttaaattttatgctagtttttttatatgttatttaaaagtgatacaattaaaaattaaagaaaaaatattattgattattaggtgagattattattatgtgtacctaaatattatagtttataattttgtcaattaaaagtgaatacatgatgtaatatattagactattagtgtttaagaaaacttgataattaaaatatattcttaagttaatccaaaaataaactaaatgttccaatacttaaaacattaattaaataggtgtaagataaaaagaaaattaaaaa

SEQ ID NO: 79859 - DNA, 3062 bp, Cannabis sativa
  modified_base (2288)..(2295): a, c, t, g, unknown or other
tatatatgactcacttctctaccaaatcggccattacaacgtcgttaatagcatcaggaacattgctaccaacaaaaagacaatctgaccaataacaagcactgcgagcaagacaatgtacaatattgttagcaaatcgtttaacataacaaatatcaacatgcatcaaagacttcaataaatttatacagtaagtgatagttgaaccaaatataaaatgcatcacaacattactcttaatagcttgaaccagcacaagagaatcagtttctacaataacatgctcccacaccctttcctcttgatccaacttaatgcctctttggcaccaatggcctcagctaagctaggctgaacacaaccggctttatgcaagcaaaaagcctcaataagctgaccatcacccccacggacaaaacatcccacaccaaaggattgagttgctgcaaaagtagcaccatccacattcactttaattaaccacaccattcataggcgcaatccaagagttagatctgctaagattgttcaccagttcaggcagaggtttaaatcgatttaagcaagcacttttccattgattcaagaccgcatgtgctgaaataataacttcagcagcagaggagactttcttgttccaaagaaaatcattcttagccctccaaatagcccatgataacattaatgcctcttcgaacatagcagaatgtccacggtcgagtacctgctataaccagtcgccaaagttagtgatagaattgatgccaagggacacagtaccaaatctgttccagcaagagtgggcaaaatttcaggacaccatcacatgataaattatttcttcctccctagagaaacatacacaactaagttgcacagacacatgttttgagtggagctgagtggccaggcacccagtgatgcctttccaagcaaaatgaatatccttaggtgggactttagttttccacaagcaacgccaaagattcgactccatatcaacagaccatctccctttagaaacttggagccattgatagcatctcttaacagaataaatacccgaattctcatgatgccaaaaccacacatcctccaaattagatgagttaataggaatattgatgatgagatccctgtctctttgatcaaaatgatcgtttaatatgtcagcatcccattgagaattatcagcaatcattagctgattaacggatgccccaacaagacctggagagcttatcacacacaaattggtcatattagggagccaaggggaactcaacactgggacagtcaaactagtgccaatacgaatacgtgcccctgctgcaataatcggttgagtttcatatatactcctccagatgaagctaggattgttaccaattagagcagtaagaaaagttccatgtggaaagtacctactcttgtaaattcgaccaacaagagacgtctcattagttagtaatcgccaagcttgtttgcccaagagagaaagattatagtcatgcaaattcctagaaccaatccctccccaacttttagagataaccaattctccacttgttagtagggttccaaaccctatcttagtaaaattacatggcctacccaatttattaattactctcaacgccacatatgaatgtgtagccctagagtcaaacagtagagtataataagagttgttgataagaatatgacttgttatgactgaaggactcgctgcagcatctacttgtgtaatggcaaacacccgagcaggtatgggtttcgccttttatttctgctcttcctttttcatatgaggacaatctttcttgaaaggcccgaccatgccacactaaaaacatgccttctgattacattcttcgggatggtttttcttacaacgagggcactcaagataaaaataacctagacgtccacctttaccttggttcccacaaaacctcttcctttctattgaagcatctaaagccataaaaacaaatagcaagctattgccttctgctgttttcaaatccacaactgatccaaggttgtttttttttttgcaccatgtgcaagaaacttggtattaggttgtatgattccttagcctttcctcttaagtcaattatagcatgttctttatttctccaagctttcatgtagtttatcttgattttgtacctatatttaaattctctttttatatcttgtggtgttgcttttgtctttatatttagaaattttggtttgatccattttcttactatttcagggagcatgatttagtacannnnnnnnttcgaggggcatgatttggtggatatcaaagtctggggaacatggtttagtaaataaacaatcactgaaatagtaaaattgaattaaattagaaaaagtccttaaatttaacaatctcaataattcagggagagaatttttaagaatttttaacggcaattaacggcaaaaaagttaagtttagggagcatagggagcatgatttggtatatgttaaagtttaagagcaaaaatcctaattaacctataaagtaatacaggaggaaattattaacacaatcaataatacatgatggcttaaccaaaagaattcaaagacttattaatcgaacaaaagactcacccggattctttttcacaacacactatcgaccttcttccatggtgatggtgtaacttatttctgtgttcgctgtttcaggcttactagaagaagctgtgttacttgatccttttctaaggacaaaagctggttgtttcacagatggaagagttgcagaatcactgtcaagcatggttacaatgtttgacatgtttggccgatcacttgggtcttcttgtacgcataagagcccaatatttacacacttaatcagttgatcttctttgcaactttcctgcaaagtctggtccattaactccaacaccttgttttctgtccaaagtttccatgcctgaggaaaatgttgacatcccatttggttaaactgaaagaggaatataacttgatttaaaaagaaatgcatatagagctacttacataaccc

SEQ ID NO: 79860 - DNA, 1462 bp, Cannabis sativa
taatatgtcaataaactactatttttgtttgttggaacaatattttatattttcaacacagagtaaactataatcaaacataatgatatacaccactaaacttattagtctatttttcgtatgttgtgtatactctgattttagttgttactgttcatttttaataaacctcctttcaatctttattaataaatgcattgacaaaagaatcttaacattattataattaatgaaataagtaataataataacaattaaatgtatactatattaataaagattgtagaagttgatccttaaaactaacctacaactaacttaacatattttaactaactctaacagttagttatgttagttactaggagctggtgtaactaatttctcctattttcggttgtaagctatgtctataaatagcttttcttttcactactgtttgggatgatttcaagtaaagagttcagagagagagagagagagggattgagagaatggtgttggagctatgtaaacaaattctgttgggattaagaacttgagggtgtactcgaggtaggggagaggaatgagattgttctctctgtgtaatcctcgagtttagagtattgtgtgctttgccattggtgtttgtaacctctcttattctctattaatgaaacttgatgatgtttcttagttggactatgtcagggatcatgtttgatctcgaggaccgaaaccaggataaaaattggtgttcctctatttgttattttctattcttgttcattgagtaaattaagtatttgttgatttgttgctgttaatagcattagttgttttgcacattaatctcaagaatcttggtattgtcactttgaaattagaacaaaaataatataacaataaaatatactttttagtaatttttagtattgtgtttagaaatgaaaaaggatttaaagtattaaaattgtacctttttggtgttattcatcactaaatttgagttttacagctgtctttaatatgatggtaaaaataaaattttcggaacaagtaaaacccgttattaattaagggtaaataccattttggatcctgtgttttacaaaagttctcaatttgaccctctattttgtcaaatgacaaactagaccctgtattttctaaaattatacaaatatgactctgaattgatttttttttttcaaaataaaacttaataataatctgatctagagacgttatgacaaaactgttgatattttctgtatctgttcgtgatagaaattgtattaaagttggttatattaaaaaataaaattgttaaaaattgagcccagtgtcctatttttaccatgtttgaaaagggaaatttgatattatatgcttaaaattaatttatccactaaaaatatgctagcatattttgcatcatgcaaaatatactcacactatttttctatccaattttacc

SEQ ID NO: 79861 - DNA, 1894 bp, Cannabis sativa
aaagataaacatttttttttatatatatattatttattttctaaaaaataaacataacacacatagagtgataaaataaaccaattgccgaatgttttgggaatgcctattgccgaatgtcatgaacgttaccttggctttccagcttatgtgggtcgcgacaaaaaagagatgtttagtgaggttaaagagaaaatatggcaaaaactccatgcttggaatgagaagctattttcaattggaggaaaagaggtgctcttgaaggcagttgtccaatcaatacccacatatgctatgagttgtttccgattaccgattactttttgcaaccaattggagtctatgatggcaaacttttggtggggagcaaataaggatggttcaaaaattcattggaaaagatagaaattgctttgtaaatcgaagtttgaaggtggcatgggctttcgttcttttgtccatttcaatcaggcactacttgctaaacatgcatggagaatttatgagatgcctaactcgttactaagcaggttgttgaagcatcgttacttctccaataattcttttttagaagctagccttggacactcaccttccatgacttggcaaggtatacattggggtagagagctactgcctaaagggcttcgatttaaaattagaaatggccacaatgttctagctggtatagataaatggattcttggccattatagcttcaagccaatatcatataatggaccccatcactctcggttgcaggtctcatcacagaaacaagggagtggaatctcacacttctacatcagtatttcaagtctattgatattgagaaaatagtttcaattcctctgaggtttttttcaactcgagaccaactgatctggcaccatacagctaccggcatttatactgtaaattctggtttccatttagcatgtaatattgaggaaagcatgacaacatcagtctctaacacacactcagcttggtggaaaaaaatttggcaactcaacttgccatccaagatcaaaattttcgcatggaaagtgatgcaaaatgcattaccagtggctgttgcactgcataagaggaaagtgacaacttcagcttcttgttctatgtgtactaatgcttgggaatctattggacatgctttgtttacgtgccgtagagtatcacaatgcccaaaacatgtataatggtgactaccttatccacttatccaatctatatcctaaactagattttgagttgataatttgcataatgtgggccatttggagtgaaagaaataaggtcctacatggtggaaaaaaaaaagagatggtctactaactctaacatttgccagcaactacctggacaaatacaagcgagctacagatggtaacaagcatccttctcttcaaatcagttcatccaatgcaaataatcagcacactgcaaatgcttcactgcctgcacaacataattttggtgcaacatggagaccaccagacctattaggaatgaaattgaatgttgatgcagctgtaaattcagtgaataaagtattgggaataggtgcaattgtgcgaaatcatcaaggaaaagttatagctgctttatcaaagccggttcaaggatgttttcgatcagatgaaatggaggctaaaacactttttcacagcattaattgggctatacaactacagctaattccaatcacacatattgaaaccgatgctcttagagtttcttcagctctaaactctacatctatagatttatcaagttttagtgacttaattatagatgttcgttgtcttttatcctctttctccagagttattgtttctcatgtcaagagaaatactaaccatgctgctcatggctttgccaaaaatgcttt

SEQ ID NO: 79862 - DNA, 2335 bp, Cannabis sativa
tttattcaggaacatcaaggtatgcagcgcttgcttcatgataaggattaaaaatccattagcaagtgaaaagggaagggaaccaacctcatgatcgtggcataatccaagcttaaactgacctataattaatgtcttggtcaaacctttaaggtttaatatgcctctacagagctaaaacctggatcaagcttcatcaaacctttaattttcatctctttcctaatctcttttacacgtacccactgacccgcttcagcatacacatttgataatagtccatagtcttcactacacttaggccccattccatttccatttaaatggctagatatttcatctaccaaactgatatctccttggtttctgcaagcccctattagcatacgccacatgatcatgtccggcttctcgggcatactgcgaacaagttcaaatgcctcattcaccagcccacctctgcacagaagatcaatcatacaaccgtagtgttctctccccggtttcatgtggtattcctgtatcattgagttaaaacatttgcgcccctcatcagctaaaccggcatggctgcaagcggataagatgctgaggaagacaaccccatctggtttaaaaccttccctttgcatatgagagaaccggagaagagcaggaattgcatatccatgcatagctagtccgtgtattatagtagtccaagacactaatgttctcttgatcatccagtcaaagacttcacaagcttttttgatgttcccacatttagcatacatgtccatcagagcatttaacatagtagtgctttgaaactttttaaacctatttttcttaatgtaattgtcaatccagtctccaagctcagagcttcccagtttggagcatattgaaacaatggacagcatggtaacctcatctggtgtaacattttcaccttccatttcttgaaacaaagtcaatgcttcattgaacaagttactatagctataagcattgatcatagaagtccaagaaaccacgttttttatggacatcacccggaatatctggtgagcattccataaagatccacactttgagtacatgtcaataagagtattgtaaactattacatcaatatcagtaataaggtgcctaattaagtagccatgaactacctttccttctctcaaggccttcaaagacgagcaagctgatagcacactaacaacgctgaccccgttaagtctcaagccagcatttaccatagcacgagcatacacaagtgcctgataggccatattgtgttgagcatatacagcaagaacagagttccacatcactgtatccctctgaggtgtttcgtcgaacaccttctgtgcaaaatccacctcaccaaataaactatacatatttattagagcagtttgaactatgacctctgatgaaaaacccaatttgcatttctgggcatgtatctgttttccttggagaacagctgaaataagtccacatgccttgattacaaactgcagggaataactatccacattgagacctatacttctgacatgggaataaactagaagagcttgtttaccattgcttctatcaagataacctcgaatgatggtgttccaagtgaaagtatccagaccctctactctagttgctattgaatgggcaatggagattgtagtgggaagagaaaatgaggcaaaagaagcaatgagattgctggcaattggagggttttgaataatgccggtggtaattagttgtgcatggatttgaagtagtttttgtttgtttttgcatcttgagaaatgagttatgatgccttgtaaatgaggtacttccagtttgtttttgctgaaaattctaaggtatggagaatttggaggcatttggccaacaaatcacaatcggccactccctccagcgttcatccaacatagcctcgataatataatatgtatccaatgtttttcgagcgggtgcgcttccccaacactggcccatcctctactcctggactcttagtaattgaaagtcaacctcagttatctcaaccagtaaaattgtgatttcagtcgttttatttgacgttatcgttaggattttctttttctttttgttttcttgttatttatgtatttatttatttatttatttttgtttcaattgtcattcaccagtttgagagtttttaattggagttaatgaaatagaatagaaataaaaaaaataataattttggatctattattttatttgattgtatacattagaatgttattttaatatatattggaatgttattttaatagaatattttttccactagagtgactat

SEQ ID NO: 79863 - DNA, 1479 bp, Cannabis sativa
  modified_base (27)..(31): a, c, t, g, unknown or other
gttaaaccaagaaatgccgttagatannnnnttttaatatataaagatatgattatatgtaaatataatttttatttttaaatatacataattaaattaaatttgttttatataaaatatttacataatttattatttttaaatatatataataatgttataaaattaataaaaaataatctgttaataagtaatttaaatattttgttaaaattaatgtaaaaaaaatatcaaaaaattctattaaaccttaatagaacacaaaaccatatatatttgtaaattcatgtaattggcgataagaaatattaatataataggtagatacttcaacatatatattaatagagcagattttatcttgaaatatacacaatatgaaattagaatatttgatgcgtacgtgaaagataccagtctaaagataaactagttaatagtacaaaagattttgtctaagaaaacaaaatacacaaaaagacatgggtataattgccaatgacgaatttttttggtgcagactgcatagtatatatatatgcaatctttttttttaactagagtacttttacatatatattcatgcaattttttttaactgaagtatttctatatatatataaatatataaaaatatttaaaggtttcacatttgattggttgggtcctcttaaaaataattataaatttttcagcctatattttaattagaacatttcgttgagtttttgattttagcttttcaaaaaaaaaaaaaaaagtcttgagagttctagctataaaatgcggaaagtaaagagagaaaataagtgagaaatctctctgcatttcattgattaggagctttatatatagctcagtcaatataaaaagtacaagctggtaataactaactactagtaactaactcactaacaacttgtttaacttcacaaactaattcaagacactcaactaatttatctaatcttgaaactccctctcaagatggatggtatatatttaccaatccaatcttgtctttaaatttcttgaactggttaggaaatagagcttcggtcaaaatatcgtaagttgttccctagttgaaatatgagcattgcactttttttcttaccaaatggcaatcaatttcaatatgctttgtccttttcatgaaagacagtctgtttagctgctatgtgttgagcagccttgctgtcatagtacatcaaagctagtctttgtgttcaatcttcaataccttaagtaaagataacaaccaaatcagctcattagtagtgtttgccataactctgtactctggtttagcaaaggatctagaaaatgtttgttgcttcttacttttcaaagatatgattaaactaccaagaaagatacaaaactcagttgtggatcttatcatgtccacacaagcagctcaatataaatctgtgtaccctttaactgaatttttaatattgtagagaagaaaattcc

SEQ ID NO: 79864 - DNA, 3004 bp, Cannabis sativa
ctttagtcacaataaattgtgattaacacatttagcaacggactttatagtcacaacatataaattatgatttataattagtcacaattctttttacttttagtcacaaattttgttcggactaaaagtaagattttttatagtgtgtaatctgagaaaatgttagactataaaaatactaaaagggcttatttagaagggcttattagtaaattgtaaagggtactattgtgcaatatggattgagaaaataaattttggttcaattggaagattgacaatgtctcgaagagtgcatttcaaagatttgttctgtcttgaagaggaccagttacctattattggtactttcattaagagtaattactgtgagagactcaatgtaaaaactctcagccattaaaggtgaagaaatcgttcaactctttaaatctatagagttgagttttgatgctcaaatgaaggcaatgaaaccgcatcttctcaatgctcaattggagaaactagatgccaagtttcaaagctatctcacatcaatggagacactttcggttctgacgtcttaggtgtcacctacttcgccaaaagtgaaggactacatagatggccctattgaaccattgatcaacacgaatccattaaagaagcctcttgacctcttcggcagcaacatttctgatggatccaatcaaggtagatcaaaatcaattccagttcgatctacgttgacgatggtagctcgaagattactgaagtcggaaaagatgcccttggattcatcgaatgttgtggattctagatctacatcaacgaaggcagttcgaagaacaccagcaccagagaagaaagagatatcattggttcttcatttacaaggttatgagcgtgttcgagcgaatgttaatggtgttaatggtggctcaacatgggaatcgattcacatgccgctaaaagatcaaaggaggatctttgatttgggacaatagtggatctttgaagaagatggactggacgggttggttacgggcagacggacagagttctggtcgcgctggatcatcgaagttcattagtgaggagatgacgatattttctcttgtgtttactgggttactataaggaaacaaataaaataatgaagttattctcgaaccgtgtgttggaaaataagaagagtattgaaaagaataatatggaataggctatatttataactcaatctgtgtgattttttacttgatacaaaatggtaggtttacatatctatttataagactctatggattattctagaaatattattaaatgactaacttctatatttttctacataattcccactactaacacaagtgaaggagatttctagaaaattcaagagcactcgaacaaaccattcaagaaagcatactttacattcatttggtggatcttccatttattttggactgctaaagaaattattaatctaatagctttaagatgagaaactgaagcaaatatctcatcatagttgatgccttctctttaaatgtagcatttgtctaccaatcttgttttttatctctccacctcgcctttagtattcttctttttcttatacacccactttactccaattagcttgtatccttgtggaagaatagttggctcccatgtgttattttttataatttaattaatttcttcatccatcgcatctctatatttcttgcttcccactgcttcttggtagcttagaggtttgcaatcaccaaataaacacataagagaaatattattttgattttcagttgcctcataaagttcttgcaagcttctaaagcatgacgtctttttatttgagctttcacttgaatcttctagtaagtttctagttggcgagattagtggagtagtaggctcttgaagttcttcttccatccttagttgctccactacatcttcctcttaaaagtaaaaaataaattcatactcgtcttcttctatgttccaatcccaagaatcttctttatcaaactctacatctcggttgatgatagtcttgccgataatttgattgtacaacttatggcctttggatagatgtacttctcacttttgtcatcaagcttggttctcttttgatcaggaacatgaacataagtaatacgtccaaagattttgaggtgagaaattctaagttttcttccactccattcatgcttctagaggtgtcttctcatgtacacttcttgttggctgcataagctatcgcttcaacctaaaactcttttggcattattttactttttagcatgttgcaagccatgttgagtatgcttcgattcttcctctctgccactccattttgttggggggatctcgacactattcagggatgacgaattccatgatcttcacaatacttgtggaactcatttgatgtgaactctcctcctcggttagatctcatggacttaatcggaagaccagtttctttttttaacagagctttgaatttcttgaagttcgtgaacacttctgacttctccctcaagaaacaagtccatactttttttgaaaaatcatcgataaaaaggaggaaatatttactcttaccaaacgagtttggtttaattggtccacaaacgtcggtgtgtatgagctcaagagactttgtggctcttgataacgactcctttgaaaaacttctccgggattgatttccaagcaaatatccttcacaaagttgatttagttggttgatgcatggaagacttctcaccatctccttcttctccaagagtttaagcccgccaaaattgtgatgtccaaaacgtagatgccaaagccatgctgactcattgtagcaagcctttaaacacttcgaaacatcatattccatattcaagagaaacactatatactttgtcatgggatccttagcaatcaaattacttttgtcatctcttaagaaaaagttattttcttttaagtgaatataataacctttctctagtaa

SEQ ID NO: 79865 - DNA, 838 bp, Cannabis sativa
tttttgctctcctaaacccatgcttgaatttgattgtttgctcctttttaataggagatggtgatggcaagaaaaagcaaaaggcccaaaaagaagaaagcgaaaacgatgaagacgacgatgatgaggaaatggatgaagaagacgaccaggaagaagaaagtgaagaagaatttactgatgtcaaggaagactaatggctttatcataatggtgagcagttattctctccattcttataaaggtatgcgcgataccataaattttgagtattttagctagctttcgaggagtttaggtagaaatgtaaagcgaccatctaagtagacggttccgctcattaccctgtatttttctaaatgtttgttttattcaagttaaggaagctcgattgtttttaagtggaaactatattttcttctgctttctatatctttttctcaatttttgttggcttgggccttggggaaaattggtagatgtgagactttatgtaggtgtaggtgattcccattgaacttgtataaagattataagaaaacttgttgcaaatttctgagtctacaagtatatttattaattaatgacacaagcatttaaaatgtagtggtagtgggacactaaagaaaattttctatgctctaagagcctatgaaaattgaggtttggctggtgacataagagtttaaaatgataaatgaaccaattttaatagtatttttaagctgctttagtttttagaaataagcaaaaaaaaaaaaaaataataataataatcttttgggattctttgtgtaaaaagtgaaattacttttttaacttttgagatttttttttt

SEQ ID NO: 79866 - DNA, 1402 bp, Cannabis sativa
  modified_base (1370)..(1377): a, c, t, g, unknown or other
tttatgttttctctgacagcttgtctaccaactttttacaacaaatgtaacaccaggagatgtcatttaccatgattaggtcacaatctagtgaggcagcttgcacaattcaaactattgacgaaagtcatccaaatcaagaagagcaactccataaattagtggatgagagagtgaaagagatcaagttagtaggaaagaaagtgtattctcattgtgtatgagttgagttctacttactggcaatgtgtcaaagtcgtaatgttaggccctgtgtttgctgatatgactatgtattcttggaaaatgcatctttgcgaattggtattccattccatatgcatctttgtaaatcattgagtttattgttttaagtaaagaatatttatatgtaaggatgaaggtcatgatcaacttgagtatctgtagcttactctctctcacttacacatgttttcattcattacttttgtttatgagtacaattaatttgggactcagaactttctcataattgattgtttctagatatttaatctatggaattcagtgaaaaaaaaatatataataatagctttaagaaaatatgttttgcgtgttaatgtacgattaatttgcctctcatttgtgaaaatgtaagtgattagtgtcaaaaattgtagtgttactacagaataggctctcatttgtaacacaatgtcggttaccttgctatttgcccgatgaaactttacaagttagaacctttactcttctcctcccatcatctacacgagtgcactagtccctttatttaaagaaaaaaaaaaaattttaaaaaaaaacgagagaaacaattaaacaaaggtataaaaatcttcagaatattaaatatatttacaaattacaaatttaattttttttttaacaatgaaattttttatttaataacgttcaaccattacaatgtccattaaggaagtaggagcagtaagttcattaaaagtacaatctgacataaaacaagaccttctaacaacacaatgaacgaccctttttacagatagtttaacaaaataaattgaaacatgatttagagaagagagtaataatcaacaatctttattggagaacattgtctcacatggattaaatgtaaaagtattgagccatatataaagaacatgggctactccactcatagccaattggttttgagatggaaccccatgattctcaatatggtatcagagccaatccctagctggctttcaatccatacttatccagatggttagccagccgcacgagatctagatggtgcaaagacgtctgagatccgaacaaaaataagcgagcaagtagcagggcctgtgataaggtgattcaannnnnnnnagcaaaaatagccaccatcttgagg

SEQ ID NO: 79867 - DNA, 2007 bp, Cannabis sativa
acattctataatatatttgctcattcaaaatggtggcattgctttaatatgtttgtttattaatacaattacaattactcttggaagttaatacaattacaaattatagttccacatttcaaatcaaggtaaactatacaccggaagctgtagtttgattaggacccacacttttacttgtttgtaattagtcctgcaactttcaagcacaaattctctgacagccacccaacccagccccttttatttgtttctgctagagaaacagttaacttatgatatgtaatgttgtaggttctgctattgggtttcgacttgatgactctgatgcattatctttgtaaggtaaatgcctcttttaagcttatattgggacttcttttcattaattttgtgattgaactgagaagagataatacgaaattataaacattaatctagttgggtctcaaattgatttcttttattggtgtattgatttgagcttctttcatacttatctttatagttcatctatatctatgatatgattattttcatgtttttggcaagctgtagttctagctaaaaagcaaccagatctacttgatttccccaaagaccttgttagtttggaaagttcaacaaaagtattgttgtattatttcgacattcggtatatggatattttattgtctatttatttatagcggtcttaccattgaattctaaaatctttagaatgtaggaaactctagcatattttcatgtaggtcctcggaatcaaatcctaaatccttaccctgatggtagcaagctttggatctgatcaatgaacttattggtaaaatatctgatcaatgaaatattttcatttgttgaattattttaaattagtctctttaccaatagtgactaattgtttatattttgtgcagtgattgctaggagcttgcgtctctgaaagattgatgagttagttttaggagatacacgctgtatcaatttctgttagtttcttttacattttgttttcttatgctactatggttgcataaactttaccaagggtaccctgttatttgattgatgtctgattctcttctagctatatttttgaattataaggttctagctatttcagaattataaggttgagttttatgtgttttggttaagttttatatgcccatgagctactattctcaatatctattctctaagtcttaacctcattaatattttgacagagctattgaagagacactgagctacacaaccaactgagttgtcttgctattgcctactttatttttggtattgtcctgctattgtctctatatagttagtgaattgcattgattaacattggagcaagaatgatgcagaggaagattaatttttgatatgactccaatctcttgaactcttttcacatacataagtctcaggtatgactccaacttattgactctattgatatattagttcaatatcaatttatatataaatgcttttgaaattttttgaaatctgcttttatagaaagtagaatagtaaaatattactcaaactcaaagccacaacactattaggttagcttttagccttctttattttaccaatgttggtttataaataaagagctctctcggttaagggattaacttttattgacagagatatatatcttttcgaacttctgctattgactttgacaatagagatataatatggttgttgtgcttagagatcatctttcaatctggctcccaaatgacagttcaagctctactagcatcacacagctgagatcatgccttttagataattttcgaagagtttgacgggcctgtgcttccaacttctgagttagagccagattaggggcttctcattcttttttttttggttgctagttttctttattttttatttttggtgtagtttggtttacaactttgattcatggagtttgcttttgtagtttcttgtttagattttgtatatttcaagataggcaagaat

SEQ ID NO: 79868 - DNA, 1210 bp, Cannabis sativa
atacatgtgctgaagccagcagatttttcaaaaaacattcaatattaaaccattcagaagcattagataaaatgaagttcataaaatcaaaattcagatcggctgcagtgaagggagccaaaagcaaatctgtgttctttgatgcatgcatgcttgcacaacagctcttaaattttgaagatgagaggtgggctataatggatcaagtgtgggtagaattcatgtcttatgctgccattaattgtagaccaatcattcatgcacaacaaccaagtaaaggtggagaacttttgactttcacttggttgttaatgaatcatttgggtttaggtacacaattttctgagcaggaagatcaacctggaatgaaaagggcggcagtcaaataataaagaccaataaatccaatccaagaggcaaagttgaagagtattgttattagcatccaacacatgcgatatttcttaaaagttatttttttaagttatatgagacttattactttcaaaaacaaaaaaaggtgctagaccttttagcaattctctattaagtagttatatgtaatgaaaaagtggaacaatcttttgcgttctaacttgtaattgattgcaattgcaatgtgttgccactgtgtgttgggtattatggatttacattgttattagttggaacaaccgtgcataattttaattttaatgtatcatgtaatgtatttaatagtaaaacatattcaaaataaaatataattatcttatggttattagtgtgatactcacacgataatgatacatcatctattaaagagttgcataagtgtatctttaatggcgatgcatcaaataggtaatgtgtacagcttatcttgtaaacaatttgctccaatagtattttaaaagttgtgccaaaatgaagaaataaaaacaacttatcaggatcgtacgagactgagagactcgaagcttcagactttctcgataaaataaccagatagttcgacgccgttcagcctcaaggtcgacgccgttctctcctcttcatggttgatgattgcttttcttcaatggtttttgtttctttggtctagggtttcaaatccgaattaaggcctgctccgatttctcctcctttgttttttgcgatttggggctgaacgagttggacgacctggttcaacgagtttctgtggtagagaggagtagaggtattacta

SEQ ID NO: 79869 - DNA, 2175 bp, Cannabis sativa
cttaattatcaaagtacaactcaagggtttgattcatgtatttattgttacattatggctaatttcaatgtatatgttggtttttgtgtgtaattattacatgtgagcatacagatttttatcactttgccttgtagtttcctaattgtgttgtatattttggctgcagatgacagactacaatgttcctggaggttgggattgtgcaatttttataattaaattgttgaggcaaaaataaagagttctccaaaagagggtgaaaatgactcaaaaatattgttcaaaactgcttctgatgcagctctgggatgaaaatgagagaaaattattgtttagaagtctttactgatgcatctcttgggtgatattttatgttgcagggaaattaaaccgaggcctatcagttatcgacagctacaagctgttgaaaggagaagagttgactgaagaggagatctttctagccagtgctcttggttggtgcattgaatgggtacgttaagattaattaccactctcctccttggctatcttggttggtggagcctggaattttatgaatgagagataactcgagaagcttataataactatgtcactataacgttttgcagctgcaagcatactttctggttcttgatgacattatggacaactcacacacgcggcgtggccagccttgctggtataaagttcccaaggtttgtacctcattgaataagtataatctcagttaaaaataaaataaaatcgctgttttcatgtggctaaagaaattaatatgtgaacttttatcatcaaggttggaatgattgcagcaaatgatggggttttacttagaaaccatattttcagaattcttaagaatcacttcaaggacaagccatactacgttgatctgcttgatttgttcaatgaggttattcacttacgtacattttgcctagtcccccccttcttcttcttctctctctctctttcatttgcttaatcgaataaatacctcttgtataggtggagttccaaaccgcttcaggacaaatgctagacttaatttcgagtgaaggggaaaatgatctatcgaaattctcattgtcactgtgagtgaacaattgcagaagttttctgcatattaaatagtgactaaattaaggatccttttggtttttcaaaaaaatgagcaatccatgaaaatgttggcattatattgcagccaaatacgtaagtttggaggaaaagtgcgagcaacacatttgttttgcactttactctcgcactttactcgattataaaggaaaatagagttgtataaatagagagacatgggatgaaatgtgtttgacatatgccgttttgcattatactccataatactctgttcaatgtcccttgtaatttcaagtgtttgctaatattacatttgtttggatcacttgcagtcaccgccgcattgttcagtacaaaactgcctattattcattttacctttcagtgagtattattttatccagcaagtaaaagcatccgatgactttttttccataaacattcaatatctgtccatttcgccccttatttgcactccttgtgccaccccaaatgtacttgcatctagaatcttgttacaagatttttgggtccttcttgaaatgcctgtgaaaatcagagtcattgcttatgcatttcccatatctacacaggttgcatgtgcattgcttatgtcaggggaaaatctagaagaccatgttgatgtcaagaacattcttgttcagatgggaatctactttcaagtacaggtaagttttctgttaagcatggatagttactctcaaatttatttaattgagtatttaaagcatttatgaaacatctggtttagcaaaactttcttgtacttgaaaaaacatctatgatttacgagtgtttatgttgtgtactggttattcatcgactattatctgccttctctttctaataggacgactatttggattgctttgttgatcctaagatccttggtaaggtaagcaagctaatgttgtataattctccaccagtaaccgaaataagtctattacatttacatttttgtttaatggagtccctaatataggtcctttctcctatcagataggaacagacattgaagatttcaagtgttcttggttggtt

SEQ ID NO: 79870 - DNA, 4292 bp, Cannabis sativa
gaggttcggctcgcaatccgtgtttgagggtttgtgtccgagttcgagtctaggtcctaggccagggctttggtcttggtcttgggtccaagtcggggtcgcaattccgggtctcgggtatgggtcgaggtcagggtccgagtctcaatccaagtctaggatttcgggatcaatccctagccctttgtaaatattataatacaagctaatacaaatcatttgttacgtattgaatactatgatttacattgtcttaaaatataagatcgtaataattaatacaatacaatattttatcccaaaatagtgttatttattatttaatacaatacggtcattatacgatctagcaaacgagcccttaaattctagctaaatcccaaatataataaatcaccaatgacctaattgtaatcaaatttatggatgggagttcactaaaattccaaaattggcaacatagtatcatattcccttgttagtaattgattattttgctccacgacatttttataaaatacatacgcttagcttcaagttataggtagcacaagcacaaaaataaatatacaatccaaattaaccctgtccgtaataacattttttccattacaacaaagaagcatgaattgttgttgtgtacatgatgatggtgcataacattacaaaattcttaaatatgcttcactgagttttgtatatgaacccatctttctattaaaagaatgaaattaactatattagtacaccacaatttccaatataatcttttggataaaactaatctatataattgttagagcttacaatttagtgtgtaggggcacataataagccccctttgacagtgtgttcttattcataaattcgcttcctcttcaaaagggtaggaaatatgatgagggaaccgatgaggaaaagcacgaacaatgtcttaaaatcatatagatctttaactgacttcagatccccgagagcaaggccagcctgattaacaaccaaatcaataccatgagaaaatcactatatctgtatcaaagattaacattttgctctacatatcaataaaatgtgtcataaattaacaataggttaacatcgctgaaaaccaacctgcacaagcgcaacaagcacagtgcagcttatgatgttctaagttgtgcataatcggcaaaaactacctaagtactatgagactaactttagcatctgttatgaccaatagcaaattcatataaacttcactaagcagctaatgaagcaattttataaaatctgaagaaaaccattagtctctgcggaaagaaattggcttttatatcaaacataacattttcatacatcacaaacaaaattcataaattcagttcatagctgctaatagatggtgaacaaaaattcatgcacaaatttagtatttctaacacagggaaaattgtcaacacatttgaagtaaaactaacatagaaatgtagaggagcaatgtttaatataaattgcagaaagaaaagcttgacttctgtgtaaacattcttgacttccaagtacaaaaagcaaatcacaaatttaacaaggctgcaagcacctaagagattatgacgagaacgccaacagccaacaggaacataaaatgaattatccagtccccaacgaatgacagaatatttaaactcaccaaatgtataacaagaaacagtaagaattatgcactctaaatgtttggagagttggtaaaatgggttttagaactattcatctatcaaaattagtgattgagaaacacacccaaatcggtatcaaaattacggtatatttccaactctcatttgaatttttatttcttaagatatctttctacttcaatcggtcatttaaattttcacgtaccaacgtaccatatccaaacaaatatgatttttattttttttacttgtacaagtagtaacaatggttttttcttttaaatacagtggacaagtgctttttaggataatgtaattgatcattttcaataataataataataactgatacataataaaattgtcttacatagtaaacaaaaattaattatttgaataaaattggattctttcagtaaatgacctacgagaagatattaactagaaattactagtccactacacaagccaaggaatttcataaagattaagatttcttcaacagaaattacactaacacatggttcagaactcagaacttctatcattctacagcttgaggatgattctatagcttcaatcatttgtcaaattaagtttgcagacacgagtacatgagcattcccacattcaaggataaaacttaatcacatatattccattatcaatcaagattcttgcagtcgtagaaagctcaaacaccaaaacaaaccttattaagaatcatgagaccaaaacacaactgtcaaaccatgcatgctagggtgactactatgataactctcacctagtctccataatctgcaatatacgttcaacattttaagataattatctcttcacattacaatctgagggacaggatactactcgaatctggttctcctaattaaacttcttgtaggtccttccattcaacataatttcttcattcacaacctgtaaagttactactattcctaaaaggtaaaagtgttgcaaaccacatatgagtacagcagtttacagtacacagcacctagtagcagcagcaattaatccaccaaaagcgggtgcacccaatagtacaaatgaagtagtactcaataggagggagatcgtgagaatataaatgtaagaataatcagactattgatataaataccacgttaacttgcattgctaacttaaaggggggagtgactagataagatggcctatgtaaatcaaaccaacactacactttttacttaaaagtaaaatcatgaggcagaaccaagtaatcactaaaaataaaaactactgataaaaaaagtgaccaggtaaaaacttcataaaccagcataagcatatgctactatctacactatctttttcccggaagatgtgcatttgtgcaagtagattcgcacataataattattattggaggaaaaaaaataggacaaacacttaccctgactgtgatatatgctgctggaataagaccaatcaaagttgccaaaaagaaaatgtgaaacggtatgtcaacaattggggatgccaagttgataaaaaggtttggcaatgttggagttaccctcaagaaaagcatgtaattaagaagcttttccttgcgctttgcaatctagaaccacaaaaattaagtttaaagatcaagccaaaaaaacgatgggaagtgtaactaaaactaaagataatagaagtacctctgcctggaaaaatctcaacttttctggccacaaccagctaactaaaggccttcctattaacttagacaagaaaaagcacgagcaagctccagcagtggcattaaagacaaccaagaaaagacctttgataacaccaaaaagagctccagctagcaaggacataaaaattgttccaggaatcataaaggtctgcatgaagatatacgtggagcagtaacccagaatgaattgcgcaggaaactcctttgaatacgttgcaagattatctctggagaattttgaaaaagtaatcttagagagacacaaattcatggaaagcaatcaaatatagaattctttgaaatcaaataaggagaacgagaatctgtatatgcccttctaaaagtatgcgtacatgaataaatataaaaatatatatctacttataacagcatctctgctgtatgtgatccaaaattacaaaactgatatagcttcccttcccctgaagctatctatgaaacattcattttctatgccctttattccaagctagctacttcccatcaaaattcatgatttcaaacaaattaacttccgcaccatatctatggaaaggtatagatgagatctgcaagtgaaaccacttaacgaaaagtaaaagtttgatgactcgattcaactctagtacggacttatataattattggattaaaaaaatggaaaaaggaaaacccacttaagcacgcgaagatccgagatggtccttggcagcttgagttttccatactcggcaggaggcatcgtcaagtagatgcagaaaagaccagcgctgaagaccaagaagacaccgatggcagcggcgaactcccatcgagagaggggaaacctatcgaatttgggcttctttccggatggagaatcgtcttcttcttccttt

SEQ ID NO: 79871 - DNA, 1786 bp, Cannabis sativa
taataaaacttttatatcagaaaataatctttgggttgtgttttgcgccccatccaaaaacgtctacaaaatgatggaaagtgaattagtatcaagtagttaatgaaatctgattggaatgtgttatgctgattttgcttcagtttataggtaaagaatttatttgggttttttttctttctttgttttcattgtattctttggtgaaatgttgatacttttgtgttgggtgtgtatgtgatttaatgattttgataaatgcaatatgttttgtttggtgggttgtaggaacatctgcttgcccaaatggaagattctattgtcgaaacgcagggcatgctcctaaagtgttattctcttctagagtgaatgatggcatatgcggtaagtaactttaaatttactgttgagatacaaaaacctgtttttcctttaatgttttctttccctttgtttgtttatgtcattttttagttttgagtgctttcttgggagaggtttgtgattttaggataaacttgtagagagcatgtagcttatgaattatgagacttttgttgaattatagtttcgggctgatacttgtcttctctgatatgctttaaaataatcctcaatctcagactgctgtgatgggagtgatgagtatgatggtaacatgaaatgtcctaatacatgttgggaggctgggaaagtggcaagggacaaattgatgaaaaaaattgcaacttttcaagagggtgttgcaatacgaaaaaaggaagtcgaacaagcaataacagctatagccaaggatgaggcagagctatcaaagctacaaaatgaagaaaaaacacttaaaggacttgtccagcagcttaggggtataatcctctcagtgtttctattcattcttgttttttttaataagtatatatgtatatattattcagtcattataaatgtcatcatccatatgctttgtgctaattgttctaattgcaaaaaacgggtcagtatcttttgttgttataataataagcacattggtatatccaggagaggtgagcacatcattgtgcacagtcatttgatatttgtgtttagatttctgaatcatgttccatcttatgggaactacataactatctctccttcacctcagagcgtaaagaacagattgaaaaggcagaggagaaggaacgtttacagagagaaaaagaagagaaggagaagaaagaggccgaggagaaaaccaaacatgagggtgaagctaagcaggaagatgttgaaggtgtagagaagccaaaccatgaaaccgaaaccataaatacagatgatgataagattgggcttatagatgatcctccttcggatcaggtttgatttttttttttggccttaaattagtcgtccattataagtactatcaagtatcaactacttttgtaaatattctcactgcctttacttttcatgtttggctactttcgataggatgctgtggaaacccatgatggtttagctgctgaagctgagcatattgatgcttccaaaaatgaaaagtccctcattgaaggtgttgaacaggtaattagttaatatattaaagattttgcattttactatacctgcagaacctctgcttcattgctagtatgatagattacatgtctcacgagtaccaattgtaattcaaaaattgatagtagttctatttttatacgtttcaaagatttttattaaagctaattgaagtttgaatcataaggtcagtttcctaattgagtaggtagattgtttatag

SEQ ID NO: 79872 - DNA, 5402 bp, Cannabis sativa
  modified_base (74)..(96): a, c, t, g, unknown or other
ataatattttagtataaattaaagtttaacatagttttatataaaaatatgatatataatccaatttaatatannnnnnnnnnnnnnnnnnnnnnncggcgttccaaacaagcccttaataaagtgaaatcttccgaaccagtaatgaggtaaaaaaatttaaggccctatttagattgaaaaagggttattaagaacaattgggttagaaatttcgtaaaccacttccgcgatagtcactcacctcccactaattttttcatcaccatcaagaacacaatttagcaaataccaaccaataaaattatcatagctctttttattttctttcaataaaattatcaaacttcattaatcagaaatgtctgcagaaagaactaacataatcttaagttaaggtaacaaagaaatatattgtgaacaaaaaaaaacattgtttgatgattttacatggccattaaatagcttgttcgcaagactttacacacaaaaggaagcaattcaattcaagcaccacaacgcgacggtgctttgattgttttgtaagaaaagaaatgaacaacactcaccgaggatcgaagaataacaacaaaagttcttgttgttttcttgctaaagcattctctccacatttgcttgtttggcacaaacaaaagggtcttgtttgtaattagttttccagatatctttttagtaaagttgcggtactaaagttgaagccctgtacaggttcatcgttggtgcgagatgcatggagttgttttcgaacttgagtagctagggactgcattcacaagcaaaaagaaatgataatgattatattctgaacactagtacagtttcggggtaagactccggtactaaccttccctaactcaactccccattggtcaaaagagttgatgccccagacgaaaccttggacggcaactctgtgctcatagatagccaacaactgaatattggcaacacaccaagcaaatgtgagagttgcagattctataatttactgaaaattgaatatatataaaaaagaagttaagaataaacagataaagaaactgcatacctgtccaacattgtaagcagttaatgaaggtagaagaaggctgagagaaggcctatttccagagaaggtctgtgaaagaaaggacaagagtcagtatattattcattggcctgattacaatgactaatgcacaaaagaaataaccttatgaggaataagatgctctgcaacattctccttttgcaactgctctatggtctacaaaagaactcattaatggttagagatatagataactgactgatgctttcataatttgttgactattttattatttgttacaatttcctgaatagcacattgatttgtaatatttgggtcaaggaggcatattaatattggttaaatgagatttcaaatggaataaaactctccaaagtacttgaatgacaaagaaagcatatatggcagtggataataccttcccataagcaagggcatcaggctgagcaaaaaagttggacattagctcatcgtggttactcaccacttcacctgcaacagaattatcgtccttgaattacataaaaagctgagaaccagactaccaacttctagaaaatcatgtgataatatatatttagctctaaaagatcaagataaaaaacctttcaggttgacaggctgctgactcttcacaataccgataaaatcacaaggaataatacggccctgaaagataataaaagagttaagtttagctttcagtagatgtaaagaggttttcataggtagcttaaagtacaagaattaaagctttgcccacaaattatcaatacctggtgaatcagttggtaaaaactgtgctgaccatttgttccaggttcaccaaagtcaatttcaccagcctcaaaagggagtggaactccgtcaatggatacacccttgccattactttccatgctaacctacattgagttacaaggtgaaaggtattattaagagcatgcaagaagaaaccacacacaacttccaaagaaaaaaagcaagtaagataagcgacgatctaaatgaacttgcctgttgaatgtgtggggcaaacttctcaagagcttgggaataaggtaagatggcctatgcaaaaaaaaaaataaaaatactaagtcaaaatatataacgtgggtggtaaagaaataaatagactctgaagtagatataggaactcactcttgcaggatatccaagaaacgaaacattccatacgctcaacaagcctaaaagcacctaatataaacagatgtcttgctattaagagatgaaactgttgcagtaatatacaaaaacatagctggagtcaacagtaggttataccaaaatgtaaatagaaaaatgctgttcgtctataacctgtactgaatctcacttctggaggttcatttaaactagagcaatatggggcacctgtggtgctcaacaccatacaataatccaagtggccccacaacatgaagttatgatataagaccactgatgtctcttgatattattcttaaagagagaatgaaatagaaagaaaaaaaaagtgcgacatggcatcctctttgaaacatgatgatgtctaatattgtatgcaggtccttcataatcctaaatagttttacagaactttcttgaaaatcaaatttacatgagggaaataaatcatttgattatgaagacaaaagaaacagttcgggtccttacaggtatatttttctcatatggtgtcgagtagaaatgctggtcaatgctggcggccccctttaagaacctttgaccagatgaaagaaacaatgttatgaaaggtatgtaagaaacatggaaaatgaagttaaatttaatgcaaacaaatgaagatattctcatctgcctttcccctaggggaaagtaactagagatgcaaaacaggctaattgttccaactaaactaattgacatatgaagcacaagtaaatttattagtcacaaatttgagtatgcagtgcaattgtagcaattataaaacacgtacttctcaacaatcgggaaaccatactggagtgacaaaggcaacaccccaacggcactgcaaactgcaaccagagttgaagcaccaatcaattataaaagagaggtcatcttaaaggaaaagaaaaggtaaaccacttaccactatatcgtccgccaacccagtcccagaatgcgaaagcattgttaggatcaataccaaatttttctacaagctgaaacagaaaagtatttaagtacttatgactcaactggtgcttaatcattaaacacaaggactaatagagtaatgtaccgcaagatttgtgctgactgctaccatatgcttagcaacagcagaaggcctgaaaaatagtatgcaatcgtgagagagaaattaaagcatctttctgccattttgacaataaatttcaagctgaaagtgcaaagcgacttgacaagcaaacaaaattttagttcagtgaaagaataacgcatgaaacgggaaaaagtcttcactcttaatttccccattccatgtttggtcaactttttacagcagctttgaagccaaatccatacgttcaattatatacgacagatcaccatagaattcccaaagaatagttgaagaatttaagctacagttaaattgaacaaacccgagagcagctgaaatccattccctaagagttcgagcattaagcatggtttcagctgtagtaaaagtttttgaaactaccacaactgaaaataccagagaacaatctcaacgttatgttacaacaatagaaattatttttgctcaaggttagcaattagaaagataatataaaagtgtaaatatatcatttaccaagagtagtttcagggtttaatcctgtgatatttctagcaacatcaattggatcaacatttgcaagactgtagatggaaagaaaaaaatagattaagctgactttgtatataataagagggtacatgagcttcataaaatgttattaatgtttttgatgaagaaaaatataaatgtcaaaatttcaacataaaagtttctttgaaaaggaatcctacaatatctttacacatgtgcttcagatatatattcaagttttacatgtctatctctctcacacattaatcattgatgaaaaaattggacacaacacttttgtccaaccaagttaatccagataaaaaggaaattaagatctaaattggtaaaaagtgaaactaaagtaaatatctactcgacttaaaaatgcacaagtactcacaaacgcagttggcgaccgcttgctgagttcatggcctctggatctgtacaatatcacgagtaaaccaatagagcatgtgttaagcttaatagtcttcattaaaataaaaataaagaacacaaaggaatgcagctcaatacaataaatgtgatttttaacctgtttgaagagcggtatgcacaaataaaggacctaagaagctgccaccaataccaacagctacaacatctttaagtggcaatccagtagctccaacctaacaaaattgtctattattagaaaattgaagcataacatccaaaaaaacgagactaaaacgctgaggtgcactacccaggaaccactgcggaccctctcagaaaactcctgaatcttgtccagaactttccaaacatctgggaccacattcttcccatcactctgaattacagtgtctctaggagcacgaagagcaacatggagaaccgatctattctctgtgctatttatctaaagagaacagaaaataatcaaacaatatcaaaaaagaaacaacttcgtttaaaaaataaaaatcatcaaatggatattctgtgttatttcataaactagagggcaccaatgatgaaatgccaaattgacactgaatgcatcaaaactatcaatgaattcttgctttctaataagcacagtgaagttattaaacacaatcttaaaacaagtaaaccctatatttaattaattcatttagttaaaagatgaacttgaacttacatgttccccaccaaacatttgattaatcttctgtttgagatttgctgtctgcaatgtcaataccaacactcagataagctactacatgaaacatagcagcaaggacggtctaagaaaacagaagggaagaacagaagctacctctgctaatttaaagagcttttcaatggttgcaagtgtggcattctgccgtgagtagtccaatagcaacccatcaaactcgctgtagaaaagtccagttatacacatatcagtaagttaaatattgacaaacaaaaaaaatatgtctaaacacttccaaagcttataaaggtttatcatacaccatcattgactgg

SEQ ID NO: 79873 - DNA, 874 bp, Cannabis sativa
aattgttaattagtccctataataaacacaaacttataatttaagattgggttggagtatgaaaagatgaaatttgatatgaatttgtaaagcatatcaattacaagaaatgttgtagtagagagtagtgagtgatatgatggtgggtgggtgggtagggatgagtgatgagggtaattggttggcagattttattcttaaatatctggaaaatgcgcagctgatttgtagctgccagttcccactgccgcctgccgtggcttaaatcctccattcccataacagccgccttcttttcaggcgcagtcaacttcaataacagatgatgctcattaatgggcccatctttgcttgcttcgaagtttggtccatctcaaccaaatgggcctacacctctcatgctgtttattgttaagctttatcaacctttgagaaattagaatctttggaggctttggtatcacattttttttttttatatagttattgtgtaaaagtttgtctaaaataaaaaaaaaaagaaaaaaaaaaaagagaaaagagattttgttaatgtattttttttttttttactgaggtgtatgatggtcttaaatttaaaaattaagataataaatgtcattgttaaaaaaaaaataagaaaatagctaaatgtaataaattaattaataaaaattataaaaatatatttattacatattattttccaaaaatatatataataattaaattaagttatataatttagtattgcgtattattatattgtaacaaaacgaataaatatattagatcatttaatatatacaacagtatttcacatattgtatcactacaaattaatataacgtaataataaaattatataccacaa

SEQ ID NO: 79874 - DNA, 2103 bp, Cannabis sativa
gtagaacaacccccgccgctgccttctcccgccattgatgatgataatgatgatgccacccaacagagtcagatatatatatatatattttatatatgtattaactggaatgattaaattatttaaggaaagaatgaagcgtaattgtacgggaatgtatttattattgaacgtttgtaataccaaaagaaacagctcatcccattcaattcaattatttaataaaaaaattgactccaaaggttgccaaccactttcgttttgctccgtttcgtaaaatgaatatcaatggattttgattttcttctcttcacttcaccctttctttctctcttttactctctctcttaattaaaatagaaaattacactagctaagcttgtatttttttttttttttatttaaatcaaaactcaacttttacaaaaacgttctcaaaaaaaaaaaaaaaactcaacttttacaaaacaactcaaaactcgggacaactcaacttttacatctacgagtattcatccaattcaatttgtattattttattcatagtgcatttaattcgcactaaatgtgaatttcatattttaaatcagattcgattcaatccaatccgcgtcataactcaaattcaatccaatccgtaaaaatgtattggattggttatgttgaattaataacttttaatatttatataaaaaaaatatcattgttttacctaactaacaataaaataaaataaattactgttgttttatgtctccaacaacataataaaataagaaataagaaattcaaaagaagaaaaaaaaaataaatgtagaaagaaattatttaattttgttttaaattgtatttttcttatatataagaatgaaatatacatttgatctattaagttttaaaatataaagtactattttgttatattaaaaattagttgtatatatatttttttaaaaaaaatatatctaaatatgtgtggattagattggatcagttacttttacatgtcaatcaacattcaatccgcacaagtgcggatttcgaatttttcaatccaatatctgattcgcataagtacaaatacccgcactttgcggattaaattaaattaaatcgtgcaaattgaattgaatattttataaacactcctaactacattattctcatcgcagaacgcgaaatagcataataagaaccatcaccaatatctgtcaataaagtgcatacatcaccaataacataacaaaataaaaaagaaattttttttagtatacgtaatagacattttaataacataattgacagtgaataatttaatgcccttgtactaacgtgacacatcagcatttttaacgtaaaaccaaaataatctcataccactattgattccaatacatgaaacacaccatattcgtcatctaattacgggattaatgagtcgtttgaacagtgcatcgaacacaatatcaaaaatgaacctttaaatttactttccttcgattagaaagggctagattttgtgatttgccaagtgaggttgtgggaaaaatcgtgttgttggtacctccagattgtttaatacagtttaaattggtgaacaagttttggattttttatatttctactttcattaacaatccagattttgtggcgaaacaccttctcatgaccaaaattcagtcttctatgtccttactttgttttaaagagccttcccatggtatcccaggttggcattgcttctttttgctgattctcgatttttttcacatggttcacatgtttgagggttttgtaatgatgttttaatttacttgccttacataactggtttttattgttatatttttgattggttgtttgctataattggtttcttgttttagtagtttaattttataagtcatttcttaagaatttttatatggtatcttattattttttttatacaatatatttttttttctgtaagtttatcatattttatttattttttatattaaggaaactggttttataagttttgttaggattttgtatgagttcacaagttttttttttatggttttacaggttttgttatgatttttcatagagtcaaaa

SEQ ID NO: 79875 - DNA, 2052 bp, Cannabis sativa
ttttttaaaaaaaattatacataatttataaaaaaaaaaatatatgaatgttttacaaagtaattataaaaattaacattaaataatgtagaaaaaattaaaaaaaatgttgagattgattttttttttttttttaaatattagtatacttataatttttgtggtgtgcaaataaaactttctttatccattttcttttattgttgtaaatatccatgatgtggactagagtcactagacatagtcctcaattacattagttaagaaaatatacttatattttattattatgaaatttgtgactaaaattaaaaaaaaaaaatatttgtgatgaaattttcttaacgtatgtaattattacacataatttaataaaaaaaaaatggcaataaaaatattttatcttacaattttattacaactgtaccttttttgttgttaaccatgtcaactcaaaaatatgtgatggcatattattaagctatgcattaaataactattatttatcctattcttttaattaaaaatatacaaattttgaatagaaaaactaaattagtttttctataatcaaacaaataatttttttaagagaaaaacgtagaagtttttttttaatctcgtcatatgtttttgagttagcacttaacgaacttagttaacgtttaatagccaaaagtgtacaattgcaataaaattgtaagataatgtatttttgttgccttagaatcatgtgtaacaattacaatttttttttagttgtgatagtttacttttcttttcaactactttactccaaacactttctatctagttaaaaaattgagtttttgcaaatatctataaatattatagaaatataatatatacaaaactgttacgcctgttgcagcagaatgtaattctgttactgcaaaaatcagttttgcataaacgattcagaactggcaaaatataaaaataattgcagaaaattaaatcacttgacacaagatatttgtacgtgatttcaatgttctttcaaacactaatgtacttactataaacatatcctaaatgatgttgaatagataaaacaaaactaccttcttcttgcacattatattaaactttctattcatctttaccttaattccctggtttagagcctataactaattgcttttaagagaaattgtatcatgatgttcacaataatatttatacatatatattaagttggtgccctatctacatcagcatccaaccaagctttatcatatctcaactccaacttggaaaaaaatgtaaaaaccaaatccaattcgaaattccccactaattattattcatgaatttggatatgggtataataaatatttaaatttgagacatatatatacacataatatatttctataattcaagagatgaaagtatttatttaatttataaataaataaataaaaatcaaagtggtaattgtgatgtaagacattgaagcacacgacactagctaaagtcgaaaatgatttggccccggttcgattcgatggttcatttttccctatacatgcttaattgcttatatatttgacaaaataatcaaagtagcataaatataacttaaatacttaaaaaaaaaacatttaaaaaaaaaaactattttttttaaacgcagcatttaaaaaatagaaaataattattaaagttagtctcacattttttatgtgtagaaaaaaattgtcatatataagatgaataaactgttcctttcattgtcagttggttttgaaattcatcttatttcaaattctaatatgtttacagagccacatgtgatccgttgtgagtccaaagtactgtcagtacaaaaagatacttccacttctttcttttaacttttatttacgacctttcggccaatgtgtacctaacaagaatgattaaacaatgagtatttcaaaaattttagatttctgtaaaaaaaaaaagtttgagtatttaaatattatattttaataattttgaatattatttctgtaaaaataaagataaagataaaaggtgtaa

SEQ ID NO: 79876 - DNA, 1644 bp, Cannabis sativa
ggggagtccccccccccccaagggggggggagccactcaaaggccaatcttcaaccgatcaggcccaaggacaggtgaaaacacccaagacaacaacttgaggagtgaatacaatcacttcagacatttaaatccactaaactccaacaattggtatgatctaccccatgccaatgcacagactccacctgtaaaaatcttataaatttattatattattttatgtgagaggataaaattatcattttgcataaagaagattagacttagaggaggaaggacctcttactttctctattaccaaacaaataaattttgctctcatcagactattctcgactagtgttgtaagtttgtgtgtgtcgtgctggtcttacccatatttatttgtactttttaaaaaacgggttgtgtcgtgccgtgctatagaaaaatatgggtcgtgtcgtgtcgtgctaatatttttaaagggtagacccggcacgacccatagaccttgcacgacccataggcccggcacggcccgtagactcgatattttcatgtcatgctcagattcatgtcgtgttttgcttgtgtcagcccgtatttctttaacaggccaacctatttttcatctttgggtttgaattcgtgatttaattttgtatatattttttcttacaattactaacatatatagttttagtatatatttatataacttttcaacaataatttacaaataatcatataaaaaattattagcattattaatttgaatatttaattataaatactcaaattttatatcacatcctttaaataaattaatctataatcttagtttcacatgttttaataattttaattataaaattataatatttagtattatatttaagttttatcattagtttaacttatttataattggtaaatgcatatcttattattattattattgttgttaataaatcataatatttttcatatttcgtttcatgtttttcgaccttgttgtgtgtcgtgcattttgggttaatttatttgtgtttacgtgtcgtgcctttcatgctttttgtatcatgtcgtgtttaaagaaatattttttatgtcgtattatgccaatttataatatcgtgttgagtcgtgtttaagcttgtattttttcatccttagtcgtacttgtgtttttcgaatctataacgatttcatgttgtattaaaaaatttaacatgtatttacagcactattctcgacctcctccatatattttcaaaatattatataataaaaaaaaaacaaatagactattctccactctacttctaaaattccaaacaagtcatcagattgaaactattattattattattattttcaatgcaaagaatatgacagttaatgaatcaacaaactcctttcaactcatctaaataaatattccaattcgacatcatttcatttctcattttcttttaataaaataaaaagcaaccagtcaagtatggttgtccatcatcatagtaattagtcgtgaaaaaagtagctaaagatttttcaattgggactcagcctcgtgatgatcgtatctgacaagtacagaatccaacggttgatagccctccaactacattcaattaattaatttaaacggtggat

SEQ ID NO: 79877 - DNA, 1964 bp, Cannabis sativa
  modified_base (1740)..(1766): a, c, t, g, unknown or other
tagttcagggaaattttttaacggtcaaaaaagttcagggggcatgatttggtacatgttaaagtttgagggtaaaaatcttaattaacctaaaattatataagtgaggtcaaacccacaaagactgtaactaattactaatcaattattgaatctatggttctatttggcaaacaaaattagttgattatatattgtaattgaataataaaaacaaaataaataaacaagtaggcaatcaataatgattagaaatatagagtattaatttcaattgcatcaacttcctatagcaaaatacaattaatttaattactatttcaatttcatgtgatagcaaattataaattcaatctatattattattaggacatacagatcatctaaattatatggcaaagtcatacacttatatggaaaattacacatacaatttgtattaaagaaaaaaatcctaattactacactgactataaagatactctcgtccaatattaaaatttatgtctatttcactaaagcaaaatcaatactttttagattttttattgaaattaaataattagtgatcaagtaattataattaaacacaaataaaatagattcacataagaaattgaagaagaactagaattgtattaaaccaaaaaaaaaaaaaaagtatcacacaatatccattaaaaatcctaattatgagtttagctcctcattgtcattctaaataattgcataaaattaattaaaaatatacaattaaagataaaagaaaagaacacttgaagatcaatagttgtagtctccaagtctcatttttctctccaatttcgtgcctccaaaaagcctccaatccaaagccccctttctctaaatttgaattaggttttaaaatctactaggcagaaattagcaggcgggtcgtggcatttcttatgcaatgtcacggcctgtgtcaaaaatgtaaaattttacgtcattttccttaaggcaggccgtagcatggcctatacaatgtcgcagcatgtgtgcttgattattgggcagtctcccttctaatgccacgacatggttcacaccatgccatggcccgggcataacctcaaattctcatgcttgttgatatttttttccaaatgagcgcactgaatttcaatgtcatggcgctactccaacttcttgaattctcaaacttcaaaggctttgattgcattgaaacttctcaattattccatgattttcacttattttgacatgctaacaatgaacttgcaattaattctttgatttgcaactatttttcttcaacttattcattttcttctttattcactaaagctgaaaacattaataaattaaagtgtaaaataaaactaaattcattaaaaacacttaaaaacaaaactcaaaaataacacaaactaatacctaacacttatgtatatttattttaaaaattataaatgtattattcgtatttttaagtgtaattaaacaaaactaattcatagtatatatatttttcaaaacttaaatattaaatgtgtacattttatatacaaaacaaatcatatataatctaaataattaaataattaaagtatctttgtacaactaatatttgtaatttgattgccaaatctcataattgaatcagaaatattccacctcacatgcaatctttatatagtattattcaatttatttgatgagtcatttagagaaaatattattattattattatnnnnnnnnnnnnnnnnnnnnnnnnnnntattattattattaaaaaataaaataaaatcgtttagaatcagtctcttcttatataaaacaaatatatgtgatgataatattttaatttggtgtattttttgaaacttatgtatcatgtttagtgtaaagtcctttttttagtaagttagatgctaaaatattttttattttatggtgagattttttgcattcataa

SEQ ID NO: 79878 - DNA, 1275 bp, Cannabis sativa
  modified_base (900)..(906): a, c, t, g, unknown or other
gaactaaattagttggattatcatcccactcattacctggttaactcataatataaatataaaccctaattattaattattaagcttattgagatattacaaaaatgatattaggaattaggcttttttgtttcttttgtggagagtgatgctgaaattattgtcaattcagtcaactcttctttagaatgtgtttcccaatggggttgtattgttagatctattaggtccttgttgtctgtcttttcgggtgtatgtctccttcatgtgatgcgaaatagtaatactgcagcacatgggctagcaagatatgcactacagatggaaaacgaggtttattggttggaagaaattcctccttgtataatgaccaatatattgtttgactctcagcaataaaattggttattatgataaaaaaaaagtaagaaaaattacatgtagtttgaataaaatttattcattttttttttaaaaaaattgttttagtaattaaatgctttgggaaatcataagtcattttggcacgcgcgcgggtaacgcattaagttgctgacatttggaaagatatttatgggtattgatatttttttatatttacttttcgtaaaagaaaatatcttctaatttcatatattttttatgttcaaaaaatatttaatttatttatcataatgacgaaaaaattattattaaaaaaaaaataagaaaaattcgaaataaaatttgttcatttcaaaagaacaaaaaattattttagtaataaatgcatgtcatttttggctcgccgtattggtcgccttgatcattattattttcattggaaacaaacaaatgtgcttgacacgtggcactttatagtactttttttttgagtgaaaatacttgttattataaatnnnnnnnagagttcatctacaataacagagtatataggctgagggatatcctcaaaccagtaacatgcctcatccacccctaacgcaaactttgccaaaccatgagccgccatattggcagtacgtttgacatgagatacaattacgttaaggaaaaaggacaaaagacaagagatgtctacaagtaaatcattaaaagatgactttgaattgaagggagcttgtaaagcagaagcaaccaatagagcatcagtttcaatttgggacaatggcaattgttgttgaatggcccaatttaagctatggaaaatagccaatgcttccatttcatgggatttgaacttgcccactaatagcccctacaccaataacattc

SEQ ID NO: 79879 - DNA, 2368 bp, Cannabis sativa
  modified_base (2149)..(2152): a, c, t, g, unknown or other
aaaaaaaaaaaaaaaggaaagaattgtatgtaactgtaaagtttcaataaaaaataatgggtgtacttatattagtgacaaaatacatacttatatattatcttttaattatgactaaaactaaacattaaaagaaaagaaaaaaaaaaggaactacttatttttagtgaactatgaatatattgtagtagttaatgataaaataattaagagtgcatcatgtgtatgttatttgactttgatttgaaatcaaagttagccgggataaaaaaataataaataaaaaaaaaaagaaaaaaaaggtaatatattgcatacttatttatttatttagtttggaagggtactgtgtaaggatacaaacttaaatctttttatctacacacagtttcaatataccctataatatgtaattaatcccaattgtatataatgaaatatataacatttttatttatacatttcaattacacactattatttttataaaattttaaataatcacaaacatttttagatagaaatcatacatttaagaaaatttttttagtggacctttaaaggatctttctgtagagctccttacatgttttgacacacaaaaatatataagttaattttttatttgattgtgtgtatgttgtaactatttatgatttattttataaaatttttaaatttttttaaataatttgcaataccaaaaataaaatttaaatagttatttacaacacgtataaaaaaagtaatataaattttattttaggcattataaattatttgaaattttttaaaaatttatattgtgttacatgattataacgagcaaaaaaaatataaattaaaaaacttttttaaatactaaaatatttaaataccctaaaaatataaattaaaaaaaattctgaatgtcaaaataccaaaaggcctatttaaaacgatgttacacttttttatttaaagaagatgttacacttatagataagtacagaatgatagtactttctcaaaaaaaaaaagtacagaatgatagtagttaaattgagagtttcttttatcattatgagtcatcatgagtctagtaatcatcacattaataaacttttttttcatgagtatagtaatcatcacatcacattaatagagttcttttaaaaaaataaatttacagtacagtaaaaattattataataataataatactgtaattgaaaaaaacattattattgaacataaatatagtgcctaaaattattaatatttcttaaaattattatagaagacttaatatgccacgtgtgaattaatctacagtagagtactttatcaaaacaaaaaagagtagagtaaataatattataataataataattaaaaaaattattattgagtataaatagtatttaacactatttacgttttatttgatttcacgatattttataaaattattaaattaaattatataaaactataaaaatttataagccacgtgtgaattaaatttgatatatcagtagctcctaaattataattgaccaggcatttagaattaataaataaacgattgcacagtatgaagaaggggcacattattttaatgtgacaaaacaactcgaacgaccatgattaatttgttacaaattatggatgtggaaaattcacgatgaattataggagcccacaccactaattaaactgacacgttatgataagatggaaacaaggcaaataaatatatataaataaattattttgaaaggtataggaagagaattctgatcaaaactataacaaattattagtagtacgactcaccatgaaataaaggaatggaaacagagacgatattggcaaagctgaaaatattaaccaaaatcaaatggaaaaatagttagggttccgtacggcatgaaacaaaagaatattatcatatactatatagaaaatcatcatataatgtggtaaataagggttaaacttaagtacattaaacattattgattaattaagacatccaaaaagataaatgaccaacacattcaaaactttagagccaatcacctaattatcttctataatctagaatgttatatttttatatcgcggttaacaacctaacttatttaaaatattattattattattnnnnttattattattattattttaatgaactagggcaatttgaaaataagttgaattttttttttttttgtatacatcaataaaaaatatccacatattacatttcattaaaatggggtataatgagaacaaagaaaatttacatggtatactaacttttaccatttttttacaaaaatactgccaggcggtatttttttttttatttttttactgtatt

SEQ ID NO: 79880 - DNA, 2731 bp, Cannabis sativa
  modified_base (163)..(165): a, c, t, g, unknown or other
agtattgtaattataacctcagtaaacccactatatatgataaaacataaaagatgccagtagaaccactaagacaggtttgaaaaaggaagagatgatatatatgagtaatgtcatgtcattattgagagcaccaaccattttatttatatatatatttatnnntatatgtatatatattatatatatcttgtcaaagttacataattggtttcttctaaggcctattacaaaccagcagcaacctagctacttgttccattaatccaactcaactcacaataatatttgaaatatatcaattacttttcaattaatatgtacacagtttggaaattgataacattgtaatataaagaaatgaagtaaaaaatttaaacaaacacacgaatagtgtgtacgtaattggtatatatacaatacacaaaaaaattataacccctaattttttatttattaatttattactgtgtacgtaattggtatatttaatacacaaaaaaattaacactcgaatacttaaaagacagctaaataaaaaaaaaatactggtcatcaattacaaattcttgtaatcgatcgtgtggttacgtgatctggtgaaaattaattaagctacccccatagatcgatctgtcgtttttatttcattacacaaaataattataatgggtgagaagttacctctctcactctcacatgactcttttttttttaatatatactcacattaagtaattcaactagaaaaaataatcctactaattatacctattgaattgtttggatggtaatagatgttaataatttattagtctttgtaaaattaataaaaataaaactagtggatctcacagaatttaataagttattatatataatagttttttggaggtttgaataaagaatatataaccataaccatgcatgttatgtttggaataaaaaaacgttctttctactaatccagcgaacatgcatatataatatatattatatctatatatataatcatctcatccatccataccaataccatggccttgtagaaaaataataaaatatttaatttacaatatggtccctaattaagatctatttaaacacaacactacacaagtttattccacacacacacacactactctttttccacatatcactagataatatttcatcatggcaataagccatcatgagcctctaatcaaatcccccaaaactaatacttcccacacaaaaactcttctcctaattctcatctcttttgttgctattataagcacaactttctttgctttcaattccatcaaaacgaccccgtttactccttattcactagcatcacacatctgtgataaatccatagaaaaagaatcatgtttatctatggtcttatcaacagccgcaagatcatcccaaatatcatcatcacacaacaaaatccaccaccttttaaataccttcctacaaaaaaccacacctcaaataaccgaagctcttaacatagccaacgttgtcagccgtcagatcaacacgatgagtccaactgatcgtgcggctctaaatgactgcgttgacttacttgacatttcaagagaaagagttactgactcaattacgagtttgtactctcattcctacgatgacgcccatgcatggctcagtgccgtactcaccaaccatgccacgtgtttagatgggctcgaagaaggctcagatatcagaaccataatggagccaaagctgaaagagttaatatcaagggcaagaacgtcattatctctaatagtgtcagttaagccggtggaagagttgttagaggagccattaaacggggatgaatttcccacgtgggttaaagcgggtgaccgaaggcttttggagagttcgggtaacgctatcaaagccaatattgttgtggccaaggatggtagtggaaagtttaagacgattaatgaagctgtggctgctgtacctgataaaagcacgagcagatttgttatttatgtgaaaaagggtgtttataaggagaaagttgagattggaaagaacaagaaaaatgttatgcttgttggtgatggtatggatgccactatcatcactggtagtcttaatgttgttgatggttccaccactttcaactcggcaacagtaggtaattaattaatcataataatattatctattattaatttatcttggactaatcttaattaatatatatataatattattattgttattttgaatttgtgaaccactaactagaagataataattgacttattttataagaaaattttataatgcatccttttaaaaaggatacattgatgcacctttatttattttggtactcgaaagaattgtttagtccaattttttttatagtcctatacgttatatttatttatcatgaaaacttttgagacattcaaagaaatttaactcgctaaaaataagattcaaacaatttgttgcacgcgtgactcttttattttatacgcgtgtgaaataaattgtttgaacattgctttttatattgtaaattacttcaaatttcttagaattttacaaaatatcttaaataattataacgtacacctaaaaaatattagattaaaaaattctttgaaataccgaaataaataaagagtgcactcctattaagaatgtgagtaccctataaaatatattgtagttggtaaaataaaaatgttaaaaacac

SEQ ID NO: 79881 - DNA, 2986 bp, Cannabis sativa
aataataataaaagaagactatgggcgataagtgataaggagagaaatcacatggttttgttctgttctatagtcaattataaacattcaccataaggtatcatcatcatgagtccactccataaatattattattattattatttaaagatcaaccctaatctgataaggacgattttagatgactctacctttatttttctttttccaaaagaaaagaatgtaccatatttatcacatgccagctcaaaaagataagatcggtgtaaaaccgtaaattcacactaaaaatccagcaccaagtctagtcataagtcataacaaacaaacacgaaccaaaataaataatattctaggaattatcctcttcatttttcttttaattttttttttctattttttccattattttaggtaaaccatccgcggcgtccctccgcataatccattgctacttattttctctctccttcatctgtacttttttttttttttcatcaatggctactcttcttcatttgcttcctttccttctccacttgctgactctatctcacgctcagattgattaccgcttcggagattctcgtcctcttgttcttcttccggtgactaaagatgcgttgactttccagtatttgaccgagattcgccatgggagttcccttcttgccaccaagcttgttgtcgatctcggtggtccgttaatctggatgggttgtgattctcatctgggttctttttctccgctccgaatttcatctgggtcaattcaatgtttggctgctaagccttttacgaaccgtaatcgtggaggagacgccgatggttgtacccttttcgcagagaacaagatttcccaaatgggtcggcgtggagttttggtggaagataccttggatgttcttttggctgatgaagggtcgaagtctgaggaggttaacttaggtgagtacccttttctctttgcttgcgccccaaaaccccttttgaatggcttagccggcggtgctaatggaatggttggcctcggaaggacgaggattgcgtttccttcgcaagtttccgcagcttttagctctgaatggcagttcactttgtgcctctcttcctcaaatggtgtcgttttgtatgagaagaggcattacggttctgtttttggctctgagatatcgaagtcactaatctacactcctctcttggctggcccagatgattcacaaactgaatacttcatcaacttgaagtcaataagaattggtggtaagagattgtcatttgatgttgaacacactaagctaagcacaattgttcctttcaccactatggaaagctcaatttatgctatatttatcaaagcttatgaaaaggctgccttttctatgaatatgaaaagggttgaaccggtggcaccttttaggttgtgttttgactcaaaatctataaagaaaacgcagcttggtccacttgtgccagatgttgaattggggttgcagagtgagatggtgaggtggaagtttcatggtaggaatttgatgatgaaagtgagtgatgaagtaatgtgcttagggattgtagatggaggtttgaacttgggagtttcgattgttttgggaggttatcaattagaggatatggttctacattttgatgtgggtacttctatgctgggatttagtccttctcttctcaaatggggaagaagttgttctaatttgaagtttgattcattaccagtacaggctttgtgagaatataggacaaggatttcttcattctgacgaggttagaaagatccatatgcagagggggagctttcttatgagttctaattttgtaattgttgttttgtgcttctttgcttatttattgtagccatctggccgagcaaaaagaaatgtctgtaaaatagatgatactattgctaactgcctgtagtcaatacatatacacctgttgattaggatgtaatttccattgagagggttttctctgccttgttttctcgtgtgatggtgacctcgattaacctttttgataatagaagtctggagagagagaacttttgatattttgctgataactttgctactttgtaacttttatattttgaatacaagtatgtgaaagttctatgttgtatgtttcaatgagaagtaaagaaaaagaaatgggtgtttaaagcacacacagctttgatttctcgtttaaatgaaattttctctacatggattgtttcaagttggccatagttataagtcagcctttgctagaaagagtgacttgtgtaagtaatggttaaatgtttttgttgaaatggcaatcgagttgtttctgactccgagtcgagttgataaagtaaagttggtttatgtttaaagttaatgttttttaatttagtaaggtaatgaaggtgtagaattatgcaggggaggtccagtttctggtagctttacctctttagcttcatttaaattcttacctcttgggtgattgttcatcttcattcgatctctggttgtgaagctcattttaattcctgtttatttgttcaacctcattagagataatgccgttagagggaaagcatcactaaggtaatatgatttgtagtaacattgtcgataaaagtagtgtgtaggtcactccttgagaaacaagtgaagatgttaaacttgaaccgaatcttcacggtcgacatatcagacgtttgcaaagaagcaaaaacagaagaaaaaaacgtgaggacaagtatcaacattgttctctattgtttaactaaacttggtaagagcttttagttattcaacagagtactgtgtgaaatttttgaatttcatcatcaggttgaaagagcctatggttgaacatcttgtttctctagacaaaaatgaataagtgaagcctatcattgagctcttcaaatcaaactccaaaagattatcttccaactgaagccctcctaagacgatcaaagtggctttcg

SEQ ID NO: 79882 - DNA, 3040 bp, Cannabis sativa
ctgtacttacggttcacaacaagggggtgactagtaggaagccttttaaatactacaagatgcgggaaaatcatcctagttactctgacttggtgaagaaaacatggcaggaggggcaatttgaagggactaaaatgtactgtgtgatctccaaaatgaaggctttgaagagggctttcaaggagttaaacactcaatcctttggtgacattcaggctcaagaggctcaagcaaagaatatacttgaggagtgccaaaacaagcttcatcagcatcctcttgacgttgaattacagctttcagagctagcagctaggaatgattatgtctccaagcacaaaagtctcttatcattcctacaccaaaaggcgaaattaacatgggcaaaggatggtgacgagaactcagctctgtttcacaccaatattcgtgaaagaagaaggcataatcaggtgttgtccatcaccaatgttgacgggcagagggttgaggaaccaaacgatgttaaagaggccttcattagctatcatgttagtctactgggcacatgtatgcacaataggctgaatgttaagaagagcattcttaaagaaggaaatgcattgacaagagatcaagtcgaactacttatggaaaattttacaagagaatatgtaaaaagatggtgctggaaatcccaagggttaaagcccctggtctagacggctttggaagctattttctcaaaaacaaaattgggacattattggtgtagtgatagctgatgccattatctctttccttaagacatgctacttattgaaagagattaacatcactgttctaactcttatgtcgaagctcaaatgccccaatacagtgaaggaatacaagtcgatagctcttagaaattacagatggactgattccgaccatgccatcatgtgaccatgcgaacacatcgaggtttgctcttagaaatttgatcaaagtagattttatttcttgcaacaaatctcggtttatcttgattattctagtcggcatagctgggtcaatctctacttcttctaattcctccatgggcctaattctcgtgttaggtccccaaagcgaggatccatctcatcattcatgccttgggcggatccctacatatttttcggtttgtttggcctttgagctctggttgaactaaccttctttctttgcctttgttagcgtgatattatagcattagcaagctatccgttggtctcccttcaaacatcctaccccattccttgtaaaaaaaacttcacagaaaggtggtaaattgacatcttctttcaagtcatacaatgttggtcggccaatcatgacattgaaagttgaaggcacatctattaccgggaactatgccataacagtgctactcgtaggtgcttttcccactataagggggcagatgactcctagcagcgcaatattatgcttgaaaaatgcacaagggaccaaatttttaaggtggaggcccatcttttcataaatggatttgaaaagatgtttgatgaggctccattgtctatcatggtctgagctactgtcatgttttctatctgtaattctatgatcagggagtcattaatgtgtggataatgaacatgggcatcatcatcatcactaaatgacacactttatcatctttgcgcaactgtttgggagttagctccttcacgaccaatatttactcttttttctcatactggagcatatgagcatacctttcttgggctttgcccatatctctagcaatgtgtggtcctccaaccatgacttgtaaatacctgcctaggtggcatcaagcaattctagtagtcttgttagggagccttctggttttgattggactttacgcaccaattcaggtgtgttgtttcttcaaaagagaaactcaatttctttcttcgggttgtcacatttatttgtgtcataattgaaatatttgtgaaaacaacaaaacttggtggtatccctcttacttatatcttttttttatcggaggaggtctcttatagggcaatgtctgttggtttttattgtccaaattagagtagaaagcgaaagcgtttttacaaaacaattttaggaaatcataatctgaaccataagccccaagatctcaacatatttacataaattaattttacattacatgataagaatagaatacctcttatagtttaccagagtatcctcaaatcttttcgtataaattaacaaacatccaatctttatacacacacaatcaataaacaatcaataatttatgaagaacatccaatcttttcgtataaacaatcaataaatgtcatccctcttgtaaaatacacacacacatatatatatatgtgcatgtacttttaattggtattacccataaatagataatagtatgacaatttttgagtttttctgttttatttttctatctaattaaaaaaaaaatctcattcttacattatatgggttgagattgaaaaaaaaaacacattaagaaaaataaaatcagcaaaaaggttgagtttgacttaagtattttatacatttatatatatatatatttttgatatagtgtaaaaacaaataattttggtattttttcaattaattagctaaattaaacataaaaattcaaaaaaaaaattattatttgctattagattaaattttaatagtttaatatttttttcttcacatcctgtacttgttaatcagactgtaagcagccttttcaaaatgaattcacgagagtgggatgaagaggtaattaaggatctctttgatgatagagatcaagagctaatttttttctttacaattgagttctactgcaatatccgactattagagccggcagttcgaacgattggggtactactcggttaagagtgtctacaagttcttacaagaagaaaaaggagcttggcctgttactggacctactagcgtttggaaggatttatggagtttaaaagttccccctaaagtcagcaacttcttgttggaattattttaccag

SEQ ID NO: 79883 - DNA, 1649 bp, Cannabis sativa
tattaattaattcattttgagctaaagttagcaccaaaatttataccatgaccatccattaaaaattatctaatgcgtacaatggtaaaatataagattcactcttttttttatgccaaatttaataaaaatttacacaattcttatgtaatttacattttaattgatttgcacgtccctaccattctgaactgaaactataccaaaaaccctaatatgtttgagatacagtgtgcaaagcctcatctcattaaacataaacccgcttgtttgagcttgccacatcagcaactcctctactttttgactactgatataacaaatatacccctaacaaaatgtatgaaattccattaataacccctagggatgacagatgtcttcagtctatgtcaaaaacataactctttccaataactctaaaaacccgctatatatacctcgctcagtctttaaaccctagaccctttgctcctcttcctcctcgctattctcctcgtctcccttccacactctgcagtacgcactcaagaggtatgtattttagggtttcattgcaacttcatcagcatgctttctctttctctgtttctgattatgggtatacatatgtatgcatatatgtttatctgtgtgtatgtcttgtatgtttgaagacttcccatggaatcgtaacttgcaaatcaaaaaaggaatttttgtgggtctgtctttgcggttgtgattagttcatatgtgggttttagatttcgtgaagtatcgttagtaggatttttgaaaacggtacactgaatatccatgtttgtttttgtgtgtttatacatatgagtaaagtcatgtgttttggggttgagttaattctgggttttatgtattttgcaggtgtatccgaggagcatagaaaatgcttattctgtatgagactcaggcgggtcccgccctattgaaagtgttggatgaagggaagctctccaaagttgatgtaattatcttgttaagcttgaaataaatctaaagtctttttttttttttaagttcgatttacttttatttcaaaaaatgttatgtaaactttatggtgccttacattttttttttcatttccttgtacaggacttgtggaaggagttttctactcctgaatcagctagaaaggtaactctttcttgggcaggaacaaagacattttaggagtctttacgttatatacattactgaaagatgatgatggaattgctcttatcgtttttgtacttgtgctattagtgatttgatatttgtttttgtgctttcttaatacataccagttctaatctcaatttttaattgacattaggtggtcaagctggttgcttttaacaagtatgaaaacacagcagaagctttagaatcaacgaccttactggttgacagtaagcccagtaaaggtctacgcaagtttttgcgtgctcactgtgatggtgaaactttagctgtagcagattcaaagcttgggagcatcattaaggaaaaactggtccgcaattacttttatgactaaaaaccctttattacaattaagaaaactaggtctatcagattcatatcaagtcattttgattttttcatctacactgaattgtcttatgttttgcagcaagtagactgtg

SEQ ID NO: 79884 - DNA, 2947 bp, Cannabis sativa
tctttattgatattgaataatatattgaataatagggattacatagggattacattgaaatagagttttatttagagcataaaacctaacaccctatcctttagattatacaactattgtatcctatacataaaaatcatagagaacccagaaaacgcaaattttaccaaaactcgatttttaccaaaaaaaaaataataagcaaaaaaaaaaacacaaataaactacaaatcgaatatctaaataacaatagggaaaatgattgcaattcgtggctctcaattcccttttccttcttcagtggttgtcgtgcgtcgcagtaggccttctcgctagtcgtgggtacgaagatgatggtggctctagaattggttgcgattagggtcttggttctgtagggaatgtgaaaagaaaagagagggaaagagagagattgtgtgagttttttgaaatggaagaggtaatttgagaagatatgaaaaatagatttagtaactagttttagtgtaagttttcattttttttttttgggcctaatatcagtgaaagcatttaaaaaaggacgtttctttatatagttgctatctaagacaaatgataactaagaagaagaagaaatgaaattactttgttgacctaaattttgagattattttgtgtgaacgattgcatttggtttttatttccttaatcaaatcaacaaattggacacactgggaccaaaactagtattttgctgaaacttacacattagtcatttgaattaaagaaaacattttcattctacttataatattattatgttgtgggtggtttggacgacccactttatttttggtacttttttcaaaatgcatggaaagacattattaacaactaatgtgaaccaatatactccaccacgtagctctttttaaaccatcctcatttgtttttattcaataaaatacaaagtcatcgttgtgcccattacgtcaacttccacaaatattcataaaataataaaaagaaattaatggaaaacgaaccaaagcactcgagaagtcactagtcaatattaaaagtcaaattgttcggtaagcctaagaatgaaaaatctaacgcggcagtccaaattttaagaagtcccaaatcacggcaagtgaaaataaaaaagccgatcaattccacacgtggcgttcatccaacggccataaattcaccaacttttttcaacagaatcctatgtcccccactctataaatagacaactacaaaacccataatagtaaacagaaaaacaaaaacatagctattcacccttaaaagaacagagcaaaaacagaattaagaaaacaggggcgagttttaaaccaaattcagagaacacgaaagaagcaatggcaagaaaactaagcatggttttattcgcagcctttgctgcggtggctatgttccaaagctcggtggtggccacgacctacaccgtcggagattccacctcttggtctatcccttcttctcctaatgcttactccacttgggctgccgggaaatctttcaaagttggagacattcttggtaaaatttgaaactgcttagtttgaaaatttcttcaatcccaatttcgattcttttttgtgaatttactgataagttttatgtttttgcagtgttcaattttatgtcaggtcaacacgatgtggctgaggttacaaaggctaactacgattcatgcagtggtaccaaccctatttctcgtcagacctctagtccggtgagcattacactacaaaaaaccggcggccattactatatctgcaccgttcccggccactgtaacgccggtcagaagctcgcaatcaacgtcacaggagcttcttctccggcacctcaaccggccaggtctcctagtcctacaccatcatcttcaccttctccggttatgtcgccgaatgttgctccccaacccagctctccttcaccatcatcttcatcatctccttccccttctccggttccagttcagggtccggcttcggctccacagtcatcctctccttctccggtaccatcttcaaatgaagctccacaaccctcatcatctgcttctcctccatcgaccggcattcccacctctccgtctccagattccacaacttcatccccgccgtctccgtctactactggcaccgccagtccacctgaaaactccggtgccggttccctcagcgttgttggcttttctgctaccattttgacagttgtggctttggctttgtgaactaactaaaattatagtttggttgagacataatgattcgatgtcattgttatttttattatgattatgattgttattattttatttttctcttgtgacattctgattattactgaatatacagattgatcggttttatgtatttgcaagttagagcttttttattttccttatacgtttcagctattaaactctggttaattgattctaaaacttttgaatgttaattgtttgcagtggaaaagtaaaaattataatcaagacaaaacattatataaaagtaaacattttaaccttgataaactaatacccgattaaaagactctacttttggtctttaaaagtggggatttatagagaattgcaatagtattgaatgctctctccgagctcatttcctggaagtttatagagaataactgtcaattgctgtttagtaactaatattcgcagtgttcatacaacgagatggatcctttggattagcgatctgtttgaagactccatcaaattttgccaaacgacattactttcaatctcaatcctggagaggtggatgaacctcaagagacaaacaaggtattactaggcaagattatcagcagatataaacaaggcaaagcggctattcaaggctctctcaaagtgtcatggaatgctatcaggggatggaagtggaaggag

SEQ ID NO: 79885 - DNA, 2754 bp, Cannabis sativa
aaaatgaagtttaaagtattcttaaaaataataagtactcccagatctctaaggtttcggttctaataacctgaaccttttggacttcagtttatgtttttactcacaccttaattgatcaatttcacattaatttttagaggtacataatatactataccctcaagtatatttttctttgaattttttttttctatttttttattcaactatttcttacccttgaggtgtacatataagagaaaagaaaataaaatgcagtaagataaaatggatctagacacccccagtttactgataatatcgatgcaggtggtccgtatttcatgctaatagaattttagatttatcaagtcttttgagctggtacattccatcacacacattatgttgtattttgtatgacccttcccagttaggtctgaggatccccactcccggctcttgagaggccgaaaacactattctcaagacgaggtcaccaacttcaaacctccaaattttgatttttaaattgaagtatcatgcgatctttccttggtacatttttgttggacttgagactgctctcagagtttttcgattaaatccaaattcatgaagtagagcgttgtttcgggtaagttttttgcctttgagaaggatcaatgttctcaactagaataattgtttcacagtcataggccattgagtatggagtgtgccccattgaagttctctttgttgtccagtatgcccaaagaactcttggaagttatttcggccaagtgagacttgcaagcttgtaacttcttttttaacgtggtcttcaaaattttatttcaacttccacttatccattttttgtggtttggccacaacttaaaaactttttactattccatgcttgacgcagaaatctgtaaattaattactatcaaattattttctattgtcagatataatcttgtgcggaagtccataatgacatagtatgtttttgatgaaaaaatctaagacctttttggaagtgactgtattcatgcttcgacccacttggtgaagtaatcgacaataataatggcgtatttaactcatcctttcctagttcgaagagagcctactaagttaattgcccaaacgaaaaaaggtcatagactgttcatcagagttatctctgttggtgaagctctaagaaccttaaaataacgttggcattgttcatacttttgaacgtattctatgcaatctttcttaattgtgggccagaagtatcccttccagatgatcttctttgatagacttggtccgaacgtgtggtctccgcagacgcctctgtgtatctcatgaattactacactgattttggttctaactatgcacttcaaataaggtaccgataaccctctccggtaaaattttccatcttgaatcacacatttgggagcttgatattgaatcttcccggaggaagccttatcatccatatatccccaaaacttaagaacttgtatatagggcctatccaggaagttgaatgattgatgacgcttacccttaataattttgtgcttggaatagcaaggtgggctatgggaactaatctgtattgctcgatttctatgtccgttgctaatttttccagcatgcccgccaaggtattttgatcttgaaggacttgtttggcagtatatcatttacaactttgaaccaactcttgagatttagatatgtaactagctattttttcacctttaatttgatattctccaaatatctgatttaccaccaattgaaaatcgttgtagagttcaatgttctaggctctaacttctttagccaattacaagcatgcaatcattgcttcatattctacttcattgttggaggtagtgaatttgaaacagagggcactctggagttgatgcccttacggagaaatcaaaatgattcttgctctagaactatttcatttaatgctctatcaacaaaatccttccaaacttttagttctagaatgggttcctccagattgttattcattctagtacattccacaatgaaatctgctagagcttgtcccttgattgagattctttgctggtaatgaatgtcaaattggttgagctccataaataatcttctagatgacttcggcttctgtaacacttgacagggagggtgatttgtgagtaccttgatggcataggcctaaaagcatggtcttaacttctgtgacgcaattaataagtgataggaaagtttctcaatcatgggatatctggactcttcctccaacaatcctttgcttatgtaatacactgaaagttgtacttttctttcttctcgcactaaaacggaattgatggcatgatcagacatgaacaaatacgggtacaatagttctccctcaaccaatttggacaaaattggagcctttgcttaatgttctttaatttttagaagacatcttcacacttgacagttcattcaaatttattgttttcatgcaaaacattatatttatatatatatatatttatatgttcagcattttttttttaaaatagatacatttgttataactaaaatatatagcgtcatataatttattttgcatataatttatttacgcattgaaaattgaaactattcttataggagaaaaaatagtctggcgtgttatttgaggacgttatagttttattgtttaaattttttagaacagttttgcctcatgtggctcacttatttcagcagcttatggtttgacaa

SEQ ID NO: 79886 - DNA, 2860 bp, Cannabis sativa
attttgtcacctttgtcacctaactcacctaacttgccaaaaaaggactttacaaattcatacaataaaacttcgggtaattaaacaaaaaaaataaacgaactattatttgtgtttatatacctaactttctttttcaataacgagaaagtgagtgcacccaactcatattgaggaatgctaatttcaacctcctattacaactttttagtcaactttcaattccgaaatcacatgtccaattttttatttaattttttttatagtaatattcgtgtaacttcgttataggtacaatatcattcctgtaaattttttaaaaattctgaatagtttacggtaccgaaaatagagtttttaccacgcgctttcaaaaaacttcaaacgtattttcaacactgtaaattactcaaaaattttcaaaattttacagagattatgttgtaagcataacgaacgccccgtgaaaaaaaaaatttgaaaaaaatattccaacatgtgttttcggacatggaagttgactaagagattataacaaacgttagcactcctctatttataaaaagcatacatatgaaaggttaaaactaataataataataataataataataataaaactttcacctgtatcgcagttctggagatcaagaaacgtgcaacaagcaaaaaggagggatttaattttatattgttgctgttcaaaaatatgaatgtacagaaagagagtgagaggttgaagatgaagttaatggaccacaaattagagctttcagatttttaggccttttctaagggaataaagaatagaggaataaaacaataaaaatggaattttattagtcgatttcatttcttgaaggccaagactcacatttatttttaagatacatttatggtaataggaaattaggaagccttcatattaaattgtaattactcttaacaagtagtgtaatcccattttttctcctatagcttggaaaactattatatttggtctagaaaatatattcacacatctattttctctatggaaattttctatgtgtgacaaaaatattccatatctcttcacaataattgcacagcaattaattcaaagtattttagaagagtaaataagaattttctcttttattctcaacttttgattgtgcatggaatttcataaaattagattgtaaatgcttctcttatttgatagtaattatcaaaaacaatcatatctttttgactttctccttttttggggaaagaaatggaggcatctctctctcctcagtgctctcttggtgtccgtacaagagccaaacaacaaagacaacagcaacagcaaaatgagtgttaaaagatgaaaagaagaagctgtttgagtttgaaccaactttttaatcggaaacctcttcagcttcagcaatcctattctttttctttgtctcaaaatgaaaatcaaaatcatggatcccttgctgaacagatcaagaaatgttcgaggttggttgagctagaacatgtctatgcttacatggtgaagactggaacaagtcaagatgctttcttgactaatcaatttataactgcagcatcttccaccttctctcgtatagattatgctgttttagcctttcaccatatggaatcccctaatgctaatgtcttcgtttataattccatgattaaaggctttgtgcgttgtggatatcccaatagagctttgcactgttatattaatatgttgggagctaaggtttttcccactagctatacattttcatcactcattagagcttgcaccttgttatttgcactggggtttggggaagctgttcatgcacatatttggagaaatgggtttgactcacatgtgtttgttcaaactgccatgattgatttttattcaaatttatgtaagatcaaagaagctagaagggtgtttgatgaaatgcttgaaagagattcttatgcatggactaccatgatttcagcgcatgctcgggctggtgatatgatttctgcacgtaaactgtttgaaacaatacctgaaagcaatatggccacttggaatatcatgatagatggatatgctagattaggggatgtgttgtctgcagaattgatgttcaatcagatgcctttaagggatttaatttcatggacaaccttgattacttgctatatgcagaacaagaaatatagagaagctctggcagtgttcaaagaaatgatgaaacatggtgttagacctgatggagtgaccatggcaactattatttcctcttgtgctcatattggggctctccaattgggaaaggagatacatctttatgtcatgcaaaatggatttgaacttgatgtttatttaggatctgcattgattgatatgtatgcaaagtgcggggacttagataagtctttgctggttttcttcaaattgcacaacaaaaacctcttctgttggaactcaataattgaaggacttgccagtcatggattcgcaaaagaaactctaacaatgtttagaaagatggaagaggagaatatcaaaccgaatggtgttacctttatcagtcttctaagcgcttgcactcatgctggacttgttgacgaaggccgtatgaggttttcaagcatggcaaaggattattctatcattccagcagttgaacactatgggtgcatggttgatctacttagcaaagctggactgcttgaagaagcactagatataataagaagtatgaatgttgaacccaacaatgttgtttggggggccctgttaggtggatgtaagcttcatagaaacatgactattggtcagattgctgtcaatgagttaatggtattggagccaaacaat

SEQ ID NO: 79887 - DNA, 3722 bp, Cannabis sativa
  modified_base (41)..(48): a, c, t, g, unknown or other
tctttattgatatttaactgatagagattacattgaaatannnnnnnntttagggcataaagcccaacacttttatcctgacaacttttgtcttgaaatttttggtcttaacaactacagatagagagttttttgaggggagggggaggtcctggacgattgataaacaattaattttctttgtgaagccttatgaattgggtgtgttatccgtgtttttgacaagtaacacgtggaatctaagtcagcatctaggcccaccagtgggtcacaaagaagacaatttgggccaagcccaagttatataggaccttctaagaacgtaccttagcttcgtggttaaatgatcttctgccagtgacagctcgtattcggaagtagctccagtattgtgatgccgaagagttggacaacatgttcctaaaagactagtcgtctggttttcctttttattcttgcacacaaataaggaaataaatgctctctaaatcttgacaaagatcgtatcaagctaaaagggaaaacttcctaaacaaagatcaagcaattaatttacgattaattgcccacaattataggacacggttttgactaattcagctgtatctaatctgcctagtcagaagatcacttccttcgtgggctgaacttcacaagacaactcaagttatgtaattcaatgtaaactccctagtagagggaaaatgaaaactaagtataattctctaaatactataaatacctaatgaatcattcgaattaaggattgatttctcttgcaatatttgctcaggaaaacttgagaacttatgctcattgtatttccaaggtttttctaagttacataataacattgactcgtggattaaggctcgttaacgccccaatcacgtaaaaatatttgtgttattcttactctttctcttttactcgataaatattttggtactttcattgagagttgaaggaagcagtgataccatctagaggttgcgttagtaatcatggcactcacccgtaacaagtctggtcttcacttcactgatcctaattccaagacaggagatgtagaagatcagaacgaggcgactagctgtcataaagattaggttggcaaatatacaaacctagatgatcctgtattcggagatgatgatttgaaagagaacagttctgatgatgctgatgacgatcttcaagagacctcaaaagatgatcctcaagacacatcgaaggacgatcatcaaggcaaacctattgaaggcagtgctagaggaaaaaacactctcaatgagttagatctcatggtcgtcatggccaaaagttccagttaactgaaagtaggctatctcgttaggatcagctcaacgagatacttcttggaaagatgataagaatggaggtcgtgatgatagcactgaccaaaggaatccctaatgtgcaaacgcctccaacaactgatgctccctgaagagttcatgcaaaagatcttgaaacctcaaatcaaggtaactgatgatatgaagaaggtggatttgacatcaagattaaccacatgatccttactatggagagatctccaatgcaaaaaggcagattctttgactaatgtcttgacaagagctcaaggattcataaacttagaagaagcttgtacttaagcctatggagtacttctagcaccttctaaaaacataccagcaactcaaactttgtagatgactactccatcaattttggcctccaaaaactgcctttataactcctactgtttacggactaagtgctttcgcgcagccagttgtacagattagtttttccaaatttagagcggtacaaactagatttagagtggtacaaaccgaattcagtgccgctcccagacaaacgaactaaaaaatggaagctctagagtccaagttaagccacttccggagcaagaggaattctaagggtccaggtcggaacaattcagcgaagaaaggaaagactcaagagtccagacacttcgagtatacaagccttgtagatacttaagagaatgataaaataatttaacctagtgtatacacaaaagacgatatatatatctgtatatatatgtgtgtatgtaaatatagtgctataaataaatctaaggtgatggtggtattattgtgtgggtagcaaaattaataatagtaactgattctcatgttagacttgtttgtagaagtagtacgataactatgggctacgtgtagtggtgtgttttggtgaatttaatttctaaggttatcataataatataatttatttgttaaaatataaaatatatatttttatatattttgtgaatgtaaaaaatattttatatatgaaagttatctcaaatttagaacgtcttttaaaaaatgcgttgggttagattacatagagttagagtgtgcctaacttataactaatccataattaaatggcctattacttttaagcacaatgaatcataatctactctttacataacattttattacaaaaaaatgagttaggtggccaagttgaataatttggcccatattttatgcactcatattgctaactatttttgaaaaataatttcaaatctacactagaaaagctaagcaaaaagttaaaagtaaaaattttaaggcttgattagttggtaattcaaaaattgttgttctccaatgaaaatatgaattttgtgactaaaaattgtttatgaacatggacgaatctaaaaaaaattgagacagggtaaatatttatattatctagatactttaaaattttggtaaaatttataaaattagatataataaaatgtaaagtaacttttataaatattttacatttaagcattgctattagatattagtggtgtgtagcacctctagatatgtcgccttgcaattgactagcgatacttcttaaaaattattatattaaactatactcccgacacttaattagaccaatagcgatattgacacataggagaatgctaaacaccactgataccttttagcatttctctttacactttacattttatgcatagttggtaattggttcaaatttcaacaataatatttaattcattgttaaaaggagtattgaatttgcaacctctaaaactatgaaaaaaaaaaatcaaaacattagttcaaacttaaacaaatagtgtatactattaaattaaattttaacatgaaaatataaagaaaaagagagatataagtaattattcttgcttttcggctaggaacatacataaattaacaaagtttgcttatctactacaaaacataaaactcatatgttcaaaacaagaaattaaagaagttcggttgttttccagttccctctatctttgaacacctttcttgtaacgattgcgaagtctaactgcttttttttctaatctataaacgcttttcttaaaaaaaaaacaaaaaattaaagaagtaatttgctgaataaatatatcaagatcacaaaaaatcaaccacatctccatttaccaattcgataaagcaagtgaaacagattctattatcactgttaaaagtcacattactatatagctattttaaaggctataattgtctaagtcatacaaatattacaagtttacaacacccaaaataaaacttgttccaatcattctacaaacataacaataagtttctaagagtttctacaaacaaacataccat

SEQ ID NO: 79888 - DNA, 4219 bp, Cannabis sativa
taaattgttgagtggttacaaaatattatttcattttattaaattgagagaaaatatagaaaataagagtaaatatagaaaattgagagaagagagattggaagaaaatgatatagaaggggcttttttctcttatagctttattacatctaaactttatttttttatctccaggtataaaaataaacaaaaatagaaaatctaactttctttttttcaaaaatacggtctctacatgagaccttcccaaaatggtttctcccaaaaattctagatctgaaatcaacatgaacattgatcacctccagaaaatgctagatctcttttataatcgacgtagcttcttcaaacaacaccaccaacgatgtagaagtttttgccgaacaccatgaatgccagcgggaagctttttgttgatcaccatgaacgccggcaagaaactttgcttcgatattcaattatggcaccgcgatcaacgatcaaagatctccatgaaaagccaacgaaagaagatcaatgactgagaggagatgtccatgaacatttacccaaaaatgtgggttttttttttattttcttttttctttttagaaaaataataaatctgaaattattaattgtgtttgctttaaatattttttaatctattattattaacgttgttgagttgattaatatatatttgttgtttttgttaatatattcttagtgttttttggtgttttcgaaaatctggaatgaaaactagtgaactaaattttttaagtagtataatgagaacattgagtgtgtgttaaaatttcaaaataaaattatgttgttttagcgttgttttcatgttttctttttgttgctgtccatgatcgtgaaataacaaatgtataaataacacaataacaacaataaaacaatgaggaatatcactttattatttagaacaataaataatgaaataaaaacataattatcttcaacagtatgatcaactttttcttaattttcaacgaaaaattaaacacaactcggaagaatttgataaataaacatacaaggtactaatactttaaatatttttcttcgtaatcaggttgttatttagtgtttctgaagtatatcaaagcaaattcatactgaaaaattagttgatctgaataaattggtgcaaataattcaaatttgaaaaaaaaaataattcatttgaggtcatttactgattactgtcatgtaatagttgtttatacgttgttttcatgtattaaaatggttgcttaacaatatataaaaaaaaaaactaatacactagtttcaggcatgaaacctttgtaaattttagtacagagcaatgatcattgggatgacaacaagcactatgttgattacgaatcaagtggagaattaatataaaaaaaaattgcacttttgctaaactagtgcatataatgatgaagatactacaatgaaacaactcaaatacaattgaaatgccaactgaaggaaggctgccaaccactccaaatcaaggatgacaaaagtctgttattttacataaagttattaaccaaggaaactgatttcacacggtatccattgtgtgtgaacacattcaacaacacagtaacacaatcctttttggcagctacccaaacaatggtgtgcagcaatgtgataataacagaaagtgacaatcactcagtacactcagatgtgcaacaacctgacaaaaacacaacaacaacaacaacaacttaacaacttttatctgttccaaggaggagatcagtttcaaaaaatgttattttggttgatactaacactttgacaacagaatcaactatacaacaacaagaaaacaaccaaaagtaaacccacaaagaagttgtatattaaaaaattctataattatttgttcatcaattgatattgttttagtttaaaataataaaaacaaaactacgcaataactacaaaagaataattaagttgttttcatgttattgtgaagcttcatttgtgttgtttttgcaacatcttatttcaacttgaaaatagcttcaaattattttcatgttgttgtaaactttgttaggaattgtttatacactacactagttgttcaacaattaaagaaatacagttaaatttatatgttaaaacaaaaacttatctcttacattcaaacatggaaaataacaagagaacacatattatgttgattttgaatcaagtgggggaattgatagaaagagattgtaaatatgaagaaaaataaattatataacattatttgttgttttacagttgttttaaagttgtaaacacgtttaatttcgatactttttaaacatgttgctttcacgttgtttgtatgttgaatttcagtagttaaaatttgtagatttcttaaattatatatacaattgtttttaagtttttatatcgttgctaaatggttattaacagttaaaaaaatattagatttcgaagttgagaccatttgaaaaaaaaaaaaagatagaaaaccaaatccaaaagagattattgaataataaaactctaaatttgagttttatacttgagatttagatttgaacttcaccaataaaaataaatcaattgaaatacaacaacaacaacaataaaataaattaaaagatgaaagcaactatgaaacaacttacaaacaacaataaattaacatatttatttaagatctgaagacaaaattactaattcataaaacttagatcaacaaactaaagataataacaatatcatgaagaagcttaggttaaagatgaaaaaaaaaaacaattgaaggtgtcatctttcttttgggcattatatcaaacacatggcatgcatttctttatatccatatacacaaaaatcaacttaaagaataaaaaaaacaaacacaataattgtgcaaaaatattcagatccaaacttacattaatgtctctttgtttctttaatttctccatacttacaatgacgcaaagatgaacactgaaatctaatcaatcaatccatcattgaactcacaaccaatactataaaatgtaacaattttaaaagggataggaatttgaaagaaatataattttcaagaaataagtatttgcccactattattgaggggaatttgaaagcaatactctctcaccatcgttggacatggatgaggtcctaccacacttccacaaaggtaatagttgttgtccaagttatctgcccaataccttacgatgcatctttcaaattttcatcaaccaacttcacctatatatatatatatatatatatatattattacaaattgatcaattacctataaatttttacagtatataattcaagaagaataatttagaatgttaacttactcaaacaaaaatagtagaaaaaaaatttgaaaagagagagatagttaaacaagagggtaaataactgttaggaactcatattgtaggcgtgcgatggcaatggctggaatcgatgatctccattcggcaaataggtgctggagacgacgaggaagcttctacaaaggagggaatggagtttttttttttctttagataatgaaagagaaggaaggaggggctgaaattaaaagctaaaaaaatgtgcatgtcagtatttttgtaattgttaaaatttaaaaaaggtataaaagaaaaaatgagaaagtataaatgtacaagtttttttttgctaatataattgtaaagtttaactaaaatttggtgtgtggtgtaaaaatacctagatatatagatttttaaaaaaaattaaacatcttcggtctgtttattacttcctaaaataaacggttgaccattgcaaacgaaacgatgacttaaacgtgaaggacagtaaatatcttaggatgataaaccagaaatacaaaccaactaaaataaaatttaattttaagatggttcttaagcctgtggtgcaaagtgcaaacgaagataaaatcaaaggaaactaagcatattcttcgtagttcagttcatactatatcaggagacaaatgaattgattcaagtactaataagaaacttttatagcacccccaagaaattataaataaattatgaggtacctttctagtatatataaatatatctctcacacatacatacatgcaccagccaccaaaccatttctttttccaacaaaacaatttaaatttaatcgaagtctatgagga

SEQ ID NO: 79889 - DNA, 822 bp, Cannabis sativa
taacggatttcgggcaaccttcggggccgaaatacaattttggaatgatttattggtattttaattaaatgtgattaatttaaaatttatttgagtagatttatattggaaatgactatattatccttaaaatatttatatgagagttatgtggccctaagggcattttggtaactttgtatgtatgagttatgtttcaataaaaagtatttggccgctttgtttcaattgttgaatgggtgaggttttgcttggttcaagcttggatttggtggctttgtgcttgagtttgaagagatttgaggtagcttttcttactgatttttagttgaaattatagtagagatttttatgtagaaaagcaagaaaatgtgttgtgttctcttgaatgcatctgtgttgatattagtgtatttatgatactctatgcttcattgtgtttaaagattgttgtagatagctttgtgttgtgaatttgaagggaattttgagtttagattgattctctaattaatctatgtagctctgaaattattgttgagatttattcttgagttctagctcttgtgtgggtgttcatggtggatttttgctcaagtgttgagcttagttttgtgtagtgatttactctgaaatttgtgtttatgggctatgtttttgagccataattttgtgtttcaactctctatatgtatattgatgtttttaatttatgaattgagagtaggattaagctttgggtatgatttggtgtgtttatgcatgatttttcgaagttggaaaattgggttttctgggttaagaacccaggggtcgcggctc

SEQ ID NO: 79890 - DNA, 736 bp, Cannabis sativa
aatcatattcaaaaatcccatttctgatttgggtcagcatcctttttaaggactctcgtcccaaacaaggtcatggtttaacattaaaaaatttcataagacacccattcgtcatggtaaaaagtaactagaaaagagtgctaaatggagtaccttgagtgtggaaatttaacgaatgatttgtgatctcaaatctatctgcgacctaacaaaataaaaatgaggaaagtaagcagaaattagaagttcataacaatagatctaaaacaaaaccgtactggtgttaagagaatattatcaatgcatacacaaacaatggaaagtgagcacaatcaagaaaagttaaaaaaacaaaaatgagtggtaccaaaatgagtttattctcatgtcaaagtatatctattactttttgttgcttataaaagtagagttcttttttgtgctttgcttaggagaattaagttcttttgcagactactttcgatttagattttagtattataaaaaacacaaggaaaggataagactaattgatattgtttcttactgctttcatatttacatcattttttttcttccttaaaaaaagaaagcttattactgaacttggttggctgtaatgttctcgcctggtatgtatataatttttaagatcttacacctaaaaggcatcaggaagtgttatttttaaagaaaaaaacaaagaaaattaaggccttatctctgaaaataacac

SEQ ID NO: 79891 - DNA, 837 bp, Cannabis sativa
tatataatagattaattacaaccaatcaatcatattcatgtgatgatgacttgtttctttattttagttcttatattaagtctacattattagtattgacaaggcacgatttcaactatgtgtctttatatttgtaacataaaaagatcttaaaagtattttataatctttattaatactctaaatcattgttaatgcttaattaggtatgtacggattctaaattatgtttttaaatacactaaagtcgaagattggctagcatcatttgctctttatggtaagcacctggcataaatctaaagcttgcttgtgggggaagaatttatttgtaacaaattaaatcttctctctctatatttttattatatattcttacatatatataaattaactatatatatgtatatactgtaaagattgactcaccaaacttactaatattttcggtgtgcgtcccagtaaacaaacatttaaatttccgttatgtctgatgtgggcaattagctacaactaaacttgattatgtgggctttattataatgtgaacgtacgtgcatggtattttctgttcggagatcatttaaattatatatataaacacaagagttgtatacttatttgtggacaaggtatagtcaatgcatgtgagtgtggcagatatcaagtgtggtgtgtatacattatacatctcagattaaaaaatgtattgtatcatgtatatataaatacgtattatattgagtttgcatgcatgtattatgtatatatatcgctatcgtactggtattagtaatagtatatatacgtttaaactattaaacttatctctttctg

SEQ ID NO: 79892 - DNA, 1662 bp, Cannabis sativa
  modified_base (1603)..(1607): a, c, t, g, unknown or other
aatgtcaaatttcccttttaaaatgggagttttataattttcactcccaaaaagttataattacactctattttaagaacttttatttatattcaagagaagatctgatattgtggtgagatcttgggaaattggggtaaaaatttcactaataattttaaagcacgaattaagcgttgcaaggaggagatgtttcgttggaaaaggggacaagatgaggtttctttgtgtaattttcgtgatgctaagagaagattagttgaggtttctttggaaaagcgttgtaagttctttgtctaaacaactttggctctaagttggtgatcgaaacaacaaattttttcatgcgtatgctacagctcgtaaacgtaataatatgtgcacaaggttgcaagactcaaacaacaattgggttgattgggaaggtggtttggatagggtaatacttgacaatttctatgctctattcacggcttattaatcatattcagccgtctgtatgggatttgttgaaagccagtttctgaagaagaggttcggttagttcttttccaaatgcatccagacaaatctcctaggcctgatggcatgactcctggtttttatcaaaaaagttggtcgattgtgaaacatgatgtgctgcgacaggttagaaatttcttcagtcaagggtttttctctcttagctttaataatactaatattgttttgattcctaagaagaagcagccggttaatatggggggatcttagaccaatatctctgttcaatgtgatttataagactgtatccaaagttctgactaacaggctcaaggtggttctcccgtttgatatctcggatactcagtgctttcttgccagacatacttatttctgacaacatcttggcctcttttgagattatgcattatcttacgataaagaggaaatgcaaggagggctttatggccttaaagctcgacatgagtaaagcctcgataaacttaagtgaggtttcttgcgtgcagtgatgttgagggtgggttttgatggtcggcgggttcatttggtgatgcaatgtgtaacgtttgtttgttatacattggtccatgggggtcatgagttaaggccgattgtcccaggtcgaggtatctgttagggtgatcttatttcaccgtatttgtttattatttatgatgaaggtttttctgcgattttaaaatgttatgagcgtcttaggcttattcatggttgtaaagttgctaggggggctcctagagttatgctctttgcggatgacagttatatttattgtaaggctaatgttcgggaagctactcatgttcttcaattgctccgtgtgtttggggaggcttcaggtcaaaaggtaaattttgacaagtcatctatttactacagctctaatacttgtgagtctttacgggatgaactctgtgatcttatgggtatttttgaagctgataagagtggtttatatcttggcctgcctaataccatgggtcgtaataagacgactttgctgggttttcttaaggataaattgcaaaggcgtattcaaggttgggaagggaagattctgtctgttgggttttatgccctnnnnnaaactcatttcaatataatcagaagatcggaagagcgtcgtgtagggaaagagtg

SEQ ID NO: 79893 - DNA, 1825 bp, Cannabis sativa
gagttataatttctcaattccggagattttattaaactctaaacaacaacactgacagttatttattgtcgtcattactgcctacatcgatagttttctgatagttacaagctatcaacgtaaacagtaacgaccacaattcataattgttaacaatgcgcaataacaacagttaataataaattttggtataggttatacatatggcaacactgaggtcaataagaacatttaaaaattattggataagccatatttgggtgtagcataaggccgttctcctggtttatttcctgagggataatagtaacaaatagcaatcatatcattacctaaaccacttctctcacaaccaatgtcagtggatttgttccacaccaactgagtgtaattgttgcacacagtgtttttcttacacttgttggtgatgtagtcgtaatttgcctgctcattttcccattgcatcacgggaggctcacctttggcgaagttctcgccataaggtccagccaagggcacgtactttagcgagtgcgtgtttagcgatatgacgcgctcggctgcgtatttttgtaaggtattgttccaagttactggactaacacccacctttcctcgaatcttattgtgctcccggatgtaataatatcgattataaacttcacgttttgagttaataggagcaatcatcatgaagatgcatcctatcaataaaactctttctaaatgattatgatttaaagacatttttaataaagatcaaaattaattgtacctattagtgatggatttgatcatgatatttatatccaaatgatgtataaatttggttggttgtcatgaacatgaaaaaagagataattaataacgttgcctaattaataaatggtgtaaatcaatttgtatttatagaaaaagacatgtggtcaaaacaaaattagtttaatattatagcataatatttaaattctcataaaatttcatacaattgtttttgtctgaatatttaaaatatattctattgtataatttatagatgtatgttttgaaaatatgaaaagggaaaaaaatataagtttaattaaaattatacattttaaataaaatatacaaaaatctatacataaatattaaatatacttttatatataaatatacaaaaatttatctttagtttgaactcattactcattaaatacattaatcataatgatctcaagcttaagaaatttatttctacccccaaaaaaaaattaaaataagattgtttagactttatattctaagttgaagaggaaactttcaacaaatcaaattaaaattttattaaaaagtaaataaaaattgcaaacataaattgaatatttatgaacattcactctatcattttgattcaaatacttccattttgttttagtctctactttttcgttcactttagtctgttaagtatctaggtggactactaccatatacagaagtgtacacatgacaaattttcattagtccacataatattactaacttaaatattataaaaaataattaaaaatattttaaaatttaagaaaaaatagtaattatttttattctttttgttacttttctttttttttcggttcttccctgtgtatcttcttctagaggcgttaggcgaagcttgaaggcgagtatagtggcaaaacttgagtccgtcactccaacaatgacgcgaaatataagttgaataggaaactttcaacaaaacaaattaagaatttaataaaaaataaagaaaaatgccaaacataaattgaacatttgaacatccacccaatcattttga

SEQ ID NO: 79894 - DNA, 1189 bp, Cannabis sativa
aatatccgaaaaaaattgtgtttccagttagagagatggttagtcaagagttataaacttagcaaacataaaaaattttaaattaaaaagtataatatctttttcactcttaataaggtttgatattttaaaagttacaaatatttaaccactaaaaatattacaacatttgacaaaaattacctcaatttaatcttatcacatatttattttctcatatttcatttaatctatgttatattttttcataaaaataataatatattttttgtattgcatctttattaagaagagaatatattaattcatacaaataatataacattaagaagagaatattcagatagaaaaaataaatgttaagtactgtatcttttattaagagaattgctaaaatgtattattgatgcttagtatctttctcggtgtaataccgctattagtgtaattaagtattatgtctaatataatttaaaaaataacttttaaaaaatattgttaaccaattgtggggcgccacctataaaaaatattgggtacaactattgtctaataacaatactcttttattaaagaggttctcgggttaccctttgaaatagaataatggaaaaaaggatgatgaagccaatcgagtgtgtatgagaaattttagggttaacttattttatactatttttttcactttttgaaattttcacctatatatatttctatatatatttatagggcttttatataaaacctcacttgaggtttgaggtttggcatacctcatgtaagacaaagaaaaaagtaccggttcgttaggttacatacttgcatataacttattccaatccttaaactacaccgttttgtagggttaaaaaatataaaaatttagttttttttattttttcgaaattatgtatatagttaggggtatttatggaaatttcttttattgttgagttgtattttctttaagctatattgtatttgatttgaaggtgtgttgtctcttctctctctcccacaagttatccctatcctctctgaaatgctcgtctccgccccgagtgatcatcagcagccaattgataaggatcatgacgatgtttggaatagtggtgcgccgggtctcggtacgggtgcgctgtatcgggcggcgagggtgattatccacaacttagagacaagaagtatg

SEQ ID NO: 79895 - DNA, 1583 bp, Cannabis sativa
ttgtttctcgggaaaattgagagcgaaaatggtttggtggaaagtattgaatttgagtttggtatttatatttgttttgtgtgttatgaggatgaacttttgagcgttgatttgttctcatctaacggtggagattcattttgttgttttcacgcggatcgtgaaaagaatattttggcggtttggaatttgacatatggtagttggatttgtgagattcaatgtggagcgttgattgcttttcatccaacgatgtagatttaatttagtgtgtttgttcggatcacgatccgtggtttaaattattgaccaataaaaattttggtattacgcttacgtttttctttcttttcaaatcatattggcgcttactttaatagcttacattagtagtggtaaatagaagagttattcacagctaaatcttattaactatggttttcactttatttaatctaacaacttcaattttgaatatatacatactcaaatatatgaattgtcttttttaatagacaaagaattaaatttattttcaataatacatgtatatatcgtaattttttgagaaaagctgtttttaattataggtttaatagagttgatgtagaaagattattaaaaaatatttcattacaaattttttttttttttttgtgtaatatagtaattttttccaaaattatattcatccagtttcgattagaaaaaattgtaaattttttaagtaaacctacaactttttttcctttctcaattcatatttttataaacacaattaaaattcaatttcacattattcacttcatattattattatcacaattaaatatcaacattactttctttaaatcatgttattaatataattaaatatgtgtttaaccttttttcagtatcaatttcacgaccctcatatcattattaacacaattgagtatcaattcctcaattcataatgatataaagcaattaattataagttccatcacttgtaaacaatacccctaacaaatctaccaatactatttctttcatgattattgaaattctttacagaaatgatactaatggattttacgtagtttatcaaaaaagagaaaaaaaaaacaaataaataaaaaggtaataaaaattaaggaataaagagattaaaattgtaaatcaagaatctatttcttttttccaggttcaaaatagctaacaatattgaaagacaaagattaatactttgattaactactaatattcattgctaacactgataataagaacaaaccaaatctaacaagttaatccaatccacaattggattcaaacacaattttacaaacaagacaagattcaacaaatcctaagctctctcgcctctgattctacgagccaactgaatatccttaggcatgatcgtaactctcttagcgtggatcgcacagagattagtgtcttcgaagagaccgaccaagtaagcttcagcagcttcttgaagagcagacacagcgctggattggaatcgaagatcggtcttgaaatcctgagcgatttctctcaccaatctttggaatggaagcttgcggatcaaa

SEQ ID NO: 79896 - DNA, 1608 bp, Cannabis sativa
agagagagagagagagttgtgttatttttgtcttttctaggaaaagcatgtcaaaatatgcattgtttggtataaattaacgaagagtctaaaaattaataatgaataaatttttaagtttacataatgaaatttctctaattcgaaaaaaaatataaaaatataaacataaaagttccttaaacataaataatattttttaaaatcttgttcatggtaattctcctagaacaaataataaatttagactaaagggaaacaaatagtttgtattttttttttttttgaaaaaaataattagtatttctctttatatgagaaataattactcaaaaatatgattattttattataataataagactagaagtaaaagttttttattaaaatatagaaagaaagaaaaaataatttatttcgtattactattaagttaaagttgtaaaatatgaggagatttacgatgatgcactttcacaccgagatgcaagtttggtttggaaagttttgattagtaacacttttcatagcacgtggttttgggcaaaagaaagcttgggtatgtttttttttgttaaattcgcctatattgtgttacaagctcagcgaagaaattggtctagccataatcaagatgggctttggaattaaagcaactgtggaaaatcaaagttccccctaaagtgataaactttctttggagagcttgtttgaataacctgccaactaggttcagttggttgtgcgtcatgtgtcggttgattctagttgtgccatgtgtaatggtgcgtcgaagacgactctgcatattctagtacggtgcccgtttgcctagaattgctggtgcacgggtctcgagttcttgtcgtgggtgcaactgccatggtttttctaaattggtttgaagaaggattgaggtattggagtcagatagagttgatagaggttattatgttatgttggtccatttggcatcattgaaactgattagtgtggaaagagagactgtcgtgtgtggaggatgtttctttgtttgcttgacttagctttgacgattggagtaatgctcaaaagatatctatgtttccaacccttgtttctcatgggggttttattgagcattggactaaatcagacattcataaaatcaagatgaatgtggatggagtaatgtatgaagacatggggcggtatgattttgattgtgtggctagagattcggctgagatggtgtggagtgttaaatttggaactaagttgaaaagttttgagccgcatgttgttgaaacattaggcatctaggaggtgctaagagctgaaggttggtcggatgtgatgcttgaatctgatagtctcaatgtgatattcgatttgattaaaaatctgatagtctctttgtgcacttttgaattgtcaagctattatttttaatttccttacattttattaagtgatctactaataaggtggtggtgctttgttagttttggatgatctttgttatatataaggtagggatgtaaacggggtgggcgggtgcgggaattgctcccctactccatacctgtttcttaaattcaccctcatacccgccccaatacccattta

SEQ ID NO: 79897 - DNA, 3185 bp, Cannabis sativa
aaaaatcatattataattaaaaaatattaagcatacgtgcatttgcacgtaaattcaatctagtatatatatatatatagggtaaaattatggtaagacttagcaaaagttctctaccgatagggaacacttttttttactattaattttagatcttgcggttattatgatgtaaggtgtatactcttattataagactgcttgtatacaattaaaactttatacatattataataatatttaatgatatatttatttaaaaaaaaatgacattaataattaaaaaaaatattaatttattcattttaattatttttttttaaagttaagttactttgaattgtttttttataggtatttatttacgaaaaataattttacttacaaattttgttatcaattttttttatgtaaaattaaaattaataaaataataaatacatttaaaattaaataagtataaaaaaaaacagtatcctatacagatggatttgtaagcttatcatcgccttttttttgttgataaaaatcatgaatcgttcattaaataggaacaaaagataagaatcatgataaccaggaaggcaaagagccatcctagactcattgtctaatcccaatcctaccctagcacaattatgcacaattttattatgctctctagagacaaacattatcaagagattaggattgaacgacaacgagatttgaatgctagaaataatatcacttaaaactgaattattacaatactcactataagtcttatccactaagtttttacagtccgtctcaatgataccaacaggaagcttaatcgcttgaatccattgcagggccaaaagaagggccttagcctcagcaacctctggagacacattacctgatataggagtaattacgccagcaatcaatttaccatatccatcttgtgccacaattcccaagctatgtttcttcaagatattatctaaggcaacatcaatattaattttgaacatgccaagcacaggttgagtaggttgcctatcttcagtttgtggttgtcgtctacttttagttgcacttgttgagctttgtcaaattcctgtaagtaagtggcttcatcatcataaagaagcattggaggtaaacactttttatgatgaaaaatattatttctttgattccaaagcgtccaaaggaaacataaaaaagtagccaacacacacttatcaaaggtttcaaaagccttagtgataaaagaaaaaatatgaagtaatttattttcagcaaaataattatagaaaggtgagtgcttccaagcagtttttgatatgaaacattcaaggaaaacatacgttactgtttccaatttcgtgtggcagagaaaacagatgggggaaggaattatatgcctagtaaaaagttcaactgcaataggtatagaattggaaagcacacgccagacaaaaatgcttcaccttatggggtacacaagaaaaccaaagtttagaccaaaatcgcttattatcattaaaagaataggaggaaggaatatatctagagcttacagcaaggtgataagcagtttttatactaaaaaccctagagttgtctttcccccacactaggtcaccattatagttatgtctagccataggaatatcaagaatactatcaatgaggttgtcatcaaaataatatttcaaattatccagatctcaagaaccagaaggagagatgaaaaaagataggttgggataaggaaaaggatgtaataaggtgttagagttgagaccaaagccaggtaaccaacgatcctcaattgtattaattttatgtccatttcctatcttccaaataagttatttattgagcaagtccctaccccaaagtatacttctccaagagaaggaaggactatgaccacaaatagcatcaagaatggaagaatggggaaaacacctagctttcagagttagactcagcagggaatttgaacatttaaggagtctccaagcttgtttagcaagcatggcttgaataaaatgtgtcagagacctaaaacctaaccctcccatgaacttggattgacaaataacccgccaatttttccaatgcacaaatttgtaatcaatagaggacccccaccaaaatctaaacacaatagattcaatctctttacaaattttagtagggagacaaaaaccggtcattacataagagggaataacttgaaggacaaccttgattaaaatttctttgccagccttggagaacaatttatgatgtcaggggtggacaacagataacactttatccttaagaaaagtaaaagactgatatttagacattgagggagaccaaaatatttggtaatgataggcttattgtccaagtgaaaagtttgaaaaaaaagaacacgcatactatcatgcgtgttaagggaaaaagaatagaggattaatcaaaattaacaacttgaccagaaacttttgaataaatattaagagcattgtttaaagcattccaagagtttaggtaagccaaacaaaagagaatactatcatctgcaaaaagaagatggaaaatatgagatgcattcctagagatggcaatgcctttaagaagtttcctgttctgaaaagatcgaaaaatggcaacaaagaataaataaggggaaaaggaatccatttgccgatttcgattatgaattcaaggtactacgttggttcatcttttatgattcatcaactccattcatgtctcctaaaccttttttctttttgtgtgttctttccaactctaccagcaagatagcaagaaattacaatatccaaacctctattcgcagagttaagagacattttaacaaaaactaatgaaatgtgaaaaaggtaataacttcctacactccaaaactaaaggacaacatccaaacaacattgaataactaacaaacactttctttttcttcttcttcttctgatgaagtagttgttgtggttgttgttggccttggataatgtttagcaggcctaaacatttccaaatcaattttgggacccaatgttaacaccttaacttcgtagtactttccatccgtacattgcaacgtaagagcaaaatataatcctccaaccatcttacttagcacatttataatctccctaagctctaaattagcaccctgcacatatata

SEQ ID NO: 79898 - DNA, 1058 bp, Cannabis sativa
tcactactaaagacaattaccaataaagacaattaccaaaataccccctcctaagccactttaccttgcttaccccttctagcataagtaaacttaataggaggcctcacattcgcatcacattaaaagaattgaatttgagaacctcttgtcttgtttgacccgaagaaaagaatagccttcatgccatagttttgtgtcattaaggtcttcatctctaattatctacaaacaagtgccaaattaataagcagtagaagatgaaattgaactgatggtaacatattagctctaatcataccttttctggtagttttacaccatcaagtaggcgcgggatgtgtgcaccacaatcagatggctcataatcagcacatctacaaggaaaaaataataattataagaactaattcaacaggacttggcagaaagaaaggaaaaaaccaatttagtatttctttcttagcttacagaacaaagtcttcattgctagtatgaacttcttcatccataactgtgtacttgtggctaagccgtaaaatgccaccaatttcttcactgagaagagaggaaattatgagaagagaatcgatcacattgccaataattttatactatccaatttttacctcaagctagtgcctttgatgttggaattgccctgtgtggaaaccaaaaggatgtgtgatcctaacttgtgagtggatcgaacgagtagctgatcacatttatgcatgttcctctcactttcttcaacctgaatcaagtagcataacttgagaaacaatacttataaataaaacaatcatccgagtataatttcaaatgtactttcataccccaagatccttcactaacttcttagtttcagaaagaagacgactttcatctataaaaggaagcttacaaactccctaatgaacagaacatgagatgtacagtggtttgtcatagctgttaattactaaaaacaaaatgtaatctcataaagttacttcactaaattgatagaaaagaatcagcaaacctgccatgtgaaacgacatccatccatatcg

SEQ ID NO: 79899 - DNA, 1608 bp, Cannabis sativa
gaaaggcaaaagtgaagagatttttgccatctaaaaaaatttactgtttatcctaagggtatgttaaactaattcatgggccgcaacattaacgttgcgacttattacataagaaagagatactcttagaaagttaaacaataaaatttcaatattagaaaagatattcctgagatgtgtttctgtcccaccaatatacctacagaataaaaaaaaaaaggtacatcagtatcaaatcaagtgaataataaaaatatgtaaatttatatgataatgtaataattatcttatctgtaaagtttctattgctaaaagcataaccattatgtatgatttctttttagaccaaaataaacttgaatcataaaacagctatatatactcaaaacaatttttaagaaaatatattttgatatttcttttctaattaatgtttttagtgagttaaatatgggttgggttttttgacacaacacaaattcgacacgagcacgactaggtatgaaaaaatacgagtttgggcacgacacaacacgatgctataaattggtacgacacgacatgaaaaatatgtccttaaacacgacactgtacgagaagtatgaaaagcacgacacgtaagcacgaatagactagcctaaaagcacaacacgcgataagcccaaaaaacacagcatgatatattaaaaaaatcttataattcattaataataataataataaaatatgaatttgtcaataataaataagttaaaataataataaaactataatataatactgaatattataattttacaagtaaaactattaaaacatgaaaaagctaaaattatataatttatttatcgagtgggaaataaaaatttgagtatttattagtaaatattcaaattgtaatgaaactaataatttttttatatgattatctataaattattgttcaaaagttatataatataattaaagctataaaatatatatacttcactaattgtaaacaaaatgaaaagataaaacatgaatttaaacctgaatattaaaacgggctagtttgtttaagaaatacaggtcgacacgagcaaagtacgatacaaatttgagcatgatacaaaaatactgggcctacgggccgtgtcatgcctaccctttaaaagtattggcacgacactgcagatccatatttttctgtggcaaggcacgatacggtccaattttaaaaaacacaaataaatacggatcgaactagtaagtcacgcacaaacttacaagactagttgcaaaatctgtcacagtagttcctcattcacaaataaatagaagaatatattctaatgtcctatataatgatgtttagttgaataaaggatttctatttaaaaatacataaatagaagacactataaataattatatataaaaatatatatctatgttacataatttattcaaataaaaattacatttgtgatgctattataataatgaactaaattagtaatatgggattggaatttattgctattttgttatatcccaaacaagaaaagcatatgatctctttaagatgtgggaattaaaattcatatgcttattatcttatataat

SEQ ID NO: 79900 - DNA, 1791 bp, Cannabis sativa
ttgggaagcaaaacgtgataaaaaagaagctaaaaaagacgaacctggtattctcggcgacatattgcctcacttatgaagtgaatttatttttacacatgggcaaatgcagaaccaaaaaatcttgaagctaaagagtaggcaacatgtcgcctagcccagtgaacaaattgaaattgtatttttaaaagcatcatcttttctatcattttcgggctacaattaaatatattaatatatttttaatttttgtcgactacaaagatagagaaataattttaagagatcaaagaagcaatctgaagccaaattgaagagttttcattagttcttcttctttcatgtttatttctcttttattattcaaattttaaacatttttttgagatgataaaccacattgtgtgactagttttcttagttgttatggtttagttggatctcttattatgattttgattttatgattaaatgaaaagtttagtttcatccaatatatatgtcatctgattctaccttgtttaattgttgatatgattatgatttatgtattttcttttttgctttatgtgattaaaattaagtctattatttagattgtaaaatttattactctagagcaaaactattgaaaaatcaatcatcaagtagattaacttaggtagtgtgagatcgagagacaagcatttacttaggtagccaaaataattataaattgtaaaatcaagaagtgaaatttttggagttgtttctacaaggactcttaataaaggtatggtttactggtggtataaagatatataaactattattcatttacatgcattctttatgtgacactcaagagggtatagagatacattatagttctaggttcttgaaaatattagattaagctaggcacaatgattgaaatcgtagttatattaaggtaaaattaaaacattgacaattatttttatatgattattctcaaattgattttgttaattatttttgtcttcgcttgtttattttaattttcgtaaataaattaaaattgattgcttagattaaattagattttattattcattataattaattattttaagtacttttaatttttgtgggacaatattgatcactataaactattttattatttgttccatttgtacactttcaagtatatcatataaatttcgcaacaacattactaatattatttactttaactaaaattgaagaaactggctcttaatcttattgttaccaattccaatagtcaaagaatatagcaaaagagaacttttgtaagggtaaagagacacttgttaggctatcttcaacatagagattttaaggatgttaccaaaattctctaacatcaaagttgctcttttatttaaaaataaatagaatttcttctacttagaactatgactcttgagttctgccccatcaatattttttcattgaaaaaactctctctaaattataaaattgttgcgaaaatcccccaatgctaatttgtttaatcacttcgttaatgtagcactaatgtgatattaatcaaagttagttaaatcagatataaagtatattaatagtcatataatgaactatggaaatatattaatttgtgcattcatcaagctaatatttgtatgtgtaatattaataaactaaaattcggctatcttaaattgttaaataaacttttctattgcatgtatacttataatcgatattattagatctagtgttataccttgccatgaacaaagatcagagaaagaagaagagaga

SEQ ID NO: 79901 - DNA, 1290 bp, Cannabis sativa
  modified_base (27)..(28): a, c, t, g, unknown or other
actaatcagattgtaaagagttttatnnagggcataaaacccaacaagttctgcccctaaaattgtcaacaatcattctatgcaaaccagagggaaatcaagtatctccaaaccaaaagtcttcactgcttctaggattcctaccacacttgctgaagctctagccaaccctcattggaattcagcaatgtctgatgaagttcttgctcttgcccgaaatgctacttggacattagtaagacttcctcctggtagaagagctattggttgtaaatgggtgtatagagagaagcaaaacatggatgggagtgtgtacagatacaaagctcgacttgtggctaaaggattccatcaacaacctggctttgatttcacagaaacctttagtccagttgtcaaaccaatcacaattagagttgttctcactatggctttggctcaaggatgggcaataaggcaattagatgtcaacaatgccttcttaaatggggatttacaagaagaggtatacatgactcaaccacctggttttgaagttcccactgctcctgatctagtgtgcaagctacacaaagccctatatggattaaaacaagctccaagggcatggtttgataagttgcatcaaagcctcttacattttggcttcacttcctctaaagccgatcaatctctgttcatttgtcatactcaacattccatcaccatagttcttgtctatgttgatgacatacttattaccggaagtgatgctaatgcaattacacaacttattcaagctcttgataaaaagttctctctaaaggacttgggagagctacaatacttcctcggaatcgaagtgagatacacatctcaaggaatgcatctctcacaagaaaaatatgccaaacacatagagttttgagggtggacactaaatctaccatggcagccgacagaactgtgtccaaatgagatgcatgtatagcttcctaatcctaggagtacaacgtatgtgttgtgttttgttcccttttagtggtcctatttgcctttgttaactactattgcagaccattggactgaccaatcggcaagtagctatttttctgaccattttcatctatttctactatctactctggttcccaagtaaaccaaagtctttattattttatttggggggttggggattttaaaagtcaatattttttagatttacattaatttgttggatacactacaatatagtacataataagcttggctaaatcactgcagagcctttttgactgcattttatgtata

SEQ ID NO: 79902 - DNA, 1179 bp, Cannabis sativa
tttttttttttaaaaaaattattttatggatattttttaaaagaaattaaaaaatataaaaaataatataagataattgattatccccttatgataactggttactctaaagatacatggttacccttatttaattttttcatattttttaactatttcttatatataaatttttgaaagaaaaaaaacaatataatataaaaaactataaaatttataattatctttatgaaaaagaatgaattagtagagaatagcctataattttataaaaagtattacaataatgtgagattctctaacacatttatatacgttggtttaggaattcgataaggataacaagaatgcaagacttgcagactatttcgatgtgatttcgggaacaagcactggtggtcttattgccacaatgatatcaacatccaacgatgaaggtcgtcctttatatgctgccaaagatattgtccctttctacaaaagggaatgcccacaaatcttcaacaagtcctgctctttgtgagtaattaatactctctctaatactctacatttcattgcatttgtagctttgatgggattgtatattttacaaaagttacctgatcgaagtctttgatttgttaaataacatatcttcaaaatctatattttttaaaatagtacaaaatgataccacgatcaaaagtttagaacgaatatgtaaaaaaatgtaatcattctaaatctgaatacagaatctgaaatgtcattaatttaacaaaataaaaaattaaataagtaacttttgcaaaatataacatttaaaataatatctaccttaactatatacttagctaagtagttaatgatagctgtaataatttaatttaatatgcagttgtagtcattatgatggtacacaccttcacaatttggtcaaagagattcttggggaaaaggttttaagtgaaattactctcacaaaagtggttattcctgcatacgacatcaagaaactctcacctgttatcttctcctcttatgaggtactactactatactacttatctaaattactaatactaaactagagatgtcgttaagagcaatatttattgttgtggaggcgcacttcagcgtactattttgtatcattttaaaaaatacacgatcaaattttttatttatatgaattaa

SEQ ID NO: 79903 - DNA, 1821 bp, Cannabis sativa
ccatgcatgggtaatacccattaagagagcatacccatatatatataaatatatatatatatatatatttgtttaattaaagtatacaagtctaattaaagtagttttaatattttttttcttttcaatttaaatattattaaggtatttattatgtatagctgtataacttttaaaattttgaaaaaaattagaaaagttattttatatactattttttatttttttttttaatttaccgtttttgttgcttcggttgttccgttagttactctggtactttctatgtgagttgttatgtaaatgttaattacgctttaagttactctgttggttgttatgtaagtttctatattaattttcgtaaaaatgtaaaaaaatattttaaaatataaaaataaaaaaaaactccaaaaaaattcgacataaatagttttaatattactttttcttttattgttttatatgattatgaaaaaaattataaatatgtagtgtagtaaactgtgtttaaattctaatttacctattgcaaaacaaagacaaattttgttgtatagtgaggaaaacaggtcttttataatattaatagttttattctttatataattaaagttagtaattaaatgcatttttataatacatgcaatttgaattaactctattaattaaactctttttgcatatatgcttattgagaagtgttatgtcaattttttattacaattttaaaactgacctctatacccaaaaatatgtatgtcagaatatttattttttaaaaaaatttcatgccggtattcttatagttacaacattattcttgtaaatttttttttaaaaaaattcaaataatttatggtgttaaaaataaatttaaaaattttttaaacacgtgtatagtaaattagaatattaagaattcagtattgtaaattatttaaaaaaattttaaaatttataaaataatatcgtaactataacaaatattattataaaaaaaatattctaacatataattttagacacaaaaattaagattgtaattacaagtcctcatccactacatcaaataaatatatttctttcctacaaaataattgatatcgaccaaattacaaggtcgttttcattgatagcttttgctttttaaaaagtagctagtggtgtcgctattaatatttacaatactatcatcacttttttaatatatatatatatatatatatatatttatatatagacatgcttttggcaactagcaataaatatatatttatatagtagtggggcagctgaaattactatgtagaaattgactaatcttaactaaaatatgtgtatatatagtagtaaagattagtagagaactaacatttcatcaagtaaattacatctttcttcaacacatatagtttttataatcaaaatcatggagaaagagtttagtatgctttatgcagctgcacaagaagggaatgtgaccactttaaggcaacttcttaaacaagataaattgattctcgatcggctcattgttatcaacaacaatggtttttctgagactcctcttcatgtggcagctatgctcggccatgcagattttgtcaaagaaatcattacttacaaacctgagcttgcaaaggaggttgacgcatggcactccacgccactgcacttagcagtggcaaaaggtcaccttgagaccgtcaaagtactacttatgttggttgacgatctcaaaaatttgtgctctgcttgggatggagagggaagaaactctatgcaccttgcagttatgagagggcgacttgatgtgtt

SEQ ID NO: 79904 - DNA, 1319 bp, Cannabis sativa
  modified_base (1290)..(1290): a, c, t, g, unknown or other
gcacacacgcatgcactcaacaccatgactcgcatgcaagccccccacatgggctcgcatgcaagctctcgagacccacaacacaggtacacacacatacatgcttgcatgcgagccccttgtctcgaacccattcaactgcacacacaaacatgcatgcttgcatgagagcccccctatgggctggcatgcgaaccccttgtatctcagtcatgcaaccgcacacgcacacacatgcatgcttgcttgcgaggccccccaagggctcgcatgcgagccccttgtctcccgccaatgcaatcgcacacacgcatgcatgcacacacttgtaggcacacacccgaatgcatacactcgcatgcatgcacgacttcagattcttacatcctcgctttttctattctcttgttcgtgaatcatcacggggttagtcactgaatcacatggatgcaccccgacaactgtgagtgttggtgatgactttatgaaatacattccgggtaggtaagcctattgaatgcagcttcattattcccttggtaattagttaactaacctcagaagttagcagtgctaatttttggggttaacaacagtgctttcaaaattcacctaaaggaagaggtgagaaagtgaactactagggttttctatcttcttttctttctttatatgggcatataatatgtttagatcaaattatttatttaattaaaataataggttaaattgttttgagcgactgagattaaatgtcgctcaaaatctaattcaaaccaccttagatctaaacatatacatattgtatctttttaatttaaacagaaatttatattattattaattaattatataatataattattatatattttaggtaacttaagctacgtataaaaaaaattaaaattttttatgtatattttaattattattattataattttaattaattaataaataaataatcaataataaaaaaaataagctttttatatattatatttaaattcaaattaaattctcaataattgtaaattaaaactttaaatataacattttattaattgatatcaatttatcagaattaacaaataagcctatatctctcttctcttcttaatttagcccaacttagtgaataattatgaaatttgacatagtcaatttttgaattctaattgattacataaatcaattaattgagactacacgatgatattatcccagacaatgtgaggaccacgggcctatttaactaaactcctaataagtagattcaaaatttancaagaaaattttctaacttattaattcct

SEQ ID NO: 79905 - DNA, 1997 bp, Cannabis sativa
gattgtttttttacccaatagaatttggaaattaggagtaatttagtgagaaaatgaaacaacaaaatccatttttaagcataatcactatcaactttgcaactcttacataataaaatagatactttcttatttgtgatagacagagtctcgtgatctgcaaggagaaagactaagagctgtcaatctcataagtatgagattacacaattgaacaaatcttttttggtagcccaaacgtatttgatctgaaataattttagaataagtgaccttttggaaagttttcctgacttaaaatggggacgttacataattacaaaattctatgctattgatcattgtgtagaacatattatagagcttagtgtattagcaatagtgtatttactcctaataaatgaagattttagttatccccaaatttggatataatcaacacgttcttttttttcttccctttacaataacaacctcctcaaccatagtttttctttttcaattattataatttatcattacatagttgatatatttctatcctaatggggtttggggagggaggcattgacccatgacttttctcgagagaagagacaagaggtgtggaaccatttaggttgagcttaaaacaacataacaacaatataatcaacaaatagaacatgatgtcgagctttaaaatcgaaaaaaaaaaaacacaaatggtagagagccaacttactcaaacggagagtaaataaccttactgatagaaattgttcagcactgataatatgaatgtcctaaacgaaaaatggaagaactttgagcactttgaattgtactcatgaagtactcattgttttttggtggggtccctttggagacatccaataaaattgaaacgatacagaagagattagcatgatccctgcccaaggatgacatgacacgcacgaatcgagaaatggtccaaatttctcgattttttttcccatttttctttgttgggtgttcgagttctatttctcttggtcactcaataaattgaaaattgacatgtgcttttttcttctttaatttgccacacaaaattagtcctacaagctgtactatgacacttagggtgggtgaataataattgtttgtgtaattttgattctagttcatatgttcattaaagggaccacataaaactaggacaaaaagattgagaatacttcttaaatgtatttgtgaattcctttttttagaagcacaaacagcatatccactctactgcgttctctgcagattcctctcttgtcaatcgcccgagccaacttcttcaccatcccaatattcaatgtcacactcagtttcacaaatgggtttggatttcctcaccaagaagccatattcccctccttcatgggcttctcatctcaaccccataccatctcattcctactctctcagccatgtaagtcaacctttatctttatttatttgtaccaaaagaggtttctttcctagtctttactcttttccattactacttgattctgttatcagcttcctaccccaattcacaaatggaatcttcctaatttgcctaaaaacactgaagtttggttgaaggtatttttttcttgttcttgttttgttttatggttgcatctgatagtttctttatcccgttctaatgtaatgttatgctctgattcattaacgttggtttctttgatattgttatcatttttctattaaatcttctgttgaatattagagttcagttgatggttaagattgagttcgtatttgtattgctttagttattaagctaattaagatttttgtcccctaaattttaacatgcaccaaatcacgtatcttgaacttttaaggctgttaaaaatcccccctgaacatttgagattgttgaatttatgacttctttctaattttagtaaggaaagtctaacatagatgaaagttcaagggacttgatttggtatatgtcaaatcaaagtcta

SEQ ID NO: 79906 - DNA, 4800 bp, Cannabis sativa
ggcgtgcgtaacaactctccttttccatggcgaaaaagaagagggtgggacgaaagcctgtcatcaaggttgatctctcagaaccccctacaatccaagactctttcgatcagacggctgatgcggaggagaacgagacaaaccaggtcgatcttgctctgcaatcggaggaggcagatctggaaacagagttgacgagagaggttttcgagactcctggatcctgggcagatgaggctgagaaggacgagatgcgtgagagttctcagcaaaaatggaagcaatttacagaaggtaagctctcattctctgaacctaagctaacatatactgaacccatgcttaaaaatgggaaaagaatcgcacaggtagatttggatgaggtgaatgtccaagcggcaatatggaatacggcagttgtgtgtatggtcctaggggctaatcccccatttgctgtttttgagggtttcctaaaacgtaaatggggatatctgggcattcaacagattgtgagaatgaatggtggctttactattgtgaaatttaatgatacagtgactcgtgatgtggttttggaggagggtgttcttcaatttgacaaaaaaccagtaataattcgcccttggtcgacagacttaacagccataaatctagttaaatcggttcctctttggatccgattaccagaccttgggttgcattactggggtacaaagagtctaagtgccattgtgagcaccttagggaagccaattatgacagacaaaattaccaaggagaggtccatggtaaaatttgctagagtgttggtcgaaatggatatctcggataagcccccgagagtgatagagttcttgaatgagcatggacgattgatagagcagccggttgagtatgaatggcttccggttcaatgcaactgctgtcgtggatatggtcattttggggcagattgtagaaagaagaagattaatgaagatgggaagaaggggattaattcaaaccagaaagaagttgccaagactgaaaccgttttgaatctagctactcccactgagcagaataatgagatagaagaatcaagcaagggtgtgacttcaaaagtgggtgtggtaactcaggtgactcaaggagatgggttggataagtggaaaactcctaagaggacagcagccagtaaaaggaacatagaggtgagaagagttgatgctgatgagaaaaggtgtaattcatttgatattctgcaagggcagcaagatggtgacaaaatggcaattattcaagagaagtttgctaatggatagttgcaatataatgagttggaacattaggggcttcaatagtaataagaagcaggaggctgtgattgatttatgtcgaataaagaaagttggtttaggggcaatcattgaaactaaaatgagaggctctaaagtaactgaaactatgctaaataaattcattggttggaatttttactctagtccaatcattgaagggagaattttagttgtttggaagaaggattatgttcaggtaaagattttagaggaaacatctcaactggttcattgtcaagtcaaaatggcatgccatgagtttgattttttagctacttttgtatatggtgctaataatggagaagatcggaaggatttgtggagtagcttggcaaacctttctattatgtccaaaccttggataataatgggagatttcaatgctgtgatggattttggagatcgaagtggagggaatcgggtaacaagagctgaaatagaagatgctaataattggttagctttgggtttggccgatgctttgaggaaaactggctctcatttcacatggaccaataatcaaggggggggagacagaatttattccagaattgatcatgcctttaagaatgaagaatggttagatttatttcccaactcttatgttaatatgaattgggagacttcttctgatcattgctcctgtgtagttgcttctgctattactcaagacattggtgtaaaaccttttagattttacaaccactgggctgataatgaaaattttgttaaggtggttatggaaagttggggaaaaccggttaaagctactgggttacaagctattcatctaaaatgtttgcggctgaagcatgttcttaggaaatttaataaggcagtaggagatgttgaggttacctaccagcaggctaaagagaactatttggctctgagattacaagctcaaaccgatcctgggaacctgatcttgctggaagctgaaagggcagcagctgaggagtttagtgaaagagataaaatgttgcacagctttcttaaacaaagaagcaaggtcaattggctgcaaaaaggtgatgaaaacacttcttatttttatgcttgcattaaaaaaagaagagaagaaaaccgaatagcttatttcaaaaatcagaatggagagattattgatgactactctgctgttgttaagcactttgtggatcatttcacaagctttatggggagtgctagaccagcagttcagccttctttcagatgtcttgactttggaaaaaagctcacttttgaccagcagatggccttaatccgtcctttctctaagaaagagattaagaaagctatgttcagtattccaagcataaaagcgcctggtccagatggtttcagttccgaattttataagagaatgtggcctgccttaggagatgaattctgctcagccatccataacttctttgtcaccggaagaatcccagatgccttgaatgaaacagctatctccttgataccaaaaaatgatgccccctctaatgcagctgattatagaccaatagcttgctgtactactctatacaaatgcatctctaagttgatgagtactagacttgctgaggtgttaccgagcttgattaaccagaaccaaggagctttcattcaacagagatcgattgctcacaatatcttgatttttcaggatcttatcaagaattacaatagaaagaatgtttctccgaggtgtgctttaaagattgatttgagtaaagcctacgatacggtggattggaactttttggaaaaatggctgattgctcttagattcccagataaatttgtgaaatggattatgacatgtttgaaaggaacctcttacaacctaatgatgaatggaagacttcaaggcagatttcaaggtaagaaaggtctcaggcaaggagatccgatatcaccactgttgtttgtattggttatggaattccttacaagaagacttttgcaagaagccaatgaaaacaccttcaagtatcaccccctctgcaaaagcctcaaactaatcagcctctgctttgcggatgatctaatcttattttgcaaaggctctatgcaggttgtgagtcacctgaaagctgccttggatgactttagtgaagccacaggtttgtctatcaactatacaaaatcgaacatctattttgggggagttgatacgacaaccagaaatgagattgctagactgtttggccttgaggagggtactttccctctaaaatatttaggggtgcctatgagacctacgaaatggagaatggaggactgtggagtaattgttgacaagatcaaaaagaagcttcacacatgggctacgaggcatctttcatatgcaggtagacttcaactcattcacactgttttgcttggtttgaggaactattggatgaacatttttgttcttccccaaagtgtaatcaaagagattgagaaacattgtagattattcctatggggacaatctgggaatcggtgtaaagtccactttggttcttgggagaaggtgtgcagacctaaacacctaggaggtctcgggttcagggaaggaactaaatggaacaaggctaccttggctaaattcctttgggctataatgaagaagcatgatgttctatgggtcaaatgggttaatgttgtgtatatgaaaggtgatgacatctggaactacaaacttggagtggatacaagttggtattggaagaagctttgccatttaaggaaagacttcagacaacagcagattatagctgcaggtaggaatggcaaattcagggcaacttttctttataataacatggtgtcttgtgaggaagataagtactacaaagctgtttggaacagatataatatccccaagcacagattcatactttggcaaactgtacacacccaactcttaactagagatcagcttgcaatttttcacatcaacattctttcatcagattgtccggtgtgtgggttggaagctgaatctcatcagcatttattctttgattgctggttttcaaagcaggttgtgtatgagatcttcaattggctcggttttcaggcttggaacttacagttcacaagctggagaacttttttgtctataacagatagcaggttcaaggataaagtggtggtcttgctgcttgctgcagttgtctactatatttggctaaatagaaacaaatgtacacatgataatagctcttacacaattagtcatatagttaaagagattaaaaggaatgtaaagtagattgtatagctatagacaaaggaggattgattccattagccaaggtttattatgtaggctgctaaattgatgtgtttgctgctgctttgcctctgttttttgtgaggctttgtttgtattttgtctgttgattaatgagaacacttctcctttgatcaaaaaaaaaaaaaatgaatcaggtcgacttggatttaaagaaaaaaatta

SEQ ID NO: 79907 - DNA, 4369 bp, Cannabis sativa
ttcttggtttatgagaaattatttggtaacttttttttttaagtttttattcaaaaataacagtttttttttttgctaaggttaacggggttaaatgcccaatttatttttaaatgctttatcgcaaaacttcctttcactttcctctctccctcgcgtctcactttcccaatgtttattttgcgctgtaagtttattttttttccctttatttctgtcatgtcctattgaatttaatatgtatatgttcaatttttcccaatcgttgtcgtcagatattaagaaagagtttgggtatcttgatttgaatatcaataaatctctgatgatgagattgcttatcttgttttaagattgagggttcatctttattgggtttggcggcgttgaatcttgcaaagaccacatgtagccttctctgaactgtccaagaagcaccaaatcaaaatttcaattcgacaataaggttcacataaccaatgggagttcatagaggcgacaacaacgactaggatcaatcattgttcactggccggagtcgatcgagattttttttgggtttgagttgttaatattagatgtgatttatggttttcaatatcattgatttcttatgatatatttctatttatatatttttatttatattgtcttaactttgtattttctatgttttaagtttagaagatcttcttctttagcatctctaccaacatagtgaactggtgaagtcgtttcggtcgccgacgatgtagttgtgctagcaatgaatagtaattagagtgatgatccgcatttcataccatttttccatggttttccattaatttttttattattattattaatggtttaatttgtcaacttttcactttctctattttattttataagggctattaggtttcctccaaggaaaaaaaagtcagttatttatttaaaagttcttaactatttttatttatttttgtttttattttgttttaataataatattatttaatttcattttatgtatggaaacaattatatatgtttatttaatattttatttttaattagtttttagtcaactatcttttatagtattaattattaatattaatgatattcatattttattatgggtaattttcttaattaataatattaatgtgattgaaaaatgtcattagttttcatttattgtctactctgcctagtgttaaaataagttttattaaacgatcagctaatcgagttgctcatgttattgttaggcatgctcgatttctccctggttgtagcattttcgaaacaaacttattttgggccgatctaaaggctctcttattatttcagaaatgctattaattcaatgaagttgatatttcatttcaaaaaattgataatttctttttatttcgcttttgattttttacatattttggttgtggtaatattattgtacatttaatttgtacttacttattttttatataacatttatattttttggtataacattttaatatatttattaattacattttttagatagaatcattatttctgtgatcacatttatttttaaaaaattttaactaattttatttaatttgataaatttatagatagacttttaaaagagaatctaagtgcatgtttggcatcataactaaaaagcagttttttatttttaaaaacagaaaattattttttttaaaaaaatttggcttgtttggccttctttttttaaaacagttttaagaaaacaaagttacaaaaaataagaattttgaaaacaacaaaatattgttttctatttttaaaaactaattcacttttggtcaatatattatttttaaaaacactaaccaaacatgacttgtttttaaaaacttcaaaaattaatttttattctcatttctaaaaataattttttaaaaacaaaaatcagaaaataatatcaaacatgctctaatggctcttcctttttgctctaatctaacttagcttttcttttaagaagtttaaattgattatttaatttttaccttttaatgtctattgaaaatacataaaaaataactccacacagtaatttaattgagtttttcttgaattaatgactttctttaaaaaatacatttagactataataataaaataaattatatgattatttattgcatcatgtttaattaaattagaaaatatctagcataaaattaagtatacggccttgcatataactttcttctagttttagtaatagatcactattttgaagatgcttttacataacaaaaatggaggaagattctttctgtaaattttatatttatgaacctttttctattttttatatacatatattcataatttttctaacctttatatattaaagtttatttcaattaaaaatagaattcttaattaaaaacaaaaatctttaaaattatatttgttttctttcaaaattttcatagggtgtttggactaatgaatgaaggtctaacttagagaatgatcaagatgatgaaaacagctaggtactaattaatacttaattatatatttattaaaccaatacataatatggtgtgattataaaacttaataggttaaccttaataataaactaattaagcatcaacaatagagtaaagctcatatctcacatagcaactaccaccaacaacacgacctcctctttttccagtacaacagttcggaaggttgcttattgcatcatcaagacacttttgacaatccatcccattaagatcccgagtacactgaaccaacccataaagctttgggtcgggacccgacccgagatccatgtcacccgtggcatacaactttgaagttcttgaagctttatacgacaaaccactcagcagttccttcaccttgggattaaacgactcagcgttatccacgtcttgaacgttccacatgtagaacctgttactgttatcgatttgaccaaagaagttgtcgtctgagtacttcaagaggcaattgtcgtaccatacaacggctcctttattgtaaggacaacgttgttgaagctctttggcggcttcaacaacgcaggttttacagttttctgttgagacgtcaccgcggcagaggccgagcccgttgacttggctgctgtcattgccattgccgccaccttgaccggttgagctgaccccgaaaccggtaggaggtactttgatgggcaaacggttattgaggagttcgtttaagttggcggcgaaagggctattggatgtgaaattttctttgttgaagcagaaatggaagagaggatcggtggctgtggctgcatgcagaaaaattagagagaataatagtgtggaagtgatgaagagagggttttgttctgagaacgacatgtcgttttggaaagttatatatttgttttcagtgatggtggatatcgattgttcgatcataattgctataaatagagaaaagttatggtttggctaagtagggagttgaaatatttgacttttccaaatgagaaacatggtcaacttaattgcgtgtatttatttaataaattatatggccaaagaagatgagttttgtcaaattctccttattaatgcatgcaatatataaaccctaagagcttagtcaaaacaggataaaatatattggtggatgaggtactttgtcaacccaattaacagccgtatataacgaaagtgtccaagaacggtttgtagttaattgtaaagcttagaaaataccattataatcaggggcacagcagcccctcatttttttaagtgggtaaaaatattatgatcaaaataaaaataattaaaatttagggattatttcataaaaacataaaacaacaacaaaaaaaaaattataaaaatacggttttatcgaattttaaatatttttttagattttttaattttatttacagaaaatacggtcttgttatgctgtaatcttattaatttgttgttgattttttattatatgtatgttattttttattgttattttcatgttacttttatgtaattttcttatttattttatgttattttcgtgttattttttaaaaaatcgtaaaaatgtaaaaaaatattctttgaacgtaaaaatgtaaatattttataaaaaatagtgtcttttataattattttttaaatttatatataaaatttaagatgaatatatcgggtgggtaacatctaatcaaattgaaccgaatcaattcaatccaatattaaattagatgttaaaaataataaaaaaaaaaaatgttagattgaatccacccttacccacgtacccccaccacactagtgatatatctatgaagaatgcatatatatatatatat

SEQ ID NO: 79908 - DNA, 800 bp, Cannabis sativa
atcaattcagggtcctatttgtacgattttgaaaaatacaaagtctattttataatttaacaaaacgaagggtctaattagtaacttttgcaaaacacagaatacaaaatggtagttacctttaattaatttacttattatcaaatatataaatttagtaaattgacgttagaaatattataatcaatattcaagaaataatgatatgaataataatatagatattttgaggctttttaacgatactatattaagattatttacaaattattgtaatacgtgcaaattaaatgtggttgcaacatttttaacaatagttgattatgtggtatatattctatttaaaattatttatttatatatttattttttttagaaaggtgtaattaattgattaagtttaacgataataaaactttgggaaatgatataaaaggatgaaaaaaaacaataattatatgtaggatgaattaataaataaatgatagataagcggggggagtagagaagggaatgaatgaacttacaagaagacagaagccagtgacatcagcgaaagaggtggcaatggcagcaccagagagtgaaagttcaccaaggtgcccggccatcatggtcgacacaacctgaggaagaaactgagccaccgtcacaaccaccatcggcatacctattgcaatcatcttcttcatttctcccacaaacctaccctctcttactcctcctaacaataattcgctactcttccccctttttaccagcaatggaacctcatcttcatgatctgcttccattttttt

SEQ ID NO: 79909 - DNA, 1213 bp, Cannabis sativa
taaatatttatattttatagtataagacaattacagggccttttatttgaaataataactattaagttggtttagtttgtcttgcttttctttccgccttttgtcattttgtcttttcttttgttttgagtcgtaattgttactttaattttggctttcacatgcattgtttttctttcggccatcgtttactactattagatcattcaaatcatataaatgtactgctgttcctcttattacacacaaaagcttttgaaatttttacatacaaaacaaactactaaataaaaaagcacacccaatcaaaaaaaaaaataaaccccagcttattcattaagatactaatttacgcaattacagtacttcttggttggagaaagataatgagtccttcacatggtagtcggaacagcagtttccttgggtggccttactattaggattggacattttgcatgatgagcacagtagtcacttacactccccagaaatgctctgcatttatatatacaaccaaccaataataagtaaaacaaaaagtatctttatattgggtccatacataatgagcattcctattaaggacgagtgatagcgatactcttatagtatttctcatatataatatataaataaaatacctcttgatggttccaaggccacgactaccaacgacgaggagatccatatgcatttgctctgtagcgttacatatcttgtcctttggttctccctccagaatcagtgtttctgctttcacattctacatttatatacataacatagtaattttagattagcagatataaaattaaggttgagaggaataatgttaagaatggaataaaattttaaatgtcaaattttttttgcatatcataaaatttaaaatgtcaaattgttttttttgcatatcggaacagcctttattttcatttcaaaatggatagtgaaaaagttattctattgaaattggattctaatattttaaaatacaaagaaaagaaaaatggaatgaaacttattcttttcctccaaccaaattaagcaagttattattaggtacgtataccggcttcgttctgcacatttgtaatgcacgagacatcaaaatcgcagaattctcttcctgagctttcctcactgattccaccactgatgttgttgcatataccgctgtcaaataatttcaaacttacatatattttta

SEQ ID NO: 79910 - DNA, 1800 bp, Cannabis sativa
gaacttttttaatccgctattgcattgcaacatttttctaagcataggatctgttaagactgttatctcacttcttatgactttggatcgtcccctctcatcttcacgaactggttgaaagttcaaatcattttgggactctgggttgttaattctgaccttgctttgaaaatcgttgacaaactcacatttgggaaggtcccgtatattttgggccttttacattgtttttatattttttatctagtttctcttctcggctttaagttaagtagtctaagtgattgatttaatgagtatatcaaactcattagaaaatacagagtcagtagttggttccattctctgttggaaatgcagctgtttacacctgcttttactcgctcacaaaccttttaatctgtaaataactatattatgcaataatgcaaatgcagacgatgataatgatgaatcggtatctcttccatcatctggcacggctgacagtgatgagcaggcagatcatcagctgctgtctgcgcccaatggcgaagtggcattcttaatggaaaaaccagtgaggttagccagggaactactctgatttcatcacaaattcttaaatacattggtcattccttgttgttttatgtatttatatgatctgaacgagtagaggaaaatgtctcaattaagctgtttgagattatacagtataatgttggtataatagcaatattgctccagatttgtatgccaccttgtctctagagtgtgataagtcaaatttgactatgtttgattgctttttacaagtgttaagaagatatacaatgctttggaaggtttttactaatctttgcaaagataaaatagtaaattacttcattccttttatttaaagcatgggtctactttcagtcttctataaatattctgtaaccagttagacaaaagataaactcaaaagttacataagtccgtgctttaattattgagttatggttcaacattagaagtcctaatcgacatcggcgataactattccaaaaggtaatgagcaagatctacaacccattcttaaatcaggtcctaatcgacatcggcgataactattgttctcatctgatattaaagctcatgctaacattctgagccaatttgcagacatcaccgcaaaatacagaataatgctctatgaaaagaagatggttgaaggccaatcaaagctacattatggtaaatacgagacccaacaacatatagtcccaaagttgctcaaattctcaaatgaaggtctcacaaagactcaagtccttggaattgttagttacctatgcgattttgtatcgcacttgtccaaattcacatagacgttaacaaagatgcttcaaaaaattgaccggcatggaaaaaaatatatacaaatagttaaaaaactgaaaaaatgatacaaaacctactcttagattccctcatgcagtaaaagaattttatagactaatgcaagcaacaggcattagggagtggtactcctattggaacactactaaaaaaaggcattagcctatttcaccaacgcaaaatggaatagaatagacattaattcttaacagtcggtattaaaattgagtgaccatttatagttgatttttttttttttttcacaattacctcgattttaaactgacacatggaaaaaaaaaattatatagatctgagatatatcttccacatcaataaacaataataatgcattaaaaacaatattagatccacactaccaacaacaattatacagcaaaataaaatatgaga

SEQ ID NO: 79911 - DNA, 1878 bp, Cannabis sativa
cttgccattgaccttgtcatactcacttgctctagaagaataaatctagttgcggtcttcaatggcaaacggttgttcttaataacatgttctcgaacatcttgtgataatctatggtattccaagaatctgcataaactagttctttcatcttctgttaagccaggatgtgcctgtaaatcacatatattgagttatcacacaatgagtcaagtaattcttattcaccagtctctaattggaaattgtactctcttttaagttctatataaacactaacagtgacaatttcttttttctttttaagtttttttaaagagtaaattgtcaaacaatgaaaaaaataagaatatcataccttgaggtacaagtcagtggctctatagagattgtcatcacaaaaccgagcttcttttggcaaggcttccacaagtgactggaaagtcttgacatgaagtttctcttctcttgctactagtgtaagatactcatcaactaacctcccaacgcctagtattttcttcttgcggttgatctgatcaagagaagcataagctttcaccaccttattaacaatgccaacatcatgaacattttcattgcctccatagtttttaaccaagagatctcgagcacgacatagctccaacaaaggcactattcgttgtacgagcagttccaacaactcagagctgatctgcaatgccaaacctgccttgagaagatgaagcagaaaattacaagacactgagttttcctcagttggaagtactctaactaaacactctattgtgactctttgtaattgataactcatgttttcgggatttggtgtagtctcatgctcacttagattgacactagagagccaattagtggcccaatgagctatacatgagccaacaagatttggcttcatccctttactttttatggactgaatcacctcaatgaaatgatctattctaagtgatgacacatcttcaaaccaccaatgttcaacttgcttctcatgttttgactcttctccacttttcaatggaaggtgaaagctatgtggaccatcttctctagcacttaagtctttaaggtttgtgcatgccttcaaagcgatggattctgagcaattcttcacaatttgcagctctttggccaatgaagaaagattttcacagcttttcaaaatttgaaatgtgtctttccatgaggaaaatatagaaaagcttagaaatgtctcagttttggatatgaggttgccttgttcaagataatcattcatatccaagaaatgagctgcacaatataggggagaaatattggcagatgtaatatcaacttccaacccgtaacaaaatttcaccactaactcaaaagctttggctcctcctggaagattgtctatagatattttgaggcttttgtccctgcccccattacttctatcgaaaatcaatttattcaaatatccactctttgagaccataggtagctgaaaaataataaaagtggtaaatatcactatttgtagacctaaaatctagtatgccattttttttaattaaaaaatttatatttcagattgtgaaaagatttagattaggtcgttcaagtatcatggtcaaatcaaccaaacaagtttaaagaggaccaaatatttccaaatagagatcttgtgctcttttatgctgataaaagagaaaaacatatgccaattttttattttttattgggtaaattgccgcataaataattaatgtttctgattttatacatttaataccgaatgtttattttttgtggcaaaaatacctaatgttacaattctcttacaccgttactaccacttccgttattaactcataaatatagacacgtgga

SEQ ID NO: 79912 - DNA, 1127 bp, Cannabis sativa
tttaaatgtgtcatatttatcataggaacttttaaaatgtcatagtaagtgtaatttcctcataattaatattatattagcaacgtaaaaagcgattatattatatatttttttttttttgaaaatgcgattatattgtttaattgcaatataataccaaaaaaaaattgatagagttctttaataagaataaataataaaatatagacacaaagaggacagttcgtcgtcgtttagtagtaataaactgttgtcagcagatgtggtggcggaatgtgggacatgcatggtatgactttgacaagtcaaacttacgcaattaataaataataataaaggcctatttatctattattattcaaaaaaaaaagaaaataaaaaataaagaatatttattttatatatagtactagtacattacatggagatttggagatggaagatgggtggcggtgaaggcggtggtgcatggtggcgactggagtgttggtggtccctgtccctacgctaacgcattggtacctgcgttttcggacttattgttaattggtcaatacgctaacaaactaataacatttatttattaatattataatgcatgtgcacaaactccaaagtcttctagctgagtttttagattctttgctttcaaagtcaaatgtgttttgactaaaatatattcctttccttcttcacataaggtattttgaaccaagggggaagggagggacggaccaaaacacatcgttttataatttcctaatatatataatataataaaacaaagctcgaagcagatttggaaaatcccttctattatgcgtggcagccctatgactatgagtgtgaagtgaagccagccatacatattattttttttattaatacatataaataataactctctgaaacccctgtttttttttttcggataaaatttttctctgaaacccctgtatgtatataaaataaaaatgatgaacacagaccactgtaaatataccaccaggaaaaggagaagaaaattataaatgtatttatttgaataggtcaacatttgacaattacacgagacattcattgtataaactgctgctgcagcctgctgctatatatttatatatata

SEQ ID NO: 79913 - DNA, 1364 bp, Cannabis sativa
ctctctctctctctctctcctggtgcttcgtgctcttttgttgttatggctaagatgacaggaaaaggaaaaggataggaaaaggaaaaagacaagcagtggatgtcgaaattttggctagggaaactctgtctatattgttggatcaggatgatgtggttggacaagagttcattaaaaagatggtgattggaagaatcatctattggagaggtatcttcaaggggctccttcgtaatgtgctttcccagaaatggcgtatgtccaatgtatggaacattacagaagagggacccaacatgtataccttaagattccaaaagaagaatgaagaggagtcgttgggagatctgtggtggtcatcttattctcaaactgtcgtcggctgatggtagatggaagtctgtaaacatggatttagttcctatatgggtaagattctatgatattcctcctcatttttttactaacaaaaatgctactgctattgctaagaaattagagagagtgataagcattgatcggttatggaaaaatggcctccttgctaaggactataatcggttcagggtggaactcaacatgggaaagccaatcttggtgggactgtacctacttatggaggaaggagtaagtttatggtgttatttcaaacatgagaaattcccatgagtttgcttcagatgtggtatcatcggacatgatgaatcagtttgcaatagaaagagaaggcttattgatgaatttgaatgttcgattatgatgtatgtgttgccatttattttaccaggatctatatttactaacaagtatgtttcattaacatcctaaatataaattttctagtacaataaaatcaaacacataagagtttagaaaatcttacattgattgcagcggaataatatggctcattttgctcagatctctgacccttgttcttttatgtcgaagagtaataacaagatttgagcctggatctccttctctccttcgggtttggttaccaccgtgttccgcaatatgattgagtacttgacttgttatgtgtcgccatggcactctatcactatggctcgaatgatgaagaacaatgaaggaggctcgaaatcactatagaaggtgtctcttatctactagttgtcagagaataaaaattaggtttagtttagttgaagtgaatagttagttcaattggatgagatgagaccatcatgttccttttatagtatttcaactagggcttaagtttgaattatatagattaaaacagaataaaatattgggcaaaaattatacatagtagccagccactaaagggtcttttactagttacaattttgccactttatttcaaccactta

SEQ ID NO: 79914 - DNA, 1711 bp, Cannabis sativa
aaaaaagaaaaattttctctttttaaaaaattggtagaagtttccaaagaaggaaaaaggaaaacaaaatccactttcaataaaaaagaaaacccacaacaaagacaaccaagtaagccattgaatgagttaattttttaggggaagtcgtccctcatgaaagatgatagtgtagtacagaaatttgttttgtaaagtacaggttaaattttagtaccgatcaagcccagtcaacaaaaagcaacaccaagggtaaaaccggaaactaaaatgattcaacaaatacattaggggccgggccctaccaccaccctcttcctctttcagcaactttagttacgaaattgctgtctcaccatctccctcggaaaatcctcccccacttttttttttttaattaaattttatttgcttatcttataaataaaaaatacatgtcttttcttttcattattgaacccaaaataaatcataattttcacatttatatatttatataaataagaacgtctctggtgttcttctctgttcggtactgtctaatggcgccgagcatcagagacctccagctcacccaactctcttccgccggcggtgataattcccgtgaccttgaggatgtacggcttcttgatgcttacgacaattcttcgtcggaggacgaggagaagggagtacaacaggggacgatgaagcgaatccaggttggtgttaccggcatgacctgcgctgcttgctcaaattcggttgaagcagctctcacgagcgttaatggagttttaagggcttctgtcgctttgctacagaataaggccgacgtggtcttcgatcccagattggtcaaggttggttgctctttcagaaaatatttgcttcctaattgtgttcaactgggtttgactttatctgtttggtgaatttggatcctcgtttagtatttgcattatgctttttcacttacataataataataattaaaattctgagcttgtttagatgtgttgaactgttagctcgtctttgatacttgattttaatacttttttttttttgtgggggggttgtatttggttttctttctagtgagttatgggttagttcttgttctttgttctttaaataattcgagtttaaattaatttcattgtttcaactatggaccgtggtagatgctaattatacagttagaatttcttttagatatcgtaatgacggtttatttactaagccatttcgattatggtggaatagacaatgattatgctctattatgctctatttaatgtagttaatatgttcagttttgtttgtgtgttgttgggtggtatatcttatcctggtaatcatattttagtttttctaatttatatgtgatgaatggagcggaattagattaaagtgacagatcgtttccttctgtaatgtttattagtccagttatatggtgtttgcagtttggactttttttccctcagtcctttttttttggtgagttactttgtctattatgataagtaaatgatgttttttattgattcatttacttgtattggaacttttttctcttgtttctcagttaggttaattgaccaaaaacatgtatccattcaacagtgtctctttgctgagtttaaagttttctttggtatctgtataattttatctgtaatcacgatgctgatattacatcaatgagcctgttgtgcaacaa

SEQ ID NO: 79915 - DNA, 2922 bp, Cannabis sativa
gtatgtaaagataaaattttgattaattacatttaatatttctgttccacgtagtacataaagataatatttctaaatttaatacttcactttacgtagtacagaaagatgatacttcaatttaatgaaaatttaatacttcgttttatgtagtacataaagatgatactttgattgacgggtatatttaatattccttttttacgactaacatacaacacatcttttcgaacatttaccgaaaatagggcaaccaaatagtacacaaaatacaaccttacatatattgaatacaaattcaaggttactaattatatttgtatatacttttacaaatgggaatcatatatggtttgacttttaaaagttacttttaagtttttgaaatttcaaaaataattttattatttgtttgatagctaatgaattacaatttttaagtctaaagtctaaaaagttctttcaataaaaactaattttattagttttcttagaaagaacttctcgagaagctaaaaacaaaaaatagaagctcaacaaaacagaatatgtgtgtatgtatgtgtcatttacgattggttagcgatatttcttaaaaattattttattaagttatatggaacctgctacttaattatactataacaatatatgacacacagaaaaatattaaacactaatgccttttagcaattatcataatttatgtagctagcaattaattttcacttcttttctttaatatacctactacctactgatttttttggtcaaacttttatatattgaatgccaaataatacaaaaatgatatccctttaacgaagacatgattttttttttactataaaacaaactctatttattgtaaaagaatcaattaattaattatgatacaatttacacctcaataacaactgtcagatattaatgctaaattatgtatataaggaatttcatagtcatagtcatactatattccatttcaaacataacgtaaataaattaaattgacagacagtactgcccacccattattaattaattttctcttatatatattatttttaattaattatatattattaagttttgtacatataggattataatgtttttataaatagttcttagttttcttcattttcactaatattaacaaaaattaagccccaaagtataaatatacatatttaataagaaaaataaaacattatcaatgctttatctcctatagtaaaagatgctcatatcttgaattattataattaattgcataaaattcatgtatgtaataaaaagaaatcaataaatacaaattaatataatgtttttatagtaatttacacaacagagccactgagtagtgtttatctgcaattaatatatatatatgtaaattaatgctacaaatagtaaaatgtatatctctagtttatatttttaacgttacaaactataaaactatacatagtaaaaaatataaatatttatatataaatacattatatgacctacatataaagattttgcttgcctgtaaaatatatggacgttatatgtgcttagaagaaaaaggaaaaaaaaaagacgttatgttaattaataaattattgaactttccagcaaatcaatgaatttataaaattgtgggaaataaatatttaagaaataacatatcaaattgcaaagcaattttggcaagaggaatctattatgtataaggtaggtcaagtagaatttcttttttaagaattattaattagtttaagataattttaaaaaaaatacatcgaaccaactaatctttgataataacaacaaactggtaattaataagcatatatcgtcgtgtgattagttaacgatatggtgttaaatattattgatatcttatagtatttttccatatatatttgttataaccgcaatatgcatttttatatacccattaattcctttcatataagacttttttaatgagggacaccacttctaaatacttatagatgagtttttttatgagcaatcgccgagtatattgagttaaagtatgagttgtaatattattattgtgatacatacgagacaaattttccttaaatatagataataaactataacgtaagcttaaaatgtattttttaaaatcgatcaccatagctaagtcgtgttgtgtttaagcttatatttttcttgttgtgtcgtgtcaatttacaatactgtgtcatatcgaagcccatattttttcgtatcagattgctctcatgccttctggccagggcacaaaggtttcctcgggccagacggagattggccctcgagtgcaaaggcagaagggatcaagggtggggcagtaggggcccatgcccaagacccccaaccgatccaaaaaaatcttttaacaaaaaagtccaattttatttcaaatatcatattttatttttttactattatttatttaaaaaaaaggaattattttctaaagaaaatacctaatttaatttttaagataattttaagaaaaaagacccaattatattctaaattactgtatttaagaattttatcactatacatataaacataatttttttcgtatagcaaaaaccaattagattttttggcccaaaaccccccaattatctgggagaagttgaaaaatacttcattttttttatacattaactaaatttaccttcaaataaaatttaattaagatatatttttttttatgagtattgtatccaaattatcctcacacactcacataactaagatataatttcaaacataatagattttgtgttatttgtagatggatctataggtttgtggaaaagttgggacaaaattttgattagagaagaataaaaaatattgtgaagtaataggagtaaaattggtagaatgattgaaaaa

SEQ ID NO: 79916 - DNA, 904 bp, Cannabis sativa
aaaccaaagtcaactaaggatgctcttaaagaccccaagtggaatgttgtaatgacagatgagcttgttgctcatttgagaactggtacttggacacttattcccttttctccaaatatgcagattattgaaaataagtgggtgcatagaataaaactcaaggcaaatggtactattgataagtacaagtctagacttgtagccaaagattatctgcagacccctgggattgattatgctgatactttcagcccagttgtgaagccaacaactattcgaatggtattcagtatagcagtatcctccaattggaacgttaagcaacttgatgtgagtaatgctttccttaatggcacattcaatgaaacaatatgcatgatacaacctcaaggttttatagacactgaaaaacctgatcatgtgtgccttcttcacaaagctttgtatggtctcaagaaagcccctcaagcctagaatgaaaagctcaaacaaactctatatgcttggggatttcaagcttccaagtctgacacttccttattcatctttaaatcagattcttctttggtttatcgtcttgttgatgtagatgatatattgttcacatgtcccaatagtgagcttattttcaaacttattcaagatctaaatactagtttctctttaaagacttggtgcatgttcattacttcctaggagtggagattttcagaaacaacactagaatgtatttgagtcagaataaatacattacagatctccttgttaaactacacatggaaggctctaaaagctgtccaaatccaacaagcaacactattaaactgagtctcaaagatggtgaaccttttgaggatgtgcaactcagtataaaagcactgagctttgcaatacttgtccctta

SEQ ID NO: 79917 - DNA, 1627 bp, Cannabis sativa
ttatgattatgtcagtgtgtggtgtggtgcctgtttctttgacaaaagaaagtcaacaaacgacagtgatatcaaaattacgacattcaaggataaaaacgacagtgattttttaagccgacaaacgacattaaaaatacagaaacgacaaaaaaaaaagaaaatacatattattggtttaagggtaatagcggtgtaaaccaaaataattttttttgtggcgaaatttacaatgtttttaaaactataatttttgctcaatttagttagtatatactccgtcaatttcttaaacaaagatacatgtaaaaatttatattttaaatttattaggtttgaacgaaaacatgtagtatcaattatttctattttttgttttaataaattcacaacaaaattgaaaaaattggataaatattatagtgttactaacattagacacttatttttttttttataagtaacattagacacttatactgctaaaaaattttattgaatttatgccaatgataaacttaaattttagtacttatgatgtgattatcactattagttttgtgagattaaagataaataattttcgttcagcttcgtttgtacatactctattagtgtcttaaacataacacattttaaattattgaatttgaacaaaaatatacaacattaattacttttaatttttttcaataaatttaaaacaaaattaataaaactgaatgaaaattacagtattactaacataaaacacttatgttgttgaaaaaattattaaatttatgtcaattaaaaacttattacttaattacttatgacacaattattactattgattgtgtgaaattacaattatgaaccaataaacgacagtgaaatttaagtctataaacgacatagaaaatacaaaaacgacatcaaaataaatatgttaaaataaattgacagctgtgggatttgaacccacgccctttcggaccagagcctaaatctggcgccttagaccactcggccaaactgtctgtcttttattctttgttagttacatatttaatatataattaaaataactacaaattagagacaaaagtcaaacaattatatttacaatttacttgaagattattatcaaataattttgactttttaaatttactgactaaatccagaggtggtcggcggcgaaccctgatcggagtaaaataaggtagcggcggcaaatgggtttagagagaaaccttgggaaattggctacaacaatcgaaaaatcctctcttttctgttaattgtttgaatcgagactcaacacattatggacagcactgctcgcagaagattggattgtatttctcatcaccttttactgccgtatcaacgcactcattttcttcaaccagtgagtttattgtaacttctttttgttttgtttcttacaattaggttggtgatttcctgtgtttgattattattattattattgttatgtaatgtgagaaaggggttagtcagtaatgggcaattggaaagtgaagtgtttgagcctgtgatcattggtggtatggttttggacattcatgccactccttcaactcctgcaagtccaaggaccactactcctggaatggta

SEQ ID NO: 79918 - DNA, 1393 bp, Cannabis sativa
ctcctttttcttaaaaaaaaaaaacaaggtaagttcttgctactcaattctggaattcatgtgccttagatgaagctaagacccttcattatcgaattctttacaatagctttacttgtgatttaatactcttattaatacctctattaggattagtaatttaatttgggctcgttacttgtttgatgtaatgcctgacaggtaattatgtttagtgggatagcaagtagatttggattgattccttcaacagttaaatttaatgcatgcatatattttgagattctgagcttatgattttaattgattgtgttaagttaaaatggttctgctgatctctgatttaattgattgtgttaaattaaaatggttctgctgatctctgatttatttttgtacaatacccttaaaaatatctcagttacctgtttgatgaaatgtctgagaggaactctgttaagtgggatagcatgattaggggctatactgagaatgtcatgctaaacgaggcatgtttgcgtttcataatgatgatttctgctagttttgttaccccatcattgtgcatttggtaggctcccttcgatttagtcttatggaatgctatgaaatggatttttgtgatgtaagtagatttgggttgatttcttcaacagttcaactcaggatggatcatatgctttgtcaagaaataaaatcatgaagcatcaaattagtgtttatgtcttacgactgtagagctttcatagctctcaattgtaatttctttagtttggacttaatttctttagtttgctactagttttgtttgattattcttcttttctgtattctgttttttgtttacttgttgactattgttctcattcagtattttacaaaactgcaattggtttctccaccaaaagatctttgtatatatatgtttgaattagaatacaatatacactgccattgctatattattggggcagtttactgtttttgtttttctcgaagtttatgaaatgggatttgtaggtttgtgaaggttccacagttagctcattgatttgtagatttttaggtgtctctggtgaacaagccaatggctgctaacgttcatcgtattctcagcacagtcgaggtacaaccccaaaccctcaacacactccttataaggcattccaagaacattgattttctgaaccagtttttgccttttgattttcccatattggatgattcttcaaatggtataaacccgtacgaaaggcgcaaaattgctgttgggttatcaaaaataatcaaaactcgggaaactcacacacttgagggcttctcaagagagttttgcccatgctctcttgtaaatacaatgaagatgttagaaactcgagacaccgcttttgct

SEQ ID NO: 79919 - DNA, 4263 bp, Cannabis sativa
tctaaaataaaatgatatattatacaataaaacttatatatcatataacaaaaagtatataccttacaacagaaatatatataataataataaataaaaataaaaataaataggacgctaataaaattgtatgtcatgtcaacaaaagtacaatagaaaatagaacttaaatattatttaaataatataacgtataacaaaaaatacatataatgatatatcattcaccaaaacatatatactaacaataataataaaaatatatattactaatatatatgtatactatactaaccaaattatataccacaattaaaatatatatactatgacaataaaattatatactaacattgtgtataattaaatagacactaattaaataatatttaaaataaataatgtatatcattcaattaaaatatataaaaataataattaaatatatgtagtatgccaataaaattatttttagcttctttgtctcaggcatttggacaagtaatcctagaaaatttggtgtccttgaccaacttatggccttgtagaagcttaaaccttcgacagttatagttgtggtcactagatttccaacgttgagctcctcactggtaagcgagttaaagactgcgatatggttgaggaaaagatgagtggggtccatccacagcaaaggagggacctgggtcaactaaatcaatagattcgaacgctcgaaagctcggaaaccaaaggagaagaaaaatcgttgacgacagtcctttacaatcttttggtaattgaaagggattgggtctcgttggttggatgaggttgtaatgaataaaaatcatctttaaatctgtcccccttttttggaatgaacacgagttcatcaaagtataaaatttgtgcgggttgggagcaggccaactcctaaaaacataaaatataaccaaggcccgatagcagatgatagccttggagaataagttgataaggagataatctaatgaaaactaaaaaattgataaagtagttttagagtggcaagcttacaccgaacatgagatgcacctgactccaagccccgaacccctcatagttatgattgggggtctcaggttattgagccagatgatgaaagactccaggttctcgaggaatgatctcaatctctttgacgatctttttcagatggtgtgcacaccctagagaggaataaagatcatcagcctcccatctagtaactcaatgaacatagttgagaactgggacctaaccttgaattatgactcacagagagacgatggggcaacctgaggccgctgctgagatgatgagttttagaggggctttaggatttgacatgtctgtcccgaagtaaagtttgagtatttcttggtcgaaagcgtagaagtcgtgtgcgtgtagattcctcaaaactttgatcatatgaaaaataagaatatacttagcagttagtccccacatcgagccctaagtgaaaaaaaaaaagaatgggggttccctaaccgctgagaagaaagctcatctagatgctagcatgtttagaaattggaaatttcaaatgccaagcatcaagtgctaattgcaccatgcacaagaagaaacagtacgtgaggcgaagggaaagaaaagtggcaagttctataaaccctaggcatggaagccacgacctaagacataaactgaagacagtcgaggaaaatcttcaaataacagtcatacaatataaatgttgtatttatgaaaaaagatcaccaataagaaaagttagtaataaaaatatatttacgcctagaaaatgacttacaaatgggagaagctcgagtggtttcaggtactagtgcacaaaaacgataaaactgagcttgatatcatcagagaaaaagtagaagaaaatcaggagtgcttaaaatttttgctggtttgagttctgaaaagtgtgaaagtgaaaatttgaaaaagaaagagatgaaagacatttatagacccatggggtgacttgaattgtcactcatccagcagtctcacttcaaacttgtgtaaacccccatgatggttagggccattaatttgtcagagtcatgagtataaacaaatggttacactactcaagtaccagtcttacatggtgcaattgatggagcatcaaaatcaagaaaatcgaatcgacttcaccaaaattgaggaaaaatactgaataacattaaagattgtcatgtgtgttgcctacgggagcatgatgtcagtgcttcaggtggtaagttgcaagctccattttataaaattataaattaggacttgtggggtaaatattgtctagaatttttcccaaaatacaaggcacttcaagagtaagccatgtggcagtgggaccctcgctacgggacatgtcataataaaccacctccggagcctggtaattgaaattttttttgagagattagtcacctctggaaggatcccctaggaggagaataattttgtctcttcttctccgtaagtgaactcgactcggagaagagatagaaggacatgagaagcatggcatgctactcgagattaaattactataagcacatttaatgcggcatgagaaagaacatcatacacattactctgaaaagacgtgcttgagggtttaaacccataatttcctgatttcatgatgcaccatacatcatttgacgtatacattatgagctatcaaattattggcaagagacaagtctagtctcacaaaacgcgtataccaagcctaagcacatcataaagaataggcaatcatgtcccataatcatgtctgtaaaattgtgcaaagcataattcatacaagtacaacaatggagacttttttaccaccattatgagcttataaataccctaagatgtattgaagagagacgttttctggactcgctgcgagaaaatactcattaataaaagtgactcgtgcactaagacttattaacgtatcaaccacgtaaaaattatattctttagctttcattaattactatagacaactctaattaataattttcgaaaacctcggtaaagttcaaaaagtaactctaaatatagcttaattattatactacatatgtaatatagctttttttttttttattttttaaaattaaactcttattaacaagaatcagagtttaatataaattaatatcaaaagataaaaaaattcttaatttaagctaattcatgatccaccctaagtatatgcacaactaattcatatatacattttttttcagagtcgaatgtcgactgccccttgtctctatgtgagtttgtccccaatcaattggttgattttttttttttttaacacattggttgattttgaaaaacacaaaaatcaatgtgctatgtatcctaacaaaaaaaaaaggtctcatatttattaataaaagtaatttaattttatcttactctaattatatttggattgaatatccaaaattactagtttggatcttacctaacattttaatttctcattaaaaataattacaaaaacagattgcatgaaaaaggggttaaaaaaaagaatcaaaagggtacgttagagcggttttaggccatagtttttctccgcctttgttttggtgttctttaaagacttaggttcagctgccctctacaatctacatctacttccttcctccgaagccaaactcggttaatgtggggaataacaccattgctcttacccatataccaaagctattcaaccaccacacacacacagaaagagaggtaccatttgatcatatttcccttgtttgctttccagttcttcattgctcaaacatttcttttctctggttttagcttccgtgtttttttttttatttgcataattcttctgtatagtcaaattccgtgatttgtgaattttctcttgaatattatgacctaattcgttacttggatcttagctagttgtgtttgtgtgtctgtgtgtgtgtacgattgaggcatttgatttcagggtatgatactgattagacccacatatttcaaattgcaatcgatgtagtttgtttaccatatttaaattatgaattggattatatgaatgttaaaatcagttgaagatggaaaggttaatgctttgttggaactaagattttactgaagagaaattttatgggagaacagacaaaagaaaatatggagggaaatattttcctgaaattctatgacttatttttgtttttaatatatatgctatat

SEQ ID NO: 79920 - DNA, 1330 bp, Cannabis sativa
ataatacctaaaataaaacaaaatatgcgtgctttacatatatttatatataataaggcttcccctctatactagtaatacctctcgtcatcttctcctcccaaagaaaaaagaactaatggccactactcgaagaagcaactcagaagtcgagtctcatggtgatcatgaccatcatgaactactactacttcctcctctgtgcgagaaaatcccagtcaaaaacactctaaacaaagctattaatctcacaaccctactcctcctcatctccatccttctatatcgtcttcttcacctctctgaacatggctacccttggctcttcgccttcttatccgagtcctggttcaccttcgacttcctcctcagtctcaacactaagtggaccccactcgatttcaaaactcacccacaaacactcttacaaaggtacttatattattatttattagattatatataattgataataatacatgacgtacttgtatatatacatatatatacataacactaccagggtgaagagagatgaggtaccagcggtggatatgttcgtgacgacggcggacgtgggtttggaaccacccataatgacaataaacactgtgctgtcactcatggcggtggagtatccacctcacaagctggcttgctacgtgtcagatgatggttgctcccctatcatcctctactctctcatccacgctttccagtacgcccgcatctggattcctttctgtaaaaaatacggtattcaagtccgggcaccttttagatatttctctaatgacgacgccgttttgccaactgctcaacatcgtggtgttaagggtaattataacttcgcccagtttcaacgggaatggaaaaatatgaaggtacctacatttttctgtcgttttattgttattgaaatgattaaacgacagttagttaattagttgatttcttgtgcaggaggaatacggaaagcttaaagagaagatagaagaggttgtgaacggaactgtccctttcgattgttctggagagtatgccgatttcgcatatgcacacaaaaatgaccattctagtataataaaggttattccttatcacttaattatatatattgtatactatttatgaatttatatatatatatatacatataattttgaatgtgaagaattgaaaaataatttagatgtatatgggttaatttcctttttttttttgttgttatgaagtataatgtattttatcttactgtctaaaatttaaagcttttttttttttttttttggaggacttttttcttaattttctttaattttttttaatt

SEQ ID NO: 79921 - DNA, 8930 bp, Cannabis sativa
  modified_base (26)..(33): a, c, t, g, unknown or other
agggtccaatctgtaacttttgcaannnnnnnngtccaaaatggtatttacccgtatttatattaatcataccccaagatacaaaacctaaggatacacccgaagttaccaaatatagttatttaacggtttgttaactgacaaggacaaaaatagtaagtgacacctaatgtctaagacccaccatacaacaattctccaccttgtttttgtaattacaacccactaggtacacatcctgttgtcgatgtttaaaagtttcaagcaatgattaaattttgttgcagacatggacttagtcagcatatctgcagcattatcatcagtagacactttgatcagcttaaccctgtcactagcaagtatatctcgaatgaaatgtaatcttacatcgatgtgtttggtcctctcatagaatacctgatttttgcttaagtgcaatgcactatggctatcacaaagaacatgtatactcctttgatctattcccatttctctagtgacacccttgagccaaagagcctcttttacagtttttgtgcaggctatatattcagcctcagttgtgaacaatgtcacaacagattagagattagatttctaactaattgtacattgatttagctgaaatacactctatttgagactttcttgtatccaaatcaccagcataatctgagtctacatatccagtaacattggtggataaatttctaatagtatgaataaaattaaaaagaaaaaaaggagattaatcaaaactaaccgacacatccatctacagtgatgtatgcatgcatgcattcacttgaaagaagcgacacgtgtcatcagaacaggataaacacgtggcaaaatcatgaagatgcatgcagtgggtggcaaagggacaaaggcccttataacttcctactatgaccatttatacaggccaaaggcaagtgcaatgattgagcaaaaaacactgtttgcataaagatatgacgtcactttttgcatataaagcacctctttcttctgtgtataatttttctgtttccccataacagcatgtacttcttatataaacctaatatagctactagcttagcttagcttagcttatgtacacttttgtcattttcttcctcatatcaaactcaaactgccacaacttggactgaagaagaggaaagattttctcaatacttgtccaagaaatgattaaggtttgcttatataatatgaatatcgacggccaaaaaaaaaaagggagggaggggggctcacctcacatgggtggcccggtccctcttacgtgaagtgaattgttttctttggggacttaattcaaacacttttggcaataagtgtcagcagtagtactggtatctcaataatttattgaacccctttgctttagtggaaagaatcaaatcaaatcaaatgtatgctgtccacaaaatcaaagcttgaacatcttccattccttttgtcaacacctgttttgttttgacaaattcattagaaagaaatgtatatatatatatatatatatgcacatactgcaatttggtcccctacatcatacttaccgagtcggacaattgaacaaaatataaaataatgaagagcaaatttaaatttaaataaccactataccacgggataaagatgtttccgttagtgtgaatttggaaattttgtaaagctcgtatttctttacttgctagaaataaatttattttaaatgacaaatagtctcaaaagggtattcgttgtgtttgaaagcgagttctaagtgaaaaaaataaagagaaatgtcatctcaacacaagtcatgtatgtcccatgataagagacaattttcttagtcatttgcaatgagcaatcaatcattttcatactttggacagttaatccttaatattagggattgttagcttaacaactttgtctgtttcctacaatgggcaagagagaccacaaatagcattgatggatacaaaacaaaaaactttgagctgtatcgccgaggtgcaaggcaaatccaagaaagtgtatttatctatatttaagaagcaaaaccaaaggacccccaacagcaaatataacacaagaaagaactaataataataataaaagaattcctaccaagtgtagccaaaaaaggaacaaagaaaaactagttacggtgaccaactccgaagtgaaacctctgatttttgctatcactaaatgcatattcgagccggagaggacccagaggagactccaaccgaatgccaactccgtatccatatccacttccaggttttagcctagcacctgctgggtcacctacgcatatcatacacagcacactcttattgaccaaataaatacatgaatatatatatatatatatatatatcaaattttaatagttacattaaatatataatcttaattaaaaaattacttaaaataagaatcctaaacttccatcatagaaattacttttttagttagagcactcccaatagcaaatgtataatagctacaaaaataaaaatatagctaaaacggtaaaaaaaattgacaaaaatacagtacaataaataagctataattgcgcaaattttaagctaatgaacaatgcttagctacattgcctaactaaattagctatattgtctaactaaattattagctaagagcactctcaacagtttctttactctgtccttcaaaatagatcactaaatcaccatgttttctattttacatcaaacttttacaacataccatccatcggcttctctatcttttgtaaatattatatttttatttattttaatatttctcacttctaataattgaatgatataacgaaattgatgtatggtaaatgtaaatgtataaggtaaaatagagagtaaaatataggtgtggtactttgaaggatggggtagggaagctgttgggagtgcttagtcaagttgtttcaataatctaagtccttcacacactttcagaaaagaaaaaaaaagaaacctaccaggcacagtcggacctgatccaatatcagttccatagtcagcaaaaataactcctccaacaggccccacctacaaacacaagatgaataagccagcaagaccttaatatgcgaagtgaactagagaaattaagaatcttacaatcattacaggctttttaaaagaatttcatggaatacttgtggatgaagaaatgtttacaattcaaatatgatttcaatacgtaccatggggaaagaaatttctccagagccgatcgcataagaccgaccagaaccaacagcaccttcttcgtatcctctaacactatttgttccaccaatggtaaaagcttcatggggtgaaaaattgccaacaacatgaccaccggataaactagaaatggagacaatattgaaaccattaaaataagcatgattattagttgtaacaacaaaaataataaccaaaacaaaatagaagcaaagataagatgataattttccaaccacatttaatttagtttcagatacatagcagttacaggtacaataccttaaaagaagtcgagctgggccaatttgaacatcctttcttgcacgggcattcacacggttaaagaacaaccattctgacaacacaggaagtccttgctccagattgaaaacaatctacaaattcaacaaaatcaggaaagatgcccagttaaaggtatatattatatacaagtattgtctgataagtgttacggggatgaaacttccaattactaaccattggtgatccatcaccagaaccagtgtagacagtctcaaatctagcaagcaatgtatgatcatagttcttgccgctgaaaccaaaagcaaaaattgtaacaactagtgaatgacaattagaccatatagtagtcccatgatagagcctccatgtagtaaattacctagcagtaagggggctgccaaaacaatccttgataatattttctcctttttcattatgagcttcagtttgctggtagaagatgcaacatacattgatttataagagcaaaaataagcttctccaggacaaattagaaatggtattagaacgattgaaaacccaatttggtatcaccagctaagagttaactatgtacctgaaagattagtccagctgtaccactccatttaggtcttaatggtcggctaaattcgataccgcctgtgacacgagcaatggttgggctaaaatcctcatcgtgcaccttaccgtgaacaagtgtgccaggggttctggaattctagcaaaataaatatcactcaagagtttaatatctcatttatcacgaaaaaaggaaggataggacagataataataattaattacctgacccataattgttctagaggttcgcttatcatctcctgcaatccatggatctgtgtagtttatccgaaatattgagtcaatttggcctctttctaatgaaacatggaatttctggtttcttccaaatagattcctctgagagtacgcaaagctacaacacaaacaatgtataaatgagccgaaagcataaaatgcaatatcacaagaatgtaaatggattttgaaccaaacaaattagaagttctctagaaatgattaacataaaagtgctcaagtatttttccactgaatggctaaggcttttattgagccaaaatctagagaagctaaaccggggcagaaggaaacaatctcaagctaatttattgggaaacttaactgtctcccttcgtaccattcattaattaaaaacaaggacaacacttagtaaaaggaagctattattacaatttgagtcgcaacaacagggtaaaaaaaagctatgtgacgcaatcctaaatgactaaggttgatccagaaaaaaaaaactacatattcctcactcctcattccaaaccctgcatcagattatggtatggtctgaccaagtagcacataaagaaaaagtttgtgggcttaccttccaatgagtcctggtaaaagtccatttgtagttctacattatgaaatacacctcattagtatcatatgaaataacaattaaataataactggaaattaattatataaaagtaaataacaattatgaacattacttacccacttgagataccaccaccagctgaaaaacctccacttggacgctcaacaacattcatcaccaaatcaactttaccagtatctgaaacattgttgagagaaatttcaaataacctatagcaatgcaaatgaaaaaagagaaaaatctacaccagacagtaaaatctaacaattaatttcaaacttttgcccggctacctataaattaaaatatagattgttatcctgaatttgcattccgtcttgttagttagcctttagttttaaaaatcaatcgaagcgtacaccttgaggcgaggtggtgaaaaaacatatctgaggatacgcctcatctgctgttattgaggcatacggctgacactaatagggtgtacttgaggcgcacgcctctaaagtgggctttttttgtgtgtgtgtgtgttagcactgtcattttgtgagctggtttgggctttatttttgtaaagcttttctaatgggatttagttttggcctttttttaacagatatttatagaaaatataggaaaatataaccctaaaaactgtaaggctgtgtttggtaggtaggagggagagtaggatgggcgcagagttaatgaaggatgaagaatataaggaaaggaaggcggaggagaataatgatcattttatgttgtttggtagaaggatagagtgatgtagggatagataattactaatttataaaattactgtattatccttataattattttttaataatatctattgagggtatttttgtaagtaaaaatattaaagaggggtagtttcagtccttccattaatggagggattctaaattggaggtttgagaggatttgttatcctctcacctctctttcaatccctcttgccaaacaaatgaatttgtcatctcctcccacctctctccctcctctcctccccatcaatccacttctacctcctaccaaaaatagtgtaagcctcttgtacaacatctctcaattctccttctcagtcgcgtccttcattcctcaatcctcgtcaactttatgcatacgtcttctttatatgtttagaattttacaatcttttgtttcaaattaaacctgtaatgaatttagtttatgattttaagacttcattagtaattttcatgaattttattactttgttatggaattatgtgttgtttgttatgaaatttatgagttttatgatattttatgaagtttttattcttattattgaggcgtacacctcgaaacgcctcgaggcttacaccttgccagaataagggaaaactcctcaacagctgtttaagtttttcaaaaccttctaaccagctaaacttttttcaaaatactgaataaaaaattagcaaatattccacatcagtttttagaaaaagcattattcaaaatttattgcaaaaacacaactgaaaaatttaaaagactatcatccatttttcacctgcaggttggggaattatcctaacatcttcaacaattcccatggttgatacagtttcctcatctctttttccttgaagcatgctgtagacctacatatgcaagagcatacaaattagaaaactcttgagatttagctaaaaccactccagtttcaccaggcttcttcaaaaagaaaaaaagacatggaaccccaggggcacatcattcaactttagtttctacaaatactttacagaataaatggtttcattaagtagtacataaaaaatgaggggtagaacactttcgaaaatgacctcaagaggtaatgctttggttcctcaaagtaagcaccccaattctataaacatattgcattgcaaagtacattatattggttcacaaaaatatgactcaggaaagtacctgtcctttcttggtagtaagctgggatagtatagtttcaggctttgtcttcccagtagttggctcgccactgaagaagattttataaacagtgaacacctttatacgaatctaaaattctcttgtagcccctagccatgattaagcagacagaaatcaaattgattacttgttcttaccttttcctatcaagaaaacgtatggagatattattgacctcagcttctgcaacttgtaacttaagcatacccccagagagcatctcaacacctaatacctaaaagcaatgaagaaaagaaacgtatgttatgatcttcaggtcttcacagtttatcacaaaccaatgcaatttagggtataaaaagcatatcaagtctattgatggactactatgaaaaataatgataataaaactcgaagctgacaaacccaccatggcaatgagaccgcgctccatgtaccaattattgatagaagatattacattatccaaacgccgaaggttgataacttttcctgcacaacgttacaccaaaatactaaaaatcaagcatgccctgatgaaaaataatctcagaagcaacatatttaaagtgcgtttcacatatgaacaattagaacaaattaccatatccttcacgaaatgaatcctctataaactttgtcggaagaacatttgctccttcaaaaaccagaccttgaaattcctgatttggttctaccttgcacaataaaataaacaaataaattacaattagcccaacacagataaataaataaataaatcaatttttattttattctatttaatttttatccatacctgaaactccaatctgataccgtctcttgtatcgacggcaacggggacacaagagtagaagtacccacttccaataattctatgcacatcctcttgaacttcacgcaccgtaagcgctgagttgggtcggcaggctttgagggccgccaaggcctccatttcaaggtctttcctctcaagctcgtcgccatccttattcctcaccaatacttcacttatcagcaccctctcttcgtcgtgtcgactcggagagtgctgcttctgctgctgttgtatttcctttccctctgccccggattgcgacacttcgtccggacgagcaattgataacgaggccgaacagagaagcggcgacttcccaatcgaatgaccatcttttcccttccgagttccaggttcagagcgactcagcgacaacgacgctgaacataaaggaagcaattttccgatcaaatgtccatcgatacctggcctcgaccaccgactcagcgaaccactccccttagtcgactcagtggttcgactatcaagcaatggcggtagtatcgaggatgaagggaggagcttaggggtgagtcgttggagtcccgggtgagttttaaccgagtctacaagttgagagaaggagtttctggttctggttaagagaaggaaaaggtcgaagggaggtggccgtgaaggtaaaggaaccttgatagaaggagtagtggtgaagcaaacgtcgtcgttcgccggcattgtcgccgtcttcgttaaaaacgttagccccgatcgacgattgttactttgttagggtttgagactgaaaataaataaaattacaatgtcttactcaatttttgcgctcaaattgaaatagttttcaaacaaaacttgggttgcctttggaaaggtattcggatttgcgtataatacaatttgacatgtttgttttaacatataaactgtaactctgtaattggaagtaattatctaatttttatggtcaccatgagaattaaatttaattacactctgtaattactaaaaactttctatattaaacattaactactaaaaaatattattttctaatataattactaactattttaccaaacaaaatattaag

SEQ ID NO: 79922 - DNA, 1364 bp, Cannabis sativa
ggatatttcatgcaggtggctcatctggaacgcactggacactatttaaccgtgaaagacaaccaggtacctataggccttgtttgtttttctctattatcgatcgatcattgtgtgttgacatactaatacttgtttactttacaggttgtgcatttgcatccttcaaattgccttgaccacaaaccagagtgggtcatctacaatgagtatgtgttaacaagcaggaattttatacgtacagtgacagatgttcgcggcgagtggttagtctctcatgaagtcatttattttgttttctttgttctttctgctttgatcattaactgtcttttacatgtaaatttggtttgggcaacaggttagttgatatagcaccacactattttgatctggagaactttcctcagtgtgaggccaagagagttcttgagaggctttacaagaagcgtgaaagggagaaggaggagagtagaaacagaaagtgaagtttttccccaacttccagactctatatatatccctagtggtgaaaatgtgggatttgatgatcccctctgattatcttttaaacatattctacctttgctgggaggatgaccactcttgatctggagatgcagccatgtttgatgtatcattttctagatagctgtaggagtagttgaccattacattatattttattttttatttgtttatttgagttggattgtgtggtttcatttaaaagaaatcattagttattgaaattttagaagatgacatacctgagtcaatcaatctgccctgctgccatatctcatttaattgcgattgcataatttcaaaacccaggttacttataaatatcttttacactacttaaaattgtattttttcttataaatatatatattttttttctttttatggattttgtttttctacaatttttttttactttgtgtagtaaaaaaaaaaaaaaaaggtgtttctgtttttgtgtagcagcaatgaaaataagttgttttaaaaacattagaaaaacaactgtattttttttaaaaaaatttatgttaattaatttgaatttctcctttaaattttaacatatactaaatcgtactatgtgaacttttcaggtagttaaaatttttttttgagctattaagattgttgaatttaatgatttttgtttaattttattaaactaagtcagacttgataaaatttaagggatacaattttgtagttttaaaagtttatggggcatgatttaatagacatcaaacttcggggggcagaatttagtacacggacaattgttatattactaaaattgaatgaaattggatagaagtccttaaatctaatgatttcaa

SEQ ID NO: 79923 - DNA, 5884 bp, Cannabis sativa
tacttggaatgttcaaggtgcagtttgttacacaaaaattgaaacctaggagatgatagtggtttggtaaatagatcagccgtttgatcctttgttggaatatagcagacttgaagtttgttggctgcaatttgagatctgatgtagtgaacatccagttcaatatgtttggttcttgtgtgaaaaactggattgagtgcaagagcttgtgcactttgattatcacaccatagagtggggggttgtttatgcaacttgattcccaattctgtaagcaaggatgtaatccaaacaagttctgttgctgcagatgctaaggcacggtattcagactcagtgctcgatcgggaaacagcttgttgctttctacagctccaatttaccagatttccacccaaaaataaacaaacaccagatgttgattttcgatcatccaaacttgatgcccaatcagcatctgaataggcttctaagtgaagcatttgggaaggtctgaagtgtaaaccgagatgtggtgtgcctttgatatatcgaagaactcgtttgcatgcattccaatgattgattgttggggcttttaagaattgactgagcttgtttacactataagcaaggtctgggcgagtaagtgtaagatattggagagctccaatggtgcttcgatagagactaggagtgtcaaataagttgctgtcatcaagagctaatttattagcctgtatcatcggagtggtgcattctttggcatcctgaaactgagttttgtcaagtaaatcagcagcatatttagactgagtgagatataatcctgaaccagttctgtagacttcaaagccaaggaaatagcttactgaaccgagggatttcaatgcaaattgattgtgtagatcagaaataagttttgagacagcagtggagttggcaccagtaatcaagagatcatctacatagactaaaaccagaagtaattcacctgatatgttcatatagaagagtgaagtgtcagaaacagattcagtaaagtcccatttcagtaatgcagtcttgattttgtcaaaccaggcacgtggtgcttgccttaaaccatagagagacttttgaagtaagcacacatgatcgggtttttctgggtcttcaaagccgactggttgtttcatgtagagtttttcttggagttctccgttcaagaatgcattattaatatcaatatgttgaatatcccattgaaaagtgacagctaaactaaacacaattcttattctggatgcttttattactggactaaaagtatctgaaaaatcaagtccaggagtttgttgaaaatcccttgctactaatcttgctttgaatttgtctaagctgccatctttgtgatatttggttctgaaaatccatttatttgtcaaaagattcatatcacgggaataaggcaccaagatatatgtctttttctttttgagggcagtattctcacggtccattgcatttctccactgaggtaaactgagagcttgtttgacagttctaggtgtttcataaacctgttgtttggtagctgtcaccatgtaaacttttggtttgtatatcccaaattttgatcttgtctgcatatggtgtcgtggaggtaagggaggtggtgagtgtggcatataaacagcaggtagggagggatcattagataactcattcgagttggagttgctgttattactgaatggagatggtgcagaattgtttggatcagtagtgtgtagtgtggggctgggagaaagagatgaaacacgatctgtttcttcagttggtacagaaccaaactgaataggtggagtggttggagagtgagtaggcataactggaataacaaaggcatgtgctaaaagattgttgttaattttgacagagggatgattcttgacagaaaatagagaagaatagggaaattcagattcattaaagttgacacttctagcaatgtatatacgaccagtggaatgtagacatctatatcctttatggaatgggttgtatccaagaaagacacactttgaagttttaaactcaaatttgtgtgtgttgtatggtctaagaaaagggaaacaagcacacccgaatgttttgagaaattgataatcaggaatgagcttgtatagactttcatatggtgatttgtacttgttaacgattgtgggaagtctgttgataagaaacacagttgaaacaaaggcttcccaccaaaattttagaggcatattggctttagctagcatggttaaacccatttcagttacatgacggtgttttctttcaactcttccttgttgaggatgagtatgaggacatggatgtctaaaaagaatgcctagagtttgtagtataggttgtaattttctgtactctcctccccaatcggtttgcataccctttattttgagatcaaattgtttttccacaaaggtcttgaaggtcaagaaaatggggacagcttctgttttggttttcatgggatatatccagctatattttgtaaaatcatctacaaataagatgtactatctatagccttcaggagttgggtatggtgagggtccccaaacatccgagtgaatgagttgaaggcaagtggtggtttttaaaggaacacttaaaaaatgcattagatggtttttaccatattgacatgcatcacagaatggtaaatcagatttggagcaagttttatccatagaatgtaaaactttattgagaatgatatgagatggatgtccaagtcgattgtgccaaagtgcagcaattcgattggactccttacagtaggcagaattgatattacactgggaaacattacaatgttgatctgaattgggaattacatctgcactatttacagctagatgaacatttggagaagtcaggttgcaagaatcttgagatggcaaggatagtttgtagagaccttggctaagtgttccttgaagaagaaccttcttcgtgcccttatccaagacaaagcagtgattagtgtcaaacagaatatgaatgttattatcaaaggtgaattgggagacactgattagatttttatggatggacggtacatgtaaaatgttatggagatgcaatggtttagatgttgggatagtacaagaaccaatagcaagaatgggaagagaagcaccattacctacaaccaatttacctttgcccttgtaatccactgtctcactcaattttgctgcatcagccacaacatgatgcgatgctccactatccaaataccattgagggtctgcaacagttgttgcagaagcaagaaaagcttgtggctcatctgaagtaggttctgttgagttggagttgccttttccttggtaactcagatcaaatcgatgatagcattttgtgaccagatctgccacagacttggcaaattggtcgatttccacctcgattgttattatttggtggcctaccacctctgccacgagaagcaccacgacctcgattggaatttccagtatttgagggtgtagaagagcttttcttggaagcgtagtttgctgttggattatgaagatccaaggcagtaggagactgttgttgctcaagacgaagttcttgagtttgaagcaagaattgaacatcctgcaaggtaatgaaatcttttgaggtgagagtgacaataacagagtcatattcattacctaatcctccaagaatgtagaggatgagctcatcatcagttatttgttggcctgctgccattaaagcatctgcgagacatctcattttgagaatgtactcgtcaaccggagtagatcctttctttgtggattgaagcatccctcttaattgaagaattcgtgcacgagatgtgttggagaagagctgacttaagacactccagagttcagtggatgaagcacatcgagcgacatgtccaagcatctgttcagagatcgaattaaagagccagcttaggagaaattgatccaaacgcatccagtcgtcaaacgcagggttcggcaccattcttgtggcatcaagagaatctggaatggtggctggaggtcgagttcgagaaccggtgagaaaaccttcaagttgatgagctctagccgtggaaagaacttgtgatctccagtagatgtaattcgtgcgatcgagacgtaaattgagaggagcaagatgatgcggaatgacttgctctgctgcaattggagtagcatgagtagcagcggaattggaaccttcggatcgaggagcagcagaggaggaagccatggatgaatgcttcaagaagtcttcgaagaacaaagaaaggaaaaaaaaaaagaagaacctaagttctgataccaagttgagaaacttattttaggaaaaatgagcttgagttgttatctcagctctgaatgaatttgtatttatagacaaggctttgtacaaagtgtagaaacagaatacagttaatcaactaactgtccagctgtgaagagtaacaaactctatcctacacgcacagctggcactaactaataactaactttgttcactaatagtacatgtaaaagtttggaaggcgaaaattctaattagttttttatttattgagaaataataaagggtattagtaatacttaataccacatgtcaaactatatatatacatatattaattattagtataatttattaaattttaaatatttaaattgaataagtattataaaatatcgttaattaaggccacaatttattgacattactgatgtctaataacattaccgtgttaattttacttggaagataattatcatcaattagctatacgtactaatggaatctagataatgtttcgatacatttataacaagttgtagtatattgctatatttgttgtttaagaaaatttgttgaataaaccatagttttactcttggtaaattaagtatccatattgaaattttgtaagtaattgatatcttttaaacaattaattttatataattaacatgaagatgaagtagtagtttagatatttatacataagcgtaacccctctccttttcaggcaaatatacacatatggttgtttaccgttaatgttagctaagacatcataataaggtgatgatgatgatcatgacataaatttggctttgtaagttgacaactttagtgggtttggtgggtttttaattgtctagggtttcaggttttgactttatgagctctatatttgtatgtagctcacaacatatatactatagttgttcttttttttttctttctttttaactacaaataaaagaacctaaaatcattgataaagttcgaattgaaagtagttttgaataaatttaacgtaaccataattttgatcgtgtagaagcgtataattcatgtgggagaagtatgggcatatatatgaccaaaagtgtactatagtaatggatttatgcaaaacataactgacttccatttcaaataatagatgatattcgtgattggcctagaaaatattgttaatgtcaaattcattaataagctaacaatcacgagttctcctaaatttcaatctctttataatattattatggatgttttttatggtacattctcaaaaaaaaaaaaaaaaattgtgtataactggtgatttttacacacattgtttaaaggtattttataaatcttgaaaaaattcaaacaaatttatattagaaaccctatatttcaaacaatttattttacccatgtgcaataaattatttaaattttattttaagggaatttatatttacaccccataaaattataaatacaccccattattaaaaaaaaatataaacttaaataatttttaaaaaaaaactctttaacatttttt

SEQ ID NO: 79924 - DNA, 1349 bp, Cannabis sativa
atgagagaaaatatccttttatatgtctgatctgtgattttgatttagggcagagcccaagtgtaatatttgtaacttttttttttcagttgttactgattttatcttctttaatctttaatctttgtttttgctgtaagttgtaagggtatatttgtcattttgaaaccctgtgagtagtgttataaaattttaggttatataagtgaatatgtaacaacagttatatatatatatatatgtatattattaatacatcaagtcacattatcacaagcattgcaaatatgacctcaaatcatacattatattatatggttattctaatacatgataagctttgatactttcacgattaggagaaaaccgtacccaagtggtgaactctactaatttcatgatgacatgctatgtatagtggttcttccagtgtatgactatcatcggcccacatctacaatgttcttaaagaaacacaatttaacattacactcacatactaaaccataggaacctcgacagataagaactattatgcactaaaattaaccatataatcacaaatagagtcatagctagatatcaatcaaggaacaaaccaataatagtaggacatccaataaaaaaacatgtgcctcctgaatttgagaaaaatactcctcctaaatttaactagcaatgcatctcatcttagataaatcacagtcacaagtgttgcaaatatgacatcaaatcatgtattatgttaacgggttatactaagacgtgataaactttaagattttcacactcaagagagtaccacttatcgtacccaagtatcaaactctactaatttcacgatgacaaactatatataatggctcttccagtgtccgactataatggtcccacatctataaagttcataagcatcaacattacacgtacatactaaaccattttaacatcgacaacttggtactatcatacactgaatttaaccgtataaagatacatgtagctgaaataaactaagcatactaaaacattctaaatcaaataactaattactctttgtgtatacttccttagatttttatccttacaattcattgataatgtctttaatttttgagtgtttacgatcctactaggttttatatacagactaagatactgaacttagacttccaaaaaaaaaaaaaagaataagcatctctcttaaattaaagctaatgaaaatagagtcatttctgttaactcataaaatggccatttacaatgttttctaataagtgaaagctgtaaaatagagtggagaaaaataaatattaaacactaagaatttatagtagtccccccccccc

SEQ ID NO: 79925 - DNA, 2311 bp, Cannabis sativa
tgtcaaattaccttaatgcttaactgtggtctcagctaacagacataaagaagataaaggatctaaggctgattgaattgtcaattaaacatttcaatgctcactagtagcaagattgaaaaaggcatttacccaatcatggcacgcaacgaggaaatgatctgctccgccggtccttttccagaatggatactttgctgcaatcatgtccaagtagtttttcaggtatgtcacaatgttcctacgtttgtgcgaattaggaacgtataatttctccctcaacatttgagagctaaaaggcaagtaaaacaaatgggctttgtgggcatctttggttacaaattcttcattagattctaattgcttcataaaccatccttcagaagcatatatgccttggaggattggtgtgtgtagtattggtctctctccttccttgtaaatgtaaactttaagtgtttgtttcattaattcatagcttctgcaaatcaaaagagaaaaataaaaattggaactcttagaacaatataaatttcacataagctctagttattaaatatgtacttgccaatacattttgtttaacatatcattttggatcctgtattttacaaaaattaccgattcgatcttgtatttttcagaatggaacataataatatcctaaacccaattttagttaaatgaaacataatgacctaagatgaaagtattatgcctaggttaattatatttttttgcatctgtttatgctagaaactggtttcgggttggttatattaaaagaaaaataactacaattaagtgtattattatgtatcattttgaaaaacacaggatttaaattgtaatttatttaaaaaaaaatcagtaagtaatttttatacaacacaaagtctaaatcatatttaacatttattatgtattaaacagtagtaacaagcaaatgatataagctaacattggttggcattagctaggactagaggtgtgtgagcagctcaatcaaatatattgtttcactcatgtatgtaattgttatttgcctgagcaaacaattgtgatttctactaaagaagcttaagaaaatttctgcgaattcagttatgccccagaagaaataacattgaaaccaccttgcaaagaagactaatggtatgctacaaaggaagagctagcattatcgaaagaagctgaagaagagttctaacaattcggtcataccccgaaaggaaaaacatcaaaacctattagaaattagagttagcattagtttagcattagctgtataaattgtttttccctgcctttagttgtaaattctgttatttttagttggttaaagactgagctgtcaagttagttattctaactaactcagtcaatggctcaacctatataaaccaatctatgcctttgtactcatcaattcaattcagtggaataaatcaaagccttgcttttccttctctgtttctctcaaaaccaacttccaaagaagaataaatggtaaaagtaatcaagtacaaactaaaaatttacctcttaaaaatggaaacatttctataaagaggggcatatagatttggatcattctctacaacaggtgcattctcaatctgtaataccacatcttgtaattcatggtcaactgctgaagaccactgtggaatctacacagaaatatgaaatataagaacaaaattgaaccatttcattgctaagaaattgtctgaactttcacaactcttaccactgaatagttagagccatgactctgaatcaacaaattgttcatctcagatactgaatatacaccagaaacaggcatcttagacccacgaatcctcttggacactttgttcacggcagcatttttgccccttttgctcaaatcactatccactgactcagattttctctttttctttaccaaagaggtgttggaattcccagatgtggttgcagttctactattcatttttttcttatttataagagaactgttctctactttactcatatcactatacaaagacttagaaaacttctttctctgagaaagttttgttctttttatactaactatagagatattataattttcagatatgggtgaagaactaatacttgaatctaaggtactatcaactgaatcagagcttttctcctgaaaagcaatagtctttaattttccaaacattgcaggagaatcaatacttggttctaaagctattacctttgtatataatgataaactagctaaagaggtttgagatttggaaagaccaaaatctacaaatcctaaatt

SEQ ID NO: 79926 - DNA, 6980 bp, Cannabis sativa
  modified_base (5803)..(5804): a, c, t, g, unknown or other
atcccttttaaggggtgcattatagaattaccccatatatatataaataattatagtagcatgcatgtgtcttttatttgatacaaaattcattttaagcaacctctctcaagtggagaaaacccaattgcttaggcaaattcaccaattttccgattagtgcgtatgaattattgccgtaatatatgtatttaattaaataattgtaaagcctatattgcatgtcattacatttcatttatatatatatacttctaaatcaaaatagtatttaaatataaataaatatatttggatgaccactattacaacatggttttatatggattttttgtattttccaatcaaataattaatatatatacacatatatatttgactccgaccgttacgtactgatcaccccaacctagctacgtacagtactcctctactttttcctatttctactatatatataataatccaataaatataaaattaatatagtagctagaaattagaataatcaaagcttaaatcagcatatatatagatagaaatatatcttaaattcaaaaaccatagtaatttatacatgattatttttaataaatgaaaattttactaaaattactccttgaattgtataatttattttacctgtaatcaagatgcgaaattttagtttaattaattaacaaataatttcactattatatatttatttagattagatgaggtaaatagaaacatgacaaattaattaagaataaaaataatatatagttaataataaggtatagaccgttgatttaatttcattctcacctgaaaaatactatatatataaatagattttgcagtagtacctaatttgaggaatgttcatagcaattttaggcgcaatttcacgcatcaaattaacattcacgttcttatatatagctaaaaaaaataaaataaaaataacatattattcattacgaaaaagtaactattactaattaatatataataacagaaaatattagctctttatatatggaataaaaacagacaaaaaagatgtttctttttttacaataaaattttcctttgtatatatttataagattgtatgatttatttatttttgtcaaatttcgtatttttaaatatgatgcgattttatataatatacattttcaaatattttttataaaataaaaaagatttcaaataagcttccaataaaaaataggatagaattattctggataatttagcttttcttagtacaaagtattatttgtaaattataatgttgaatgtcgtaatgcgtatccaaaatataacatcgaaaagagaaaaagtcacaaagcaactaactaaaaccgcaaagctaagtatataatacgtattcaaaagcaaatctactcaatagattattttcgtaaaggaaataaaaataataataataattaatattaaaaataaataggatttgtctcttgaattatgactactgaagagttttgcttcagatgtaaaaatttaacttaaattataaaaatagttccaaataacactccattgatattttgctcatttttttaaataatatatgttgatgttaatatgatttagtttaagagtctagaaaaaaaagtaaatgtataaataataatctaataataaattatgataatatatatatatacaagtttatagttaatacttgtatttttaatataataaactgaatttcaaatagctagcttaaagttgttaatatagagattcttgtaattaaaataaattatattaactaatgatcacataaacaaattattttaaaaaatgagcagaatataactaaccaaaggagacacttgcaaagatttctatatttcagaataaatttttagaacaaaaaaaaaaatagaaagagtaaaagtactctacctcatagttcaaaaaatatatatatattatttattctaatattaatattaaaagtattattaaattaaagaaaatgaagttcggcgcgggacgggggttttgcttgtattttctgcattagtttttcttttttctcaatcttttaatatttaatttcactaaaatatttccctatccaaaaaaaatataattattttatttctattaaaaaaattacattaaataattattatatctctacgactactaagagagcacctttctaaatctataaatacagcttcaaaaccgtccaacttcctcaccaccatttccacacctctataccactttctactacttcaaaatctctctccaacctcagaaaaaaaaaaaaagctaaattatttatcataatattatggctaaatcaatctttataatcatgattataatggttttattgggttgtatcatttctagtagtgaaggtggtccaacaacaaccacatacaatgtggtgagttttggagccgtgggagatggtaaaaccgattcgaccaaggcctttttaggcgcttggtcgaaagcgtgcggctcgggtaaccgagccgtcatttacgtgcctcaagggagattttttgtgaagagtgtcaattttaatgggaataattgcaagaacaatgctatttcttttcaaattgtgggaacacttgtggctccatctgattataggattattggaaattctgggaattggattatatttgaggatgttaatggtgtcagctttaatggtggtgttcttgatggtcaaggtactgggctttggaattgtaaaaactctggtaacaattgccctatcggagccaccgtaagtactttttttttttccttttttgtttttgtttttgtgatataactggcggggtatttatgtcattttacaatatatggcttacactataatattaaaaaaaatcaactaattaaaatgaagttttttgaaatttactcttaatatttgttttgttaatttcttaattttttgacaacttttttctaatttgaataatttttttcttcataatatttaaaatttatgtattgttttagaatgtaaaaataaaggagcaagatcagaaaataagaataaattaaaaaaaatatatatatatttttctttgctatatttaattcgaggaagaacaatagatgatgggtcacatgtggtaacatgcatgcatgtaattaggactagtaatagtatcatgtatataaatataggtgctctttttatcgtataagaggagaaataaaataataaaattggtttttttatgggaaaatgttatttggtattatattaataataataaaattaatgagaaaaataataatgtaactgatgatattggggttctgagctgaatggatcaggaatcatttcttatgttgaattatacgttttatttttcaattgtgtcagctaaagaaaccgtgaatttaaggaaaagagaaaatatatttatttgctatgttaaaaatatatataggagttgaagagtttagagactactgtgcattatatcataaaataaattaaataataataacatataatatgtattaaagtcaaatagaaagtgattttcagattattataaatgattaatccctacttgatcgatcgaaactccttatcatagaagtcaatgctgaatataaaaagctgaatatataaaataatatgaattaagaggtgcacattatatatatataatcatggttaattatagagaattaatttttttaaggacattagtgatatctaatgctatttatttgttcatctcttacaaattttaattgtgaaattcgattattaattatgggttaatttcacaaatgcacaaaaataataaaaaaaacaacaaaaatacggttttatagaattttaaatatttttacgattttttttttattttatttatataaaatatgttcttttatgcttaaattttgttaattttttgttatatataagttattttttgatgttacttttatgttgttttcttgtcgattgtatatttttttcgtgttattttttagaaaactgtaaaaatgtaacaaaaaaaaacaaatattttacaaaaaaaaaagtgacttatgagccgctaataaaaaaaaacaatacttaaattttttcatatatattttagttttaatttaataaaatatctactaattttttttttaagttttcagcgttacattttctaataagtttttttttttttttttgtatgtacagacattgcaattttcgaactcgaagaatataaaaatagcaggagtaacatctttaaacagccaaatgttccacatagtaatacacagttgcaacaacgttaaaatccaaggcgtaaaagtaacagcctcagcaacaagtcccaacacagacggaatccacgtccaacaatcctccgccgttacaattctaaactccaaaatcggaaccggagacgattgcatctcaatcggcccaggaaccacaaatctctggatcgaaaacatctcctgcggaccaggccacggtattagcataggcagcttaggaaaagagctaaaagagccaggtgtacaaaacgttactgtcaaaacggtgtcgtttaaacaaacccaaaatgggcttagaatcaaatcttggggaaggcccagtaacggttttgctaaagatattttgttccaacatgctgttatgtttaatgttgagaatccaattttgattgaccaaaattactgcccggatcagaagggctgccccggtcaggtctctggggttgagattagtaatgtgagttatcaagatgtgcatgggagttctgctactgaagttgctgttaattttgattgtagccctaaaaatccttgtagtggaattaagcttcaagatgttaagcttacttataataataataaagctgctgtggcgtcgtgtgcacacgcggatgggagcgcgtatggattggttcagccttctagttgtttgttgtaggttcaaattatgtattactagttactagttagtaactagttactagttactactagctaagctagttttgtttgttataggactttttctttgtgtgtgtaattgaaaaaaatagaagaagaaaaagggtgattaagaattattacattacttgtaatcctagctagttagtacttaactagtaatctggctaaaatttttaatatattatataaaataattttattaaataatattaattaactaataattagtatatatataactgtaatttcttacttttgcttggtgtgctttgcattgattaatttcaattgtgttatgaaatatattatatttgaatttgaataattaagagatgacttataaggacaggttacttgttttacaaaaggttacttgaactatactattttttatttaaccccataaactgattttgtaacggtaaaaaaagtactttaaatctcatttctgttatattatttaccttttttgttcaaaaacctcaattaaaacttagaacctagaaccttaatgtatacatggccttgcaattgttagaacttagaacctttatgttgggagttgttttgtaaggattaatttcaatctttttttttaaaaaaaaaatatgttatatttgaatttgaaaaattaagcattttttttttggaaatgacttgtatgaagttagaaaataggataaatactattttggatattgtgttttgtaaaagatattaattggacttttattttgttaaatgataaaatgaactctgtattttccaaaatggtacaaataggactttgaattgattttttgtcaaaatnnaatttaataataatctgatctagatgtgttatgacaaatccgtttacattttctgcatctcttcgtgttagaaattgtcttcaatttgattatattaaaaaaataataataataaaaaattaagctcagggtcatatttttaccatcttgaaaaatacaaagcccattttattatttaaaacagagagtctaatcggtaacttttataaaatacatggtccaaaatagtatttaccctaaaaaaatatatttatgaggacaggttacttgttttacaaaatatgttactatgattttgtgaaaaacctgttttatatatttcttacacatttcagtttactgcatatttttatgatggaaataaataagttgatattacagaaaatttaagattctctaatttcgtatagtaaggtaatgctatattggtcctggcacttaaaaaattcatgacaaagtcataattttcatcatcgaaaatatgagaaaatctcaataaatttgaaaccctggtgattttattttttattctttttttttttttaaagaaatgtaattaaatagatgtaaacaaattaggtctcttcgctgttataaacaattgttattgaattgaaaaagttttgacaaaacacaaaaaaaaaatatctttgtttattttttaattttatttatttaatgaattaattttttttataatttatctttaagaaaaacaataattattaaactaagaacaacaaaaccaaccaaaacttaataaaaataatattttcaacgtaaacaagaatacactactttattaatacactaccaaaataataacaatcaaaaaagaataccctactttattattaatttttaactttatttttttatataaattaattaattataaactatcaattttaagtaaaataactatcaacaaactaaattaactcaacattaaaatcaaaataaaaaagggtaaagaacttataaataagttaaaaaaaaaaaaaaacaagagagggatagaatgcaatgaatgtacatattaaatgaaattaaatagataaaagaaaatgtctagacaggcgtgaaaaaatgtgatcagtagagatgcccaggctattgctcaatgcttgggcatgaaaagaatgtcctacttgggcctccctctgtttagatcgc

SEQ ID NO: 79927 - DNA, 1958 bp, Cannabis sativa
  modified_base (145)..(151): a, c, t, g, unknown or other
attcagaaaattacctacaaggtcagagcttctatatctagtttctcactctagaaattgaagttttgacgcttagctttttctgtaataccatcttgtaagaaataaaaactcaaaatagacgtagctctattactgtcgcgannnnnnnagtgaactactataaatttttgtgtctctctttacttttatttaacaaatatttcattctcgccaatctagcaagcaggtatgtcttggaagtctgtgtccagatttttgaatttacacatgttattttaggaatttttattgatatcatacaatgatattattgatgctattttttttaaataaaaataaaaaattaaagtaaataaagttatacaatttataattaaaacaaataatatgtttataatagcatcttgaaatgtgctatattattgtagtgtttttagaagtaagagtgtcaaaataatgtgaaagaattattaaaatgaaatattatattttcaaatgatatgaagaattttagtatctttaaataatggtatcattagagcatctacaatggtaaaactttagaggatgcttggtgagatgtacatattatgtggcaaaatattatgatgctataccattagagagaaaaaaatgttattctaaatatttgcatggatgctatgttgtagtattgatgctattcatttttttaataaaacattaagccaaaaagttattgtagctaaagattagactatatattaaataataatatgtgaaatcataattatagtatttttaaagatacatacattgaagtatttttaaaagtaagagtaccaacaacaatatgaaagagagataaaaaaaatattatttttaaatgatgtgtaaatttttaataccattaaatgatgatgctaccagtggagatgcaggtcctctaattggatttgtttattttgtttattttttcaaatggtctaatttgagcttgacgcgtgccaagtggcaatcgacatttgttatggtgtgtgtgatatctcacctctctctttgattagttgccaatatagaatgagtttaaaaccaattttaaatatattaatataataattttttcaatgtagtcaattttattaaatatatttggttgactccacaaaatttccaggaacaagccctccactatgaaataagcattatagtattccctatatttcaacaacttggaccatgatttacaatagaaatgtttgatcaagaagagacgtaaagagtatctgtttagcttagaatgatcttctttaccaccaaccagaaacaccagaactattattttcttatattttttttaattgtttttatagtgttatatctctccttttgaatatttttatggatttggaatgataggcatcttccattttattttatatttaatttgttgttatatgaattagaatattgtgagtttttatattttccaatccgtgctattttcctatattgtcaatgttaagtcaaagctacacaacatgaactgaataatagagaaaatacataaagaaaagcttaaaacattgtaagaacaacagtacattaagatgaagatatactccctgtgagaaattactactagtggtggagaatcagattaattaaaatttaaataactaaataattagtattgataagattaataaataataaacaataaccagagaaaaaaaaagatgaacagagtatggaaagtcagaaatgaaaataaaacaagaaacaataaaatcaacatagagatatatattggttcaagtctaataaatcgatgtgatctatggctctaatttagttttggaacactaccaaaatcctcttaattggttgagcaagaactaggtacattacagtcgagatcgattctttgatgagttctctcaaagtgtttcaactcttacactcttacccaagaa

SEQ ID NO: 79928 - DNA, 1287 bp, Cannabis sativa
taaaaaaaaaggcttgatttttgaaattaattctcatatatatttttctcaataagcctggttaatttcgtaaaaaaagaaataaaaaaacggagaataaaattatggtaagctttggggatgtttaaattgaacaacgttaaagaatttatacattggaaaataaagttaaacaagtttgaaaattaccaatttggtgaggctgttcaatgagaatagtcatcctggatcgagaaacggacaagaaataataaaagaaacacaagaaaaaaacagagaaatagagagttggagttggagttgggtttgcatttgcaattgggcaagtatggtatttataattggccggaagtccttccctgagaattcggagaacctgagtccttacctgaaaatctattaattagttttcatactttttttctatttaataatataattttctctgtgtcattattttacgccaaagtaaaagcaaataaaacatgtcagtcattcagtcctccatgcaagttggcgccaggagagactctatattaaaccctttaaacttgggtttggctgttaaatattattttattaaactaaaaaaatcttcaagagaggtgggttccagtgaatacgtgtgtgtcatgactgagtcagcctagggttggctggattacatatcacattttttagccagaagttctcatattaagcggggcccgcttgacgtggcatcgagtcaagttggtaattggcgttatcaggctacgcggttgacatttcaatgtggttgccattatcggcggtgccaccttcacgcccgtgcttctctctctaaggttccagttcttgttgagcagagggtatctgatccgacggtccataactagcatgagattgctacgtgtcaacccgagaaccggaaatatcgctgtgacgctgtctaagatatttatcttctaccacgtgacgttctgtgattgctttggcgattgatcaggtttatcaaatagagaactgattttgttcaaataaaatatatgcacttctaaattcattacatatatttattaataattaaaaattgtaataataataataataataataataataataaattcattacctaacattaccattaagtattttcaaaaaaaaaaaaaaaacattaccattaagtctaaggattgctgaaaaatatattacctaactaaaatgtcaattagtataatttaatattaatttttatttattttaaatttaataattattatacaaaattattaactacccatt

SEQ ID NO: 79929 - DNA, 3965 bp, Cannabis sativa
aacgccacaaccacgtaaaaatctctctcttaattcctgatagctctctaaattattattattattatagtggttgccgaaaacctcggtcaacagcgggctagacttatatctagggtccacctaattcagggaccaaaacaaattattacgttttaaaaatatacatttttttattattttgataaataccatatttttttctaaataaagatccaaaaaatattttttttcttatggcccattaaattttcaggttcgaccctgctttgtgctgtagaaattagttaatgaaaagccctattatgtttttattacattggcctcgcaacgcctgcaccactaactgttgaactatacaatcatgctgattgcaattgaaatgggcccactgatgtatctctttgaaatgccaatattaaatgagtaagacaagaggctagttaatagcagaaatatctactcaatcatatcatctcatgcctaactatgagcttcaatattgatatttcttaggatgatgtgaggcaccagttaggattggacaagatccaatccattccaattgaactgaatcaattcaattacaaaaaaattgtatatccattacaattggattggattggatgtcaaaagttaaatgtataattagattgaatcagttattagatgtcaatctcaaaatccaattacaattaatatgtattaaaagttaatttatgtataataaaaagtatttaaaaaaaaactgatccaatccgattataaataatatgtttagttttttccaacttttagttaccttaaacctataaggatggtacttttttttttagaattttaaacttaaaagggtgataattagttttaatgtattttttttttcatgtttttaagtttacataattaaaaatcaagtgtgtatttgaatattcaattaaaaaccgatttaatctaactagtaattgaattgaaatggattggatgttgaggtctaatgaatcagatgatgattttccaaatctaattagtaatgggattggatcggatgaggagaaaattattggattggatcggatgtccattcctagcaccagtggtgccttttaacatttctcttattttatgagcattgttatttggtaccttaaggtatctatcaccacaccgatgtgacaccgtataattagttagcagtttcttatatcatttattaaattaaaatgtgttgaacccaattaggggtgtgcataaatcgatccaatccaattacaactgaccgaatcaatcacaattgatcttcaaacattggatatctgattatgatcggatcgatttggatgttatttttgaatatctaattgtatcggatctgatgttggatggggtgtctataaatcgaatacgtacatctaacatctaatcaaattaattagtaatttcatttagtttagatgaataattaattttatgttgtcatacttaaaatatatatgtatgtatgaaaattaaaattatttttttacctttttttattagattagatatggatccaattcaatccaataaatattgaatggatccgattcgatctaaaaaattaagtctaaatatcggctaaatttgaaccaatctgataaatatacaagaaatacatataatggataaaaccgatctaatccaacatcaagtgaatgttgaatcgatcggataactgaaattaattagatcggatcagataataaaatctaaaatccaatatataattggatcagatctgaataggcttaaaaatattaaatgtgatccaataaatacccttagatccgatattgaaatataccaatagcagtgtatcacgtcttgtggtgcttggcaccttaaggtacccttaagtatttcttttattttatgagcattgctatttggcactttaaggtgcctaatactatactgatgtgacaccctataattggttaacagtttatcatattatttatcaaattaacatgtgtaaaacttgatattaaaatacaccaataacgatataatatatcaggtgtgcttggtactttaggtggtccttaacctttctcatattttattatgtatgttaggtaggtagtggtggatataacaatttatttcatgtggcccaataagatgctatatattgctatatatatatataggtaatatccaaattaataaaaagaaaaagtatcataattgagtgtagattttgaattatggaattgggagatttggttgaatatcttgagaacaagaccattttaatcactggaggagctggcttcgttgccaaaagtagtacatatacatacatgcataccctacttcaattcttattagttgaataaaaaagcatgcatatatatatatatatataatatattgatgatagttttgtgtgtgaatgaatgaatgaatatggcaatatgcacatgcagtgtttgtggagaaaattctaaggactcagccaaatgtgaagaagctctatgttcttttaagaccttcacaatgcaactcaccaccccaacgtttccaaactcaggtaattaatccaaattaattaaatgttaattactttttttattatgtattaataataataaatgctaattaaataattacatatgaattggttattattgtaaattattaggtgatggagaaggaattgtttaggttactaagggcaaaatggggaaaggagtttgattcatttatatgggaaagagtggaagctgtgggtggtgacattagtgatgaaaacttaggcataaaagatgccattttgagagaccatatgttcaaacatattgactttattgtcaattgtgctgcaacaactgatttctttgagaggtacaactacaacaaattactattatattatttaagaataataatatatatatatatttattaccctcaaccatatcttactattataaatttggcttgttgatgtgataattgatgactaatttgtcctcacaaatttaatatatattacaagtctatttcttttgtccttactctcacacattgcttttgtttttaccctcacacacattgaactcaaactttttaaattacactacactaatcactttcttgtgttgccaattatatataaatgataattgatgaccaatttaccctcacaaatttaatatatattacaagtctatttcgtttgtccttaccctcacacattgcttttgtttttaccctcacacaccttgaagtcaagctttttaaattacactatactaatcactttcttgtgttgctaattatatataaaagtccttttgatattgaaaatttatgtctattatacatatattataattcatagatataactaagtacatttataataattttgataccaagtggctaaaaaaaatatttgattccaagtattattaataattagatatttttttttaaaaaaaatgaaaataaaaaccaagtattatattttaagatttatagcaaaaaatattaaatatattcatttaagttcaaatctttatttgagagaagtttcttaaatgtgattatatgaaaataatattaaaaaaataattagtgatatatagtcttactaaaaaagaaattgatagataaatttatttttaatactagatttagagatattattaactttaaaataataaataaataaataatctttgcacaacatttaccgcgtaaaactttagataaaagttagttataaaaagaaaaaaaatactaaaattattgatcgttaataattaaatattttaaaataattattaatgataatattattataaaattgtgaatttaccattaattcttcatgataaaattacaattaaaaaagagaaacttacaaaaatactagaatttagattaacttttacaaaaatactgtgacacggaaa

SEQ ID NO: 79930 - DNA, 1443 bp, Cannabis sativa
tgtatgaataactaccacatcgcataaagaaagccgtcagttttttatcacacgaccctagacgcgcgtgaagatcggattttgaagactggaaattacaagagcaattaaagaaaggagaacggaaaaataaacgaaaacttaaggcctgtgagaagggcgaaggagcaaatttttgagggaagattccgaaaaactgccttgaaaaaaaaaaaaaaaattggaagggtcaaatatcagggtgttggagggggaggagtgttgaatgcgcgctctgtcctctttgtttcatcgtccctgagcgaagcacttgaagccacataaaggagatttatatatatatatatagagagagagataaggaagcgaagaatccgatcgatcggagaatattcggttggacgggctcgttttgagttcggatcgggccaagtctgtaaggaagatgagtggatgggagagggttaggccttcgagaacaagactgggtcgaaattccaattcgagcatggaggaccgcgttccctctagtcgaacggttcggctcggccgagttcagcctcaggcgcctggtcaccggaccattttctgcaacgatcgcgaagccaatcttcccgtcaaattcagggtctctttccttttcataatattaatatatctgagagattaggcatggcgatagaactataggatgagttcattgcatttatatttattttattgtcatttctcattttcgttttacagaagaaatctggagtgaaaaaatggttattttatctcttattcgttttagacagagatttactgttaagtaagaaactcttacattaatgttttatttatttgctgtaaagccaaacgcttgatggaacaatgtcaaaagagggtgcaactgtatctgtttgagtagagttagattggacacatcccgtacgataattttcatgaggttcctatttgcccaactaggagaggttaatgagttagatgagttacggataagaaagtaaaaataagaatgaacgctcgatgcctagttttaaattgattgtatttgttcctttgggtttgatcatgtgagttttgtaattaggtttattgttggatgaaatgcattgctgatattgacctctaaaaagaaacagttggtgtatccacgaacagctaaccacggcattgtaaaacttggttaaggctgtccattttcatttgggcctcttgaaaaggtcttctaaattcacaaagttattccaaagaatcaaagtggcaattattaatggaattctttctaggctctcattgtgatcttgaattttagcacaaacacagatctctaaatgggtagttgagtttagttgtatagcaactagagtgtgcattttattggtttttggtattttgatgatgagagtattcagcatctgtaactaataaaatttg

SEQ ID NO: 79931 - DNA, 1104 bp, Cannabis sativa
atgaatggaggagacatgcagctgcgcattataagttataactgcatcgctttatgtattttctagtgtctacaattatgatatatgattggtttacatctatttttataagaggaacaaagactaaaaccatactcctgataaaaaagaaccactttcagtttactattgccttttctttttttctaacgatgtactcgaatgttacacagaaactactatagatgcacttcggctggatgtcctgtaagaaaacatatcgagacggcactagacaacaccaacgccgtaattataacatacaagggtgtacatgatcatgacatgcctgtaccgaaaaagcgacacggccctccaagtgctcctcttgttgctgctgctgctcctgcttccatgagcaatttgcagtcaaagaaattagacgcaaccccaaaccaggcctcttcaactcagtggtcagtggacaacgagggagaactgaccggtgaagccttggaccttggaggcgagaaggcaatggaatccgctcgaactctgttaagcataggatttgaaatcaagccttgttaagggaaaggcacttcaaggaataatacaaagaagggatttacacattctatgagagatccaatggagcatgtatgtatacataaaaataatcagatttggcatttttcatttatttttttttctttagtttttatttttaattttaaaaatatttcttgttgtacttctctttatgttgttgtagtcttgttttttttcagtagtctacagctgtgtatatttggtattgtacacactaggtttactttgtttggaatagccttaggcttaattgtagtggaacatcattaaattccatggcaaggttgtttgtatttttgttatctttgcttttatcttatgtgttcaacacaacacactaatatagttttgtataaaaaccacacttaagatagtcgttttatgtaaatcataaaaaagtaattgcaaatacaaaggttggtgaatgattggaatgttagagtggttatcatttcatgttttcttactaatcaacaaaagctcaaaagaagctatcctcagtcttaatcggtg

SEQ ID NO: 79932 - DNA, 3774 bp, Cannabis sativa
  modified_base (97)..(99): a, c, t, g, unknown or other
aaaaatcagttcaggatcctatttttaccatttgggaaaatacaaagtccattttgtcatttagaaaaacaatgggtccaatcggtaacttttgcannncacagggtccaaaatggtatttaaccaaattttaatgacagagaatcgttttggctttggtttagttttaaaatgaagattcctctgttcttgaagcaaggaacataaaatgtgtaaaacaaggatgtttttgttatgtgacatgaaatgaagaatagaatagaatagaatacacacattattcgattgacaaaataaatacattttattcatctgaaagatctatgctgtgtatatttatgatgtacataagaatttgtattcaagccattttctcttgaaccgatccttgttccaaaatggacactaattctatcgaagtgtcctgaaatctacaaggcttgtgttgtgctcctagaaacttatgacagcttcttccatgaagggaaaggggtatggtaaacacactagcaatcctaacaccaaaactaaaatcccaagagcaacatacttgctatcaggatcggttatttcctcagagagtggagcaattggtcccctctgtaaaaagaatatcagaacaacccaataaaaagccacatcatttacgattgcagacagtccaagtagcccaattgaagcccccgtaaggcgaactgaactctgtcgaattacaagaacaagttcaaactgttgagaatatgtttcagtgtcttttcaaatttatattataatgacttcaaaaggcatacctttcttccccaaatagcaaaagcaattcgtcccccatcaagctctcccgcagggatgctgttgatcgcattgataagtagtccagcccatgcccatattacaagagggttaacagatattggagtgccttctttgagcgcatcgccaagtaaaagctttgctgaaaggagtcgtgataaaaacagtcactactgtgtatctccaataaacaaaattagttgctgaaatattaatgttgggcagaagaacatgtttgttacacaatcagatttgatgattgcaatagctattcagatgaaccattactagaagtctagaagtcaataaagattttaaaacatataaattgagacatttttctccatgcagtacatcaaaaattgaagtgcttaccgatgcccccagcaagaagggactcgtgaaacacagaagcatcaacaacaacaccaataccatcactaggtggtaagaaaaatcctaaaagcaaaagaacaagacccaaggaaaatccagccaaaggtccagctgctgctactttcagtagatcttcacgcttgggtacaatatttataatccttgtaattgtcccaaaagagcctatctgtcaccaaaacagctcgttataatttcgtgatcccacaatggaccactagatgctaacccaaaggaggaattacttctcacagttgtgagaaaacaaactacttgcgcgaaaaattacacctgccaactgggcacaaagtatggcaccccaagcttgacaccacagctttttgctgccaaaatgtggccaagttcatggactcccagaataagtgctgttacaagggccccaggtgctccattcttcaacaggtcaacattgtcaaaaattgatctgggacatttaataatcatcaataggtgcattattcctttgaactaatattgaaatgtaatgttttaacctcgtacgcaaacacactttatgcttgaaaataaaccatatttttcatttcaacataagtaaacttcaaagtatgaacagaaaagagtgaaacaagcatattcatgtcaaagaaactaatacactagctaaaatataaacaatatgttcaaaacacgcactgaaattacagcaataacttacaaagacaataatatctaatggtaatacttagggtgaaaatgaaagattctatgagcttccatattacgtcacgcacagcaaaatctagattaaggaggagaacaaaataaaaagcacttttttttaccacgcctttcaacttgtatataagtatgataggaacaggaattcatacaataggttggattgcaatgcaggaacatttcgaagaagtaacgtgaacacggtaacaagtccaaaagccccagctgcaaaccactcaggaacagctgcaacgacattaatgtatagatcattatataaatcgtgtatatagaaatgaacaaaagaagcattcacaatggaagagcttaaaagttttttagatgagaaataaaatgtgaaagaatgttacaaaattcacctgttgtctctggttgcaaggtctttcttggaacaacaacagcaacaggtcgatcatcctcgggattgactaaaaggaaaattctaaactcatccccaaatttatcctacaaataatggagtgatattataaaaattaattctctaatttttataatcaaataaaagaaaaaaattagggagagggatcaatgtaaccgtcaaaagatgggaaaagaaaaagaactagaaaggatactacctccactctctttgttaacttttcataactttttgcaggctccccacgaaggtttcctttgaataacacaccaacctagtcaaagtaacgaaaaataatgtcaaacaaaaacgagtgacattgaaaagccatgactagaacaaaaagatggaaatttcaaagttcctattgacagtatttatcattgctttcaaaaggtaacaattatgctcataaacaggcatcaaaaaatactatgttcatattgcacttcagagtggattacaagttaaagtttctataatccctaaacctatgcagaaaaataggtagagaactaaagaaaacaacaacaacaacaacagcaacaacaacaacaacaatatacctcatatggctcctggcttgtcacaaagaaagtatcaaaaccaaatacttgatttttaagtatttcaattgtttccttaggaatcctgattgattcatccagttgctgtggctgttcatgcaaatttagaaactaaggtgtcaaaaccaaggcacgagacagaaaatgcctcaaaaataaaaacaactattcataatcaccttcagacctggcagaggggatccactagctacttctaatttatcaacatcctgtttgaatgcaagaggataaagaaattaatggttagtggatcccatatatattggaaaagcatatatattttctccaattcaaaagaaaagagcttccataagttctgtcaatcaacttggagctgatcataggatcagtccctaccaacctcaaaaaaacttgaatttatgcccaagtacagaaaaacagtctttaagttattgtccaatgcttaagagctaatgagctatatttcatatatgagcaacggcagggacatcagcactaccctgaccaccaacaaagactaaaattatgcttaaaccctcatttatgcttatatcctttgctgaacacaatcatgaatgagaaaagctcttaaaagtaccaacacaatcataaacaggtctatgtagaacaaaacaaacataataaaaatagtattacctaaataccaacctgagaaatatttcctgcatcattttcattaatttgttctgaagcaagcggcttagagtcatcatgggtgttattttgctctatggaatcagtgggaggctgaacttgaacctcttcatgctcttcgtcgtcctaaacacattggcactt

SEQ ID NO: 79933 - DNA, 2434 bp, Cannabis sativa
ttctgaaacgaccttttcatccccatctcttctttaatctttgtaatctcgtcgttttcctctgttgttattgttattgagtttgagtttgaggcttggtggaatctggtgcttgagatgtcgtttagcatttcagagttgagaaatataaggtcagaggaactaacattgctccacctgttcttgtaaacgaaatcagaaacgacaatcttgtggttgtgcttgtgtaacacttgttgttgttgttgttgattctgatcatgatgagtttggaggatcaataattgcttttccttattatcatcatcatcatgatgatccttttcaatctttctaaaactgcttccaatgctgaatcttgaagaccctctttggctttcttctctctcaacaaagagctccatggttggctcttcttcaccacctagatgatgatgatttgattggttagtactgttattataattgttgttgttccataaaaatctcatacttgaagagtaagtgatgagttcaagatcttcagagctaactttctgcctgcaaagagggcaactagaatgcttctcaagccaataatcaatacaactaatatgaaaagcatgtttacacttaggcaaaagcctaagaacttctatatcttcgaatttcgatagacaaaccgagcattcaaggccttcttttgaaccctttagagaggagaatctgaagaaaggaagtgactcaatcacagtcttgtctataccagaaaacctgttgcttgtgcctatttggttcgggtttcggtttacaagaagaacagcagactctcttctgtgacagaattttgcatatgcaaggaggaaaaatgttagcacaaacatgacacttagaattcctataacaacagctagacttggttggaaatctgtgtcatctgggccagcaaaatcaggccccagaccttgtgctttgacatgatcaaagctgaacaaaatgagctgaaaaatgatcactatactaattctttgatgattcatgggaataacaataagattcaaactttggaacttcttgactaggcttcttcttctaactctctctcaccatctttggcaaacatctctatggacaaaaggagttgaacaagaagaacagataataactcctctttctttcatttcccaagggagtagtttaaggggcttgttttttgtgctttggtcttttttaatgtctctcaataaaaggggtatccatctggtttatgtcagtttttattttattttattttattatattaaggctttagttgttaacttaattgggttttttttaaaaaaaatatatattttttattaaggctttatttgttatcttaataggggttttaaatcattttttaaactaagtagtgatgacaaggtggggaggaccttttggctttttgtaggtattacttgggcaataattctacattattgattaaaagaaacttataataaaaagggtatttggaattatattgaataatgatgagtcttttttgttcttgcctcattttccatgttaatttaagattgaaattaattgactattatacatgtccatccatctgtaaccgagtaatgaatgaaagttggttatagcatttgactaattactaattattgctatcttttctgcttaacaaatcatggagggaggaggaggctattgagttttttgttgttttctttttcttttttaatgaaatcaatgaaaaagtcaaacttgtttgcaaggcaattcgtagccatcataaaaaaaaagtcaaaagaaatgaaattttgttcattttatgcctgactattacctcagtacataggccatcaaaaagtaatcaatagagttaaaaacaaaaataagaggaaaaaaagtagtttacttgaatgaatccttggattttggatgaccacaaattgattagttaaaaaataagctttagctaagggggccaaaaaaaaaaaaactaaacataacaatacatatgacataaatctatgcataataatgcatataatttcctctaaaaaaaaataaataactattctgagtggctatttaaatattggcactccttgaaaaaaaaaacaaagtagaattcaaagggtgaaataggccctccatttcatgcacacatgtatgaatatataatatgtatacataaataatttggcaaccctatgtacctaccatatataccaatgctaatgctatcatcatcaaaggtttaaaaaattgtggtggtatatcacatccgtcacaaaagacaaaaaccaaataatggctcttactatacgcaagggaaatgccatttttcatgttttatttatgtagactttaattgctgattaatgacaataaatagagagggcgtggatgatgatggtgtaatgcattgtcaaaatatatt

SEQ ID NO: 79934 - DNA, 3390 bp, Cannabis sativa
ttagtgttcgcaacatatacaaaaagtactttttgtgtttgcttagaagggtttgaacccaaaaggcctaaagcttgggaataattgggagatgacttagatgggtgtgcgaggatgactcccttacaataatgcatggctggaaatgatatgtttgttagttaatagcactgaagcatgtagaataggctagcctgctttaatgtttttgcaatgcttacaagtatgatgtcaaaagctttatttgcatggatgatttagttgctatagtcccactttcgtccataaaattggtccatattcacattaaaatgggaaagcttcctttatgggaatataaggctgcaaatagaaaaccatttgtgttgttgctgcaatacttgcaggttggttgttgtgtaaggtcttaggcattgttttactattggtgagaatgagacactttgtaagtggatttgaaagagtggaggattctctggtcctgtacaggtacagagatttaaaagctgaaacaaagaacgttggctttggttatgttctcaaagctactttggtcaattcataactgtaaacaaacttaagagtttgcagcaagcagagatgcaatttcacacagaagtgaagacaattggaacaattcaacatgttaatctcgtttgtcttagaggattttgcacagaatcatcaaagaagatttctagtctatgattacatgtcataggattctctagagtcaattctgttcaataaaagtgtgaccatcttacattggaatgcgaggtaccagattgctattggaattgctaaagggctttgttatctccatgaagagtgcagagaatgcatcatacattgcgatatcaaaccagagaatgtcttgttggatgaagagtgctacccaaaactagcagatttcggccttgcaaagctcataggcagggacttcatacgcgttggaatgttgcttttcgagctcataccaggagaaagaaacaacacacagttggaggaaggcatgaagagatattcttcctttgttggatttaaggttcgagggaaacgctgacaaataagagatgaatggagcgtgcaaagtggctgttatgaggaatttctatggaaacaatttattaccatcaaaagactacttctggttgagttttattgtcaaagaatgatgaaccaacctccaagttattcaatttctctacttaaaatcaaaacatgttcattcaatgtttgagtagttctgtatggatggaaccataatcatctatgcttgttgtaattgatgtaatcattgtatctgtctaaaaaattttgtagtgaaatatgtcaacttattggactaattagttgatgacaaactaacatggaatattattattaccacttttagaaaatgtaagaacaataaagcatagaaatgggtttctaaagaatttccaatattaattctgaaaaaggtaaaaaaagaaaggtattagttccatgactctctattattgattctttctcaccccgaatatgaaaatgttgtaaagaaaaatgcctttccgatccagcttccaacttgttgattattcttagctcatttgtttcactttcaattggcaatgacagcttttctgtcattaaatttatttttctattaacatgttagattactctcatcaaagcacatttggcacgtgcaagcaatattttccattgtaaaatgctgagggaagaaaggtgaaagaacaaatcttcatcctacatttctattgatttcgttccaagaaagaaggtgccgctgctgctgccactgaacccaggtagcaatcaatctatgttatcatcttccttcttccaaattttgagttctctcttttcaaatgctatactttcggttttgttccaagtaaaactacacatattttcccattttctaggcgacccagttgactttatatatgtgtgtgtgtaaatttttatactatcactatgtgagttagatattacggaggagaaaaagatggagttgactataacacagccggatgattggcatcttcaccttcgtgatggagaccttctcaaagctgtagtccctcacaggtaagttaagttttgatgaactcacaaaatcatggttgtattgtattaagttatatgttggagcaaggtttgtgattggagaattaaaagaagaaaaccatttagcataattgcaacaaaatcttaaatctgatgtcaaataaacctgcagtgtagccctgtttggaagggcaatagtgatgccgaatctgaaacctcccatcactacaacagttgcagcaatggcttatcaagaatccatcttgaaagctctgcctgctggttcaacctttactcctcttatgacactttatttgacagatacaacaagtcccactgaaatcaagcttgcaagtaagttataatctttatatacttttctcttattcatacacactcaagttatttacttaaaaattgtagttattatttgtaactgttgcattttgtatgacagaaaaaagtggagttgtatttggtgtgaagctgtaccctgctggtgcaacaacaaattctcaagatggggttacagatctctttgggaaatgtctacctgtccttgaggaaatggttgagcaaaatatgcctttattggtattacttttactatcctaaactagtttttatggttagtaatggctatttgtaccaattatgctaggcttgtgctgaatccagtttataattgtagatctctggctaaggctgtttgggccacttgtgcagcctcagcttgagttttgagtccattctatgtgtcttacattcaaacctcccacacatactttatttccaggttcatggagaagttacagatcctgatgttgacatatttgatcgggaaaaggttttcattgaaactgttttgcggcccttaatagagaggcttccacagctgaaagttgtgatggaacatgtaaccactttggatgctgttaggtttgtagagtcatgcaaagaaggtttgtttaatcatatgaagtgcttaatgtgatttctctttttcagtcatagctcaaatttatttgtttgtcttgttaggctatgtggctgcaactgtcacaccacaacatcttctgctcaataggaactctatattccaaggaggattgcagcctcataattactgcctcccaatactcaaaagagagatccacagtaagttccatttgatttgatttcaaagggaaaaaagagcaatgagaaaaactttgttgtctgttatagggtgacattctgaatttgtactatgtgatggattgttaaagtgattttttcttttcttcaattgttaatttttctcaatatggt

SEQ ID NO: 79935 - DNA, 1575 bp, Cannabis sativa
  modified_base (1361)..(1361): a, c, t, g, unknown or other
taatctttttgatactacaaacaacttgccatgtagcaatagatgtcgattccgttggtaaaccagatggttcagggaatcgagttgggctcactttaatcggcgaaccgcattggaattcgggtccccaagtgccattgatcttccaattctgaggtgggttgagctgagttcggttcaagtccggtggcattttgtagacttgcatttgaaaagccgaaatggatttggttgaatccattagaggtgagagaatcgttccattccggcaacagaagggaatcattccgagtgttgaatcgtttgctcttgttggtgggagatcgatgatagtgggtcttctgttgcagctcaagacagtagaaaaatccatatctttgtaatactgaccttgtggtccgaatatacagtctcttgagtcgataagtatgggataagctcctttcatggagtaaatgaactcgccctttgtccattcccaactcagtttccaattctctaaacgactgagtgggttgtggtttgagattgtgacttgtgccaaataatttgtgtcgtatgaaccaattacgtcgtatgtaataacaacatcacccttttcaccattagtttgaatttcctcttcaaaattagtatctttctctttaattggatctctggtgcaacataaatgcatctcattgttccctacgtacacaataattaatataaaatcttaattttgatttcaaaattatatatcataataatttctaaaaacaattatataataataaacacatttatttatataggaagtagttattattatattgtaaaatatagtttaatttttattacacatatttcctctacttattttgttttttattttttatttattaaatcttttattaaaaaaaaaaaataaaaaatttcctccctcatatctctttgccttttttcaatgatttttttttgttggttgattttttttctcattctttttcgaatgtcactgttggcgctggaatcaagatatcctgttaaaaagtggtgtctcatattgtgttagttgatgtgtaaaattttgtttggtttaacacaatatgagacactaatttttaataagccatcttgattcagttggctgacatttctttttctctttttcatctttcttctttttcaattctctatctttctctatttttatttttttccacgctaatattttttatatataaagttatgggtgcactcttaatgggtattacccatgaatgggtaaaattagaaaaaaaattgaatttttatgcttaatttttctatctaattagaaaaatctctcacttttacattatatgggctgagattgttcnatcggttgaaaaaaaaaattaaaaaaagtttagcaaaaaaaaagataagtaaaagttgagttttacttaaatattgtaatttttctctaattctgtcagtacatactatgttattatcttaaacatagaacatataaggctcagattctagatcattagtctagataaaaatatgtagtgttaattacttctaaatattcttttaataaattta

SEQ ID NO: 79936 - DNA, 1188 bp, Cannabis sativa
aataattaattccacagtatatttccattttataagtaaccaagttcaaataaaccaatcacaaagtgttcaaaataggcatctgctgccttatcatatcataatggtcaaccttaattaataagctataataaatatgagaccaaagacacaatgaattccatgaaaaatactttataaaattgaaccagtcaaaagaatgttgaaagaattggtactaaaatttaactataattattactattattattattataaattcttattctatataatgatatacacctcaatggctatcagctttcacagggtctgccaacaaaagctctgtattcctacaatggccaaagctggacacaccgggtgacaatattatcactaaattaaataccagttaaataatatatatttatatttatatatatatatagatttttaaaaatagagagagcttattatatggttacaagtatcaacttctgtttcattttctttactcagttgctgttttcttgtgattcatagccgtaaggatttttgctagcccagttccattgatcccgacacatttcgacgataccaaatttcgccctgcaacaaaagtttgaagctttatcaacaatgttaccaactttaacaacaagaattttctttagtaaagcagaattagcacttacttccagttcaattcagcttccgccttctttgtcgatgcataaactacttcggcgtcaccaggccgtcttccagctatcacaagaggaattttctgtacaagttgacatgaagattgtcagacaaaaatatccttacaagttacaacagatgagttttatgatacatatttagtatagcattttcgagcatgagaaagtgatacaggtttttgtgcggttttggtccagtaccacattacttattactggtacctaatagcaatgctcttatatttaaagttaaggattacgggattatttggaatctaaactaactacaaaacaagcatcttttaaatttctcaattttggtatggagatttacttcagttattgttaacagatagtttcatagggcaaaagggagatgtataaccttcccagacgcgttttcaaatgctgcaaccatctccaacaccgacgttccttttcccgttcctagattgtacacctcacaacctggcacaaaaca

SEQ ID NO: 79937 - DNA, 1339 bp, Cannabis sativa
aatattgaagtactgtattcccatgcttactatactttatatatagcttaactatatatcatcaggcctggtcagaaaatcgttaaaatccccataaatggctcaaatatatataaattttatcgattaaacagcccagctgacaatatacatgtgccccacgtacgacaaaattcgtgtcagccgacagtgcgaaataatggttaagtgcacaataaatctagtttactataatgaatcatatcccaccacttatacataaaaatattgcccagttacgaaatgttgggttctgtagtcgccatatgactactcgtggtagtagtagtactaatgcattatatattattaattagtttaaataattcaaataaaacttgcataattaattaattaataaagaaagaaaacaaagagaagccgacatacaaaaggggattcggttgagtcaaagttatatgtcaatatatatatagcgctaatctttgagcattgccccggaacatgtcggccataatttaaacccagccacgtaactataattaattgatattcctcgttttgttttactagctacctagctagttatagttacaaacgagatactatacttttctttttctctccaaaaaagaaaaacgacgacaacgtacacattacgtactctgtgcaaaactgtgtccatatgatatgatatatcctggtttcatggacgaatgactgggattgacttgttgtgtatgggacgacgtcgtctgaccctggtataatccattgtaaagtaatctccagatgtatcactcccttctacccactctcgccatgtccctctgcttctgtgccttactactttatttttcacacccttccctgcaaaaaattagattcccttttttgttttagagatattaattatttaataaatttcttcattttatatgtatacaagactagttatgtaatggtagtaagctttgtgtttcaaagcacattcatatattttatatccaatataattaagggggctacttatcattttatttttatttataaaaataaaataactaaaactagagccttctaagttgtatctatatatcactctgttctgtacatgttaagtatatattctttctttctctctctctctccctctatatatatatatatatatgtagatagatagacttttctgagacgcataacacatgctaattaatatatgtatatatatggtcacctgagaaattttccttctgtttccttctgttgttattagacatggaggcagagagtattgctcgtcgtcctatgaccatggcctgcgtgcgtttcagga

SEQ ID NO: 79938 - DNA, 1109 bp, Cannabis sativa
  modified_base (42)..(48): a, c, t, g, unknown or other
ccaaataaaaaaaattattttttaaaaaatatacatattttnnnnnnnatttttaaaaatactatttattttcatagtaagggtcgaaaaaaaatttgtctgtggctcattcatctcatgaccggtcctgcttgttagatcagtatttttacactttttttcctcttctgttcttcattttaaagaaaagctaattttaaaggaactattgggagtgttcttagacatttatcaaataaaccattatcatgaattgaaatacttatatatctatttaattttttgttgaataaaaagtgaaccaaatacaattgatcagctagctctatgctatgtggcccaactaatggaagtcttcattttatattaataacccaacaaagaattttttgtctctattttttccctttatttttggttaatgtactaactaatacttaggataaacaaggcaaaaaagtctccataagtgggcaaattggccattaggtgtataaaaaatatttagtacattgaaatcgactaataatgtcttaaccttgttattttttttctcaatcattctaaagtgttgtttggctttgttgtgattataattggtttagtttgtaatcagctgggttatgtcattgttttgggcgtatccattatgagatttgtgcaactagttatgtcttttggactattatccatttaaccatcgaattaaaattcttcacctttgcagataagttcaattttaataaaattatgtcctcttgagaattttcttattggttatattaatatttattatttgagtgctaatttatcttttattattttattctattttgtagatattttaggaacttgtcatgatagtttatagtgtttggcatgctacttgttcgtcttataattgtattgtctaaattttttgggaataattttattaaattattgttcacaactaatacttttagctagtttcttttaagttttatttcattaagtttagttttacttaattgaataagttataaagaccgaaaattttaatattttattaatatattattttatttatagatagttattttaatacaatttattttttgatatttatt

SEQ ID NO: 79939 - DNA, 3324 bp, Cannabis sativa
tttttgaaattttaattatattaagaaaatattacctaaattcttaaaaaataatctttcaactcttcctaaattaagaaaatatatttttcaaaataaataaatagcccccatcccactagaacccaactcaatcccggactgaaaaggttatcgttacccactatttccaccatttcaacatattctaatgtaaaatattcatttattaattttactaataaaacgagttcccatctaaatagtctctgcattattttttagttttaaactctaaaacatcattgttgattaaatttggatttacgtgttttatactcatgaagtttttaaaatatatataacgggtaaatttatagtacattttaaaagagtgtttatgtagactatttatctattttagtaaagaaaataattttttagttaattattcatgatcgtgttataattatatagaatcacttgatatttttagaaaatttcgagtaatttacaatgttaaaaataaaatttatatattttggtgcacgcacaacaatttttttcttatacacgtaagtacttatttaaatttaaatttttgcactgtaagctattcaaatttttttaaaaatttataagtggtcataaatagctacaatagattaaaaaaaatatgaatgtcgaaacagttaaggaccaccagaacgaccctttaagaggtctaagtgcacaaaatatgggccaaaccaatcaacctgaccaacccaacccattttttgtagtaaagatttatgttaagactatccatgactcattgggctgaaaagcaatagatcataattatggattgggcgcattctaactcaatatgacctaacacaacccatttattgagatgtttcaaatttgagataactttcatacataaaatatattttacaatcataaaatatataaaaatgtaaaaatatatagtttatattttaataaataaattatattatttaaatcatagacaaattacaaaattatgaactttttccctatgcaaccctcctttgaaattagcagcgtgtgaggcctctctctctttcctccaaggtgaagaaaaaaaaagtgatttgaaagcttgtgcgcttgattgaatcggatcccccatagtgagagacgaagaaatagctgaggtgattgccagtgttgaagagcttctgatctaagaaacttttgaagatgacaacctttgtgaagaatttttggactcgcttgaagagttgctgacagaggttatggtgccgattaaaacccttcctccgcctagttcgcgttcgttggcaaataaggctgagaaagtggacttctaaactttcttgaaagatgagtggaataaatttagatccaatcaagtaagaatcccttccactcattttgattttacaaaaccgattaagcatggggataaacttatagctaagattgatattgaagaggttgagattgaaacttctttttgcaaaactatattatttgtgtagtgttgggtgtgaatccctcctttcgtgtcttcgaaggtgttgttaagaggatctgggggaatttaggggttgattgcactgtgtgaatgcactttggtttcactttggtgagctttcatgttgaaactactcgtgatctgattttggaaacggaagtggtccattttgacaagaagccagttgttcttcacccatggacttctgacttagattccgttaaaatggtgaattcaatccctatttggatcaggttgaatggtttgggtattggggaagaaattgtcacagtgctttagtgagtaaaatcggcaagtcgataatgattgataaagtcactagagattgttccatgatcaagtttgcgtgtgtgctaattgaggtggagattgctgataaacctcctttgtccatatcttttattaataagaggaaccaacatgttgagcagtcaatagggtatgagtggttgcctgccaaatgtgcaacatgtggtctattggggcattctatgagttcttattcaaaggaacatggtatggtctgggttaaaaagaagaaagtgatatttgaaaaactatgtttgaataattttgtgcaaggtaatattgcagaagcaggtgttgttaaatctgataggattcatattcctgtctatgatgttgtggagcaagggtgagtggatagttcctaagagaattgacaataagaagaatgtggagaagtccacaaaagtttcaactagtaatgtgtatgaggctttgtaagaacctacgatgggagacatggttactaactcaaaacaccctaattaaggagagatataatatcctttgttagaatgttagggggatgaataaagataatcaacaaaggtctatcctagatctttgtaggttgaataatattggtttaggttgaataattacccttccttaaacatgaagtaatcaacatacataggggtaaagtagtattaattcataaccccgaagcaactcgaaatttcaaatgtctaactgtatcaccctgctattttaaggtactaaatcatatttatgtgactatataggtcctacgttgcattccactgttactgttaaaatatgaaaatcataaaattttacgtacatcataattaatacacctagaattcaaatatatttctataattgcataaataataatcaaaagtctaattctgaaattaagccctaattattttctaattcttaaattaaagttaagtggtcattacaactttaccatcttttgacattagtatcaagtcccaagttcggttcttcctcaaagagtggatctcttccgacatatataactccatttcatttcttctgatctttgcttatcattgcttgtgcatagctagtaggctcttcctgcacaatctgactagcaatttcaaatgtgattgctattatatcagcatgtccatacttgtctagaaccttttacttctctctatatcatatctctcgccactgtataaccttttagatcatcgcttccagaatcatcttctgaatcatcacttccatgatctataggcatttcagtctccactctttccagaggcaccacctcaagcttagttcctggagcttcaattttcatatgatcagatccagcttgacttccagcaggtttgagaatgaatacccatacccgattcactaaatgtcacatccctactaattatacattttctcattccgagctccaaacaccatagtctataaccttgactcatttcgaataccatcaagaaaatacacttcaaggctcttgcctc

SEQ ID NO: 79940 - DNA, 2301 bp, Cannabis sativa
cagagattaattgtctgcccattggtggtaaattttcctaccaactgttactttcaagctgacttaggccttcctcttttatcactgcagttaatcgatacacttctcttacttccccttcattaagcaatgaatgaaactggtgaaatgtgagttgttgtactcccgaatcagctgaactagccagcttaacagccttcccctgccactgaaactccatcctcaaagcctcgtggtcatgtaaacacggaccaagagtttgtagccattgcatccctaacacaatgtcaagaccccaaatcggtagcacatacaaatcaacattaaattgatgtccatgcggccataaatcaactccacagcaaatttttgaacacaatatagagttgccattgcccatataaaccttgaagcatttggtatcttcacatttcaaacccaaacgattagctaatgtttcttggataaaattattattgttgctcgtatcaataagaacttctaatgtctcattaccatgcttagcactcaatcaaaagattcacggattcaccgaattaaataaagtattgagacttacctcatcaaccagcgagtcatctgatttgccattgtccggatcagttgcaggtaatgtatcggaatcatcctcctcttctatgccacataaaaccaaaatctggttcttacatcgatggccgtagctatacttctcatcacaagtgaaacaaagtcccttctcacgcttgtcacgtttttcagcaggggtaaccttcttcactggtagcggagtggcaccagttttaaaggatttcagtcctgtagttgaggttggtgtggaaccatacgaagatgaacctccaatattttggaccgttggaggcaagtaagtagaaggacgaggggaccaacccgaacgagacccttcgctctttgagcgcccaaccaactcgtcatttctatcctcaaataattgagccttagccatggcatcagctaaatccacgggtttagctagcaataattctctctgtatttccatcttaaggccccacacaaagaaattcaagaacaaatgctcagagatacctatcaatttcgtcatcaggtcctcaaatttaaatcaaaattgagcaacacgacctgtttgtgtgagcttcgaaatacgacccaggggatcgtcatacaccgaatctccaaaacgcatacgtaaggcttggagaaaagcattccaatccacaaatgagtcactcttctccatccactgaaaccactttgacggcaccccatccaagtgaaatggaaccactgtcaaatggatggaatcatcaatctgatgaagatcgaagaatcgattgatcttgtaaatccaatcttcaacatcgaatccattgaatctagcaaccttgacccgaagagtttttaaaattccattgagatctccagcgtctctatccgtaggagcacaatagaaggtcggacgaggttgagccatcactaaactcgcacctgcttcggttgaatgagaattcgccatatgcgtgaacatagcctgagcgaacttctctttatttttggcttcatgatcatgcaacatttgagcatatctccccaaatgagcatcagaaaattctttgaagcttgccttcatatctttgaacagagtagccatctcatcgttcctcattggatgaagatcaatgaaagcaccaattgatagcaataaggtcctcttcgagacaggttaaatctcccaatacaaactattgcaaattcattcaacaagaaacccaaaaatagtccagctagtatttatgtgtttctaaaatagagcaaagaaaaagaaattacatctcaaggaaaagtaaaaatggctcatccagctagcttctcaactccttttagccatcacaaagtctcttagtaatttgggtctcactcggctccttttcccacgtgttggaagtccatgctcaccttcagcagcttcttccccttcgttgatagctgaagccgaaggctccaactcctggtgttggttaccatgctctgtccattctcttatcttttggtccattaactttgggtcacttggtattgggccttgatccttgggctttgctaacattatcaaataataaatttaaaaaatattaatttaatataattaatagcggtgatagtttttgttgcaacataaatatcaattattaatctcatatatttcgttttaaaataaattcaactttttaaaatttatttttgactttaatataacattttaaactgaatttttttttt

SEQ ID NO: 79941 - DNA, 1030 bp, Cannabis sativa
tagtactattccactatctgaattgaacttttgatatttagatgattttgtggcattttaattattcagacacaattccttatgaacttttatgttagcaagctaaaatctagacttcgtttcagtgacaatcattttaagttgtttaaaatcggtttagaccatactttattttgtatcttatatgtttatttctccctattggtaattttcgattgagcagtcaaaatcttcctggcagaaaaccttccgaccccgcttcacaatcactgccaatggttcgaaaatcacagtcacacgatgcagctgtcggtgttctcgttcacatgcttaggaatgcacctcccctgcgtcaagattcgagctgttactcaacgaactcctttaaggccgaacctgatggaggaatcactactgcttcaggcttctttgtgccccgaaaggcagctgatgcactcgaagagcttcgaagttatagagaaatgaaagacctcctcctctctaaaagtggaactagggtggtttctaaagaagaagcataataataaggctgtgattttgataatgggaaaaattgcatttggtttggttacctaacacaaaaactaagaaaaactccattttggagggaggaatttaagacttgtacatatctttgactgtaaatttgttattatcatttaaacatttaatgtaatctcccacattttatttgttttatgtgtttttaaactttgatgcttaactgagttattctttcatgtgaaaatttttgtaagaaaataaaataagttgaaaagaattatatgtatgaatatgtgtatgtatgtgtattgctattggtgcctagtactattataaattatcataatattgctattagtgtaatttaatatcaagttatacatttgtatcagttaaacactaagcgtttggttagaggtaatgaaatggaatggaatagaaaggaaataattttcattctattcttttgtttggttgcattttaaagtattggaatggcattcca

SEQ ID NO: 79942 - DNA, 1530 bp, Cannabis sativa
caactagtaattgatttactcttctaataaacattgctacaatcataagcgcaaataaatgataaaatcagaacaaaacatcgactaatcctatacttaatcatcagtaacaaaagaattatgtattcctaaatttaaattcttcatataattcaatgacatcacaatttacatgttttcgttcatgtataatattcataatgaaaagaaattcgaagacataatgaaggaaataaaaattaattgtttgattttttaatctaatcctattctaatctaatctacaactgtataaccattatgtttgattacgtattcagtagattaagacttgaatgttactggccagaacaactataaacagcactatctatattttaaaatatgattataccaaaatcattgagtgagagtaatgaccttgtacttcgaagcaagacgagccaacccttgagctgcgccaatttctgaaacgccagcccttacagtaaacccttcacgcaaaagggtctgcgctattcgaataccagcctgcccggtggcgccagcaacgaacacagtcccagcatccttacgcctggggttcccaaacgacaaccccgaagaagggttactcacaatagggatcaaagacttgacatcaggcattttcccaaagtcaaaacggaagggactagaattggtttcaccttcctcggacgaagaatcagcttcagcggctgcatttttaccgagcctaaaagtagagaagggtcctgaccctttggcaaaaactttgagcctccttgtcttgagggtcagtccccttgagttgggtgcagtggttaaaagaaaggaatgggaagtgagagtagaagccattagttggaaaaggaagaagggtatcttattctaagtttgaggagggatgactcttcttcgtcttcctctttccctccaaattcagttttctttgcattaccatacttgatactccatgttggctttggccgcttccaactgaatcacatcgcatattatctctatctggatgggaattgtatttccatctggcgaatgataggaagccacgtggcatagtctatctactatgaaaaaattgagcaccagatatttttcctttcccttcttttaatttggttggctcttttacgtaaacaatagtttcaacatccaaagtttagattcatttaaaaggtttatccaccatgtaaccacataaattttctgatatgggattacgtgtggcccacaaattgacatctatttttatagattttaatcttctaatatcatttgctacatgtaaaaatttaactatattttaattgtgactttcttacattaatttttactattatattttataattataaattttcatacaaaatttaatatattatttaatactcatttaataatttattaaaaaaatataaaatcataataataatataaaggtaaatttaaaatttaataataataacataaattaatggaaaatattatattaattaaaatttaataata

SEQ ID NO: 79943 - DNA, 1951 bp, Cannabis sativa
gaaaggttatcatctaaatagaaagtacagaatgaagactaacagtgattccaatctagtttgaagtttttactacctcttacacgtaattttaccaagatttgatacagaaatcaactttcagaatactcacatatctctcaaggagaaatttcacaatgaagtggaaatattttttttttatctaaatgaagtggaaattttatggcaagtaataatataaatagtacctcagatgctgtgttagctaatgcaaatgctgcctcaattcgaactctccaaaaggccttcaaaaaaataaaaaaataaaagaaaaaaaaatgaaatctaaaattaccagactccaaacacattcttcatataaaaattcaactctgctagtggcaaaaccttcgagtcagtgagaaaattattgagagcagtaacaatgttaaatgatagctgtggtgatgtctctagcattgctattgcttgcgcctgagcaataacatctctgtccttctctaactgattaatctgtggaacaatcaaataatttaatttaagtaataaagtaataaaaaaactcatggcaaatagcaaggtgtaagtgtgactggcatgaacaaaggcaagctcaaactaaaggcaacgtggttctaaccagaggaaaaaaatggcatggaagttgttatcaacacttgtgaaacaaataagcagacacaaacaattttctagcatagcattattaaaacatgctatcaaatagttaaatgtttaaatcaaaaggattacttataaagttattaaattaaaacatgtaaaccaataaatgtttaatcccaaggtttacatattacgcattttataattaaatgttttcttacatgacttattcaaattcaaagacaacttatgggtcataatgaaagtggtcaagactttgaattgctaggcttgggtgacaggttgcaatgtagaaacggagtgggcagacaacttcatgaactggtattctttatagatcacaagaataaccatttggttccctcaactgacactactacttaaatctcaacaagagaaacaaaatgagagatagtaaagcagatcctacattcaatgagagctatgctgtaaatcacaaaactcaaaactcaagagcccattaaacaatatctacaacaagaacttttcaaggttttatgcgcttttcaaaagttaagatgagcttttccctctaccatttcctccaccatatcctgccttgtgaccattttcatgcagtcggccatataggaaactcagtgctcatgtaccaatttgatacactcaagtattatgaaaatctgaatggatcttttactgattaagagagcaaaaattacaaagtgtttccaagttttcgagacacttgcctatctcaacaagagaataactcaacttttacaaaaaaaaaattgatgaacatttccatctaggctaggttctatttacaatgaatagtcaggctgacaaaaatgactaacataaaagtacagccactagaattaatagagcttaatgactacgataactagcaatcgtattagactaagtccggatcagtttttcgttattagtttttgtgcctaagatatgttagacacattgctggtataacaggcatgtacctcacacacctttgaaaataatggtttcataatttttagcctatgttgtaagaaaatacaatagaaataaaattcgtattagactaagtccggatcaaccactacaattaatagagcttaatgactacgataactaacattcatattagaaaaaaaaaagagaaggaggccactgtctaagactgacccctcccccaatatatatagatagcctcacttgtggcggaggaataccatggttacaagtgctatatcaaaaacatttaaaacattttaaacaaaaccaaaccaacgagaca

SEQ ID NO: 79944 - DNA, 1324 bp, Cannabis sativa
  modified_base (299)..(301): a, c, t, g, unknown or other
tttttttttttttttataactgatatgattgatacttttcgcttttattacatttatatgatggaacttgtgtgacaagattatatctcgatcactaatattctcacatattcttgtatgaaacgatattcaatatttcattagggattgttccctagactaagagattgtgctcgttagattgatgaaaaataatctgataacataaaataaatataatattataaagggtaaataacgacataagtacccaaagttttaagtttgtaagcgacataaacccaatatttatttttagnnncataagtacccaatgtttgtaacactgtaatttttctctagttttgtcagtataaactccgttttggatttattaaatgaacatttggaagtaaccgatactacatgtttctgtctagactaaatgatgaagaatctgaaccttatatgtggtctgtttaagaaaataacagagtttgtattgacaaaattagagaaaaattacagttttataaatattggatacttaataacattgagattatgccacttacaaacttgaaacttttggtacttataccgctatttaccctaatataaatattgttattataggtaacttaaattgtttaatagtcgtgtttatatttgagacccaattttaaattttacaagtatgctactcttatcatttttctactatattgtcaaccctcaacctgttttgctaattatatacgcgatctgtgtatcctattcaagaaaaagtatgcactatttccattttcttttggcaaggtacactatttctatccttattaggctataaaaatatttagtcaatggctcttattccgggtcaaacacatgcatatatagtgctccccgtatatgtcaaagtcaaagtaaactcttttgtattcgatcaatcaagtagctcagtcgacatggcatagtgggccagccagcacacaaacgaatccaccgtagcaactggcaaccactatattctaactctatatatatgctacaatactttgtggtggtatcaataggatcaaaagagaaatctgatcataaaagagtacctacatatacgcaaattaaaattattattattattataaagatggcaaaatcaacagcttcaaaagttgcgagtcttgtattgagaatcctaacgattgttcttctcttgatatcgctcattgtgctcaccaccacttccaagactgttgaaaccgattctggcgatctgcgactcagatttaacaatattattgcttaccggtacgtattatattattatatataaatatatata

SEQ ID NO: 79945 - DNA, 4175 bp, Cannabis sativa
  modified_base (3042)..(3044): a, c, t, g, unknown or other
attttaaaaaatttatatttttaaaaattatttaaatttatatatatatatttaataatgaagtgtatttatcattttatgatgtctaaatagaactctctttttttaatcttaaaaacaaccgatttttaaacgaagaggaatagtgtgtttaaatttgatacattatttttttttaattaatacaaaataatgattcctattaaaataaaacatcttgttagcaaaaaaagatataagtataaaagattgttgaataaaagaagcaattataggaaaaaaaaaagtcttataaaaaaaattgtgtgacatgactttttttattaggtaaataaaaatattattaattaattagtataattactatttacatttctcgaaacattaattataatgtgtaaaatttcagactcaagaaaaagcaataaagaccaaaactaacagcaatagtatactaacggagagattaaaagcaaaggacacatgtccactttttattagtgcgacagtaatgtgacagcaaaaatgggacagcagatttttattccttctctacacgtacttttcttactttttctttcttctatttttctcttccacccatggacaagcttagatccaccattcttcaggccgcactcataccccaaagctatcgactagtagagatttcatacctcaaatttagtggtaatcggagcttagacacactcatacgggtcgtgcaaagtttcacgtaaaaattttaagttgatatttcggccaactttggcgaccatttgacgaaaggttggtatttaaaatctacaccgcaagaagaacatggctcactaagtcattttgcccaaccaaaaatttagaagagataagagagagagacactacaacaattaagagtagtaccggtagaaacttctgccggtactaattagacatacttattgaatattatcgacagattttgccggtaataattagtcgctaatattagtaatagcgaccaaaatatatttcctaatattaataccggcggattaatagctatggggtctgcctgtattaatgtctgttcttacatacgctgacacattaatatcggcagaccaactttagtattccgccggtattaatattttttatataaaaaaactatttttcaatttttaatatttatataatgaaaataattagaataaaaataattataatgataataattataatattatatattatatataataattattttaaaaaaataatattaattaatatttaaatttacgaaattaaacattaatattaatttatccataaaaatatatactattatcttaaataaaatcataaaattgtcttaaaaagattttaaaacataaaaatttacttaattaaaaaatctaattatcattgtttagattaataaatggcataaaataatctgcattcgagctaagtcttgaactgtcacgattatcacgagattgaggagccggtagggtagggtaataaggttgtccagattgttgtgtaggtaagatctccacaaattgtcgagtctgcggacgaaccaaagtaggttgttgttgctgactttgcgcactgaaaatctaaccatacataggttgttgtgaagatcctcctatttgaccatacacaggttattactgcaataatgacccaaattgaccgtacacagattgttgttatgatgacccaaattgaccatacatagggtattgttgttgttgcgatgagcctccaaaatggccaaccataggttgttgtgtctgagatcctcctgtggcatctgaaaaaaaaaatataggaggagactgggagggatgcccaaacatgtaatgtaaatgaggcgactgtgaggagccagtagttgggagaattttgttgttgttgttgaaagaattgaggcatctgaggcaattgtggttgttaaaacttattgttctggcattgacattggacgtggggttgaaatggacgcattaccttgctgttgtgatagtaaaaaaatttcaaaccattggtcatgtagagaagggtcactaaaggtgccagactgatcaatcttatcacgcatttttaacataaactcagcaaagactcacaaatcttctggactaatagatggagaaacgccttgtgattgagcctgactttgagttcgggaatttgttaccgatttgtctttcaatttataacccactcctctttgatagtccgaccgattcccaagaactttactcagtttgaaattgcttgtatttggtagaagatccattgctagaatcattttctgttcccgtcatgctggcaacctcttcaagcattttctcctgatcaaataaaatattagaaacacaatattaccttcattcaataattttaaaaatattataaaacttaacaaaaatttgaaacttacatgtatttctctgcatgtcacgctaatccaagtgtcctccgttcttttttaaggtggcctttttttccaagtatgaattgcatagtcttcacggacgtcttgttcaaaaataaagttagtttgtgtaatttgtaaaaaaaattacaaatagaaagttaataattttacttacaaattcattacgagacgatgccatcgattttgtgccttgcgtggacaaatacttcatttcttttctatttttcttattttgattagatcgagcaataaactttgggcttagaaataattcaataatttgcttccagctctctgtagagcagtgatcaggtacaacattgataacactttcaaaatcatctggatccccagaataatgttcctaagagtgagtgtgcctgatattctttctctcagaagaccttctcttcatctcatgataaagagtttgcatcaccttttcaggctttggatgaccatcaatatcgtacaaatactacgaacaaatagtatttgttaaagaattttgtattcattgaaattaaaaatttacaacattaaacttgttaatgtgttttaccttcattttttgtacaatnnngtctttaaagtgttgaggtacatctttaagattcaagtagtgtcctagcaatgtcattgtgacttcaacacccatttgacgtacaaaagcttggttctccgtaccaaccactttgcctgtcatttcatcaagttttagtggtaatggttttcctgcatcccacattcgttgttcaacattaaggttagtagcaaggtcacgtccctttcttcttggcggtggagttgactcacatgtcgacggtaccctactagggtctggtggatctggtaccacaccacgtctccaccatgataagttgatacgtcagctgacataactatttattaaaaaatatatatactgtttattagcaatagtagaaataatttaaaattaataatgttaacttgaaatagaaaatattaacttgaaattaataattgtatgtattacaaaataaagtgtctgaaaattaatcatccataacaatataactattaattaaattatcgttcacatcatcttcacaaaggttaactaaaatttcatcatcagattcttcaatagcttcatcttcgtccatgttgcgaacttcttagttaacatgcaaacttttgttcagtgccaatgtcaatcggaggttcattaggtagcaaaattaactctccaagatcaacagttaatacaaaatttgatgagtttgtgtcgtgtaccaaatcaactttgacattagcgtcaccatccacgatgtcccagatttgtcgatggtttacattctcaactattttccaatttttccctctcaataaatcatcgagataaaatacttactttgcttgattagcaagtatgtataggtcatctttataccattcaccattaacattaatactagtgatatgattctcaacgattattttcttccgtcttggatctatattaaaccacttgcacttaaataatgtgacggagtaaacactagtgaaggttaactttagtactacttcaagtgtgtcgtaataattaaaaccttctgttcgagccacgaacactccactattttgtgtgctcctcttctcatctcgtttggtagccataaatcgaactccattcacaatacaaccttcatagtaagtacctaagtgatca

SEQ ID NO: 79946 - DNA, 942 bp, Cannabis sativa
ttttttttttttttttctattcattatatatttttttctgcttctctctctttgtgcacttacatatattgagttaatcaacaattaatttatggctataactgagcgtgagggtaggattaatattaatagtggcaaagatgtgcccggaattaagctgtttggggctacgatcattttgcaatatggtagacaacaagaacaagtagtaaaagaggaaccaaataagttcgaagcggagcgtgatcatgatctaacggttgagatgaagaggccagaaaagatcataccatgtccaagatgcaagagcatggagactaaattttgttacttcaacaactacaacgttaatcagcctagacacttttgtaagggctgccagagatactggacggctggtggggccctgcgaaacgtgccggtaggggctggccgaagaaaggccaagccgccttgccgtggtgatctggctggcttgcccgacgattgtttttatggtgatgcttctgaggttgttgggcagtttgacttggatggattaatggtagaagaatggcatgtagaagccgcccaaggtggtttccaccatcacttcccggctgtcaagcggcgaaggagcggttcaggtagtcagacgtgtgcttaatagtttcaattactgttttttttttcttggggtggtttgggaagtgccaattttacttatttttctcttgtttgaggaaaaaaccaaaacaagagttgtgatgtatgtatcttcgatcatattggtgtacataaacaaattgattgcaattaatcgtcatcattattattagatcttacttttcatcatactcataataataattgaagagagtagatcaactcttcaaaaaatgaaactccataaagatacatggaatcaagcaaaatcaaaaatttaaattcgacggaaattaa

SEQ ID NO: 79947 - DNA, 2019 bp, Cannabis sativa
  modified_base (1991)..(1993): a, c, t, g, unknown or other
caaaattctgttattcaattgatcctcagtgcagtattcccaaaattctgttattcaattgatcttttcacatgttcttgcactatgtggaatctagccagacgatccttagtttaagtctattttggatagccatccagtctaccacaaaatacttaggaatattaaacctatttcatacctcattgcactatcaaactcattttgaactgtgaattcatttctctgcatttttccaaccaaaatcaaaggaatgtcgatcttaaccctcaaactcctactaggtcacaactccaaattcatctaaccaaatattgctactctgcaagttgcaacagctttgaatcctcctgttgcaataaatccctttagcaatacccttagtcaacctttttcattgaagcttgataggcaaaagttcaccttatggaagatcatggtctctaccttaatccgtggacatggttggatgactatttaaatggccaaaagatttgtccactcaaattcattccaccaagtgttggaatagatgggtcactaggttttggacttcaaccaaaccctaaatatgaaagttggatcgtacaggaccaacatgctgatgggtagttgtatagatcatgacagagggcgtagtgtcagaaatgatggcttgtaaaccagtagcatctctttggataactttgaaagacttctatggagctcactcaagtgcccgaccgatgatatccccaacaagattcaaacaacaaataaaggaactctgagtatgacaaattacctcagacaaaattgagtttggatagactcctttgctcttgtaggtgaaccatatcctgaacgacacttagtcaaatgtgcttttaggatttaactataaaactacataaaaatatgttgtattcatatattattttcatccctttatttcttgaattaattatcttcttagattaagttgaccaaaaatcgcgtcaacaattagttttcagtttttagctataatagattatcttattcattgtattagctcaaattagtatcttatagtgactgtaataggtgtgagaggattgagggttgtaaatttagtgtttttcttgagaagacttctattagtgtgagattatatgtattaggagcttgtcttctttgtttgtacccgatcatcattgtaattcttggagttgttcaataaagagataaccaaccttcatgcttgttcagatccttggtgtaacgtccttgcttcaagcttctattgggctcttacacccacagtatgatggctcttatacacgagtacgtcactctagctgcttcatggaatgacgactgtctctacaaaccaacacgagtgtttccagtgtgttttgtcctcactcatacacttcataggaaaacttcccaagagatcacaaattctaaaattacccaaggtcaagcatgcttaataaccgtggagttcttttgtaataggctaccgaaaaataagatgcgtcttgctgatataggtagtaccaattaatctatctaagccctcttcaactagctacacaatctcagactcatcacacatgaccttacttatatgatgtaggattgtacagctcctggtctctttccctttcagatcacgggactctgactgtcacaatcaccccccttttgggggtctgacatcctcgtcaaacacacttccagctaggtcaaggctttgataccattttgtaatgtccccgcttcaagcctttattaggcccttacacccacgaaatgatggctcatatacacgagtacgtcactctgactacttcatggaatgacgactaatcctacaaactaatacgaaggtttccagcgtgctttgtcctcacttgcacactttttaaaaaaatttcttaagaggtcacccatcctaaaattaccacatgtcaagaacacttaatcgtgaagttctttcgtgatgggctaccagaaaacaagannnaccttgttgatataggtagtaccaat

SEQ ID NO: 79948 - DNA, 2885 bp, Cannabis sativa
ttttttaagaatatgaactagaagaaaaaaaaattaaaaaaaaaacttagtttcattaaagatataaattttatataacataaaaattattaaaacaagctttgtcatttctcactttccaaatatatatgtcacattataaaacttaactttttttttttttttattatgactttttataaaaaaaaaatttcttcaataaatagaaattatttgagtaaattaataagaatgacatagttgaaataaaagtataatattatgattagttattaagtaaaattatgccttgttgaaaagatgacatttgttattaaataaactagagagtgcaaaagagagtgtccttagactagagcatctcttcttctcaaataagcagcttgtcaagctaattttttcattttttgttaaaagtctaagcaagtatctttcactaaatttgccttaaattattttaaagagatgccaaagtgtagtataaacgttcaacccatttttttagtgagaaggataaatatgagggatcaaaatacaattagatggaattaagggatcactttacaaatttgttaagactttttcacttttgtactcgtatgtatgtatttgtatcaattaaatcggtgtgtgaattttagtgtcaccccacagacacacaaagcttcactgaagatggcacttggaaatttgagcaggaaaaccctagcggaccttggtacaaatggaggacggttagggtttgttcgtggattgaagaccttcacattgccggacttgccttatgattacggtgaccttgagccggccataagcgccgagattatgatgctccatcaccagaaacaccatcagacctacataacaaactacaacaaagccctcgagcagctcgatcaagccatggccaagggagatgcttccaccgtcgttaaattgcagagtgccatcaaattcaacggcggaggtattcattttttttattttcttgttgtgaattaactaaattcttactcttacccaacattgaactattgaaggtcatataaaccactctatattctggaacaatctcgcccctgttcaagtaagccattttccttttgggatgatcttaaagtgtttgttttgattattattaatcgaatgagtaattacagaaaggtggtggtgagcctccaaagaaatcactgggatgggccattgacatgcagtttggctcactagagtctctaattcagaaaattaactctgaaggtgctgctttgcaaggttctgggtgggtggtaagtaagctgttgcttcatttcgttctgtattaattaacatctggtttcaaaaacatgcctgctaatttttaattttattgcccactttgaattgtttactttgcagtggcttgctcttgataaagagttgaagaagattactgttgaaaccacagcaaaccaggtccgtttaccattgctttcagctttgctattattggagctatttatatcataatttgtttgatttttctcaacctgccaattgttttggttgcttttatgcttaatgatgtcttggctgatttgggagtttttttatctctgattgggttcgcttattatccattttcttttcttttttcggaattaggatcctcgcccaatcctacattatttggggaccaagattctataacaattgctgtgtaggtaaccattaaccaggagggactcgaacctcggaccttttggggcaaaccgcatgccttaaccccatttgagctatccctcttgggtagaaggaaactatccattgaacatggcttaatgtgtttagttgcttctttttagtttcaatttgtgtgcatttgctgatgatattatactttttcataggatccacttgttactaaaggatcgactttagtccctctgctcggagtagatgtgtgggagcatgcgtactacttacaggtgaatttactgtatatgtaatttcttatgactctgattacttgatcttcttgctctaatgtattgaatagataactttttgtgctcttaaagttccacaaaaaatatgatgttcttaactttgctatcataatgtttaatctggtgctttcagccattagtgttcccactgaaatctcttgttctgaaatatatattaacgatgagaatgttgtgacgatgcagtacaaaaatgtgaaacctgattatctgaagaacatatggaaggttattaactggacatatgcaagtgatgtttatgagaaagagtcttcttaaggggaaaaaacttggtaactgaagtgacttctggagtgtaaagtctaagatttcccagtctgcaaaggaataagaatcatctgtgaatatgggtatgcagaagctatgaaaaaaataaagataatgtatggtggttgtacttgtgtttttatttgtttttttgccaattttgagctctctcagattttcgttgctcaaataagttgaaacgcaggcattgcagctcacttttgtggatactttggttccttttctaattcacatgagtgtgtagttgcatctctctatgagaatagttcatgtggattttgttcaagttctgttacgagaagttgacaaaaaaaaaaaaaaaagtaaaatggttatatttggcaaaaggaacaaagtgacaactttggccgaatgctccaatgtaatgtgtgctccagtgcacaagtataaaaaaaatgaattgaaaatataatatataattttttaatttcatctaatatacttagaataataataaaatcgtctaataacaaataaaaaattttagtatttaatgttaaactgaatatacgtctaacaatgcaaggtatatttagctcaaagtatctattc

SEQ ID NO: 79949 - DNA, 6886 bp, Cannabis sativa
  modified_base (786)..(789): a, c, t, g, unknown or other
aatgctggttgatatttataggcaagtcacaaaaagaggtaatcatcttagaggaacctcagacgcctcagtttccctccttcaaagagaatatgggaaataaaacataatcaagtgcagccgtcagccgtggagagagaaaattggatttcgaaatattaattgtcaaagcatttattagccgaaaactgaagggatgcccagtcagcctcacatcgagtcttggacgatcgcgcttgacacgtgtccccatccaaaggcagaagcagctcggatgaagtctacacgcgactttggaagtctcgtatagacttggggggcaaacgttatcccaatttttgcactctgatgtggcatcacataatggtgacacgtggaatccacttggagcatcttctcaggaagcatagtccgagcaggatgcctcgttggcatgcccagaggaaagcaatcagcaatccgcgcagagcaaccaacacttagcgaattcagctttcgcattgtgagtcatcaatgaaatccctataactcagggatcagattacagagatatgggatacacaagatcccactatcagtgtattcagcatcaatcccatgatctttgtactcagcattgatccgccgatctttctgtttatacacattgtgacgagaggggaaactcttcctctccaagcttattagccctataaatagtgatgcatgttcactgggcaaaggatcggtcgaaaaacagttcagttgagactatatcctaaatatattatctaagaattatatatnnnnagatactgttgtaagagctctaagaaaaggaaccattctccttgttcttaagtgaatacaagtaacgaggattaggctataaccgaactgctcggggctgaacctctataaaattcatgtgtctttacattgctttattatacatattgattgctataaatcacttatcgcttattaaattagactcattgttgttggctaaaagcgaggtcaacaataattatcttatcatttcttagtcactaagaaatatatacttctagggcggtaagtcaaatcctacatactcttaattaacccaatacctatattatcaacttatcacaatattctcatcaattttatcaattaaaaccgttatgacatttcttgcgcccgatcgagtctccaaggttgccaaacttgaaaaatactttaattcctcatatcgctcatattacattcacacatgctatataaatctttgtgatttataaattacgcttatttattcatttatagaaaatttaatttttttttctaaaatatattagtaggatcataatcccacttattacctgattaattcatattataaataataaccctaattacttaccagtaagcttattgggatattacaaccatcccctacttataaaaattttggagatacaactcccgcatctgcgactctagttcccaagtctcttcctcataaaataagttttctggagtttaatttcatcataactcaaaataattatcggatatgacacatatttcttaacatagaaatgtggaagacattatgcaccctagacacgtgggtggtagagctaaccgatagggtacctgaactatccgctccaatatttcaaaaggattgatgtatctaggacataatttttttccattcttttcaaatctacgcacccctttcttcggtgataatcaaagaaataccgagtctcccatttgaaatttaatattcgacaaacacttcatcaggggaagagattattctcagataatttaacctttatcaaatatgctcataccatattcctaatattccattaatcctccaaaattacccatctttcaagaataaaatattatactattttcactttaatctccatggtttcgataacattcgttaattcctaacatcatagtcaaatatatcacctttggatttctcaagattagactcatcctttgtatgagttctatatcctcatttgctgtataaattgtctacactaatagacaatagattaacttggcatttctaaccgctactattcagttgaaatcataagtttccatagtacattattcataactatgtctttctattcttcctaagggatatcctaagctgatctactgacttaacttaataacaagttaagtactcattttttatagatattcaattagagcatttcttatttctactcattaacatatacttatctcaatacattgcaaatctctacttattaacacagcctttacacttagaaatatttggaatgactattgattccgtatcctaacatgaatctttctagcatactttgtctgaactcgtacgctttccaagatgagtctccagaagatttctcatcttgagattaccccatgttaagcatgcttaattccaaggtaagctcatggtgggttatcagaaagtggatgcttctttgtcattccttattgtattttttgctttcatccttttgttaataaaattcagtttccctctctcccttcactagcctcttaaaattcctcatcggttttattcacataactatgaggaatttccaccttattatcaacttgaatcttgttcatctctactcatgttaacttgcatcaattttctttgaactgacacaagttttaaattttctaatcacacagaattaaccaccattataaagtgatttaatgtaacctatatggtagaggcaacattgctcataccgggaacccataactaaactagaaatactaatttcctgaattctcaattgataacaattagtcagatcattccttgatctcaaagtttcatttctgtatttagtaggagtcttaaaaatcttttcaaacacatccagagatatatgtatctcaagtgcattctctgttttattgacaatcccatagcataaactaccctgccaacttatagagagtccccccattgatgatgctaattcgtcaacatctaacactctcgtatacttttcccttcattactaaggttttactccttagttcatacgccacccttgctctcgtgtaattatcacatcttcatacttggttaacccctctaaaatttattttatactcaattatatagttcaatgtttaataaaaacctactttgtggtctaacattcactaaccatatgaatacattcacattaaattgcatctcaatttataagtttttccccattctaggtgagtatgcctttccatcattgcctaataaggtaatcgtttcccagaatttcaatggtctccttatataccatattgacaatctagtcaagtataaaagcactctccatcattcttgtatcaccatgattaatctaggtaatcttatttaccttagtgataccactactctccatgacattcttttatatgttaccctggtaatgtccctgcttcaagccaccatcgggccgttacacccacagaatgatggctcttatacgtgagtgcatcactctagctgcttcctgggctaatgactggttgtacagatcgatccaagtgtttccaacatgctttgttcttattcgcacgcttcatggacaaacttcgtaactgaaatcaccccaagtcacgaacacttaatcctggagttgctttgttgttgtgtaccaaaacaagatacttcttgctaacataggtaaccccaagcaatttattcatgtcctcaacaactatgtagtcccacgcgtacataatctcaaaatcactacatacaacctttccctaggcgatgtgagattgtacaactcctggtctttccttcgcggtcacggggttctgactgtcacgacttgagtcgtgtcccctttgatctcattcttcccctggtagtgaatagatccaaccacacaattgtcaccttcagttcacctagaattttaggtgatactcataaattgtcccacatttactaatactagattacttttagcccaaaaaactattattttctcttaatcaattaaatcgatgcttccattggctacttatgtcctatattccacttaagaataccaacaaatttaactcatattatcatttccctaatctatctacctcgtttgatgagttaccactaactaacatacatgcacaatccattcaaatctcttgatgtcccctcattaagtgtgaaatgtttaatatcgatatcaattgaacaacaactatcatattgcccataaaattctaacttgagtcggccaaaggatcaatacccaggtccccttgaaacataattggcacttgggcaggacccatatacatttcttctttaacattagtctttcttaacggtcggtaggtttttttcaggcgacccactatgccacagtactaagatcttgctctaaattagcccaaatggcgcctttttgcatattaaacactaaggataaggtctccatttcttattctcaccttggctgttttcctggtcaccctagaaccttttttttctaccccataattggtggtttatttagtttttgcttcatgatctactcataagggtgtttcataagtttcaccacatctagtggcacgagaagatgtgtcggtagtacaagaatagacacaagacaagcctgttattctctcaaaactcagatttgttccccttgttgtccaattatgtccaacatagcagaatttaaatgtttccagttttatgcccgagcccatacagttcgctaattaggcaattcaattgcccttactatataacttgtcacacaattaatccacatcctccaaacacttaaaacctgaacaaatatcaatatcaatattcatataccgtacacatattcttagtgtagatagtcagtacgctacttcttcccatcatacactatatttgtctaagcaagtaaggcaataactaataccataaacacgtacaataccatgagtcgacctatcttcgcagcaaatgtacacattcgaccagtcttcagaacctttaaaatcatggctactctgataccaagttgtaatgccataacccatagggatgttacatgggtgattttataaactagtttaatactaaaatattagttatttattaagaacttttataatattaaaaacttgactaaattaaaacacgaatcgcatacatcataacgacagtgaaaatgtgtttcggggatccttattataaaagatttaccaaaatgctatatacaataacaattcaaagcacaattcaaaaatgcaaagtagatacagctagcacaaaacaactcctggccactcggcacacagactaggggcaaatatgtacattgttggagaagactgtcatctcatggctgctctaacttttccttgcccttacctgcaccataaagaacccgtgagtcacatagactcaacaagaaaagtgataagaaaggatatattcaataactaatcatacatttcattatcataaaataattacacaataacattcaaaagtaggtaatataaccatccatatacgtagaaatagatatactcatatatttccattgcctaattaggcaagcccgtgtcataatggaatatcatatataatatcactgtaccacctatcaggtgggcccgtgacacaacctagcaacaatatctgcttcacctaaacaaacaagaccatacctatgctcggtactcatatgtcactgacacacgtacctaggcccgatacattgccaagaggaaaccatacaacaacttcattttatgtaataaccatgtaatggggaaagcctacacgattccattctatcattgacgcccgtacctacccccgatatgtcaccaggaagaaaccatacaacgatttctttctgttccataacttggcaatgtggggaaccctacacggttctattctgtaactgatgccagtacctacacctgatatgtcgccacaaatattacatcacctaatcaggtgagcccgtacattatgtgcattgtatcatcacattatcattgcctaatcagacaaacgataattttaggacctagaaaacaacaattttgattcatagtcatgcctatataacggttgccccataagtacaacctgaatgtcactatccatatatcacattacctactcaatcaagattattccatggcctggcattcatcatatatatatgtatattgtattgccaaatcaagctcatgtcataatctaacattcaattaacgcatttccttattagggtagctaggcctatgctataacttggcaccatatcacctaataaagtgtacttctatatcatattgcctaataaggaaaacccatttcacaatctaaaatccatatatcatatgacctaatcaggtgaaatcctatgtccaattcgcattattattgtctaattggagagtcaatgatttcaaaacttgtcatgccatgtgttacactataattttcttaccttaggttccgattcaggtatgttggctgacctgcttggagtatgatcaatgatcctgggccctatgcaataacaataatatactaataagtgtttaccccaaaacactacttaataattggaaaagacaacctagggtttcctaccaaaccccgtagttcaaatacactaaaatgaaacttatattttggctctaaaacatacaccatgtgatagagctcatctcaagctttgaaacggtatctataacgaccaaaatagacacccaagtgaaaatttatgacaaaaatacgattccaaatctctctagaatttccaaaaacggcaggcgattttggtaaaaacagcatcccattttt

SEQ ID NO: 79950 - DNA, 4076 bp, Cannabis sativa
acaacagtaagattatgatatctttaccaatatcaatatcagtaattgtgaattacaatatgttctagatttaacaaaaattgtataacaaaccataaatatgaaaaatatatgtaacataaatgacttcttctaatcttctattaacaaataagattatattgtaatggattatatttagggcaaaattcccaataaaaatttgtcaagacaatatttgttgagataaaagttatcaggacaaaagacaccatcattgtcctaaacaagactaggtagtgcctatgccttatgaaatttatctttttgggttaattaattatttaattattcaattcgataaatatttgaatttaaaaagttgttgaagatatttgaaagttgttgagatattctctcaagtagtttagagattccctcatacatatcagtaaccaaattcgattatcgatatttatttatttaaataattagatatgaatgaattaaagggtttttaacaactataattagaagcctaatttaaaaaaatcaaacttatactttgacattgctattttcgaaaaaaggagaggaaaagaaagatattatttttctctcaatcgttcttgctcatttgttgagaactcaacaagaacacactatgtactttattctaatagcccatactattccgtgttggtggtggatagatttaaaaaatactagtgtgagtccaattaactcatcctcatcatctagattaagggatacaacatgcaagaagttttgaggataccctgatagtcttcaaaatgtatattctaaacttatatttatgttttaatttaatgtacacacatatggaaatttattgggctatggtacaatgataatcaggtaatatgaaactcttctgctgcgtacctgatttagtaccatataactaaaaaattaattttttgcaacatgcgcggacatcatacgtcctatggccgtcccaacaacgcttaagtgtcgtcggggcagtggttccttagaaatttgcgttgcgtgcttcgattagtattttggcaataactccttcaatacaattcagaattggacgatttaagatgctataaaaagttgagaatgagatctaaatactttatgttgagctacaagtccaactttgcatctaagatagttaaaattagtaattaggtatagacttatcaaaccaagctctccgtcttccactattgttcaccaaaatgtattaaaccccttcaaaatggctccaaatgcataattagcctccataaaatccctaacaagcaaacatcacactaatcaatcatttaaagaattaattttgaaaatataacactaatcctattggattaccattctatttcaattttgaagtttcaaaaaaaaaaaaaacaaataaaaaaatttacaaaatagacctaaaatttaaaaaaaaaaattacaaaaatacttcaacatagaattttttttatttttactcttcgattttttatttacaaatatagatcttcagtaaaaataataaaccgttattttggttgttttataattttattatagttgtcatgaggttatttttctaattgttttacagtttatttatagttgtcatgatgttgatttctagttattttttagttattttcttaatttttgctgagcaaagtgtaatcttataattttaaaacattaaaagtatatttttataaataaaaattttagatcgttaaattataaataaaacataaaaaatgatatttttgaaaattatagttcaaacttttaagacactagaaaagaatataatgatgaagatagttgatttttatcgacaggggatcaagcgattttgaatctctgtaaaataaaaattccaaatttatatttgtttaattgatatatttcacattcatagcatattacaattaaatctaaatgaaatgaagaaaatcactattgatttggttattaatatgagagcaagaagtttgtagaaacatgaagcctatgatgactgaatagtgttttcaaataaaaaatgaaagaagaaaaaggtgttaaacataaggaagaacaaaattttattttctattccataaaataatcttaagaaagtgtgtgtgagagtgaatttgcaagactaacataaatataggaagaaaaaaaaatacatcttattaattagtattagaagattttcttttcaaatattttcattgaaaattagtggactcaaacatttgacataccaacaaaaacaaaaaagacaactacttacaaaatttacaatataggttgttgatcaagtacattcaacatattcttctaacaccactaatttgtgcatcacaacaaaaaaatataaaaccaccttacttttatatccaaattttttatttaaaaacgtgaacaactcttcattttcaaagattcaaagttgagagttggagaagaaaagtatccaatatcagattcgtcgtcaaattcttcactctcttcggcaatggtctccaaaccaggggagttagaagtcttttgagggtaaataatgagggcaggagccacctcaagccaagaactcaagttcctcctttccttaaccattttttactttgagcttgtaagaaaacaagacaaaaaagagcttagttcccttgaacaaaaaaaagtagtatggatgattatagaattgaattgggatggtgaattggttttctctcttcctccttctgtctttagaaagaagagagattaagatgagaatcccacaagatatttctaaaggggttttgttaataacaaaagatttttacactaatgatttaagtttggaatgaaatgagggtctttatataggaagattttgggaaaaatatcaatgcaaatgggaagatagttatcattgagagcccatttgatggtattcattgaatccatgtgtaaaacgtagagtaaatgcttaaaaacagatgttccaaatttaggcgaaagctctataattgcatgtaaccaacctatcattcccccacttcattggggaaggattttgagccatagataagttgaaacgtgtaagaaattgggtagagagacaattgtattgctcaataatgttatggttctttcattgtcgtttatcttttccatgattataacgttagtattttatttcaaaatagaaaattgtgaacaaaattgtgccattggtccttaagtcagtgagccatttattattggctacaattgttttttaatcttataatgattgtgttagcagcattaacatcatgtgataccattccgagagtagattgcaactataatatgttgatgaataaaataataaaaaaaaggccaaatccttccatttgattcatttttctttgctactaaagataaagctcttgtaaaaggaaccaaactttaagcaatagcaaccaaccatgtaaatggatccacaagcataaaaaaggaaatagcttagccgtttcacaaacctttttttactggtttagttaacttcaataaactttttacttttttttttttttggtatgtatcagtgttttgtatgcaaacaaatttattttaatctataatatataccatcatacttttcatctttagttatatcaaatcggtaatatttttcgtcccaatcactatactcaattttaaccgttatatgtagttcaataaactccattctagccatcatacttttcatttttacttatatcaaataacgttcgtcttcctattatattttcccaatccattcttctatataatgcgattaaactgatgagagatatacatcttttcatactaaaaaaaacatacaaacacagttttcttacaaaaagaaaaaaaattcatctgcgatatcatattgtgagagtgtattcgacggttctcaactgtgtagtggagatccaatgcagtatatgattaggctgttttatcctggggacgactggtaatttttgatgtgcacattcatgggtagtattgggaccgtcttaaagaaagcgactaaacctagaaatttcatttggtac

SEQ ID NO: 79951 - DNA, 1776 bp, Cannabis sativa
caaacaattactccaaaaagaccaaaacaaataaacaaatttatactgtaacagtacaagtaccattacaaatgtggtgatcaaaaactgagaaaatgaatcaaaacataagaacaaaatccacaaacaatcatgtagttacctctgcacatgcgcttctcaaaatcgtactcgaagagagtttaacatatttctctactcatactcgaactgcacatcaacatgtataaatcttctcatgagctgaacaatggatgttgtaaagttggcgagtatctgacattcttcacgagttttagcccccgaaacaatcccatatattaccaacttctgaagattaggacaacggtttagtaccccttcaacccaatgtacaaacaaatcggtaagtgttgtccatcttagctccacaacaacaagattctccaagtctacatccccttgcaaaccatggagaagcacccattctttcaagtcataactcaatgatctcagctgaggaaaacagacagcaatggtttccaaatccactatctcatcttcttccccgaaatctatatcccataaccgaagccttctcaatttcgtgaatctagtaatcatctgatggaaattcggccatatgattgtgaagctactaatatcaacaatctcaagattttcatgagtatcaccaatttcaaaatgtattatagtaactttatcaacctcaaaatgtttcaaagtcccttttccaataagttcaaaaacatcaataacacaatccttaaaatgcaaacgctcaatacaatctgcttccaaaataaacttctccaaactaatcccttcaacataaacattcttcaacttagaactagccaattcaacagtcacttgaggatccgaaatcaggatttcggatgcaacaagctccaaagattcgatcttcggacaagcagcaagcaaataattcaaatccaaagccgaaatactaacatgccccaatgaaagagacttcaaacaaggaaatctctgaaaatttggctcaacaccaataattgaattatgacccaaaaccaacttttccaactgatgttgtctaccacacaactcaagaatatttatattaggagatgtcttaacattataaaacaattgcttaagtgtttccctagtatacattaaccaagccacaagagctgaagctgaaaattcatcatcatcattatcataatactttaaaattgagagcttttgtaaacctgtggtttgaaaaattgtttgggtaatcaagatttcatgcttacttgatgttaaatcaccataaaagggtaaatcattggaattgaatgaaagggtatgaaggtgttttgtgaaagcttttctccattttctacatgtagctgaagcaattacaatatctctagctgtttcaaccctagataaaatttccccaataacctcaacaggaacatcctccattacaatctattctgaagactctcattcatccaatctaacaagaaaaattacatatataatccatgaaagatagtcaataaaaaaatgaatcaaaaatcaatgaatttggatttagtgaatcaacaaagatctgggtatgttgagatttgatggaaatcgaaaaaaagattggatttttagcttgcttaccttgagggatccgattggaagatgaagatcttggtggaatgagattttcacgcgtaaagtttcgaactttgaaatttaactatgtcgtttggaatatataaacgacatttcatttgtttagttatt

SEQ ID NO: 79952 - DNA, 1012 bp, Cannabis sativa
gcattatattatttcttaattcttatcaagagagactcttaattttattagttaatgaggctaaagaagaaattctctctctccctctctccctctttgttgctaattaattaagttgtaattattaattctgaggtaagataaaaccaatatatacttgaactagagaaggaaattctacttaattatttagttcattttctttggcacagtcctttatctggaaatattttgaatcatgatcatttacatgatgatgatgaataagttgttacttgcccatgatttacttttacatttgtctgaagatcatgtaattaaatccatatatataatattaaaatatggtacaagtacttgagattcattatttgcagacaagaagaattcccaaatagtagtttctaaaaaaaataaaaggcacgtgttagaattttgagcaaaaataaatattttgtggtaactactaaagtgatcagagcatttagggaaattaaatttgccatctctagttaaactcatcatacacctagctaggaggtagcatagatattcaattataaaacctaccgggttagcctaacggtggagaactcctttgcaccataaattacaccttcaaacgggaagaatcaccaaaaattctatgtgtatgtatatttatacaaattatacgtataatatatttaggcataaacaaaaattagatgtaatgtcctataagaatataaaaggaatctagactatactttacaatatactcttaataattaaacagctacaatttttgtaatcccacactaaagtttaattttgagacgagaaacgtttataatcttgagaatgttgagtttgggaagagaaataaaattattatagatattgttcttgaagagaaattgacgttaaacctcaatttcaactatcacgtttgatagggtttaggtttccatgttttttattgattaagaagtgaatttagaatcttgataagacaatatcaaacaacttc

SEQ ID NO: 79953 - DNA, 3291 bp, Cannabis sativa
agattgtggtggagtttactgaggttcgaacgagcattccggatcgaatccaccgctgctgccgagtcactgaaaaaaatcacattcttgtatcccagtagtcttgccgaggctgccccttcacaaattgcttgaagttcaccagggagtgggtcacaataattcgataggaaagtgactatcttcacaattttgttatcctcttggcgaaagattacagcgcctgcagattgtgtcttgcctatcgaaatgtctgagttgcacatgatccaccctgggggggggggggagagccgatggattcagtgaatgcagaatttgcattgttgtctacccactcaatttcttcaagccgtcaattaatccctttgatagtaatatggatgggcgttttagtcccttcatggcagagagtatttcgtgctttccatatgctttcaaaaatggtggctgcccctcccaataggaaatcagaatatatcagacctagtctgttttgggggatagagaaccacttcaaccagtcatcccaggagctgaatgatgtagtcgaggttctcatttgccaggagcatccaaaccatatagcccttgcgtactcgcactcccagaagagatgtaaagaactttctatagctagggagcacataggacatagagtatccataccagggaaaatggtgatgagtctctctttcgtaagaaggttataggataagatcttccaccaaaagaactttagtctattgtgcatcttggctccccacacaaacctccatttactatccgagtcaagattcccctgcaggtttttgacgactcgatacgccaacttaactgagacatgcccattcggcgctggtaaccaaagccaaccgtcttccttgggtctgctaggaagtgttatatatccttctagcatcctcagaacggaaccagcttcgtaccagatcctcgttccaatggttgtcgatgataaagttgctaaccaggctaataccatcagaggcattccaagatggggccagttgggggttgtccccagggacccaagggtcaaaccaaatggatgtcgagttcccatccccaatcttccgacagatccctctcaacaacaaaggtcgggttcttaatatagctttccagagtactgagtctgtggatttggcttccatgtccatgaaggactcatttttgatatacttgtcttttataacctgaccccagaggcagtcctcattagataagatcttccaagcccatttcattaggaaagctttgttcatagcttcagtagatcggaatcccagacctcccaccacctttgggcaacaaagtttttcccaagccaccgtatggagtcttcttttgtcatccgtgtccccccactagaagtcccttaggagtctatcaattttattgggcacagacaccggtatagactcagaagaagccacatagtttgagagtgtggatcccattgatttaacaagacaagttttcccggcactggataggagcctagccttccaaccttgcactcgtttaagagtcttttcaataatatgttgagcgtcattcgttctcttgaccgaactaaatagcgggagacctaggtatgtagcgtttctacccattttcctcataccaagcagttgtcaaatagcttgtgctttcctgttagaaactccacgagagaaataaactgctgatttttgggcgctgaccgattgccccgaccagctgcaataggtattgagacattccaagaaggccttagcctctcggatagaagcttctccaaaaagtatgatgtcgttagcgaacatgagatggttaataggaaggccatttcttgcgagtttgaagcctttcagttgccccatcctttctttctcaaaaagaagcctagataaagtttcagcagcaatgatgaatagcgagggtgagagtgggtcaccttgtcttaagccccttgcctagataaagttttagcacacatttgacactactattagacctaacttttaccaaaatattctaaaaaattgcaatacactatttttatagcattccattagaattgctctaaggatatagtaaaaattatagcacaataatagtgactactatatataaaagaagagctatattttaaccccaaaaacttataaatgcatctcatttcaataatttttattttataaaaaatatatatcattaattatattatttttttaaaaaaaaaaaatcaattcatattcttaaaaagtatatctatcaaacaaaaatgaattatattttaaatattataacaaaaaaaataaaataaaaatgatgtgaaatttcattggaaaaaaataaaaaaattatacatgatgcaaagaaatattatgaaaataaacataaataagtattggaatcaacacaaaataatgtgagaaaaaaaaaaatattaagagtaattttcaaaatataattttatgctcaactttttgaaatattagaattatacttataatcaattttgttggggtgcaaataaaattctcttatataaaaatgggatattggcggcaaaaccacttgaactttatatttgttaacacttaaccacacaaactgaaattttgactgtaaaacctactgaacccaggaccgaacatggacttggacccagacccagacttagacccgaacccagacccaaacctcgactcgggattcacccgaatcgggacccaagaactagactcaaacccaaacccagacccataccaaaaacctggacccaaacctagactcgaacccagacctggactcggatcaagacccgaacatggaacgtgagacccgaacccagacccgagacacgaacttaggaccagacctagacccgagacccattcccagtcccggactcgaacccgaacctaaactcaaacccgaacctaaacccagactcgagacttggacccagactagacccgagacccaaactcatgactggactcggaccccaaacctggacccaaaacctggacccgaaactagactcagagacccaaacctaaatctagacctaggacctggacctaggacccaggcctagactcgtcctcaaacacaggacccgggacccaaacctaggcttgggacctggactcgagactcgagacttgagagttgagacccgaacccgaacccaaacccaaacttgagactcgacacctgagactcaagacccagacctaaatcgggacctagaccctggactcaaacccaacccgt

SEQ ID NO: 79954 - DNA, 2192 bp, Cannabis sativa
attagcagcggacattagcggtggacaacccgccgctaatagtattccaaaaaaaaaacgaccttgcacgcacccccatgaaagcaagacgtggaaatgatagaatgctaaaaatggaataaattagtgaaaaataacccaaaaaatgaccttgcacgcacccccatgcatccattatagcctcttttttttttttttaaatattcgtacgacatgtcattttctggaaacgacatgtcattttggctttgacaatttccacctcggtccaaaaacgacacatcgtttacggctaaaagggggctttcactctgtgcaaaatgacatgtcattttcccgataaaggaaaaatgagtcatttttcatcacccctgtcacccataaacccaccttgcgggtccgccgggtctgctatttggatcggggcaacccgatttgtgacccgatcggatagaccattctcggccatcaaatctgatgtcgttcgtttaaggggttttgttccattgttaactctttatcaatttccaatctccatttacttcaactaatataaaataacagtcaaaacttgatgaacccaaaatgggtttcctccattgttcaactccttcaaacataatatgcatcaataggaaatataaaaaatagccatccaaacatatatgaacccatttaaaaaaataaatctgatatttatacaacatcaaacacattaatccgaaaaaagatattataaatttcaaatttacaataacggtttataataatttaagctctaaaatcaacaactttagctctagatattaattgttaagaaattatccatctaaggcattataattagtgactacaataatagtcatagaaaacaaaccaagatccaagtatttatttagagcattcaaaatataatattcacacatacctgcgattgatgatccatctatgtgagccattttaattccaagaatctccaattaggattaacacaaacacaagattagagtaatattagagagaagcacaatgtgaagctatcccctcttttcttcttattaccattaaccacccttttcactcaagacatatatatatgtgacacccttctaaccctaagggattatacactaattggacttaagtagttcaataatggtatcctataatttaattggccaattatagttataagagtgctctcatgtgtctctctaacataataaataattattaataatttcattacgattgttgataaatattgggcacatagttaatgattatgtttatagtattaagcctataattatattagttcacaataataattttaacatggactgggttgaagaggtcgaggttgttgagatggattactagagcttgattatcccctttcggggagcaggtttatatggaaattgccacggtggtataccaggtgaggaagaaccgaaacattgttttttggatgtagaaagttacaactacttcacattcgatatattgcatgaaacaagacattaaaaataagattgcaatgatcttacccaaattgttgaaacaagaagacagagagtggtttgaactttcgatatagttatattggtgatatcaatgtatagaagacgagacattcagatcaagagtattagtgctgttaagatgtaaagaagttttgttggattcaaagttaatacaaatactgtgaaagattgctaaaccaaattgtaaaagatggacaaataaggaaagaggttcaatcacaagtcaaagaaaattggatgcactcctcatgaaaaactgtcttgagcctaattttattcaagtaactcagtttatataaatgatcacgaagatctatgcaccaagaatggtgtcttacatctacaaaacaacttaccaatgtgagtaagtaatcaaatacatactaaaatcttcaacaaccatcctcactcaaactattttgatctaaagtctctctctaaatcgtaatctacaacagagtacaatcagaccttacatagagaaacagtgatctccaaaagaatgggaaaactgagttaaacaactaaactaactaagtttgcaaaatctactacacaataagtatctaaataaataataaaaaaatgcatactaaaactgttataaaaaccatcctaatttataatgactattattcttat

SEQ ID NO: 79955 - DNA, 2141 bp, Cannabis sativa
taatctgggttctcttttctatttcggctttgtcaatttactgtttttgattttcctctattaacatttacatttgataggaaaattggttttaatgtcaattctctccatgttgtttgattattgttcatattatatacatattattttttgtcttacgtttttttaaatacaggggtcaagcatcgggttgtattttatcaatagaccggagtggcttattgttgatcatgcatgctccgcatattcttacatatcagttcctttatatgatactcttggtttgtctctggctatttgcttagtgaattcttattgcttggtctagtcaatatatttacaagttcattttatttattttcagggcctgatgctgtgaagtacatagtaaatcatgctgctgttcaagctatattttgtgtgcctcaaacattgaatagtgtaagtcatactacttttcatcggggctgcagtgtggcaccatcctgctactaattttattgggactgttgatttatttgcgtcaatctattttctagtcatacaaatctttgtgaagtaacgtttatagccattagtactttatattgagtttaattgtcatagtttaaagaacttaaatgagaatattgcatattgacccaggtgcattaggaacagactagcagaaggtttagactgttactataatattatcacatggttttgggagaaaggcataattaacttttatcatgaactggttagcttgaaaaacgaaaaccagtttaaatttaagatctgacctttcttcttatcactatttaataattgctctcaagctccaatgacatggcttattcgtggtatttacagatattgagcttcttgtcagatattccatctgtgcgactagttgtggtatgataaatgtctcgtgtacttattttaattgtattgttaacttaatgttgatcaaaccgcttgttttactatcttccttggatatttcttttgtaaaggttgttggaggaatagatgatcaaattccatcactcccctcatcaaccggggttcaggttttatcatattcaaagttgcttagtcaggtaatttgattctctttgattcggtggagatattcttaaaattcttttaataattaattgaattgtttgtttctctgtgtatattttgcttttaggggcgcactaaccctcagcctttttgtcccccaaaacctgatgatgtagcaaccatttgctacactagtggcacaactgggaccccaaaggtaggactaaaatttatttatttatttggtcatttggtgtctatttgtgtgttgccatgaatattaagacaaagaactacctcttggccccacatcttttgatgaaattagtcgtatacctctcaaatttgaaatttagccaaggtaacataactttttctgatgtaatggtttagctaacatgtctttttttttttaaagaaataagaaaaaaaaaaaaaaacacgtttacatttaaaagaaatgaacattataataaataattctttcattaagtaaccaaccaaattccaggaaaaaaaaagtaaccaaccaaattcaaattagtaataaagcgaacaacataatttactgcaaaattttagccactataaaacaaagtctctagattattatttatttattcatcatagttcttcactggtactcaccattagaaaactcagctttatataatttgagatgcaataactcttggatacttttatcatcttgattgagaattcttttttatcagtctcaattttaatggcaaagtgttatccacacttttatgttttatccaaagatagggatattatattctttcttccttcctatttagtaagtcttgacatttgatcggcaaaagttgtgtgtttttatgacatcaaattagagcaaattgattttacatattacagtggatactaaataaaattatcattcttactagcttaatacaactaaaaactcgaagtaactaatataaaagcaattgattaaattgtttcaagatattcaaaacaactaataataatgtaatataaattttttaatcttacgatatatgtaattggattggattgtttttaattctattttgaca

SEQ ID NO: 79956 - DNA, 959 bp, Cannabis sativa
ctttgttcttaaaaaagaatttcttcgagggatgaccgaagctcataagaaggcaagaagcacgaattctcagccacaagcttgttctaaagcatggcggcatgtttgttttggcgggtttgttctaaagcatcagaaggtttaacattccaccattgctagcttttgatgagagataatcttcttccatttgctggacctgaatacaacactaacaacaataatacaatatttatttttatacaatataagggtactttgtgtggccttaacagattaattcaaagttatagttctatcaatttatttatagtatacattcatctcaatcttcaaactactttcttcaaccttgataatcatacactgtcatgaaataatgataattgaataagcttaaagcaaactgttctgcaacaatataggttgggagacatatgagctaaaacttttcgagtttctagctagctaggcaacaacttttgattaacgcgtggttcattggaacaattacatggtgaagatataacaattgtgttaagagttagaaaacagtagaaaacactaatcacaataaaaaatctataagcaaagaagaccacaaggattcttgtttttcaatgaacaagaatgaccttattggatggatacaggagtgcccactttggcatctccttcttcagatttattcccatcctttacagcaaagaagaccaaaataaccagaagtggataactcactgtagtcagtgaccaattcacaatcaattgggataagaaagaaactttgtgtgtatcaacttgccaagcaattgctgccccagcactttgtactcccttataaaacccaacatacctgtagaacaagtgaataacaataaaaaattgtgcctttgtaagattatgttgagctaatactgatagaattaattatgttgtgttacctgctcagggtttca

SEQ ID NO: 79957 - DNA, 1571 bp, Cannabis sativa
cacaaaattaaataaattgagtaaaagtaattataatgtattaaaaatattttttaataataataaataagttccacaaaataaaaattctaactacttcgtcactgacaacaattattaataatggacaggtattttttaacgtattgagcgtgttatttgaaaacattataactttattgtttaaatttaacatgtttttcaattaaacaatcttacttcaagaaagatcagtaaattcacaaaatcactacttagcaaatttaccaccaaaatggcaagtattgatactaaaattctgtggcaacgttttgttggtggtgtattatgggcttggttgttttgtggttcgtattctcaacgctgacgtgtcatgtatggggtttggagacttcaactgagtcggagctgagtcatgtgactcgggagctattggaatcggcgaggaagcccgagtttttagattggttgaaaaagattaggaggaggatccacgaaaacccggagctagcttttgaggagttcgagacgagtcaactcattagatcggagctcgattctcttggaattgggtacacatggccggtggcaacgaccggcgtggtggctcacattggaacaggagctcacccttggttcggcctaagagccgacatggatgcccttcctattcaggttttttttcttactaaatttattttattgggaataaagatttgaggtaagtgtggaactataaatgggtcagaccaaccttttcatttggggaaggtctaattttctcaattcaagttttgattaacaaactatttcattattaattatgagctatgatgataataagagtggtcccaaattaaaagtataggaaaaaggccaaacctttttacttattaatgctcaatgtcaatatgcattgtggaactttaccatttggattaggaattggttgagtgggagcataagagcaagaagaatgggaaaatgcatgcttgtggccatgatgctcatgttactatgctgcttggagccgccaaattacttcagctacatcacagaaccgaccaacttaaggtatgcaattaatcaagttttattatgctatgctatgttgtcaatcttcaatgtctcttgctttgtttgagttttaaagggaactgtgaagcttgtttttcaacctgctgaagagggtcctgctggggcttatcatgtattaaaagagggtgtacttgatgaggttcaagctatgtttggattacatgttgacccaacattggctactggttcaataggttccaggcccggtcctttcttctctggctctagtcgattttcgattgtgatagaagggaaaggtggagatgctgctatgcctcatgcatctagagatccaattcttgcagcgtcgtctgctattcttgccctgcaacagattatctcaagagaaacaaatcctcttgaggcaggggtgagtgttttgtcagtaggcatagctagtagtaaaccatgtttagaagaacaaaatttgtaattcctttgtttatactccctaggtggtatcagtgtcgttc

SEQ ID NO: 79958 - DNA, 1270 bp, Cannabis sativa
atttacatcattatgtacattctgcacagattgacaagggttacatgtcctctcacttcattaccaatcaagacaagtctactgtggaatttgacaatgctaaagtccttgtaactgatcagaagatctctgctgttaaggacatagtccctttactggaaaagactacccaattgagtgttcccttgcttattattgcagaggatatctcatcagcagtgctagaaactcttgtagtaaacaaaatgcaaggtctactgaatgttgctgttataaaatgtcctggacttggagatggaaagaaagctcttttgcaagatattgcacttatgacaggtgatcatttttttctttcatagtttcatctcaatgattagcgtttcagtattcttgatttattcataagtttgtaatgttgtgtagccataattatatcttcgcccaaagttcttatgatagttgaataatttcataatttggtcaagaacctcagttttactgatcaaataaagtatggttgggtttatgttggcactattcaatattgaattgttgttcaaggtttccaattatttcgatagattagaactcttattttgtaattttactctgcaccttctaagtttttatttctactggataggcatcaatattattttttagtacttgcttctagaaaggacaaaggagagtaaggtgagagacgagaaaccctaggagaggaagtctttcaatgcaccttcttgaaagtactattttcttactattaaggctatggtaatgaaaaagatgttctgaagtatactacagattgacctggctggaaaccattgaatttgaactatgcaccaaataaataccacattacagtctgccaaataagatgtaaattagtatgatgcttaggaatgaaataattcctcatatgacttttatgtgcctgtaaatgatattgcattgtaatgtaacataattatttatagaattcttttatgatagagcatagaaaacatcccatcctttttcattatttgctgtattaccaggtgctgattttctctctggagatcttggattgacccttgaatgtgcaacttcagatcaacttggtattgcacggaaagtgaccattactagtaattcaacaaccatagtttctgatccttctactaaagctgaaattcaggcaaggatattgcagataaaaaaggatcttgctgaaacagataatgcatacatgtcaagaaagctttctgaaagaattgccaaa

SEQ ID NO: 79959 - DNA, 4945 bp, Cannabis sativa
tgaggggtattatagggataaagcaaaagtagtcatatattgcctatgttataacatttaggtttagggatataattttaggattttttaagcatagaaaatcaaatttccctttcttttttggtggtggcgtcgttcttgcctaactgatctattttttataaggtggagatttatttgtgttagtcaaagtcataggcattaggcactaggtttcatattaagttttatatttatccaaaaaaaaatattatcatgaatataactaaaaaattaattattattattgcaattaaataattagtttttcatgacgtaaaaagattctaaaagtctaaagtaattggatcaaaaattttaaaatataagtaccttaagatattttttatataatttattattaaattaaaatgtatgagacctaatattaaaatacattaataataatttacgatttcttgtgtttagcaccttagtgtatcttagcatttttcattattaataggcatcatactataataaggtatgataattatatatttatagtaattaaattaaaatatgtaaaatttccaatggagacaccacttatattttttagcattaatatacactaacacacagatgaacaagttaaaattgatttgttctattattaaaacagaactaatattttaaaacaaaagacaaagctagtttaatcttaataataattagagtaataagcttgactaaaagatgagtaactgcttcaaattgactattcttaatgggaagatgcagagaagtttctttatgcactgttacatcttggagactctgaggacaaactaatagcatttctttgacaaggtttggccatcctctgctggctgcaaaatgcaaaggagtccacttatttcttccttctattctgcaaagtccttggtcaaccctcaaaagctccctcacaatctccaaatgcccatttgcagaagctatgtgaattggactgaaaccatcctcattcacttgcttcacaaattctggttttagccttacaatctccctgacaaagtccacgtggcccgccgatgaggcgacatgtaagggattgtctgatgagaaaagagcatttgtgtggagaatgagagggctctcttgaagcaattggtgtaacaacatggtacttcctgctcgacaagcctccaataaccttatgtccattatattatgtgtatgtgattacaactaatgtgtttttttgtttttctgtaatatgtcgctagaggtaaattttaagacttcaattaggttaaaactgagggatatctttgtaaagagggaacttaaaactcaatatattatatattagtaataactaggttttggttttggtattgtcataaaaaaataaagttttagtataaatcagcatgttgaacaaatatttttaaattcattattatgtagctttatctatataaatatatatatattcatggtctccactgagagggattggtgtatttattacaataatcttggttgaccttaccttaggatatggtacataactacaccttaattttttattttagttttgatcaataactacaattttcatgttttaataattattaatagatagttttctctgcatacgaaactacaccttacagaattttattggcattaaaaaacatcattttgtgtgtgtgtgtgtatgctgcaaagggaagaagggggctaagttcatggacagaactataactatgactatgtcaaaagaaaaagagagttacatattaaaatatgtattgaatttttattgtacaatagctatgtatttataatgtatattttagtcttaatgaattaaattgacaaaactgaaggagactaagtcctttatatattaggaacttagccattacaagtaattgactgccaactaatcctaattagactatgatagttagaaataactatcaattaccaacaataataacaatcatctcacagatttttatctttgttgtcattagtgttggcctcatggtagtgactacgccggttctataattccaatttaatctcaaaatttattgaactttattgctatcactactttagtaagtatatcagatctgttgtcctttgatgctaccttctaaagctttacttcgccttctgcaagtatgtctctgatgaagtgcagtcaaacatcaatacgcttggttcttgcttaaatggatggaacttttaactatcacatgaaattgtgatacatatctgatcaatgtccattctcttgctcatacccttaagccagattacttcctttattgcttttgtacaaggaatatactctactttagtggtggacaaagctattatagattttaggttagctttccaacttattgcatgctggtttaggataagaagttaaccagtttaagacctgcgaacattccctgcagaatctgagtcaacatagtcatgtatttcttgcttaggtgatcatgatttatacatgagattcatgtttgatgttcctttgaggtatctcataacccacttactgcattctaatgtttttgccctggatttcccataaacctgctaactacacttaagttgtggcacaaatcaagcctagtgcatactttaaagtacatgaggcttcccactagattaatgtaggaatcgactccatttgctttaattctttatttgtggaaggtgattgagcattggacgatttaaaatgttgtgctaaaggtgtactgactggtttgcatctaaaaactaaacctttgcagtacctttaagatgtagccactttgagacagggccaggctctttttttttcttatctcttagtatctcaattcctaaaattttcttggttgcaccaagatctttcatttcaaattcagagcttaataattttttatattcttgattttctcactgtgattgctagcaattaacatatcatctacatagagaagtagatacaccacaaacttgacatttgtgcttttaacataaacacaacagtcatagacactctttttgaatctagatttggtgatgtactcatcaaatctcttgtatcactatctaggagattgtttgagaccataaattgatattttaagcaagcatacagtcttttttctcctttacctcataacctccaagctatttcatgtgaattttctcatccaatccccatgaaaaaaatgttattttcacatctattttctccaattctaagtcatttacagttgttaaagctaataaaatttgaattgaggcgtggctcactactggtgaaaagattttagtatagtctacaccctctttctatgtaagctcccttgacaactgcctagccttgaatctagttgagtcacaccctggaattgaatctttgtgcctgtaaacccacttgcagttgattatccttttgtctttaggttttcttaccaaaatccaagttttattcttaactagtgaatctattttaattgtacatttcagttccccacttgccactgtcagctgatttcatagcctccttgtatgatctaggttcattatcactcacctctgcaatatttatagcaaaatgaacaagacatgcataaccaaatcttcttggagcttttgacactctcttgactctgtctctgaccagctggtagtgctgcaatactatctcagtatcttcattttcatcttctttagcctgctcatccatagtgtgagtaccaatttcctcatcatttcctgtcccttgatgttgcatctatttgttagaacttgaaccaagttccacctcaaacctagacttgtatgaatttcgctcatttatagaactggttgctgactttaaggtgtccttatagacagaaccttcatcaaacataacatctttgctaacaaagtacttttgatggttccttgactttatgctccacatcttgttccccttgactccctttcgatagcccaagaatacacacttcctagttctttgttccaacttgtcaagcctgatttgagcatgggttatgcatccaaaagttttgagccttccatagtcagcagtgtaccttgtccatacctcaaccatggtcttgaaatttatggcggatgatgggcacctatttatcaaatgataagatgtcataacagcctctgccaaaaagtccttagagaaccctaaatggattagcaaacatccaaccctctcaaaaatagttatgttcatcctttcagtaagccattttattgagagtttctaggtactatcttatgccttgttatgccattatttctacaaaaaattgtaaattcatttgcatagaattccgaaccattatcactcctcaacttctttgtttttcttccaatttgtgtttctatcagagttctccattccttgaatgcattgaatgcaacattcttgtttttaagtatgtgaacccacacataccttgaatgatcatcaatgaaagtcaagaagtatctagctccacctcaagacattgtccttacggtccccacactgaatgaatgtaatccaaagtggatttggtattgtgtagaccagttcaaaattttaccttcattgactttccatacatgttggtcacaaaattctaaatctttatttacattctttccaactagacctctattagtcaatacttataatccctttttactcacatgaccatgtcttttgtgccataaagtaaatgaatttcgtattcctcttgaagctactgagattaagtttgagtaattaccttgcaaaatgtaaaccccattctttgcctaattttattattgaaatggattgtaaatccttttgttgataactttaggttaggaacgattatacagatttctcttctttaaacttagcctcctctcattgtttctc

SEQ ID NO: 79960 - DNA, 2507 bp, Cannabis sativa
tatcaaaaataccataaccataaggcttaaccttaacaacaataaaaatatgaaaaaaaaaaattaagtttcaacaatacaataattagtgagttttaggttggacattcacatataaatataaaagttggtatttttataatgtgcagtgcagtttgaatcgtatattaataattcaaaaccgcaaactgcaccgcattgcacggtttaaggaaaattcaaaccgcgactgcaccgcaaagaattttaaatcgcatttttttttgcggtgcagtgtggtgcaggtgatttgagcggtttgatgaacacccctaaacataacccatataaagcctgaattctagaccatcagttctggagagaaatatgtttgtatcaattagttccaaattttcttttaataaattaaaaaatagtctgtaatgaaaaaactaaaaaaaataataattttacaaatattaagtacttatgtcaagattaacagaattaaaaacaaaattgttattgataatgaatgaaatatagggggtattaatacaaaatgaacctcaatagagctcaaccaaaactaacacaacgaactaacaactaacaaaaaattaattgtgataactaactactaactgacatagtctgttatattaactaccctcaacaactcccttcaaactcaagttggaaaagctttttacattgggtttgtctcgtagaattggaaaccttgagctggaaatggctttagttaagtattttgtgatttgatcaaaggttggaacatgtctaacttcaagttccatgttcaagacttttttccgcacaaagtaaaggtcaaattcaatgttttgggttcgagcgtgcaacactggattaataattaacattaggtgctaagattgtcacaccacactataggttcaccaagaagagccacttgaagttcactaagaaaagactttatccatgtgatctcaattgtgatgcttaccaaactcatgaactctgctttaatgaatgatcttgaaaatatttattgctttttagattgccaagaaacatggtttaacccaatatagatacaaactccacttgttgatctcttaccatgtgggtcagtagcctaggttgcattacaaaaccctaccaggcctagtgtggttgatttcttgatgtgaagatcaaagtctaaattgtctgacaaatgtttaaggattctttttactgcacaccagtaagattgcagagtattgtgcataaattggcacactttattaacattgtaagctatcttaggtttagttacaatgagatattgcaagccaccaacgatagatctatagaaaagagcattttctatagaatcactgctttgtgctgataaccttagaccagaagttattggagtggaatttggtttggcatactgaatttttgttcgacacagtagatctttgagatatttggtctgagagagatgaaagccttgattagtttgagcaacttcaatgccaaggaagtacttgattccatcagtttttttagagcaaaaatgatttaagatcagagattaaagcaaagatgagagatgagttgttgcctgtgatgagaatatcatcaacataaatgagaatgagagttgtatgcccattgtgagagtttgtttgagtccataaagaactttatgagtttacagatagcttgaggttgagaggtatcttcaaaccaaggtggttgctacatataaaactcttcagataattctttattcaaaaacacattattcacttctaactggtgaatggatcatgatctagacagggctaagtgagaacaaatttgatggtgtcaggcttgaccattggactgaaggtctcttataaatcaaagccgggttgttggtgttaccctttggccacaagtctagtgatagtcagtagtcttgtgatccgtaaggagaaatatctggtaagttgtacaatctcacatctcttggggaaggtcaagtgtgataattatgagactgtgtaggtatgggactatacagttaaagatggcttaaatttattgattaatactacctatatcaacaaggtgcatcttattttctagtaagcctatcacgagagaactccacaaagcgtgcttgacctgtggtaatttctggatgggtgacgtcatggaaagttttctcaaggtatgagtggggacaaagcatgttggaagcactcgtgttagtttgtagggagagtcatcagttcaggaagcagctagagtgacgtactcatttataagagtcataaattcgtgggggaaggcccaatggaggcttgaagcggggacattacaaaatggtattaaagtcttgacccagctgaaagtgtagttaatgaggatgtcagacaccgtaaggggggtgattgtgacagtcagtattcctgtgatctgtaaagggaaatactgagtaagttgtgcaaccccacattgcttgaggatggtcaagtgtgatgatt

SEQ ID NO: 79961 - DNA, 2247 bp, Cannabis sativa
tgattgtggaactcaaaaaatgtatatattcaatcaaaaaaagaaaatctaaacctacatggatgtttgagaaaaaataagatttatagcttttgaaaacttgcatcttaattggcaccttttgcacagtgatgaaatttatggataaaaatgacattcttcattcatcaattggaataaatacatacttacattctttgtcagcaatatctatcctaatatttggtgtgactgaaatggacttgcatattttgttgggagctactccccctctctttctttctttctcctattttatgaaattttagtagcacaaagtagcgattcttccttctaagatgtccgttctttatctgattgaaatatctctgttcagttgggagcagctgctgtgaatctagttgcaggagataagcctgcagatgtgtactcaggaatagcagctaggtaacctttctctaccatctcagtgttgaaacatgcttcaagtatataattttatttttgaaaatctcatacttggattgcagggtaatagaaatcatgcgcagagatgcacaaatggatcccgcaatttacccagacgcattgcgggcaaaagtattaattaatcaggtaattttagattttcaacaaattcttatttggagttgatttcattttaattgctattacaaaattcagttctttatttaataatcttacatgagaaattagtatagagaatttaatgaatgccactgccttgtcacttgtcagacgtcttataactgatcatttaccctcatggtgtatgccatctaggtggatagaaagttggtgaagcagacagtgatgacatcagtatatggtgtcacgtacatcggtgccagagatcaaatcttgagaaggttgaaggaacgaagtgccattgcagatgatgaagagctttttggctactcttgttatgctgcgaaggtatgcatatctttctcgcctcatttctcttgtttattgttggaaatgctttgtcacaagcagaagtttgtatatttttaaggttatatttttacttacaatattacttattatgtgcagaccacattagctgctttaggtgagatgtttgaagctgcacgcggtatcatgagttggcttggggattgtgctaaagtgtgtacccaatttctcaatagtaaaagtatacatgttaaatatcttgttaaatttaatctacggtagaatcttatttcgaaacttgtaaatgaacagatcattgcatctgaaaatgaaccagtacagtggacaactcccctgggacttcctgttgtgcaaccatatcgtaaattaggaaggcagtttgtgagtgctgaaagattttctgctattagtgaaagccataaattctcttaatcctaatcttaggagtcataatcatgtcaagtcagtgaactcattatttttttttgtttaatatttcagataaaaacttccctgcagattttgacaatacaacgagaaacagaaaaggtaataagtaaaactgtatttccttttgtcagaattactttatcttacttttaaataacattactcaccagtcaactctcatgactcatgaccatccctagattgtattatttgacattcatggcactgaataactattgggttcaacatatttcagtgccaacatagtgtaataattgtataggagtttattgctcaataactataaccatggctgaaatacccatgtgttttcttttccatgacttttatcattttgagaagatcctttctccaaccgatctagctaccattttctgaaaatctttctttctacaaggtaggagtctaatgtagaaattacttcataaaatagacagacttctcatcagaattttctttatcactgttcttcttttacattaggaaatttctggtagtgtacctgttaagtaaataattttctctgaaatatgtaggcatgatctaacatgcactctcactagaggcatagaattgggtttggccccatctaaattctaattctatagcaattgataaaatgaccacaacaaaagcgaccccattgtgatctttgagttgcctgattctgttttttatttcccatagacttaggtttgcctaattagcttaatctttagttgtgtttcaattaagtatcagatttatgacttaatatttatttttgtataaacatatatttttgaaaacacagtgaatgagaaaaaggaaagagca

SEQ ID NO: 79962 - DNA, 1925 bp, Cannabis sativa
tataaaatctaagtggaaatgtttggataatagtacatggcccaaacactattgttttacttagtctaggactcaaataatttagccctgaatggaaggatgtaaaatatcacacaatttttttacttttgtcacaagttaacttgaacttgtgactaaaagtaaaaaaaaattctagtgagatttgatttaaagtctgcaactttaatgttgaggttcatagattgattaagcatgtcaattaagatagacaataaattttcttagatgaaaaaaaaaaaccctcacctcatgtataacttttgttactattgttattttaacatttatcgattaccctaaaaaaatcccagctatatttattttggtttactagcttacaagtttgaattgccaaggtgaatatgaaaagctcaattttgctccactaccaaataagttaggatgagaacggtaaacaaaattaacaagctaatttatcattgaattgttaatctttaaataaacttaaaaaaaattgaaaatataatagtccaatgttgaatcaagatcttaaccaaataataataataataaaatatgattcatattcatattccatcattcttttttattccatcaatacttatagtccatgtattccatagataatattttataataatataaacttctcattgatccttaaaatggttcaattaattaagatatccttggtccttaagtgatgcaatgcaatcctcaaacatttcactaatggacttgaattcaaatccaagactcttcactttagaggtgttgaactcgtaatatggtctctcaacttgttcaaacctgtaaaacaaaatcataagacaagtgataaaattgtaaagataatattgttagaatgtgagaaaatccaataatgttataaaataaaaaaacaacctttttggaataggcaaataaggatatctttttgataagaaagaagctaattcatcaatatccaacactgttgagctacaaaggtatcgtccattggcatttttgtgctcaaaaacaaggatgtgacaagtggcaacatcatcaatgtggacatatcccattcttccatggaattgaaatttctcagtttcacctattttttcaatagacaaaacaagaatttaatcatttgtgaaagaaaaataatgcttttccaacacccacattaatacttacaaattgtaaagtttagagggtgagtcaattgtaaagtttggaattttgtaattttctctttgatatcaatgaagagcctatgtgtttattttttaagaattgaattggatcaatagtgtatcaatttaatatacaaaccacatgattttagttagttattagttacctttaagtaggccaaggacatcagaagctgtggaacataaagtgggtggcaaactaggtccaattaagaatgaaggaagaacggtaactaaatcaattccatttttgttgcagaattcccatgctgctttctcagctaaggtttttgataacacataccaaatctatttaaacacaaacaaattcaaacataacatatgatgttacatacatgttatgttatacattgagtaacatacgcataatatatttagggatggcaacgagtagagtatgggtaaagtacgcttatttcatgatctgaccctatatataaaaagagttttacctatacccagccttgttaccctattattttttgcgggtagggtatgaggtagtaccctatcaggtatagaataccgacgggtaactctgccctaataaattttaagaagaattaaaaaaaatactaaaagaataataaagtattagaaatagtaaaggtttattattagaattttttactttaataatatttaatataattgttttttaaacatgaaattaatgta

SEQ ID NO: 79963 - DNA, 1011 bp, Cannabis sativa
atacctgaagattattgttggagaggtcaagcttggaaacaattccaagatttagagatggactagggagagtctctaaagacaagccactgaaatccactatttcaaatctctcttcttctatggaggttttcttctcctccttcttcatattactaaaactactactcttattattattcctgatcaaatccatcctcatttgcacatgttgcttttcatacatcatcttctactaaccacgaattaacaaatcctaattttccacttttcaaaaatagaaaaaaaaaaaaaaaaactctccaagaaatccaaaagaaaaaacgacagaatatgaaaagagagagagatgattttgtgtgtaattatgcttgagagagaaaataccgttaatatatattttttttcggaagatagagaaagatgaagaattgtacggagatatttgacgtggaactgacgtgggcgagttaagtacaataggccgtataaaagtatgagattagtgcctaagaaatccacgtcagccacatgagaaagtcaactgttcctcttatttcagtttgaaactcaggcagcccgcgaatctcgggggtggctgctctctctcttatatatttgcttgtcttgtcttatattttacttaaataggaccaaatccaactcccatttcaaattttattttataacaggtcggtccgtgataagttgatcttataatatacagtccaacaagtatatattattaggatagttgttgtgtatatatattatttcttaattaaaaaaaaaaaaaaaaactgtccaacaatcatttttttattaatcattgatttcgatctttacagggtaggaaaattataaatgaatttgtttcctaattttaagagcatttacaataaagagctgaaatgtagtttcttctatattttagcacattaaaaaacaaattcctactcatttcaaaaaaaaaaaaacaaaaaaaaaaactgttaacgttacatacaatgt

SEQ ID NO: 79964 - DNA, 2348 bp, Cannabis sativa
  modified_base (2163)..(2169): a, c, t, g, unknown or other
tttgtacaaattaattaattataatatatttgttttgtagaatctagtgatggctctaaggatgatcaagttttgtaacacaaagatatcttggagcatgtcatagttgaagtccattcatcttcgttagccatcttaggttcctctcaaaactcaaacccagtacttttataaatcctgggttttctactttcaataatctccttttcctctcattagcaaaaggatacaaattctctctcttctcaaggtactttctttatgttttcaatgttttaagcaattggtatttcagatatccacaaaacccttaaagccataaatagttcttgttcattcttatttacaattcatattagtatccatgtctttatccaatgcctccttttgggtaagtgcaaaaccttcaatttctagtacattcctgcaaaacccaaaaccccttttgtttcccattcctcttcataatggtggctctcgatcttcatcaatccctaaagttcattgtggcatacgagagttgagagagcgaattgattcaataaagaatatccagaagataaccgaagccatgaagcttgttgccgttgccaaggttcgcagagctcaagaagcagtcatcaatggccggcccttttctgagactcttgttgaggttctgtacgacattaatgagcggcttcagtttgaagacatagacgttcctttgacaaatgttagacccgtgaagaaagttgcccttgtatccattacaagtgaccaaggtctttgtggtggtttcaacagtggaattatcaaaaaggtcgagaatcgtatcactgatttggagaaacttggattggattacactgttgttagtgttgggaaaaagggcaactcttattttagttgcagacctaattttcatgtagataagtttattgaggcagggagttttccaactacgaaagaggctcagactattgctgacaatgttttctcgctctttctcagcgaagaagttgataaggttgagcttgtttataccaagttcttgtctttgattagatttagtcctgttattcataccttgcttcctttatcaccaaagggaaaggttgttgatgtgaatgggaatagtgttgatgcatttgaagatgagttttttaggcttacaactaagaaagggaagttgagtgtggagtgggataaagctaaaaaaggaagcaaaggattgtcccctctcatggaattcgagcaagaccctgctcatattcttgatgctatgatgcctttgtatctgaatagccaaatactaagggcattggaagaaagtaaggctagtgagcttgccgcgaggatgactgctatgactaatgcaactgataacgcagccgacttaattaagactctttcaaccgcctacaatcgcgcaagacaggcaaagattactggagagattttggaaattgttgcaggagctgaaggatttagaaatatggactaaattttgaatatcctttttcattgtattctctttgtaccatatatacaaagtcatcacttggatgattttttcttcttttttttttttgaactattttgtattcatgtcttgattgattgagtatacaccctttgaattaacttctgaaatgaaaacaaaatgatgttgttttcaatcatattcattattggtttttactttggatttcctcaattaaaatggttcagattagaataaatggtttaatgaattcttggaatggtttgttgtatgtgatatatgatcctgcagctttattatatatttcgttcttgaaattatttgatattgttcacctgttttcagtgcttcatcttttcttctctttatttttcttgttgtttctgatgaaatgtgtaaattttggtttacactgacataacatatgtgaatatttttccgataaaaattgtaaatatattttaaatctttaatttaatctcttttcaaatttagaatacatttaagaaaagaaaatatttatcaaaattagtggaaatgtatatacattgttttttgaatgccatacacattttttttttgaaagaactatatacaacgtattgaaatggagtatttaagtacggatgtactgtattgtattgtattatgttggattgtattatattgtattgtannnnnnntatttaatacaatattatgtttagtattgacttgtattcatagatcgtgtaaagttataatatatttttaatacactcgatcccaacatcaactacgggtccgggtcccgagtctcgggtctcgggttcgggtccggatccagaattaggttcgggtcagggtctgagttcgggtctag

SEQ ID NO: 79965 - DNA, 2951 bp, Cannabis sativa
tagtgataaaattaagtttatatattgctatttgtctaaatatgtgcatgtacgttttagctgtaacacacatttccttactgagtttagtagctcactcttatcaaaatacaatgtgcagactcaggtaactaaaagcctagagtgccggtggtgagtgaaactttggatgcttgtatgtgtgaactcgctgagggccatataactgcgagcggtctagggcgctctgtttatttattaagtctttgtacgaaatttctatatgattttttcatttgtatttcttcttcattcgcgtgccatctcatgctaaaaagattgtatttgcatctctcttatttgatgacttacgtctctctcttatttgatgattgtacaatatatatttctatttatctctaatttaaatctacatttttatatttttctctcatttgaaggtttttctatgaaatttttagttttcagttttaagcatttcttaatcaatgtacattcctttcgtttgtatagtttcatttgactaattagcttcgaaaagaattctacatcatcgatgtcttcaagaagtggtaagtttaacatccaatatcttgtaagtaatctttatgctatgaatgaatataacataaatattgtcatatttactatttttttattattgcagaagttgtggttcctctactttttgagagcaaatatggcactgaattgaatccaatactccataggcatatatataaaagctctacaacttctgatcattgatattggaaaagaattatactttatttttcttattaaaatacattatttataatatcaatttttattagtttctcatcttttttggatcaatccattgtaataagagtagactcgtgtaaatgtgtatggaacatattatttcttaaacaaaacttctccctattataccttaagttttggagaagtacatatatattaattactactaatagcagtctgttgtatgattttctttctcaattatatgtctccaatttacgattgggtcttttgattttagtctcctacgattatcatattagtttcatttcaaagatggtaataattttcaaatattctaaaatcatcttattattatgatcaagttagttaaaatttcatgattccatgaatcgtttacaattcataaacaaatcgttaatatatgtctattgtcatcgtcataacttatcttgacactaattttataatgtgaagaaaaaaaaaactaaaaattacttattttacaaaatgtaatagataattataattaagattttatgattatgtaacttaagttagtaattaatacttaatcatggtagaaccattgttattggacaccctagggtgtttagcgctactaaaggtgacgctttgtgatattccctaaaagttacttgataattaattgcatcaataatgatatgacaccaaaaaagttgttatatactattggtatcttttaacatttctcatcatggcagtcaagtgaagaactgacctattacactttttctcttaattacactgatgcgttaataattaattaaaaaaattaatgacaaatttatttattcagttaaaaaatatagatgttaaacttaatccttttaaaaaaaaataaaaaaaaaaaacttaactaatgacaaattcattatttcaataaaaaataatttagaatagactttaattatgtggtttattagtcttaaaataagacaataaacactcctaataattttgtaacgtaatctattgttaaaaaaatgtaaaatacaaaattaattagtaaaaagataaaccatactttaaagttatagtataataatatattaaaaaataacaaaataaaatattaaattcaaattaaatgttgtaccgaatgtcaattaggcacataaagaataatttagcaataattaagaatactcttagaaaatattaatttaacaataattttatttttattttctcattaggcataaatgttcaaatggtattgtacttaacatactatgatgctaaatacattttagtagtcgtctataaaaaccaaattaaggttaagcaagttttagaaaataattattcattttgatgatttaaagaagattaattcatgacccaaaaaacatatatatacattttatatataaaaaaaaaaaaatcaatcaatatttaattaccgcttacattttattacaaaattaattacctttcacatattgacatttgatagttaagaaacaatttattgtaaaaataattaaaacaaaatatgaaaatgaaaaataattagaaaaaatccatataaacgtgtgattccaaaatttggacaattttaattttttttttcatcagattttaattttatttagttaaaaaaaataacaaggtaaaaataaccattatgtcctctctatcatccaattaatcccattttcacacttccatcaataaacactctactcccatctagtctactaaaccctaaaccctcctccttccaaaagaggagtctactaaaccctaaccctctccttccaagaatgcagtctactaagctctctcattccaaggaacaacccaaaattcaagataacatggctaaggatatcattataatagattggcgtaaaaagatggctctaccaagcattaaaaatcagggtacagcaggtaattccattttttaaaatctccaagtacttttaaaagattaatgccattcttactaaatttgcatcatcctatttattatttttcttttttatcaatctattaatttgtatgcctaaaatgattttgcacatggaaatggatcacattttgaagcctcacatcacaatgcaattaattctaaaaacattaaaaaattaaaaaaggagggttagggtggtcgttttcccagagcatttata

SEQ ID NO: 79966 - DNA, 1520 bp, Cannabis sativa
agatcctggtaaaataatttccaacaaagtcgacccagaatgaaagcactttgaaactgagagattacctttgacaataaacctttaagcatattagccataaccttagaaataaccttataaagtacgttgcaaagagtaatgggcctcaaatcccccaaatagaaggagacttcttttttggaaccagcataagattagtagcattaagatcttgaggcattaccttagactgaaaaaagtcctgaacaagcctaaccacatctttaccaacaatgtgccaacacttctgatataacacaggtgtcatgccatcgggtccaagatatttatctagatgcatctaaaaaactgccatacgaacctcctcttccaacaccggctgaatcaaagcaacattatcctcttaatttatggagggttgaatcctatcaagaatatcatcaccatgtgaccccagggaatggaaaattttaatgaaataattaaccattaccgtgggtaaatcggtttcccaattaacccaatcccttgcttcattcttcaattggtggataaaattatttcttctctgagagctggacgcaacatgaaaatacttagtagtgcggtctccctcctttaacaaaaattacttcgatcgttgtgtccaaaaaatttctttttgatgataaatctcagcaagcagttttttcgcctcttggtaatgagaaaccgattctaaattagttcggcctttaaaaatgccaattcttgtcttacaactttgaaatttctcttacaattaagaaggtcctggagagctaccaacgtatcaacaatgttacaagacccacatgcttcccactgctcctaaataattgaaaaacaagaatcttctctaagccaagcattcttaaatcgaaacaatttcatgggagttaaaggaagctgaaaagtggggtccaaaaataaagagaaatgatctgaggtggagaaaacaagattaaatgatcgggcattcgggaataaactcatccaagccgagttggctaaggccttatccaaccgaacctcaatccaactatccgagcccctccctttttcctgagtaaattggtgacccacaagctccgtatccacaaaatcataatctaaaacaacttgctgaaaaccagcaataagccaactcggataaggattcccacctactttattagctttgttgtccaaatttctgcactctgacgtggcatcacacgatggtgacacgtgaaaacaactccaagtatctgctcgcaagatacagtccgaacaggatacctcatatgcatgctcgagataaagcaattagcaagctgcacagaacgacaaacacttagcaaatttagctttcgcattgtgagtcatcaagcgaatccctataacttaggtatcagattacagagtatggcaagctgtccaaatctcacgatcaatgtattctgtatttactatgcaatccctttttccttgttcttgagttaatacaaataacgagg

SEQ ID NO: 79967 - DNA, 1421 bp, Cannabis sativa
gtggctggtttgttctcctcccatcctggttcagtatcacctattattgttgaagctcaaacccttctttcagccctcacctggtgtcaagcggcaacttcctctaactagagtcttttttgattgccaagtcttggtaaacaaaatcaaacatatatggaaagatagatcctctttcagattggattcagactattatttcttctttgtttcactttctcaatgcctctatcgacttcatccctagagatcaaaatgttcttgcccatagggtggcgaagagagctttggaaacaaatggagaatatgtttggaattcatgtggttctaatatttcatttttttgattttgtgtccgtgttttccatttctttctctttttttagttacagatcagtttccaaaaaaaaaaaaaaagttaaccgtttgaaatttgtttttctcttcgtctggaatctaaactaaagaatagtaaaaggtgatcgagggattcttcaaggttatagctatttgctatagccatgtaatcttagattcagattagaatgcatgccaccaattaataatttttcgaaaaatcattgtctctcttgttttgctgttaggagaaattcaaatattaaggtcatcatcaattttaagctatagtttcacacactaaaactaaagtactattattatatatgtgacgaattgtgtatgcgcttttactatttttccacattataaaatgagtgaaaatgattctttaatagcactaggctccttttaaatatgaatattggtgtttcatatcattattgaagacttctaagttgtcactatcttttatgtggacttttataagctttcataatgttttatatttaataattatcacgatgcacattagtgtttttaattaagttaacattaatttgagtttatttatttattaagtatgatgtaactgccaataataataatgtatattattttgttcttatctctaaatattatctatatattaatggtaggttttcatctttcatgagtagtataaactagtatattattgtttctctcttgtattatgattctgtatactaattaagattctcatatattggtggccggcactatataataagatccaataaaagcatagatacatgctatggtaatatttactaatatatacataatgcatcgtaggtttaaagagaatcaattatcatgactcatgtgcataattatttaagggtggttaatctataatatatatggattaatatttaatggttatatttttattataaccattatagttatatttttttttgacatgtaataagaggttagtaataggtaaatattttttttttagaattaattaattataattaactattttcttagaataattaattaaatatttaaca

SEQ ID NO: 79968 - DNA, 2767 bp, Cannabis sativa
  modified_base (227)..(237): a, c, t, g, unknown or other
actaatcagattgtaaagagttttatttagggcataaaacccaataatatcttgataatgctctactacaaacagaaattaagggctagagatctgaatggaaggggttattattatttcgatgtcatcaatgtaaggatttcttaatctcttatgtttttatttcattgttttagaaaattcatttaggatgttaaattatagattataatcaaacatacatgttnnnnnnnnnnnatcctggtaaaataagttccaatagagggactctcggcttatatggcatccgagaggtactaagggattcgacacgcctcccaagataaagcattatagatgactgcctcaacatagaggacaaagtgaatctaccctacaaaagaagttatatttaagatttagcccatactattatgaaattgccttttttaatgaattctaattgacggctaatccttgtgttatcctattaaccgcctagaagataggtcttgtgtcatcaaactcctacttcagagtttaccttatgcacacattacaaacatctacacctgcaaaaaaatgctatgtggagcctataggtaatgggaagatgcaccaatcacctaagaatatcccatttcctttaccttagggaaaaatgtaacgaaaaggggattgggaattttagagaaaaagagagaactctgaaattgtaagagagcatatactctcaagtaataacaatattactcatcaatacaagtgactcgtggactacggttaattaacacctagaccatgtaaaaatactcttttctactcataattaattttcttaaaataagattaagaagttgctaaaaatctcagtcagcacatgatgataggttttccgtcaagaactaaagatacatcccccctacaattatcctattttgatcctcaatagagtgaaatatcacaataaacatctgatgagctagaagggaaacctaatcaattcttttctccttccaaatcctgtgaaagaaactttccataacatggattagagggttagccccaagcacataacagaccaatggagagttccaatacaaaatttcatcttctatatcatcaaactaaatcttgattttctcctttccactcccctcaaagttaatatgtgattataaatgcactgccatagattcatcaaaatttagacatgtgcagaaggaataacagacatactcatttttccctctgaggcacgcataaccccaattcaagtggaaattattttcaagactgctgatttctcccgaggagtgtaacttgccaaaatcttctccacctccaacgtaccttcctccacagcgtcagcacaatctagttcttcctttggatttaagaattccacggtagtaatctacccatcatttttgccattgattttgttttaagaattaggtcctctgatgaagatcccttcttctttgagttacttttctgagaacctccatttccattgcctttaatcacactctttctaggactcctccgtgtggccatagcttcagcagtgctgaaatgattgagccctagcagagaacatacatatgtctcacgtttatcatgtttattaaaagttaataaaaatattaaaaaataaaacatacatgtttacaggggtgttcgcggtgcgggttgtgcaggttgtaatattttttcaaactaaactgcatatgccttttttgtgatttttcaaatcacaaacgtaccgtgagatcttaaaactgcaaaaatgtggtgttgtgttatgagatttgagcgttttacactatcatcattatcaaccattataaaaaattcaaaaaccaatataatcaagttttaacaatacaaaaaaaaatcttattaacatcataacatatatactaatcacaaagtcattatattaaattttttttaaaaaaaaaaaaaaaaagtaatgtaatatacacatatattacatatatttatcttattatgaaaaaataaataaaaaattatattgtaataattggtaattttgtaatatatagttcggtgtggtttgaatcgcaattattaaattcaaaactgctacaaaaatgattttttgcttcaatttttaagtgacatataaatgatttgtgtcggttagggtaaccgatgtaataactgtagacgcaaataatcttattttttacttcactttgttaccgacgctaattttttttttttttgcttcatataataatcgacgccaaaagtattacacatttgtcgtcaattatataatgaagcaaaattgtttgcttcatttaataactaacgcgaactaaaataaaaaaaaaaagatctgatcgaagatggtttcagatctgacacggttcaatacaccaccccaaactcatcatcccaaaacccagccgcgtaccaccacctcgaacttgaaaaaaataccagatctattgcattgagagagaagagagatcgaaaataccttacttgtgcgacggctccgccatggcttggtgtgtgctgcaacaacgatgccaccaccccgaacctgcaaaaaaaaaaaaaaagaaatcaaaccaacattttgaaaatatatgaggaatgagagagaaagagacccctcatttatggagatgaagatggtggcaggatgcgcaccgagagaagagggtcggagagcggttggttcaaaaccaccgagagaaagacgacgggcagtgttaatggaggcttatgatttttgaagagagagaga

SEQ ID NO: 79969 - DNA, 1244 bp, Cannabis sativa
taaaagcaatattttcttcgaaacgtaaggtgaaattgaaagtgagttaaaaaaaatgatgattgggaataatagagatgggcctatgatcaaacgacagagtttgacatcataaacttttgagaaggaaaatgacagggagagatttttcattcttcaaatcaaatcccccaactcaaaccaaacgacctaaaactgccgccacacctttcggccgttggtgttttgacacgtcgtcgttaatcaacagctttttataggatgaagaaagaaccatttattattattattattattattattataaacgacatattcccaaacgtgttaaaactttcggcatgcaccatccatttcatgccgcgtggacaacgacgccgcgttttgacccaccttaaaacttgaaagacgtgcctaaccgacacttggactaacggtcaaaagctgaaaccaaccgcaccatcactcattgtcacacacacacacactcaccttctttctttcttagtttcttcaatttttattttattttttaaaaatatggttatttgattgaaacacaaacatttgtgagagcgtatacatataaatatatgtttataaaagaatagtcattgaccttattttggaagatttaatagtctttttaattaatattattgttattgccctttacctacctaccttgacaaggtctagaagatatttttgttaggggtgattattagataattctattacaaggacctttgtttcttggtaacattctaaggtagaaaatgataattgttgggtgggggcgacctactttatatatgcttggtgggaaagacatatgaactcgtgtttcttggatcctcatctactttattattattattattattattattattataaataaatttattatttttctactttaagaaagaaaaggtctcatttcaaacatatatgtatatcatttcttaaaacatatattaattaatataagcatttctatactgcttaattcgattttttttactaaaattcttaattctaaattttaaatgtcaatatgatcatcactatatagatgttttatgagatcaaggattcctagatagatatgtatttggctttctttacatttctattattatcaaatgaagaagatacatgaaatggtataatcttactctgtacatattggtttcttacgaaactcatgatgggtagaactgtctccttcctcatatcaa

SEQ ID NO: 79970 - DNA, 1206 bp, Cannabis sativa
tgattcaaagctagctgaggaaatgtggttatgaagtttatgaggtgataaagttgaaagagctgagagagagagagattgaagacggtcattggctaacgtgcgcggcatgtgtatataacatatacttttgactaattagaatttttaccatatatgtgtcaaattatgttcttattatcctatattttttggattacgaaacgacatcgtatgatttgcagactgacgtgtcgttatcacgcatgagtcaatcacgggaatgccttttcgtttcacccaccgaacggtatttttttatgattgatttaacccacgtaacacgtgttgctttgcgcatctggcgcatgttagcacttacctgaacattttatttatttattttattgaaaaggcttacctgaacatttttatatagggaaatagaaatattttttcatagacagaattttaaaaatagaaatgttaaatagaacaagacaaattaactttctttatagcaaatcaaacaaaaaaaaataatattgacaaaatttagaagcacaacctagtggtactaaaaaaaagaatcaattgtttttgtcttattaattaaataaaataatatctggctattttttaaaaaattattaaacattaggttaagcagcattattattgagagttctttcttttgctttctctatattttttttttggttggtggtcaaaaattaataattaaattaactgctcttatcgtaataatatattatctttttgttctaaattaaaaaagaaaaacaatatattctatttgacccactaatacaatttcatatattggatatgtaatgcaataacttgagaaactccaaataaatatagcaatcattgtttaaaattgattagacattgctttttctttttttttttctctttaaaaaaaaatggatattgttggtagactattttaacaatatctttctgtttgtttttttagttgtcataatttagaaaaataggataacctcaataatggcttattcaatttgcttgtttcaattaatattcaactcaagagttatcagcttatttattattattataattattattaaattcgattgacatataatttgtgttattatttatatagttaaatattattttagatttaataattattttggtttttttaatttttgagaaatttttaatattatt

SEQ ID NO: 79971 - DNA, 1659 bp, Cannabis sativa
aaaaacattgaagaacaaaaaaccaagaacaaataaatactcttcgtcaattaaactgaacttttcatttattattatgagaaaaaaatccaaaacaaaggtcagtgttctttaatttatttgtatactttcatttaataaatacttatatttcaacagactttacctctatttagaaacaggacaagttttgttttcctttttttttttcttttgaggaaacgaaacaaaaaacaacaggttttatgaaaaaattgatgctttctaagtaacaaaaatctcacgtgttgattggcacgtgctgacgcagccgccacttggctaaatgtcgtcttttaaacggtgtaccattgtcagcatggtcttgcgtgtacacgatctttttcgatttaagtaacggaacttttactttccactctcactaacctaatcaatcaccgttaaaattgtcaaaaagattcatcaaataaacggctacagattcatcaaccaatttttatacatgggacaattcgagcaccaaaatttctttcttccctttttgtccctatattaggggtaatgtgggacccaccaaatcaggtagaaggggtgatgtttggctacgttcctaagcccatgacattttgacggtcaggattgttttcggtttaatttacacatggcacaatctctaaaagccctaagccattcgggtgcagcgtgccataggaagtgcttttccatcgaattactttctcttctcttttttgcaaaaaagaattaaaaaaaatattatataaacaggctgctcctaatggatatgagtgggccccacagtaagatcgtactgtactctaaaagcgcgtacaattcagacattgacttctgcctcaaacagagacccgacccgacccatatatagtcttttttttttttttttcatcttaattaagaattgaactcatatatagcaaagaataacttcgaaatgtctctaataagtttcttttttttaaaataataaaaaagtttaagaaagatacttcattattggttaataatattaataataataataatatataatagatgttggcaagtgacgaatgacatttttaaaagagcaccgttaaaaataaaattgtattattatgtgtgataaggcccactcgcggaggagagggttgttggagacacttgagatggaatgtaggccattagtaagacatactgcgccaaagtaccacaatgaccatgacaatgagcttgggtggtgcttttcacgtattgtataaatagcgtgacccaaaacctacaatagtaatttccaccatgactcaatcacatctccattacaatattattttcctaattttttattttaatttattattacaaatattgataggtcacttttacaagaatttcatggggtcccggtttgacaatttctcaaagtcaatgctaaaggcaaagcaaaagggttgtgggttcccctagaacaaagtcgctctcttctctattctagtgcgcggtaggcttatatctacttgattattttgggaaaatttttagtttaatttttttcataacttgttacaattatttagagttatttataattttttataaaattttaaataatttatggtacttaaaataaaatttaaatatttt

SEQ ID NO: 79972 - DNA, 2201 bp, Cannabis sativa
gacacccacttttggtactcagttccaataactctttgttctagcaaatgcttcagactttgttggtaagtttgaactgaaaacttcttgcccatcaaatacggccaccattttgctaccacatatgctattgccattagctctttttcatagttttcttcttgcttcttgtcccaaggtctggctgaagtaagctattggcggctggtcttgcaatagaacggcccccaacccaatcccagatgcatcagtttctatttcgaagggcctctcaaaatttggtaaagcaaggacaggtatagaaaccatggcagacttgagtgtgttgaatgccacttcagctaggtattccacccaaattggtccttacggagctgatccatcaagggttgagcaatccgagcatagttggccacaaattttctataatatctagagagaccaaaaaacccccgtattgtttgatcgttgtgggtgtaggccaatcaagcatcactcgtattttctcggaatccacagcgaaaactcggtgagatattatatggcccaagtatgatacctctcgtttgccaaaagcacatttctttttgttgacataaagtttgtggcagcctagtatttcaaacaccatatcgagatgtgctatgtgctcctcctcaatcttgctacatatgacaatatcatcaataaagactaacacggtgctacgaagttgcgactgaaaaatgtcattcataaatgattggaacgttgttggtgcatttgtcattccaaagggtatgaccaagaattcatagtagccatcatgaattcgaaatgctgtctcggccttggccttcacaaggatttggtgataactagatttcaagtcaagcttagaaaagatgatagcaccatgtatttcatttaataatttatcaatgactagaattgggtacttatctggtattgtggcgcggttgagagctctataattgatgcaaaaccgccatgatccatcttcttcttcaccaataaaacgggaccagagaatgggttgttattgggttgtatgattccaaaaggcaacatctccttgatcactttttcaatctctgctttctgaaagtatggatggcaataaagcctcacacttatcggagttgttcccaattgcaaattaatggcgtgctcatgttgcctcgagggtggcagctcctcgggtggtgagaaaatagcctcgtgtttgaagagcaagttgccgaggtaattcgagcactcgttctctatctcagtgggggtagtagtcaccacattcagctccaacaggatgccattcttttcagccaacaaggttttgtacattgttttgagcgtgactaagtttctgccaagtgaaggatctcctttgatggtgacacattggttccctacttgaaactccattgtttgcatcttccaatctatgtgagtcatgtcgagtgtggttggccactgtagtccaagaatcaaatctgcactacctaactttattggcaggaagtcattccacacatcaaccccttgaaagtggagatgaactttcttgaacaacccttatctttcgttgtctacactacccaaggtgaccccgtaaacactgagcacaatggaaatcttcaattgcgtgacaacatcttaagaagtgaagtgtgttgctctgagatctatgaggatcaccacctccctaccttggatgactccttttagtatcatggtgttgttcgaggttagtccaaccactgattgcagcgaaacttccatgttggtattagtttcatttgattcgaactccggtgcctcgttgtttgacttgtcaccctttgaatctagtggctccgcctcacttccttgaacattaataccacattgaattcctttttcttgcaccgatggcctagcacccacttatcatcacaatggaagcataacccttcctcccttttgtgttgaacttgagttggtgtcaaactcttcctctcgccaaatggtcgttgaggaatattcaggtaggggttggagctagattatggttgcatgggctagaactgtgatgacctactcgacaatagtccggtagccttggacggttcacatgagtggtttgtcatttttcttcaatgtcttgggcaatatccatggcctcatcaattgttcttggtcgttggatctgtagttcagcc

SEQ ID NO: 79973 - DNA, 2332 bp, Cannabis sativa
aaagtggaagaaaagagaaaataaaaaaaataaatatcttaaatacccttcacaaaaaaaaaaaaaaatctatttaaaaaaataatataataattttaataaataactatttttctatccttctaattttacttctaatgtcaaacaacataaaacaaacttactattctttccattcatcatacatagtgttaaaccaaatgattggaaagactgagatatttagagcttgtttggctgtgttttcacttttcagcttttaaaattgtgctgtcaaaagtgagaatagaaaacagatttttgttattttaaaatttaattgtgcttgacataaattttttaaaattatttttagattttttttactaaaaaattaatatcttaacaccataccatgatatgaactcatccagatttgggttcgggtttagttccgggtctaggatccgagtatgcaaacaaaaatataaaatataatatattagacaaaaaaaaaattgtttttagaaaattaaaaacaacattttgatgtttttcgttttctaattttttaaaactcaattttaaaaaattattttaaaaattttttgccaaacgctcctattagtttttaaaaactgttttttaattttaaaaaacaaaaaacagtttttaagttatgaagtcaagagcctcatacttgtttgtaatgccaattttgaaattacacgaatttgaatatattagtctaatggattatgtagattgaaaattgattcttctttggtcaaaaatcacatggctcccaattgtttcaacgagggtctatcgagttttcatttattatcattaattagttccataaaaaaaaattataaacaaacaaacaaattaaaagaaaaagaaaatgttctttgattttgtttgattatatagattaaactgctccataaacgatcacaaatcttacataaaaataatgataaatctatggtttggaacataataaaaacacaaatataatcagctttagcaatttaagcttgtggggcttcttgaccaatccaatcaccatcacaacaaattaagagctatgacatagtgcttttttaaaggcataaaaacatgttccagcctaaagtcaaacctatgaattttgcagaatcatgcagagatttcagcaataagattggctgagaagaatcttttatgtgtttttttttttttttcatttaaaaaattaaagttattttactaagaaaacaattggtacccttttgggaattcaaatcacacacacatccttacactttttcaaacatgcatgagttgttcaatagtgttagtatatgaattgcacaatgaaaatttagaaaataagaagaagaaaacgagtaagtaagtagaggggtgtttggcagacaagattcttattaatgctgaccacttttgttgtcttgtttggtcaaagaccaactatatctgcaacctatttggaccatgaaataaatttatttttgtcatatgacattacccaaataacatgtgtgctcaattggtgtttcaccagctaagctttacaacatttttagtcataaaatacatttttcccaattaaatatgtatatcctttttctcactttctgtgcaagtataaatggttttaatatttaataataacaataaagtctcttaaatcttaataatatgtattagtatatttgagttgtttgcttcatatcttcagaagcggaagttatgggccagttcaaagagacttttacacgggtcagatcttagttttaagttgctaattggtcatgagaaagtgagttcagaagaaataccaaatggaaaatggaaagtttaaaatagcacataaactaatgtctgatgaatcagaaatatgggatggaagttttgaaaacatgcatggaaaattctgatatttttgaaactattgaatggattacatttttgaaaagcatctcagtagtacaaaagtaacttgtgcaaattgcttcctagttttttaaatcatttctaaaactaccatattttctcactcatatgcaaaaatggcatttatgtatactcttttttttatatatatatatttaaaagaaatactcttccatttttttttcctttgaaatcacatttatttatacttgtgacaaaattaaatacagtgtatttgtatattttcatgattttgttttgttttaatgaaaaaggacataagaatttgagcttcttcggaaatgaaacgtgtttccttttctgacttttttgtcataggcctggttgtataaaaccatataagaccaacctctcaactagttataggcat

SEQ ID NO: 79974 - DNA, 2480 bp, Cannabis sativa
  modified_base (463)..(470): a, c, t, g, unknown or other
caaaaactggtgcacctgttgttgcgaaagatgatgtggagtttcacattagcacgattgttaacattaccgaagagggaagtggtcatttggttgaggtcgtgtgctcggcttggccagaagaaatagagatcgatagtgtttcgattcgaaaacaagaaaatttgcctgctaagccttatcctggccctgtattcaagtaagaacttctgcatttgtcttttctaattaggaattgaacttatattgaagaatactttcttctttttttttttttagcgtaaataccctctttttatacagggaagttctatttgcaccttataaaattatttatttattattttttttgaaaaataaactcatcatttattaaacgagtaatttcgttaccaagctcggtaatagctcaaccggaacagtgtccaaattgaaaacgcgatcagggtgagatatagaggcnnnnnnnnaggaatgagccgctacatttgctgttctttttacaaataaaaagaaacattacgcaaagtactaagtaaatccttgcaatcactgacaactttgccaaacaagaaaagcataaccacagagctacagatagtttgcataaccgaaagacaatccgtttttaaaactacactgagccacgaatgatctttgatccaactcaacacctcccggatcccaattgttttggccaccacaggagaaatcgaaccatagaacaactttgtaccaccctctacaaaaaagccattggaatctcttgccacaaacccaacaccataggcagagttatcattaaacatagtcgcatcgacattaatttcataaaaattaaagacatcaagttaaaagaggtataatttgaagaaattgcattgtataccttttactttatttattttaatttttactttcatttttatattctttaagatatacttaattttatagatgatatcccattagagccgttaaagttaatataaattatatgctagagttaatagagagttaataaaatataataagaatttatttttgattaataataataaaaaaaatgtattcctcaatttcctccaaaaattatgggctgcgtagatttttctgggccaataacaaaataggcctgggcctgggcctgaggatgactcgtcctgttccttttcatcagaaagttccgatgattcaaaattattacagaaatattctctgaccatcgcagatgcccttttctttcatcgcaatgactgttttcctttgatatttgattttgatcgcaatgtttcgcgccagaattggctggtttggagctttgaaccattttaaacttgctaaaatggggaggccattttcaagcaatcccactacaacgagctctaccaacaaaggcggcggcgttcgcgagaagactgagtccaatttgactaagtacgacgagtcgtatcggcaactagacaatcttgacttcatgaccgccgctaagatcctctttactgaacctcccaagagaaagaaatttgggtattttctgtagcctcaaaatctcttcttcaatggttagttttacatcttgtgtggtctcgtttgattgttttgttctcacaggcattttgtcgaacacatttatgtttgttttaggtttcattaaaaaacactgggatagtactttagaataaggtagttaacttaggaattgttcaaaattctgaaattagcagcatgacagcaaaaattgataccttagcataaattcatgatgtttattgggggtgatatgacaacaaaacataagttttagtacaagttcatgtttttcatactttgattttctttgttctgtggtgtatttgacatgttttgttgcttattaatatttttgtcaggttagattttcacctagtacaactcttctttgtcttgatgccttcattgggtattactaaatttttaattttcatgcagataatctattattatctattgattttgcgactcttatctaaattacattatttcatgtatcacagctgtatatttagttgctcagtatgctcgttatgaaataagaagaatggaacaggtgactaaattttggtttttattacttatctgtaaattttgttcaatttgtgaattttccaactccaaagaaccaatatcctccttaatgttgatctctcagtttattttataattactttctcaggaacttgagcaaaagaagaaaaaggaagatgaaaagaaagcaaaagaacttgaattgaaagctattgaagaaaaagaaacaggtaatcctgagttgagggaagtgaaaacaaggctagataaactcgaggaatccctcaaaaaaattgtggttgagtcaaaacagccaagcaacagtgaagggttgaagaacaatgaaagagatgatgagggaaaagatactgcagaaactgaggcaagtagtggcaagagcacctccgaatcaa

SEQ ID NO: 79975 - DNA, 2131 bp, Cannabis sativa
tttgtcttttatttatccttcccttgcaggtgatgatgttaaattgaaaaaaccagatccttctatttatttgacagctgctgaggtaattaatttagtatctctttttcttgtcttttcattaaaacttaatttttttaaagaaatttatcatcaaaattgaaatttgtttccttgtttttttttttttttctgcagaggttagatgtacaaggaatagaatgtctagttgtggaagacagtgtcattggcttacaggtagatcttatttctggagctattcacttcattatatgcataagatattcgcagattcaaaaatataaataaaaaaaaattcaaataagtggaagaaaactatgcttatacagttttctcttttcaatacaagcaaaatacatccaacactgataaagaattccatagtctttttaatatagccaaatcccaacaatttcaccctgcatttaagtgctgtaccaataatacataattttttaatcaagttcaaatccattaatatgtttataccttaaataaagttaccctctttaggcagcaacaggtgctgggatgccatgtgtaattacctatacatcttcaacagctgaccaggtacggctctttcctctatagctattggtgaccctaaagaaaataaaagatttagttgaatgtgatagaagtaactactatccacaccaacgcataacaagatagataagttctcttacttcgatttttacattgtgatcactttaggattttaatgatgcaatagcaaaatatcctgacttgagcaatgtgaggtatgaagtcacaaacttgactttaatggtaacacgttattttgttagaccaatcaattaatttcgttatacattttttttttatgtcatctgtgcagattaaaagacttggaacaattacatcaaaaagttgccactaccaaatagaaaatttgttatctttttatttatttttggaattgcatgattttcttatttggatttttcttggaaagtattgctatagagatgccttggcaatttcctttgattgattgactgaaatgattttgttgtaaagttggcaaaattaaattcaatacgaaagaaagcctgtgtaccaaatgagcaaaaggcaaatgtggaaccaatgcttgagggtgtatagggatcatcaagtataaatgagagtggttatgtaattgtatcatatttttacagtacaattaggaagatgagagaacatttggaagagtaatttgttgttggagttgggtctggagtttaatttaaattatttatttatttattttttatttatctatatttcttaagttacattgttttagtaattattaattgtgagaaaaagaagttttagaatgtctacgtcccccaagttatcttgatggccaagttttgtaactttatacatatgtattttgtgtgtgagagaaaggtatgtgtgtggagaaaaagagtgagttgtgaaaggagaaatgagtgtgagtttgttgtgtggtgagagtgaagaagaagcacatggtatattgggattttggtggaaagttcgagatagaaagtgtatctaattttgaagtgataagtgaaatatattttttttgtgggtttggtagttttactagaccaagtaaatggttttgcttcgtttctttagtatttcgctaacttgaaatttattattttttctaacatgtacgtatatatgtaatttatcttatcgatttaattttcatcgactatacaatagcaactttttgcaagaaatttacaattcactataataaatgataaggctacgagaatagtagaaaatgtgtgagcactgaatttgtattgcgattgtctttttcgggtgcattgttataaggtgtgataaccagatgattagaacttatcatttatttaattaacatagaagatgaattgatttggatattattgtagtgctttcgtgctatttgtatatactaagttattgttacgtgtaatattgcacgtatattttgttatatctttagtttttatttttgttatgtgtatttttaaaaatttataaataaaatagaaaccacttattaatatttattttttttttaaaa

SEQ ID NO: 79976 - DNA, 1254 bp, Cannabis sativa
aaatgaccactctaatacaagatgagaaatattttaataaactttgtgtcaattttttttatacattttaaatttgattcattcatatcttattctcatttacattcttattcttatgtttttatttcttccaaccaaaagtgaccttatttacaaattatagcaacagaaatcatgagattaatgattttttttattattattttgaaaagaaatgtggttaatgatttggtgcagtgtaaggttcctggccaaacttggtcaaactaataaaaggtataaaattcaaccttgttgtgctatgcatataaatagtccaaaagtaccaacaaataatttgaagcaagcttgtttgtttgtactatgatgttataaaaatatgttttaatattctaacatgtaacaaattatattaacaaaatcaagtgtttggatttatttacaggcatacaaaaattacaaaagaggcaagtgttttgagatactagaccctatgctggctccaactgcagtggaagaacaagttgctatgtgtattcaattgggcttattatgtacacaaggagaaccaagtctacggcccaccatgcatcgagtggtggtgattctgtccaaaaagcccagtaatttagaagagcccactaggcccggaatgcctgggaacagatacagaaggcccagaaggcctgtgggccaggcccatacttcttcaactactactgctggctcatctggtgactcaaatacggtcacttcaggtacaaatacgaatacaaatactaatacgaatacgaacacgaccgggttttatacgactaccaatagtgcttctggtacatcttcagagccccatcatagattggacactaggggaaaacgtcctatggtctagttggttagttagtaccctctagggaaattttgcattggttttttcttttatttattatttattttataatgtatgatatatatgtgtatgtaaatgagaaatgttatagggtaatgttgttactgatgcaatttaatattgagttttttttcattaaattatagaaaattgttaaccaaatataggatgttttattatagttgtgttaggctcgtatgtaaatagctaagaaacaaggtttgaatttcctcaatattagttgcacttgtaattttgtggcttataacgtagttaagtgaatttttatccacaattgatatggttgttggaatgttgaagttttattatcggacttattttgt

SEQ ID NO: 79977 - DNA, 973 bp, Cannabis sativa
cattgttagatttacttaccggcagcctcttcatcatcacagtcgttggtacatttggtttcacacttagtatattgacctttgttttcaagagtacttaagcattctttgctacacttactgtagcaaacactgtactgggggtcaacatcggccgtggccgcctcaccttcgctcgcgtacagcgccgcgaaaaccacgaggcaaatggcgaaagcagcaaccatcttgttggccattttttatccttaattttgttcctttatatttgttatgaggataataatgtgttaatgataatataagacttgttgagatggatatgtaatatatattgaagtatttggtatttatagctaggaatagtggggtggagaaattttaggtatgtttttttggacctaaaactatgagagaattagtggttgagttattaataagacttgcttataataaggatgaaaggacttgcaaatgcctgttctatttttctgtccaccaaaatagtatcctattgtccgattcttatgctttatatttctttttattttctcaaaatagaaaatcaattatattgttttgtttgcttaacgatttgaataaaaaattaaaaattaacttagacaatgcacacatgctcataatttttttttccttatttacaatttagtctatttcatttcatgtagtagattttttaaatgtataccctttgtaaatttttattatatattacacccgtctaaatatttctaattttaactctcacgtgacatgtccagtcataaatttttgaatcaatcacaatatattaattcaagtaatggccatgaattgccttcctaccacagttatgttgcgaactaaaagggtagaggtaagtgctatttgtcctatttgtcatggtgactagggtgtacaaaaattttcgtaaatcgcccaacccgaataacccgcccaaaccaaaccgaca

SEQ ID NO: 79978 - DNA, 2113 bp, Cannabis sativa
agtagtgattagggacttacgaccggcgccttcgtcggccatacagaggacggtgaggccatcggttctcctaatgtggaatatgtatcgatcctgagagtaagagacattggaatcattattaccagggattttctcaaggatttgcctggcgatggcgccggcgttggtcgatgtggcactgaactccgccagcaccaccgatcccctagccaccaatgcgaacagtatcgccatatttaatctctttctctgttttctgtagattttttcctgagcttatagaatcagaaagaaaactctctttactttttcaaaccttcacttttccttgacgaatcatttaaaatactgcagctttataacacaatataatctgaaagatatagaaaacttgtcaattcaaaatatttcggggaaaaaagaaaaattgaagaggacatgaaaacacatgcataaatacaaacatacatctttcataaacaatggaatagttataacaaattagtaattagcttaccactaatatcaatggttaacaaataaatataattagtctaccaggcctattatttaacaatcgcattccatagcaatctttcaacttaaacaggctactctctagagttaattttcgattaattttttagcttggatgtgatcatggactccctggaatctttacatgccttgaggtgaattttcattcgtggcttctaattcagtgtcctagatcagatgtttaatatgttgccacttatcgaattatcatgaatttggacttgaccaaacagtctattagagtgtcctggtactttcaaacccattgtgggactcaattctccaatgcttacaagaacatccacataaaaagaatcaaacaagattgaattgataacgaaataaaaaactttgtccactttttatacaatttttttaccaaagagaatgaaatgaaaagaagactaactaaacattatcataatgttcattccattactgcaaaagtaaacatgaaactatataaatgcatataatggatcaaaatgaatatcagatatgcatacacttgaatatatagatatatgtaataactaaaaaatgcatcaaacccatatatttcacataacaacttcaagggtgagaagagtaaaatatacattccaagtacaatatcatgcatgtgaccattggcaatgccatactagagacccgtcagctaatttggcaatacatagctgtctgtcttcacatgaagcaagtttaaaaaggcagagaaagcagatgaagcttaaccgggctaacttaccacaaaatacatgttttgggactgaaaatgcagagcaacaatagccttgaattataggcgaagaaacaaacaaaatgctacatattgacaaacaaaaagactccatggatgaataagttcccgtacaaaaagacagaaatatgggaaacagcccatgaagatgcaccacatgtatcaaccaaaaggacctcatataaacttaatttgcaataaatgaaccaagcagaaaaaaacaactcaatatcttttgagaacataagaataatagaaaaataaaaggcgcactgaattcatatacgaaaattcctctggtgtgcaataaaaaaaggcaagatatggaaagcctgtattgatccatcataataggaggaaacacattcaaataaatgtcagatgttttgagcagtaaacatacaaagtacacaaattaatcgcctgaatcaattggtcctaaaatcatatgaaatttagggttttaaactttgaaatcctaaaactaaacatacaaatttaattttcataactcaaaattcgaaaaatcaattgaaattacctttgttagaggatctcacgcttgcgcctgaagcaatcgatctcagagaaagaatgagactgtcgccttaatcatggacggagctgaaggaactatcaactgaatttttggttggagaatgaaagggaggaagatgatggagtaggcgtgagatccttcctaattcgttgtcctaatttctatttcttttttttatttatttatttattttttttgatcgtgtaacaaacaattatttgattggggaaaga

SEQ ID NO: 79979 - DNA, 781 bp, Cannabis sativa
ttggagaagttggtggccaagtgagtttcccggcaagagggaggaagtattggagagtgagtgaaagggagtgcctgagattggagagtgtggaagccattagagatgggtctgaggttttaatggagtaaaagaagaggcactctataggtgggaatttgaatgagaaggtgtcgagaaaggtgagtgggagagagaactcggtgaccgagtcaggtgagtcagagagaaagggagtgacatgggagatatcaagtattctgatagagtttcggattggttgagccatgaggagaatgaatatagctgaaaatgaagtgtatgatatgtagttttaatatgaaaacgaaaactgaaactgaaagtttatttattattgagatcaatggcatctttcaatttggtatttactgaagatgttaacaaggactcttaacattaattatgataacgcaaccagttagcttcattaaattgcagttataaaagtgcaataaaaacaaatagcgaggagagtggagactcaaacattccatcgggaactttatgtaaatttaataagtgaattaactaattttactaaataaattttgttacactttcttaaaacatagtatttgctgtcttagcccatattattagtgattaataggcttagagtatgtgtaaagtctaggtgaagcaggagtgtgtacttttttacttgactgaagtctttgatgagcagatccgcccaactagggttttgtagctaaggcccctccctaactctataaataca

SEQ ID NO: 79980 - DNA, 1595 bp, Cannabis sativa
ggtatacatgaaaactctaggtgagggtagaattgtaacaagttcatgatttgttgcagcttgcaattaggaaaatgaaaaaaatttatgaaatgggaattacttattaggatatgtaattaaccattacaaatagttttatcttttctgtgaaccagacttattatatgctaaaaaagggtttttatccatttgtgaaaagaccccatcagtctaatgtttagtttattatctgtagtctagtgtggtaggatgggatgcatcacttgagaaaattgagcctaaggattggcctagtctcagttttccaagaagatttgtgttcctatgtaattgattgatatattgtattttttctaccacagttaaggaatttcagataattggttgtgtctttcctctgatcattatacaccatgtcatttgtaaagaggttgtaaagttaatttagaaaagaaaagaaggatttagatattgaatcatttatgatttcggcctgtgttcttgatacttctacatacatttgtattcaagttcttagagttttcatttcctaaaaattccttataaatagttcaaagtatgaaattatcagtttatcacttagtgaaatgagttgcttgcttttatttctagtactaaggaggacttcttgtcaaaagaaatatgctgcgagcaaagcaacaccattttcaatcaaatgtgaacaaagtactcaggagagtggcttggatgtatggctaggtcggttcgccatgattggctttgcagtcgctattagtgttgagatagcaacaggaaaggggcttttggaggtaaggcacacgaattgtatttttcgctctaagcttatagaagcggtttgctttcgaaattgcaaccattatttttatatcttaagagtttgttatcattacatgtttatattttgatttttgcagaatttcgggctctcgagtccactgcctactgttgcattggctgttactgcactagtgggagttctaacagcagttttcatcttccaatccgcctccaaaaattgatcatacttgatagctttgcattatttgtatagttagtaactctgaattatactttcaagttacattttgtattattaattttccctatgagcatcaatacttgagtatatacattggtgatgaaatctttaattcatttacctctctagattgattttcacttgaatttttctgttgactcttgcttaaccaatgatatggtattttggtatccacacaatgtaatatcctataatggctctagattaggagaatcttttagtttacaattcattcaggtaaggacaaaagtggaaacaattttcaaggttcaattacattagtttcactgtcaagaaaccaacagagattcggctagactcagttgatgatgttatgtgaaagcttcaattggaccagaaaaaagaaattcctgttttgaagttcaaagagaacaatgaacttactccatttctttatgtatagaattgattctattctcttgtttgcctcatccttacactaatattccagctggtgttagcttgaaaccaaagagatctccttttt

SEQ ID NO: 79981 - DNA, 706 bp, Cannabis sativa
tattcaatgcttagagatgaaatcaaagccattggttgtcctaaaaggccagctttctctatgaaaagtgaatacacatccacatcccaacaggaaagttgttcaggtaattttttgccaattactgatgtcataccgcgatgatggtcagagctctcatggcagaaagcagtatcacagaagctttttattattatttgtcgagttcatagactcatttatgttgtttgtttctgttgtatgtcctactattggaccaggtgcatagtctgttgaagttgtatagaacaagatattattctgtgaatgaaaagaaaagcttaaaaactgttagtatttaactgtttatgaaaattcattaagaaaaaaagaggttagatattcaggccaccaaatatgattctcttccatggacaatgtaagttgtggtaatgcatgtgcaattttaattctgacaatgctgacaggtagcagtaataatagccaaggttcttgaacttttctcttgctgatactattaattacatctaatgtctaacaataaaattattcacctgattttgaaaaactacctagcaaattagctatagagaggaactgtgccattttgctctatcggtcctgcattattgtttccaatttttggagaaattataattcaaaaatttaatgagacattctaaattagagtaaatactattttgga

SEQ ID NO: 79982 - DNA, 2361 bp, Cannabis sativa
  modified_base (1744)..(1744): a, c, t, g, unknown or other
ctcaaaaccaattggcaatgagtagagtagcccatgttcttatatatggctcaattctctactatttattccatgtgggacaatgtccacaataaacacaaattattattgctgaaagagaccaaattactataattaaaattactatgctcaatctttacttttatgcttaacacattgtcgttgactatttttagagtggtgctcactatttataatttaattgtaatatgtaatgatgtaataaatttttaaaaaatatatattaatacaatatcaaaaatatgtaacctaggactaaaatattcattatataatattataacacaaataatatatggatgttaatataaaaaaaaacatggctagtgtgtgagcaattagagctgccctatatatatgatatatatattatatagttatatatttaacttaataaatatttttgaacaattaatgatcaattcattattgtatatttgttaaatactaataatttcatgttcactttcacaaaataataataataataatttgatgttcacaactaaattgatatattaatttgaatggaatagtttgtttgaatgcatggtaatgtgaatttgtaaaacatataaatatatatatatatatatataaatattcataaattaattaatgcatggctttgaaattatccaatggttacttagttcacaatcacatgtttgaaaattgaaaagtaacaataaaacgacatttacgaagtggacattgcgtagggtttgtctctctgcctattagggcttccaatatgcaaatttcagagattgtctacttcacaatataccataattagtccacaatatattttttttaatgaaaaagagaattgctagtgttctcaaatgaatctagatatttgttgctagcctaaaaaaataataataattccacgttatcgggtggcttacctgaatgtcaattctttcttcgttacccactcgatgtgttacctgtaaaataaagcaaaaaattagactttactagcaagcgagaaaatccctttttatattattagtagtgcattattatatataaaaaaaaatgttcatatctattttatcattattagtaaatgtatttcactcaaggtgtttaaaaaaaatcagtgaaccaactgaggttagcttattagatcgtatatagaaggagtgtgtgtgagttgggggcaaggtgggttcgatccccatatgtataaaaataaaattcaccaaaataattaaaaattatttatgtttactttaaacaaaaattatattagctttaatatataaattaattatattatatttatatattatatagattataaaaattgtcattctctgtcagatcatacacttatgtctagagattcttgtattatattttggaatatcaattttaatcatttacagggtatctttttattttattttttaataaaaattataagatttaataattaataaatttgttcaaaacaatagaacacacttcagatgaacagtcctccagctgaagtatacgacctgtagagaaataagagtctcttgtcaagcaatgagccaacttatttgcagatcgttttacaaaacacaaatcaacaaaagatagagccataagcaaatttcgaacatcttgaataataagaccaaactgtgaaggcataaaaataccgctatgaatcgcttggacacacaccaagctatctgtttcnaatatgactctatcccacgaatgagttgcaatccaactcaaagcttctttaatgcctattatctcagcaatttcgggttgaacacaaccaatcttccccttcttgaatgcttcaactatagcaccatgacgattccgagctacacaacccatgccaaagcgcccctcttgttcaaacaaatccccattaacattaactttgatcttgtttaactcaggtgcaatccaacgctcaagattttgcccccgtcatgcagcggagacaacaaaagacccttccttccttgagcaaatttatatagatcaagcatgttcctagctgatgcaacaatatttgatgcagaccaactcttctttttctagataaattaattttgcgcgcgccaaatagcccaactcaccacaaccacttcttccatttcaccttcgtgccctctgccgaagatccccaacaaccagttgctgaatgttgcagccccagccccgacgtcgaccattctgtgatttcaagcagcttcacactccaccaacgcatgttaaatggtttttgcatgagagttacatagcgaactgtaacaccctaactatcttaggcgaattacgtgatttttaaacgta

SEQ ID NO: 79983 - DNA, 2522 bp, Cannabis sativa
agagcactgtggatgagtgacttgtagttaagagcactgtggatgagtgacttgtagttcagtaagcagggaaacaatccattaatttcaactcagcagctgtgtttgttaaagtacgaaatttactttcagtgcttaatcgagcaacaacctgttgcttctttgcagaccaagaaatgagactatcacctaagtaaaccacataacctcccacggatcttctgtcatacagttggcccaatcaatatcgaagtagctctctaatgtcgtgacagtagtaagttttagaaataatccatttgagatagctagtccccttttaatatatatatatatataattaaaataattattgattctaaaagaaaaaaaattaaaagtgatttttaaatattaatttaagtttatttttcttttttaatattagagtgtaatttcacaaggtgccaataaaatttttatcatttaaataaaattctatttttctcaaaaaataaataaataaataaataaaaattccacacctcacccgttaggcactagcataaaagtaaaggaaataataaaatataaatgtttagtattaagagactgagagctattggattggagtgctctagctaccattttgcacacacacttgtttttacatgtattttctcgtcttgcactaataactgtgcccaattttcatggatactatatattatcaagacacatgctaatcctaaagggtatttatactaaaactttttattttactttttaagctaattaacatttttgaactccgaactttgataaatcatatctcataaactttttaagctgctaaaatttttcccgaactattaatattatcagactcaagtacttacgtccaattctgttcaattttactaacatagtgattgtccatatactaaatcgcgcccctgaactttaatatgtacttagttatacccccgaattttaacatgtaccaagttgtaccccctaaactttcatctttcatttgtgttagacattcaatagtaaaattagacaaaaatcatttaatccaacaatcttaataatttgaggagagcttttaaccccttacaaaatttagaaggcataatttaatatttgtcaatgttttgagtaacaaaaatcttaaatagctttttttttttaatcattgacacacttggtgcttcaacattttcacattagacattttaaagtatgtcaccttacacattttcaatggatgcagtagatctcatagagcaagatctattagaattctccttctctaaataataacccaccaaatccttcacaacttggcgaaatcttctccggtgagtaggaaacttcgacacacttctcaccattccggtcatcctgcataggattctcccatcatgtcagatacataatcctcaagttgctatgctttaagtatcagaattttatgatgaaaagtagtactaattagttaccttctactgattccctgcatttgagcagctcttaaagcatcttcaggtgctaaactcccattttcccaagcttccatgcgttgtgtattgcttccgaaaagaaccaccttctccaagaatctcacctcgccttctactaatgctatggccttaatctgttcttttaagatcattactggattaaagaaccaatccaacagtttgtcctttggtctattcaattgggttacctcaaaattttcaagcaacaatagaccacttgaatttgattcaatggagtgtatcagaaactgcaataatgagtaacaaggcaagcctacaccaataatagccgcttcgttgctgtttttcgccttcaaccactcatagagatccgctggtgttatcacattagaatccaataattccttgcctctaatttcacaagatttcaacatgtttccccatatctgtcacatttaaaagaaatcattcattgagagaaaatagcatgatagccgaaaattttgtacacattaccaatgcagtggcataatcattgtccaaaccaaatcacaaataaatgaatattcaaagaacagaatgatttcattacaagattaaatactctgtttcataaaatgggcagtgaaatgcacactcacctgcactactttcacttcttgtatggtctctctgactgatcttgaatgagctaagcttggcacgaacattgcaggtgcttctgacgaagcagaactggataagcgtccaacagatgactgtgttcttgaaaagtttttctttcgatactggggcctggctgcaagcaatgctacaactaccattaaaggtcaaaaagaaacagataagcttcgaaagataaaatattttgttcagcgagcaattaccttgggaaaatagtcccctcctggagataaagccaatcattggtgtattcatcgaattcagcaaccatagcaatcacataagccatacctcttctgaaagatctttccttcatccacaaaagatcaaaggtttacttcacttgaa

SEQ ID NO: 79984 - DNA, 2133 bp, Cannabis sativa
ttaactttataaactgtaaaagtatatgtatgtaataacttggtggtctctttaactctgtagaagcttccatgagggtacgggtgcgggtcttggagccgaagcgaagaacgcctcgaggtcgggtgggtgaaaatacccattcttgggggaaacccgttttttccctatcacagacagattcctcttcttcttcggcggaggcggtggcacgtaacgtaccggaatctgaaactcgggtcgggtcggtgttgaacatccgggttggtcaagatgattatggtaatcttctactgccataaccatattgatgtcctgatcagcagtggtaggactaataatttccatgattgttgctgtaattagaaaattgcgattaaatattaaatatatatatacatgtattataagagagtgggtgggtgtaagagaataagacttgtcgaagaaggaaggagaagaatgtgagctgctttcttccgaagttagtggattggagagcttcgacttcaagcgttttttttcaatttgttatatatataagaaaatgaaaaacatggagatttgaattttgtttacttattattataagctcttctcagagtatttggcttgttctggaagacgcggcagatgtgatgactcattttattttatttttgcggctgtggtggggacacctcagcggtgtacgatgtctacgtgtcctgcaatcgttgagcttttcccacgtggatatacacgtggcttacgcacagcctttcgctcataataaaattggcgccaattgtctccaaaatgcgcgggaaaaatacctattactatttgtttgaatggtggcacacagatctccaataccttaatttatttagttttatttggggttagaagagattgatattatttcaaaataaaaaagtatgattggaaatctgtaatttatttactaaattttttatactggtgtggtgtcaatttatgacctatgttattcataacatataaactacactcttattacgataccaggtttttctttaaacaagatctttttcgtatatatggatttatagattccaccttacatatgcaaaatgcaagtctgtacttctacgaaaaaaattatgagaatgaatcccattgtccgttaataagtagttttttttttcatacaaaaagtaatcacattaagtttttataaaatttgcacaatacatttaaaaataaattttattattattatttacgtttttagaatttttttttaacacttttacaaatttattttagtgttatttatagtttttcaaatttgtatttacatgttttaactagttttatttttaagtaaaaatattattttctcgtagcagcaacgtcaaaataatattattttaaaataatataaaaaacaaaactttgtattgttgttaaaaagataacgttaatttcttgtagcaataacgtcaaaataacagattttcaaaaacaatgaaaaaccaacagtgtatttttatacggaaatctgtaacaaatgtaaaaagagaactgtacatctataaaaatataatttttttgtcagtgttgtatatttataaaataatccatatgcaaaataaaagaacccaataattctttatactctacttttttcttttttgagaaagaaaaaaaaaaattatatagaatcatttacaacaaaagaaaaaatggcaaagagaatttcttctaaccaaatataattattatccaacattaaaatttatttaatcaaataatgagcgattaattttgcatctcgtcaaatatgagatacaaaaatagtaaagaggtagaataattgatctgtaacatcaaatatcaactcttgttgaatcattgagagaattggcaagtatcacagaaattgtttcaaccaaatccactttctctcttttttttaaaaaaaataacaaaaccacttgaaagttcatatgtcttgcctattgtaatccatgaaacaaagatttagcttccatttcttgtaatcgaaagttccatttatacactactttatatctttaggaatataaaaatatcaaaaagagtagtctacccttaactttcagttttattggcaggccatgtctatca

SEQ ID NO: 79985 - DNA, 1419 bp, Cannabis sativa
ccaagtaacaaacataacggaaataactaccctaactgtcaactaacataacagaatgcctaataactaggagcagtaaacagagtaaatagcagtagcagagtagtgtaattcttgttatatcttcttaattttactatttcgaggataaagtgattttaaagggttggagagtgttccgtaaaaaatataaagggttaatagtaaaattgttagtattgtgtagctactacaaatatgtaatatcattctcataaatggaaaatgaaggaaatgcactaatttcacactaactcgaagaatgcatgttgaattttgacactcactttcctattgtataatttatacattagtatgcgataagactggttatttcttcacaaaattatgtttattctttttttttattatttgaaaataaattatgtttattcttgatgtattctaattggatctgattatgatgcggaaagaatccaagagaaaaataaactcagttcgaattgcgtcttcattaataaaaattaattcataaaaaaatagcattaattatagactaagtatactcttcagtccagctagtatatatatttcgactgcgttagtcctttcagcttttgatcaactaagacgaaggtatgactattaatttacttacaattatcagactttcaaacaaactactccagatggaccaaattcttacaaagtggctcaaaaaaaaagaaaaacgtctatgcacataaaatggctttcattttaacctcatcctcgtatgtgacaattctgtaataaaaaggataaatgttcaaaacaggtgtagtggcactggcacttggcaatggcaaaaaagcaaactatcgctttggctcattccaggtcttgccttcaaataactcgttcaacattcgctcaagatcttcaggtctgtatctaatgtacttttgaggatttttcccattttcaatcataggcctgccataacaaatagtgtgcaactgattagagaaggagaaaaaaaaaacgaaaaatatgaaaagaatcaaagaataaaacatgcccgaaacgtttggcaaaagatctgtatgcgggcaagaggacttcagcgacagccagcctcagagactctcgcaactcactatccggaactgtccactgggattgcctttgatgaagctcctcaaactggatgttgaaggtcttgaaccgatccttcaccatcgcccttgaaagtccactcgagttaccactgccttcgccacttccaatcaagccgccagaggaatttaggccctgaaccgtgaggcattgcagaatctgccaatcaaaattggaagcgattttggaattagagagattctctttttcacaagaaaacatgtcatgtaagacaaagacacaatgaataataggtgcatt

SEQ ID NO: 79986 - DNA, 2385 bp, Cannabis sativa
aaaatttaagtgtattataagcaacaaatattaatagcttagttggttgaggtagatggcataatgtctaaggtcatgggatcaaatctcataatactcatcttttgattttcagggccggccctgccgcacctccaccacaaccccacatttcaaatacaaacacaataaaaaaaaacttaaaacagtaaacacttgccacaatctcacatccaaatataaatatcccatcccaaaaaaaaaaaaaaactaattaaaatccacaagagaaaaatcttagaccaaaagagaaattttgaaatccagatctaggtgagagagagagagacagcttactcgacatcaggtccatcactggagaacgaccatcgaaccaccacgtgcggtgctgcccaaatttgacaatgatgaaatgagtagtgaaacgtgagatcgagaagcccattccaaggagaacacaaatctagagtctatttgtcaataggaggtaaaaaagccattggatcggagtggaatatctcagattctgtggatttcaacgaacatttagatttgattccaatgatcgtcaagctcaacttttagaggggttttattctccaatagctcatgagcttaaccgtaccgcttactgtgagaaatagtgttaaaatcacgcccaaaaattaatttagaggtttcggagccaagactttgattgggcaggcaaggctcgcatgggtgaggtgttaggcggggctcgcgtgagtgtgtcactggcgtgaaaagagatgagagagaggtcactggtgaccatggagtagattaaaaaaaaaaaaagcttggcagagatggttcgtgcgcaagcaggagaaagagtttccaaaaaaaaaagaaaaaaagaaagaggagggaaggaaagaaaaaagaaaaaataaataatttttttagtaaatttatttatttattttaaattttttgtaatttatttttatttttaaattaatttattttatttttaaatattttttaggtgggctaataatataatgtcatgtgtacattgtgtcaatgtgagcaatagtatgtgtacacatggacatccttacatgacagttaactaccaaaaatagatgaaaatggctaagtgctaataaaacatgagtttagggggttttactaccaaaaatttagaattgaaggttagttgcaataaattaggcacttataaagattatgccgcaaattactcttatccactccttatcaatgagtgcaataatctttgaatcaaggcctacaagtctatttttaatgaattttttatacaattaacatatttttaacaactcaactctctgattccataaattgttattgtatttatttatttagctagttggctctttattttgtaaatttttcatgtaaatcctaaaggttgtttgtcattgaaatttttttggtttgatatgtttatcttgtggtcaatatttattcaaattgtttgtcctaaaaaaattatcctttctcatttgtgcgttaattgcaacatttctaactccaacaagtgtcatctttctttttataaatactttatacctgagagaaaattggagttgacacatttattatgactttaaaaaataaagaaatggataaactttggtgcacacacacaactactctggagttacaactgaagtaacattaatagtaatttttgactctctactttatatttttaaaatgcctggatgtttttgcttgatttatttgtttattcaactcgataattatttttctctgcttgaattgctaagaactagcaataagctagttgagagttgtgattagtgttaaaaatacacttttatttattataaatgataaaataagttaagatttagttgatattttcatgaaattattgtaatatattttataaatgaaaatatttaattttgattcaatttatgattttcttataggaattaagttgtatttttgctgaaagaaagaaaaataagcaaagttgaaaagaaatgaagaaaaaaatgacatttttgttgaagtccaaagcaacccaacccaaaaaggtcaagcctagcccatgaagcccatcatcaattttctctcttccaaagcatgtgatgcaatgatgacaagtctaagtcatctaggtaggggtgtgcataaattgatccaattcaatgacaaccgaccgatccaattataatcgaccgtcaaacattagatatcaaattgtgatcagatcagatcgtatgttattttttattacccaattggatcggatcggatgttggatggggtgtccaaaaatctaatacatccaacatccaatcgaattaattaatattttcatttagtttgaatgaataatta

SEQ ID NO: 79987 - DNA, 1740 bp, Cannabis sativa
gcaactaaaagttaacttaagtatttataccgtaaattactcttatataatttcaagagagtctatacatatatccaaatgtattaacacttacagtgtagttaacttggtgagattagttagagccaaagggaactctccagtgagattgtttgcattaagatttctgcagacacaaacaccataatgatttcaattaagactaaattaaaattatgtaactactaatcaaatggttactttgaaaagattatgaacactcacaagtattccaagttcaccaattttccaagctcagagggaatagttccggaaaacaagttactctccatgcccctgaaaatgcatatttctcccatgaatttagccaagacaaattgaactttacagcttcttatacacaaatcaaaggagtttaaaagagacaacatacaattgtatgagagtagttatgtttcctaaatagcttggaattggtcctgataaattgtttgcactaatgcccctgcaacaacacattcatatatggtattccattaccaaaaacctgttagaatatttatatggactgacataattaagcgtgactcacacagtattattatgaattagcatacaaggataattacctaatcggtattgtataatattatcattaattgggccaaatgagatgcacataacgtctttggtcagcccattgggtcaaaagaattaattttctcatattgggcctctaggcccaattggcccataattcctcataaaagggttggagaatgaacaagagttttgttcatcaaatctctttgtgattattgatttgagcataattattggtgcttaatctttgattagtgttgtttgatgctcaatctatttctaaaaaaagcctttaaagcataatcttgaatgtgttcacaaggctaaatagaaacttacaagctttccaatttggtcaaagtccactcttttggtattgagccactaaggatgttcctgtcaaaattactacaaggcagaacaaaaagatgattattcttaactaccataatgttcaaaggcatatatatatatatatatgtatatatatatttacatacacttgtttaaggtgaggtagcttccatagtgatgatggaagctcaccatcaagatcttgtccaataaaataactgcataataagaagaatgaaatcccaagttagaaatctactagtttgcatataaaatccatgaacaaaaagaagagaggaggtttatttacatgctttggatatggcatgtattagcagagattgtacaattgcagatgacaacatttttgtactgttctgtgtgtggggtatcaatagttgtttggttactacaagggtcactgaagttccaatctttcttttttagttgttcagctatttctttaatggcttccactgcataatcaatgaaaagatgaaccctttactacccaaaagaataagaacaagacattttgtatacataattagagattcgataagctcaaatagttagacatgtggtatgcactgagggtctcgatagctcaaatagtcagacatgtgttagaatgttatctaacccgcatgcattagtaattgtagtaaaatgaaaacctgacctgttgacccttttgctttttcgacgtttgatagttcaaatagtcaaacatacctaatgtttgagattcgatagctcaaatagtcaaacatgtgttagaat

SEQ ID NO: 79988 - DNA, 1881 bp, Cannabis sativa
aaatgggggttcgggtggtaacagtggttcagttggtgtagttggtgttaaagaaaatgggggttcgggtggtaacaggggttcagttggtggagaaaataatgggacaagaggtggagctggagtaaagtcttcaggtggtggcaaatctggtgtaggcgggggaagaaagaaatccggtacctgtggtgtgggaacaataggaggtgaaggtaccaatggaactgcatcaggaggaggtgaaagtactattggaactccatcaggaggaggtgatgtccatggtagtgttggagaatctatgaatggaataggtggtggtagaaatatgggtggtggtggaggggaaggcaatgggggcgggggtgatggaaccaaaggcggtggaggtggagatgggggaagcagtggtggtgagggtgtaggcaatggaggcagtggaggcaacggtggtggggatacaggcagtggtggcggtgagggaataggcagtggaggaggaagaattactgctggtggcggcaatggtggcaatggtggtggagacaatggcggtggtgatggggaaggttgtgcaggtggaaatgggagaattggtggtggaaagataggagctggtggtggtggtgaaaggattggagttggaattgatggtggtggcagtattggaactgggggaggagtaaggatcggtggtggcagaggcagaggtggaggatttcggggtggagatggtggcctaggccttggcctaggtgttggtaaaaaagggttgtctggagaaggagaagttgaaaaaggccattggccacaagcatcaaataggtattggaataaagggtcacagcatgatcttcttcctcctcctctgcatctacttcttcctctattactacttcttcttcctctactacttctttgacttgttcctctcttttgtgattcttgtgaaccttggtggtgcttggaatgatgatgatgattccttgcttcagtgatagtttgagtgagtagaagcagaccaaaaaagatcacaactcccttcatttcttgctcatgttgtctcctcaatcatctattttttttctccatacaataaaaaatagagcaacaatagtataatataatataatagaaagccaatttactgtagtagtcttgaaaacatcacttgcagttggccataactgtgtttctttaatttcacttatgggaaacacatgaagattttgtataacaatccacttgtcaaaatgagttacaaaaatgtgtgtatatatacaaatagtcaaatacaatatgcttatacgagtaagaggaagaagagataagtttgctattttcaaagccatattatcattattatcatacgagtgtatgagttgtaataactaataagcctagtcctctccatactccatccatagtgaaaagggtatttaatgagagaatgcctagtttgaagtgccattcactttgacaaagaatggaagcaataaatgtagttagtgcttcatgtcgttaatgacatacgacactaaccttaatatctacgacatataatcgagcaaaatatattatgaatgatttaaaacaaatgtgacatgtgcattttatccttaatgtacaagtaatttcatacaaaaaatctatagtaactaactcatattagaattagacaataaagacgacttatttaattataatataataattgtagaattatattatctaatgaatgttgggaaaaggcatgcatacatgctgtaatcttagttgttatgtttttcttgtactggtatgtttttcttagttaaggtttggttgtagattactactttgctaagctatttaggaggcaaggaatgaaaaaggtgtaga

SEQ ID NO: 79989 - DNA, 1590 bp, Cannabis sativa
tgtgttcatcatttgttcagatgagtccatggcatatgctagtagaccttcttccatgcttatatttgcttactaagggaagagcaatgaacaaaaataagatgaaacaagagttattcatatcaatacctcatattcaaattttttaaacagtaccctttctcctggctttcacaacgcaaggtcttcattatctaatcagtcctcttttctattattgattcataattttacataaacataaattaatcctctattaaatatgccagagactaacggactgcgttttccccttaaacggcagaccttgccactctgatcatcccacatctattttctaacaaaacatacggtcatcttcatttttagacaaaaacaaccagaactgcaatccatgaacagccaaaacttcaagaatcaaagctttgacaatccaacaatgtcttatttccttataattttctaaaagcaaaacaaaagtacttttcgagataacaaggaaaagacaaaaaagacgaaacgaaacgaaaaacaatcacttcgatcgccaacgtagcttttttcaatcaaaagaaaaggttcaaaaaaagtactgacattagaacaaatacaaacaaaaacaaagcttacaatgccggggttttcatgggggtccctcttgtacatctcaacgtacttgcctctgatgagcaagaagcgggcatggcaatactcatggccgatcgaattcacacctaggtgaaaaacacacccgaaatactcaaacagattcttctcttcgctaccacaacttccaaaactctgctccgaaccgttctcggatccgacgctcttctccttgctcaacgtcgccggatccatggtcgttttagacctctttccccctataactcactctttccttcctctctcctcaaaacgagctgaagctgtaattgaatgtcagccaacaaaagaggaggagagagagagagagaaagaaagaaagaacgctgagacaggtgatgaggagacaagacagcactgttcaaagcttcctcgccattattttattatatttactttcaatttattatttatttatttattttattttattcagggaaattattaatttttacttaatcatcctaattggtcccttaattaattgtataaatatatgtggggtgcattttaattatcgaaacttcaaactacaaattgtccaacattactcgatttgtcaaattacacgtaccaattcgagtaggattggagtgagatgtttttgcattgcatgagttgattagtctgcacgatttacaagtttggcaattttctttaaaacaatttcaattaactttttttaattatgttaaaataaaatttacataaccattcatcttacacattttctaaaggaagatgtaaaaaattgtgttatatttaacacgaaaaataattttgtagtaaatttatattaaattttagttttgtattccaatacataattataaaattttgatgtaaaattttatctacttaatactttattaaaaaaaataaaattttataattttataattatttttattattattttaatat

SEQ ID NO: 79990 - DNA, 2335 bp, Cannabis sativa
aaaaaaataatataaattctttacgctatagttagttatactaataaaataatacaaattacataaatgtaagtaaaaaaatagtacatttattgtgatataaattttacatcattacaaatgttgtgtcaaatttaacacaaaatttgctatgtaccaaattttacataattttttggcatatcattgaagcacaatttttgttaaataagctatattttaacttttcagtactacttatttacatctacattggagatgctctaagacaccatttttaaagaggagattttattccgatgtgtggtggaaatattgccactatttcttaatgaccattgctattgagtacattgagtactggtgctcaacaatttttataggtagtgtttcataattagttaacgatattgcttaaaatttattttcttaaactacatgagactcaatacttaattacactaattataatatgacatcaacaaaaatacgaaaatcatcgtaccttttaaccattctctttcttaagatatacataattttttcaagagtgataatattataaatatttattgtggtgatcaaatcgatgcgaatatattagtatattcttcatagtatcaagttggtacttttatttttttttgataattaagttggtactttagactatgaatttgaggcttgaccaagctaatatggtgtacgtacgttttttgtttcttccattatacataattaaatatattttttaatatatacacaacacaaagtatttgtcctatcgaatgacaaaaccaagtggagttttgcaagtgtttatagctttttgccaaccctttgccactagtttaaatctttttaataacaaaatatatctagaagctagaccaaatgtcatatacatatatatatatatatatagtacagccagcaaactctgaaactcatatatttaaatacatattattttaatgaaattctatatagtctgagggtttggtaagacctaattaatagctgttcagtgctatatttaaaaaaaaaaaaattctctcaatctgttgtcattatgtgatgataatgactaatataacttatgaggtaataagtgtaggcttgggtactatgaaaaattaagaaaagtatgccacttagctttaactttattttttttccccaaactatatggtaccaatgcaaaaatggcgcatctaaaaatttaattttgagaatactagtaattcttaactaatatttgtaaatttaatattgctattaaattctattatagttaattttgagttagttgaatatatacatctttgtattgtaactatagcatataaccacatgaataaaccgtccaaactgaatagaataatgcaacagagatataagttatgatcaatatataatttatatatacaaaaacgatatatatagttgagaaggaaaataaataaatttatttattgtccttcttcttgatattataaagaagtaaaagagtaattcgggtgcacatgggagtgtgttttgactcattagaaatatgatctctgccatttcattttagtttgattccttttgtcttagcaacttgcaagaatatatatatatatagctactactttactacttggagctacctgaacatgcctgaaaaaggaaatttattataacttaattaactaacaaacacaaaaacttctcatgcgtgccctctttacagaatctatatgcatgtatatattttgtaatttgacactaggcggctatttatataaagctcaatatatatataattatatatatgctgctgtgtgagattcaccactttaactttgcggctaagcttatatattgtatatatatattatcagccaatcaaaggctttttctgaatgtgagattttctttttgagagttgaaagtgagatattactttcatttggttatattaaattacagattgtcaagatttaacttggtgcagtggttattaataataattacaatatatttataggttaaaattacttaatttttttattaaattaattattttatttagaccaaaaagaaaaggtataataaaacacgatttagtggtttgtattcacacgcaaaaatgaatttgcagcacatgcaaaagttaatgcacgaggtttatttttcattgagctccctatatatatcactattattattatttttttttgtcttaaaatgttaattatatatgtataatttcaaaattaattccaagctatccaggagacaaaatagttcagtcatcacatgcttccattttttttatataaatatatat

SEQ ID NO: 79991 - DNA, 1185 bp, Cannabis sativa
taaagttccaattgggggtttgcaaagggatgatgctttagtttggaatcatgaagcttcgggtgtcttttctgttaaatcggcttaccacctagttaatagcgcttcccttcctccttcctcttctaatctgtctttttttacatcttggtggaaaaccctttggaatttaaacctccctccaaaggttaagaatttctcttggagagtttaccaccacattctccctgtagctattaacttgtttcataggaaagccatccctcagccttgttgttccttctgtaggaatccagtagaaactgttactcatgcattgttagattgtcccagagctgctaaaatttggaaagcttccccccttaggacattctatatctctaacagatatgtggatgtaaaagaatttatgttaaatggttttgatcagctgaacaaagaaagtttgagtttattattaactattatgtgggccatttggaattctaggaataaaaaactttttgcaaattcggatatggctcctactgatgttgtagcttggactaactctttcatttcagattatcaggaagctttgtgtaatgctaacaagtacaaagcagttcacaatcagcaaccgaatgacaaggaaattacagttcctcacaactgctaccagcctaatacggatgcagctctttgtgctgagcgcagcaagttaggatttggagcagttatcaaagattggaagggtaatttggtagcaaacttagctatccctgcagctggaatcttccagcctacattggcagaagctttagctttaaaagctggactaatctggtgtcaacatatcaagatccctttggttttagtcgagacggattccaagttgctggtggacagggttcttgatcgaaagggtgatctttcagctctttcggatatggttgaagacatcaggaattctttatctcttttccctaatgttatccttcggcataccagtaaacagtttaattgtaatgctcatagtttggctcgaagggcactagggctggatgaagaattatgctggaatgttttagttccaattttgtagcttctttctctgaagctcctccgtcaaaaaaaaaaaaaaaaaattatctgagcatgaatatgtacacaacaattcaaatttatatttttaatatatatata

SEQ ID NO: 79992 - DNA, 1170 bp, Cannabis sativa
agagaagaatttagttcatttattggaaaattttttgtaagctttacctattttctttaccttccagctattataaatcatctattgggaatgctagtagtaccactaactctaagcaatgtctaccaaattaatttaatttaatttctaataaatttggataattatttttggaaggaattgatttcgttaatttcaaaataccaccattctgagttattattacttaaaatagaattgaaactaggggcatagaatgagtaggaataccaatagagtgagttgtaaattgtaattacccaagacaacaaaaataccctttgggtaatttcaaaatcttgagcacgcttattcaaattctccttctaccaaaaatctgtgactgtgagaccacacatagcattctcagtgaaaaataagaataattgcaatagaatattttcaataccaaaaatgaatttttattattattattttcatttttcttaattattataatatagattttagggaatattcagttttcccaatgcgacaaaaatgctcttggagttcgtagttctggattagaccccatcaaggtatcatctttcatatttttattaaaaagaatttagccatttatctccgtgcttatagttttaattattttaattacattcttaagtgaggtgactaatatacccctactctcgttagcagttttacaaggttgggagttgtagggagacggggtatttatgagattccatcattccatttcccatactccccttcagagcctcacagtgtccaaggaagaataacttaacgaaaacggtacaattacaaagccctccaacctaaaccacaagcgtattttagtatttttctcattattaaaaatgaaaagtaccggtcattgcacacttcaaagaatagttaagtcttaattaaatattagttaataataaactaaaactaaaacaaattgcgtgccagcgtggcactaattactcacatgttatttattttttattgaagaattttaatcaaaaatatttaaattaaactcttaattagaaataaataaatataggaatttaatttttaaccgtaataatatttacgtgatgatagcttttataagcacctgtatattaagatgccgtttggtaatatttttatttt

SEQ ID NO: 79993 - DNA, 701 bp, Cannabis sativa
agatttacaacttagttttccatttgcagcaagggggtatgatcaaggagacatggatggatgaagatccaagagaagctatactgaagtttgcagatgttgcagctaaagaacccaagttcatcgccccagcatatgcagatacacaacccgaaccagtttttgccaagtccgactcagaggatgaagaaaaataatctgactaatctgcttgtggttttctataacgacccccttggcgagataaattcagaaggctagttagagctaggataaggttgatgcctcacaccgatagccccgtcttaaaaagaagaaacacttggcatggtcaaatcgaagcttcgagtgaggaacacagaagagttttttgtctatgcttgtataattgtttgttggtaaatgccgtttctaaccgaaattttgattgagaccatgtatgtaccacttgatttggcatatttcttttaacacaataaaaatatagatgtgaagaagaggaattcagctcttttacccaattatttgacgaataatgctatattattaacaaaaaatgtatactttatgtatttaatttctattatagtatggagatttgactgtgtcaaagtgagaagagttgtcaattctaaaaatagtttggttcgtgcgtgtaaaataatgataaatgataaataaaaaataaacttacactcgaa

SEQ ID NO: 79994 - DNA, 1956 bp, Cannabis sativa
ttaatcatttaattaaataatcaaactggaaatattaaaatacggaatttcacaaatgaaatgaaaacgaggagaaatagtaaccagcataccctcgcctaggtaattataaaattgagggtttttcttaatttgttgtttttttttcctttgtataaattttctttttactaatttatatgaaaaacaaaaatcaacacggatagagcttttataaggttctctagcggacacctggctgggtatctctctagacacacatgtgcttgctatctctctttcattaggtagattacatcacaagttttccctgtcttttaaaaggacatcttttttgttgttggttttcgaatacatatcttgaaaagttgttatatatacatagagggggcagccacacatgcgatactttgttaaagcacttgagatttttgtgggacatggcaaacacatgacaggttcactactacatggtcggcaatcacgtattattgattcttcttcttattcactgatttagttattacattaaaaatttgagagataccttatattattctcatttttaaccttttcttttgattttctccaaataaatgcatgtatacactaagctcgatcacatataagtatggtatgggtaaatattattttggatcttatgttttgtaaaagttactaattaaactctctcttttgttaaataactaaatggaccatgtattttctaaaatgatactaatagaatcctaaactgatttttcaccaaaataaaatttaataataattcgatctaaaagtattatgatgaaaatgtttacattttctgtatttgttcgtgttaaaaattgtcttcaagttattatattaaaaaaattgtcaaaatttaagttcagggttttattttaccattttggaaaatacagggtccattttattatttaacaaaacagaaaatacaattggtaacttttacaaaatggtatttaccctacaagtattctaattaatacaaaggttgtctctgaaaaaaattcatggcgcaacattattgaacaacatttacatatatatctattgtgaaattttgcagaatgcaattatgaatctagaattaatagtaagaaaataataatcagggtaacaaaatgtcatcaatttatatgtctccaaaaaagaaaatcaaatagcagctttacatgaagattttacagataagctcattaatttactatctattgctaccgttaatttgtgtgtatatatatcaatatttatatcacacaattattaatttgatcatctatttacgactattatttggctatacgtacatacagacagaaggatataatgggtcagaccttggacggtaccaaggatattgacaagagataaacggtgtcgtacgtgaaaaaaaaaatgagagaattgggagtctacaaattttagacacaaactagctatgtctattattacactcatctccatgtgcctctctctctctctaaatttcatctcgtaagttaaattcaacgaaatttgagcaacaatacaaaatatacttttgatatatatataataatggtaataataatgtacagataacatttttaattcttggttagggagtccagcaatgctgcataatggtaaaaaaaaatggttgcacatgttatgctttgtggtgggaagacacacttgactgttgtgctccaccaatgtgtggattatatgttattagactcatcacatttctgcttgatcagtgagaaagtacaggattctttttaatttcttttttaacaatatacataattaacaaattatttacgaaactaacgttgcacacaaatacttacgttatcttttatcaacgtaaatgctgctgtttatatacacaaatataaattagggttaatttcacaaatgcataaaaataacaaaaatacggtt

SEQ ID NO: 79995 - DNA, 1870 bp, Cannabis sativa
agtcacccctttccataaaagaaaaacacaatacaacgcattcactttatgaagtactttcttggctaaaattattatttgagcccaataaacatgtatggtgattggggccgagttgattaatatcattctcccagcataggagagatgtcaattactccacgccctaattctttgcatcatttattctattataatctcatttttagaaactgacaatcgcgtggaattaatgggaattctcaagtgtctaagaatcttaacctcttcatcctacttaccacgacaataaatggatgatttagctgcacttgaaaataaacccgaggtttgagaaaagagtttgtgcccttcatcctactcaccatatgattgaatagtaaaacaccgtccgtaaagcaaagatgattaaatttaatatcgatgcaccgttcatgaaatttaaactcattttgttacccactttacccattattcttgacaaatattcccaagaacaaaaagcaaagcaaaggcgacatattggatctcctaattgctacaaagaaaccatacatgacaccattgaacataagactaaattgaggcattccaatgcaagtcattaccacttgaataaactctttaggaaaggcaagtaattgaaacattaaaagcacataagagtttagtagttagcttcactaattgtaagaaaaatgtgaaaatgtggaacactaatcgaacttgtataaaaatacaagtcggtctatttaagaaaaacagattgactcgaacaaaacacaacacagaaaatttcaaatctacatgcctaccttataaaatgctggttggacccctatagcaggcaagtatttaaacccatttattaattttgagaaaacaaacatatctataataagagtaaaggtgaagccatgcaatgcaatgcaaattccaatcacaaaatccatgcccaaatcttgtcggttctctcatatacatcctaataggcccaacaacactctttcaccaaatagccccaccaccccacaaaacataaaaatacactatatcttaattacacattaccaaaaaaaaaaagatattttcactcattaaaatgccttacacattttatatctctatatataatatgacagtaagcacttgctagctggaacctgtaagaaaggcaatagaataagcctaatattctcataaaagttcaaacttttaataaagacaagactagacaattatatatctatattgagagtttcacagtagcagactcaccccaccaaacactaaccaaaaccgtgtctagactccactcctgaatttggttaatgctattttgacttggcataaaatgttgctactttcctaggcccataaaattagatataataaattattattaacaactggctacagcttcacacacttggagaacaagaaggtgagtgagaatactataaacacacacacaccttccttagctacttcctcttaaattactaaaccaaactataaataccacccaacttcttatatttttaaaacattcaatttcactacttcttccctctctctttctttctctttaagtttgatattcaagtccccataagaaaaaaaaaatggtttctttttctttttcagaaagttcttttgtggtgtttctggtgttttgcatggttgttgttaatgtctcagctggtgatttgaaccaagattttaagattacatggggtgatggcagagctaatattgtcaacaatggagagcttcttactctgttgcttgataaaggttcaggctctggatttgagtcaaagaatgagtatttgtttggccaaattgatatgcaaatcaagcttgttgc

SEQ ID NO: 79996 - DNA, 2217 bp, Cannabis sativa
ttttttttaaaaaaattttctgtttagatccttggagttgttcttttccaatcaaaattcgccgaaatttatggttgttctacgctcgatctagtttcattctggctgcgtagcagactggatcgatggaggttccttcatcgtctccgttcgtgacgtgcagctgaaggtataggtcaggtggtatttttgtaatattttcaatgtgggttgtataaatgttgatagggccggcccacaataatattgtaatattttaccctttttggaatcttcctgctttttttccttaaatttaatcacttaattgggtaagatgtaagcatttcaatcaatcacctatataaaataaaagaagaaaaacgttactaatttttagaaaaattaaagtgatcaataaagaaatacttttctacttataaacttaacataatttgtaaatatgtgagatttttacttaaataaattaataaaaagatatattatttaataccacgtgagtttacacgtgcaattgtacgtgtgtaactcttagtttgattttttattttaaattttactttataattaattgtgataaaataaagaaaatgtgaaattgaaattttattttttaatataaattgaaaattgtaaaatatatattatatcatacaataataattacaaactaactgaaactggacattttaactatacacatagagtgttaatataagatgctcattatttaaatatattttacataatatttatattatttatacataatttatatattggcttatattattttgtagatgcttcaagcatcattgacagtatttgaagtgctcaactcagcatcactttcaagtagtgagataacgttgtatttggtttgatttctgccattatattcatccgctcttacttgtaagtaaatgaaaaatttactcatagtaaaaagccttgcaaccgataatatgttttgatccaattattaaaaatatcattaaaagaaaatagtaatattaatgtatgttaatgaagtgagagagtttaaataataaaatttacatttgagatgcgaataagctcttatgcggtacaatttaaaaacttttatgcatactgaagaatgttactattagtgagcctgtttagtctgttagttgagcgtgaaaccggcatctaaaagagtatatattcaaatacaaattaattaatttaagtaacaaattatgataataagatttctactaaattgaattaatattaagtcaaatatatgctttaataaaataatacacttaataggaaaagtaaaaatgggaaatacaattaattaacacgtgcaccattatgatcggtcaattccagctataaatttttggaccaacaaaaagtcatatgttatgagccacggaggctataaatcattcaaacaagtatgaaacttattttcctatttttatttgaatatttatatttttcaaataatcatttaattctttaaattgcatgaattcagggaaatgtatataatatgttcaaggattcagaaagaataatagtgggcccttttaagctccagttccccattgatgaaattatgtataagatagcaaaatttgtgtaagtatccacctaaaaaactagctatatggtttatgccttcacaaatttcagtgagtttaattttattttctatgcccctatattttctttcaagtagttatttaatattttcttaattaaaagaaaaacaaatagtgtataacattctactgtaagttttagaactagtgtaaaaccctgatatctttcttagtcgtggtcaatttatttaattctgaattcaaataaatctatgtaaactaataatttataactaacatgcaagtttcataatcaaaccataattatctgctaatttttaaattaaagttaagcggtctttacattaggtacccttcaatacttgagtttgacaaggccaaatgtggctttcatcataaataaactcagtcagttcattcatgctcctaccaatacacattgggaagctttgcgagaggttactaaggtatctaaagggcattatccatgataggcctgactgggtcagctgtattgatgataggagatcgacaagtggcaatgtcatgttcttaggctgcaatctcatatcatgatcagccaagaagcaacaagttgttgcaagatcaagcactg

SEQ ID NO: 79997 - DNA, 813 bp, Cannabis sativa
tatggagaggacaacccatggaggtgtgacctcgttgattaagccggagaggattcctatgttggctcctaagtctttagagaagctaatgaggttgagtgtcgtttggtcgtagccaaggacggacttgatgtcgtttgagtagaggccgaacatgtagcttgctccagcggtgaccatcaagaggaaggaggcaaacaccatgagccatcgcccggtgaggacttggatgaacaagctcttcatgttgattttagagagtatatagatttttttaattaatttatcaaaaaatatttatatatttattatatatgtgagagtgtgatgggtgaatatataatttgagataatctaattaaagaaaatgttgaaatttgagtcagtaatctgtactaatgatgtaatatgataaccgttaagtattaatagttggagttcataattaagcggtgaatatgaagacaatggaaaattgtactgtgtagtgtaacacaattgccccacccacaccataacccactaataaatatgatttttttagaaatttcttaccactaaggcaataggaacatgtttcttccccaaaaaaaatacaaaattagatatcatatagtaatgtagtgctataaaaagataataaaaaaatactgatggtgtcatgttgtactataaaaaaagtattgatcatattatatagtattatattgtaataaatatataaatcataccgtgttgtactataaaaaaaatacggcccatgtttaaatttgtattatgttttacttagaccgactcgttttcttataccaa

SEQ ID NO: 79998 - DNA, 1831 bp, Cannabis sativa
cccactctctgctaccattatggctgagtactcttccacaaccacgcgcggcgcgtttatcgccgctgttttcgctatgcaaggatttggaattctctccggtggtggagtcgcaatccttatctcccgtatttttcggagcttattccctgcgccgccttattcggttgatccgttaggttctactccggctcaagccgattacgtgtggagaatcatactcgcgctcggcgcgttaccggctattttgacttactactggcgtatgactctccctgaaacgccacgttacacggctttggtggctaaagatgaaaagaaggcttgtcaagacatggctaaagttctccaagtcgatataccgaacgaaaatgaaaacgacaacgatagagatacttctattgtcgtagtcgaagaaagaaacgacaagtcgtttgggctattctcgagcaagtttctcaaacgacacggattgcatcttctcggaacagctgcggcttggtttttcgtcgacgtggcttactacagtcaaaatctcttccaaaaggacattttcagcgccatcgggtggctgccggcggcgaagacgatgagcgctctcgatgagcttttcaagattggtagggctcagttcttgatagccttgtgtggtactgtccctggttactggttcaccgtcgccttgatcgatcgaatcggccggttcaaaattcaggtggtcgggttctttttcatgacggtatttatgtttgctttggctttgccttatcaccactggtcggcggccggaaaccacgtgggatttgttgtgatgtacggattgactttcttttttgccaatttcggaccgaacgcgacgactttcattgtgccggcggagattttcccggcgagattccgttcgacgtgtcacgggatttcggctgcggcgggaaaggctggggccattgttggagcttttggattcctttacgcagcgcagaaccaggacaagacgaagactgatgctgggtaccctgctgggattggaatgaagaattctctgattgtgttgggagtgattaatctgtttggattgttattcacttttcttgttccagaatctaaaggaaaatcattggaagagatgtcacgagagaatgaagcagatgatgatgttgatcctcctactagagtttaacattttttcttttctttgtatttctttaaacaccaacaattgtttataggttttgattttgttaaattcagttcaattcaatattttttttaaaaagaacgattgttaatatttcacgtgattactgattacgaaatacgagcattcatcacaccttcaatttgttgttattagggcatatttgtttttgtttatttttttaggattgtttgtcattgtagttatggtgaatagtgaaaatttaaaatttctctataatcaaaatgaatactgtgttaaataatattataattgaaaagtttaaatttgcttattaaaatacatatgtctctttaaggtatgcttgtttgtttttttgacataataaagatatattattatgtgaaattgtgaaatctttacactactttaataatacactaaatttatgagcacgaattttcatttttttttaaatgacctcctcattaaaaacttaagataataactcacttcaaaatagcaaaaatacaattagagaggcaggccattcggaaaaagagtgctagaaattatcattaaattttagtgcatgtcaaagtctaacatggatgaaagttcagggggcataatttagtgcatgtcaaagttcgaaggacatgatttggtaga

SEQ ID NO: 79999 - DNA, 1599 bp, Cannabis sativa
agagagagagagagagagaatgtatgttgttctccatttttggtcgccatccccaaactctagtcgtgttgaatatttttgttgttgaagaccatagtagtcgagagtcccctttagatacctcagaatttccttgactacctcttccagtgagcttctaaagatttgtgcatgaactgagaaactttgttaactacacaggcaatctctggcttgataaacattgcatattgtaaagctcctacaaggttgtggacagggacggacccaagtgtattagactagcaaaaatattgccttttaaaaaattaaatgtaattttttaaatttgataattatagatcaaaatcgtaaaaaaaaaaccccataaaattaaataaatctaataagaataattataatataggtataaatatttttgaatgataaataagctcccacaaagtaaaatttctaggtccgtcactgggattaggtataaatgatcacttccatatgctgagagattttcacctctagtcggtgtaggaagtcagttggcacactccattttggctctaaccagaaggtccataatatatttaatttgacataagtgcaaaccattgtccaatcttgtgacctgaatatcaagaaaatattcaagtgaacctaaatccttgagagcaaatgagacagtgagtgttggttgtggtactaaatcaagtacgtgatgaaagcatttataacgattatcatcatactacactcaagatctccatatgtacatatattaaatctcaaataaaagctaaaaggatatatttacctcttaaagcgaatcagggtatcctcaaatttttacgtaagttgtatccttaaaatggtaatgacaaacttacactgcaatcttccatatctgccaccacacacaaggattagtgtggacaaattaattaggatactctcaacacatgagcaaaactaatccttttctctttgagtgaataatgatgtaattaacctttttatgttccctaaattatacgcatatatagaattaagatataacgatatattaatttaaacaaataaaataaaataaaataatgatgtaattaacctttttaggtttcctaaattatacgcatatatttaacgatatattagttactaattctgttctaaatattattttgaatttaaaaaaattagtttaaattgaatataggaaatctcccaaccacttgagagaatatctaattaatccaaaacaaattcagtggggtccatcttatctaatgtgcatctatcactgtgtccttacacagtgtggcgccactattttcttaaccagtcaatggtgatgtctttaccttttccccaatttatttaaatgataaatttaaaataaattatttagtacaaaataaataattaatactttttgaattcaaaatatatttttctgtccttgactgttttgtaaagtggcgatccggggaccatggacttataatactaagccaaataaattagattatttattgaatcttattaactaaataatcttatttattaatttcatgattactctattataaatatagaattaaactc

SEQ ID NO: 80000 - DNA, 1647 bp, Cannabis sativa
aatataaatagacaaaagcaaaacaaagaacaaaacatgtggaagtgaatccataagtggtcttaggcttagcctagaggttcgaggaggtcaaaggttcaatctccccccaccctcttaggatagatatcaatgatgcaataaaaaaagaacccagcttcacaataactttacaggaacaagggtggtcaaaatattaatataaagaccataattttattctcaactaaagaacttacgagggagaagcatgctcgtgtttgatgaagaatagcacttttcccactagtgctacttctttgttaagaccttccagaagaagatctatagtacctcttttataagaggaatttacttaaagaaagaaagaggggtgaaagaactcagtattatgaagtaaaaaaaaaaaggaaaaagaaaaaagacaatgctcgtctaaattcactatcaatcataaagtaagagtaagggagtttactaataacggtagtcagagacgctgcaatagaagcaagtcttttagctctagcatatccctgtcaaatgaactatatcaaaaatcctcacatgcctttgaaaagaggttaattaattcgtaagagacactaaaggatattataagccttcttaatagctaaccatacaatatatcgagagtatgaaaatgataatgtaaactgttcacaccaagaataatgcttctttaacaaataactaatcctgcaatgtagtaagtggtttgcaggataatataaaactataataggacatttcagccagtatattttagggaaagaaactataaatattattttattttctaaaaaattgcaggtttaagcctcaaggcatatttttattgtgaggcaaggcataagcctcaaggcgcattgaggcgtaagcatttaattaaaataaaatttttagagtaacgaaaaataccaaagataaataatgtcttattaataccaaacataccaaaaaatgtctcataaaacaaaagcatggcatcaaatgtctaataaaataaaactcaaacttaataactataatttttgtttttagaactagaatgatattctactatcctaagaacaaatttcttctagtctagaaggaggaggaagcttctgtcattttttcattttttttctcttcttttctggttcgtgttggctattctattctaaccttaagaaagaaaatgttgttttcttttcttttttttttaattgtgtatgtttaattgcgctttttttccaagtttatttgagttttcttgggcttcttattgtgttttattgggcctttgtaaaaattaaatgttattgggctattttttagttgctgaatgaatttgggttaaacaaagccctaaagttcaggttttttaattgaggtgtgcgcctcactgtttgtactgcctcaggccatatctaaccacctcacatggctgaagcgtacgcctctcttctcccaactaaggcacacgcaataaagcgattttcttccgcctcaaatggtcaggcatgcggtttgctccaacaagatctgaggttcgagtccctcctggatggatacctacataattatagttatttacctagttgagtccctcctggttttgctccaacataactgcattca

SEQ ID NO: 80001 - DNA, 1219 bp, Cannabis sativa
taatacctgtagagggaattgaaagaataaaaggcctaactggccacgaacctccgtaagagtatcaaaaggaacggtacccctagccaagtcctccaacaaaaataccacatcggaaaatatctccaccccagctaaatccagctcagcatccacgtaggacgatcccctcgccctcacgtgacccccctctgatctcacgtgccccagcttcttccccctgtaacccaccgccacctccaactgcctatagtccaagaaataaacgtccgcgtttctaactctaaccgtcacggacacggacacgtcgactgacacgtgcggggttctgtgcacgtgcacgctcttaagcctcatccgtacgagcttgatgtctggatcggacggccagaatacgtacgcggttgcgaaaaataaggcgagaccgacggtgcagattgtgcggatgggtcttcgacggcaagggaaatagagtggcaatacgacgtagttttgggattctggtacttctggttgtgggtcttgtttggttgatgagttagccatttttgcaagttgggacgaggtcgtgtgagagtaatactataatgttttgcaatttgaatttgaggggtattatgggaaatcaaaaagaaagaggggtatgggttgcttggaattgttttttattttttgatgaagtgggttgcttggaaattgtgtgtgggtaactttggagtacacttttgttctaattgttattgttattgttactattgttttgtttattatgaaatttccaaaagttctaatagagagtaaattaacactatgattattttttttttgagagtaagggtaaaattttatttaacttgaaataatatcattccatagaaagtaaatttaatggagcagaaaactcataaaacaggattgtcttgcaatgcaatgagcaaccctatgattattagtttttaataaatatttaaatttaatttttaatagtaattatattttcaaaatttcggtacattattgtcaattgttaagtcaatgatgttattaaattttattttttatttagaacttaagtacgtacggactaataaaaaaaataatagataattatcttacactttatgtataataaaacctctatttaagaatactctattcaagaataacttctaatttgttataaaaaaatcaagtgccaatttgggtcagttataaataa

SEQ ID NO: 80002 - DNA, 4062 bp, Cannabis sativa
  modified_base (3818)..(3819): a, c, t, g, unknown or other
atacttgtgagtggatctaagatcctggtaaaatgatttccaacaaccaggcccaacgactttttttgggcataggtgcgacttggttaggattatgttttgctgttgtgattcgattttttctattgcgattagtttaatctctataacatagttttgagtgttttagtcttgtctgtgtgacagtattttattttgttttgtttcgttgtttgtacttctttgttcttcaatggttcccatcaaatcgatgttagtggttgttagtagtgcagttacgtaccttacacaatagttaatattcaatctacaaggttgaatgaacctgctctaatagtttctattattgtgtcttttaagcatatatgaaaattgagtataagtgttcttaaagttaactgtgatgcaacaatctttattttttttttttggtcaaatgatttaggaattaggcggctaactatttgtctcatttatctaattctaatcctgtttgtatctccaacagggaaatatcgtgattagattgtagattattattatagctgattgctattaataaaattacatcatttactaaaaaattaataaagtttatatttttgtaataaaaaaaaaattgacgtggtgattaaaatcacacatgattaacgaagcagcaatctacagttggcagcgacactttctcgagctaggatagttcattgtttaaccgaaaggtatgctttgccaaactatgagctgcaacattcttatcgcaagtcacataagataaaaccgttcccaaaaatttatacaataaaattataacatcctcaaataatatccctaactcattaaagaacactttttatctattgatagtttcaagagacatttgaaataaacaagtgattagataaaaactacttacaaaatgaatagatataaaaaagtaaattagcatagtaaaattgaaattaagaataaaacttaattattattttaacttattatattccaattcaaaaaaacaagcatttttaaatccaacttcagttggatacaatccaaccctgtttttctctctccgccgccgccagtaccgccgcggctccgactgttcttagagacttcaagatcttactttttttccacaatgattcataaatgtgaaatatgaatgaattttcccttctacaggctttgaggaatgaaacctcttcttctacatcattattcaagttcgaagcttcagcatcgttactcagtgaaagacctccgaacatgtataaccttattacaatcttgtgcaaatgagagaaatctgattaaaggtaagcaagttcactcatttatggtcaccaatggcttccttatcaactctcctccttcaattacaagtgttattaatatgtactcaaagtgtcaaagaatgaacgaagctgtttctgtttttaatcatccgagcgatgaagatcgtaacgttttcgcattcaatgctgtgatagctggattcattgctaatgagagatccaaagatgggtttgagttttacagaagaatgcgtgaagtgggtgttgttgttcctgataagtatacttttccttgtgtaattaaagcttgttttgattccattgaggttaggaagactcatgggttgttgtttaaacttgggttggatttggatatctttgttggtagtgctttggttaatacttacttgaaatttgggttaatggagtatgcacaacaagtgtttgtgaaaatgcctgacaaagatgttgtgttgtggaatgctatggttaatgggtatgcacagattgggtgttttgatgaagctttggagatgtttaggattatgagtagagaaggttttgttgtgccaagtagttatacagttactggggtgttgtcgattttcgcagtgacgggagatatctacaatggaagaggtgttcatggttttgtggtgaaaatggggtatgattctggtgttactgttttaaatgctttgattgatgtttatgggaaatgtaagtgtaataatgatgctttgaatatttttgagatgatgaatgagaaggatattttctcatggaactcaattatatctgttcttgaacaatgtggtgatcatgatggtacaattaggctttttgataggatgttaagggttggagttttgcctgatttggttactataactacagttcttccggcttgttctaatctagctgcgttaatgcacggtagagagattcatggatacatgattcgtaaatcgttgggaaacaatggcgattgtcaacacaagtttatcgaagatgtgttgatgaacaatgctcttatggacatgtatgcgaaatgtgggagtatgagaattgctcataagattttcgataagatgagtagtaaagacacagcttcatggaatattatgataatgggatacggtatgcatggaaatggcaatgaggcgctaaacatgtttgctcgaatgtgtgaggcgaatttcaagcctgatgaggtcacactagttggtgtactatcagcttgcaatcatgctggtttgttaagacaagggcgcaagtttttctcccaaatgacaacgaaatacagcgtggttccaaccatcgagcactatacttgtgtgattgacatgctcggtagagctgggaaacttaaggaggcatacgaaatggtactaacaatgccaatcgaggccaaccctgtcgtgtggagagccttattggcagcatgtcggcttcatggtgatgcagaccttgccaagattgctgcagaacgagtaatcgagcttgaaccagggcattgtggcagttatgttctgatatccaatatttatggagtagatggtcaatatgaagaagtatcagaagttagagaaacaatgagacaacaaaatgtgaagaaaacacctggttgtagttggattgagctcaaggaaggtgtaaatacttttgttactggtgataggggccatccagatgcccatttgatttattctgaattgaattcattaactgctaacctttgtgatcatggatatgtgccccatatctaatctaactagagctgttggttttaaaatgcaaaacaaagaaaactatgtatcaaaagagaaggctttttgatattcttacttccattgttgttacaccctttgtacagagttgagagctttgtttttgtttgtacttacaattttgacacaatgttaatgttgggagcagattttatacaatcgaaagaataggcaaaattatcagagtattcggttattgatgtatagttaggatcgtattctattgaaaaagtttactttaggaagaataaaagttattatttatgattaaaggttgtgactatttacagtgttgggatttttgacctttcttaaaaattcataaatttatcgacgtgtacgcttacaaatttttttatttgatattgtaggatttttttaaatatcacattcaactatgtgatcttttaaaggttattcgttatactcacattttccacacctaaacgtgatgagagtatattagagttagtctcacattgttaatgtgtagaaataaaataaaggttttacaaaaataatggattttgggcaaaagtataattttactgttgttgccctcattttgtccaaaatacgtggaccaaccagattatgacacgtagactgaaagggcttaacgtttagataattcaactaagtctcttcaaaccgcaaggatcaatcatagatgtgcctccccgagaaggcacgtgagtctcacatactcccggagagcaaagctacaacaaannatctccgggaggtgtcagatcctacctgaacagtcacctcgcattaaataccgcacgggagaaagcgtattgaaattgtcatatgtcttaaagtctgacggcgtaacccccttatctgcagctactactctatgattagtaagcctaagtgacagctactctatgaggaatcacattagtcaagaaggataaaggactacgtccattaaacccctacaaagcctagggattagaccatacatt

SEQ ID NO: 80003 - DNA, 1547 bp, Cannabis sativa
  modified_base (1472)..(1474): a, c, t, g, unknown or other
ctatctattttagaattcaaaaaaaaattttagtctaacttttttttataatcgagtatattgtagttatttaaaattatctgtaaattttaaaaaaattctaaatattttatagtgttgaaaataaagttcaaactattacttaccgtacatgcatgtaagaaaaaacaatactcgcatgtgtacaaactattcaaacattatttttggcatcataaaatttttttaaaattttttgaattattgatagtcttaaataattaaacgtataagatcataaaaaaaaatacactaaaaaaaactctacatgatactagaatagatagaaaatctaccgaacaacttttaaagggtgtatattttatgaccatacaattttagaatttctaattagtagtaattaagcttaaaattttgaacaaagacaagtcgggattcaaatgtaaaatatatataatgcaaacaataattatttaattaacttattttatatatagaaatgatataaaataataatgggtgggttaatatataattaagtcttaattttataatgatgatcagattaatattgttgatttataagcgcatctttttaattttcaatcatagagacagcgctgaatctacattatatgccatctttttctcttataattaattattcctttttattttaataaattttctgttacttttctcaaatctttaattaattataataatatcaatcgaaaaataaaaattataataatagggccaacctcgtggaatatatattttatatattatatattaatatacccacgagggttccacaaattatcctttccaccaacatgaatgccacctttgaattaaataaaatatatatgagcaattggaaaagaaaaacaaaatattttaatcttatggctatgacttcttttttgtttatgatttattaattgtaatcacatttataaaataatctatcttgaaatttgtttaaagagtaattaaccaaatacatttattaatgtgagtatatatatttaatttaactcattacatgtaaatattatacaccattctatttatatgtaatttaattgtaaataattaagtacaatatcttaaaattaaattatacatatgattctttttagagaaatatttatatatacacatactatttttgtttctatcagtaaaaatattttcatttttgtacttttaatacgatggaagtatatatatacatttatatacttgaatttcttttatacactatgagtattatatttttatacatgtataattgatatttaaaattataaattatttaatttttttcaaaaattagtaaaatatttattataactataatgtaaaaattaagttataggttattaatactgaaaattaagttaagaacagagatgcttttaataataagggcatacacatataatattataattttttttttnnnttgacaaagtgattaaaatcactcatgaatttacgacgcccacgtccgccaccggcgctggaacctcctcgaa

SEQ ID NO: 80004 - DNA, 1914 bp, Cannabis sativa
ttgtaataattatttcttttcaacgacaaagtatgaattcataagatcagaagatattgacctaataatacatattttactgaacaattaaattgaattatatgataattatgcatggaaaagacatacatgtttggtatggtgtttcataattaatatttatagataaatatatattaatttattagttgtttgaattgtgataattattcacaacatgaataagtggaattaagattctctatcatatggtgtctaactgattcaataaaaatagttaacatatttaatataaattaaattgattcacttatcagaattaaattagtttaacaaaatatggaacactattttttaacgaataagtggcatctgatcagctcatcacttaaccaaatcaattaggacattgctatggtttatggggcaccaaggtacatagcacttctatgacataacgttttataattggttagttgttctttataatttttattaatttaaaataagtttgactgctattaaattgtaccaataataatattatacttcataaaagtgctaagtagtatgtgtgtcatttagcattgctactaaaacaaggttttttgcttaataaagaagaaattctaaaatcttctaagtataaacaacattctaaagtcaactaattacaatatagatcacatgtccttattttgtttgataaagaaagtaatggaaacataaatacttaattttctttaattaaatacctcacttttaattaagcatactacattataataccattttattaatttttgttacaattattaattaaaaaatttagcaacaaaaatacttaatttaattaactactccacttaaaattaaattaaaaagtaaaagttgcaacaaaaatttaaaatgaagtatataccaaatttggtattaattaattaagtgattatacaatatctcttatatttttataattagtacactaaaattattagtcatttagtcaaaaataaaatattaaagtcatatttatttgaaaaacctcttaaagtgtataattataaaataagtcctaaaataatgtaaattttgcagcaatattataatttttggttttggaattttaatgacacttgagtttgagactactagaatttaatgacttttagattttttttttttttttcagaagagactctctaaaaaagcctaaagcgatattattttttggggtattaacttaaatcatgatgaacttttagttcaattgaccttcacctcaaaaaattaattttactagggatcacataaacatatataacactacataagtatagtgtatatatgtacggattaatacaatggttaatttacgcaaaaagaaaattggattatttaattttattttttttatactatgaaatataaatgatttacaatttttaaaaaatcaacaaactactaaaactagaacctatatctttatcgaaaaaaatatagattttaatttatttaatgggtggaaaataaacattattcctacaacagcagccggaccaaaacaatttctataaaattatggaaaatattctactctagggatcacttttgtctttatcgataggaaagtctctatttttagcgcttagagaaattcaaactattagtttacatgactaatttatggtgtaatcatagacatttcatgtattattatataaaaaaaataaattataattttttaaaatactaatcccttatgttattataataaaagtgttgcccccctatatatttatgtgaaaccactatgcttacaattgttaacccaaaaaataagaggacttagaatttttggccacttgcaagtgaccatatattgacacacgtcatatacattgtttgttagga

SEQ ID NO: 80005 - DNA, 1127 bp, Cannabis sativa
ttgtccgcgaaccacttgggcaatgagttgtggtgaagtgatcaccactgatagtttggatcccatccataacttgaaaatgggaccataaagcttggccaaacctgagaaatcttggtgtatgtttggagttaggaaaggaaggtatccgactaggggaagcccccgagggcctggcggcagctgtgcttccgatgatagcttttttcttgtccatccaaacaatgcaatcaaagcaaaagctgctgatgagaaaagaatgagaatgtcaaaaaggtcatacccataatatttagtgttggtgaacatggttgaatgagatagtgtattaattgtttgtactctcgatcactacctatatatagatatggaattatacgtatgcttttgttgaaagtactactttatagagtgaagactgtgacttttcttcagttctttcttatttaattttttattttgttagcgacatttttagactcctcttctgtttgattataaggagtccctaatacgaatataatatgccttcttttagcactttacggtgtctataaaaaatgctaaaagagatatcacaacacataaattatattattatttggtggtgggcatccgatccaatctaacttttttttttctcatacgatccaatccaatcagtaattgaatttagaaaatcatcatcccatcaaatgcaattagacatcaaaatccaatccaatccaattactaattgggttgaatatattttttttacttaaatattcaattatacacttatatttcaatattaacttaagaatgtaaaaaaaaaatactcaaaactaagtattaacctttatttttgtttaatactttataaacataacattaattctatcctttattaaccatttaaattttagaataactagcaattttacttctacaacttttgataatattgattctgctccttaaaatatacggcttgttaaaaatctcctactaaaattacatttatagaaatttaatcttctgttaggttccgttcttttattttgtttaaatgttgacgtatctttctaaattaataactttgccctctcagcttttacaattatcaaatcatacattctcaaaat

SEQ ID NO: 80006 - DNA, 3004 bp, Cannabis sativa
agtttgtattattgtatatatctgtttcctttagtgatttagggttttaatggtggctctgtctcatccgatttatataggtagtcaacttgaggcaaacaagaaagctatgaacatacaggtattctttaatcaagatttgggttctggatttgttttgttactgtaactattcaacttccggatcatgaacacttttttttattcgtacacataattggtaccatttttcttgtgtttggataaccaaaatagaagttggtatgtgatcttgatttaatgagggcctatgagccactgactattctaatttttgccctgaattaggtactggaaatggaatgtgtgtttttgatccacttgggtgaattgattatcttaaggatgtgttttttctctgctccttggagctgtttaactattgtttatggttatcattctaggcctgaattcttttgctgaggcttctcattttccccaacctgtacatgatgaagttatatatatctaaaagtattatagcctgtggatgtgaattcttaagaatattttcttggttctcgtatcatttcttctaatattatgatacaagaccttttttcccagcaaacaaggctattttcttgtatcatgatctcgttttttgagttattttcttatctatggctctcattggtttggttcccctgttaattcaactttttgttctttgatttcagctcctcccaagaatgggacttgctgatcagagttaacttgtcgatatccatgccgaaagttgttcactcagcaatattgaagtagttgcatgtttttgtttgttggtttttgcctatgcaatagaaattttattctaccaaaattttctcatggttcatgggttttccactgcatggctctcatgctaaatggggtttttattttttgggactaatttcaaattatgtgactacatttctgcacataatacatattatactacttgataatgaaaacattcttcatagaaatttcatgggaagaagaagtcacttgagtattccaatgtcaatgttgtagagttacaaagtttttatctttagcaaccattgattcttcattatttgatgttggacagttatctatagccatagttttgacaacatgcatgctataataatcgcttcctcttgatattgtaattaattttcgtgctaatgcattagagtagagtccattcacattaacaaaggtgatgacttgtttttgttgctgttcaatcactgctggtggttgtcattgtttcggttccttgttgcagtgcaaggtgtgcatgcagacatttgtgtgtaccacgacggaggtgaaatgtcgagaacacgctgaagcgaagcaccctaaggctgatgtgtttacttgtttcccacacctaaagaaatgatcctaagctgtagaattactgattggtaatgacactagaaacaatgctgttcttatgtaccgtgcttactactttgttatcaacaattatgaaaaaaaattgtcaaaagaaattacaaatgaagtgtgttagtaaatgatgttttttaaaactcttcatattcctcttttgctggaaagtacttcatagtttctttatcattttgccctcaagtaattctcatttgaaaatagagagctttggagattttcagccacaaaatattagattatgagaagaggtaggtttggtatgtctcataaaagaaatgcataaattcattagtgatgtggagagtttaaatgctggcaagaagatctgcaaggggttgtatgcatttatttgatcttatctatggcctggttggttgagcttttaaaagctccattttggtttgtggaacttttactgccggttggataaccagtaagattcagtttttagctctaaaaacctcagaagtcaaaattagtagcttaagggtgtttatccagttcaatccgtactattttgctcattgtacattagattcgcagtaagtacgattttcgtattttcgatccaatctaatctgcatagtagcttaaatctaatctaatctaatctgtaaaaattaggattggattggttatttttaattgattacttttttaatattgaattattttttttttgaatgaaaatcagaactttattaataactatcctccaaaactaaggatgaaaaaaaatcaggaagagtattcaaacaaaaactgttgtttccctcaaaacgagaagattgcactaacatgtgcgccaccttattagcagactgcttgacaaaattcaaggaaaaagagtttaaactattaataatagccttacaatcaaagagaacacagccataaggagagaccatgtttttattattattcaaatccgctaccatagtaaggcaatccgattcaagtatcacatcagtccatccatgatctttaatccaacttagcgcttctttgatgctcattgcttcaactaaaagaggtttgaagacaacctctttactaccacactttgctttcaccgccataccaagagaatcccgagccacacatccatagccaaaatgcctactatccaagaacactgctccgtcaacattaactttgattcgaggatacactatttttgtccaatgctcaatctcaacctgcctaggcacatggttggtaactatagaaagcttttgagcattaatccattcctcaaaatttagtttagcaaacagagtaacatcattaatgttaatcgactgcttctccttccaaaccagttggtttcggtggtgccaaatcgacctacacatcataaccacttgagtataatgtttctaacaataatattaaaacaatattttctttacataactaattaactacaaaataaagtaaattatattgttttatgtttctaacaataagttaaaataaaaaatttaaagcaagaagaaaaaaattataatgtatgtataaagaaatgtttaattttattttacattatatt

SEQ ID NO: 80007 - DNA, 1682 bp, Cannabis sativa
  modified_base (1038)..(1042): a, c, t, g, unknown or other
aaaaaaaaaaaaaaaggcataatatataatatttttcaaaaataacattatattttaaaaattctaaagtactttttaatttcctctagagaaaaaggttctttttaattgggacttctaaattattttaagtattatgtagtatttctcaagtttttggcaccaaatcctaaaatatgatcagatagaatttaataatgtacttgtcttattattttcaccattgaatatcctaaggactaaggagtaggtttgagttcatatattgctcttacaattctcaattcatttataaaagaagaatattgccaagtgttctctagagaaaaaaagtcaatgatcttttctttctctaatgaaaaaggaatcatattattatatgtatcaatttatatatgtgtcatcatcgatgggtgaggacataggaattagtagaaattattatgtttttgaatgagaaaaaaaaaaaagggtataggattagtatacttctcatgacttgtaactattacttctattatttaatgttaattgctaatcattattcttctcttatctttatccacattagaaacagtttaataatatcataaattaagagtctttcatatacatgaaccaaatgaaaaataaaccgattatatcaaaggaaaacaaacaaaacaaatatttaattgtaaatataataattgcatttgcaaccattttctaggtgaggcatgaaaatgtttggtaggttgacactaattaaagttgatatgtgaatattgactaggtctcatatgctttaccttttgttttttttggtcataacaatattaaagagaaatgctaaagggtattagtggtgtctagcaccctcctatgtgtcaatatcgctgttggtccaactattggtctcatatgctttaccttttgtttttttggtcataacaatatataagagaaatgttaaagggcactagtggtgcctagcaccttcctatgtgtcaatatcgctattgatccaactaagtatcggatctcatataatttaannnnntagcttttagggagtatcgctagccaattgaaacacgacatgtcgagaaggtgctaggcactactgttgcctaatagcaatgctcaatatataattgttgagagttaactgctaattaaatcacattttaaagtatattaaattttatatatcttaatttttaataagtaatataagaattcgttaatcactcacaactcgatattattattttttattattttcttttcaaaaaattaaattcacacctcgatattatattgatattatattgtattgatattatattgatattatattgggtatatgtataatagcaatacccataatttatacataaactcattctctaaataggatatgttttcttgagaaaaaaaaaaaaagagaattattccatctattgtttaattttttttctttaaatcaacgaattgggtttattggtagttatttcggtagtttctatgtattattacaattaatcacaatattttctctttttgtatgttaaaaatgaaatacttattaaacaccaccataaacaatatcaaatatcaaccaaagcaccacaaacaatataaaatatacaaaacaagcataaaagtgagacactaaaatttttacgtggaaacccaat

SEQ ID NO: 80008 - DNA, 1691 bp, Cannabis sativa
ggtcttgggaggagtcttgtaaaatggagattataaaagcttggggttgtgctgatagtaatgcaacggcctcattcatccgcaatataaacagttctaagaaggctcttcaaaggtggaagaagactggacaaatcactaatgaacatgacatccaaaagttggaaaaaagactggagtggattcaacgtcagcctatctctgaaaccttaaaagctgaagaagccagtgttctcttgcaaattcaaattgcttggtcaaagctagagtgtatgtggagacaaagatcaagagaattatggctatcattgggggatagaaacacaagatttttccatgcagcgactgtcataaggaaaagacggaatagcatttgggcgatcaaagacaaagaaggaaggatttggagggagaggaaatacattggtggtatcatcaataattactttcaggaactattttcttcctctcgtcctagcattgatgattctctgggaagtttgtttgttaaccggattgatgatcagtccaatgagtttatctccaaaattcctacagatgaggaaatcaaggaagcggtcttcagcttacaccctctaaaggcatcggggccagatggtttttcgggttgtttcttccgaaaatattgggaagttgtgggaacaagtctgtgtgctacagtcaaggaattcttccagacaggtgtaatggatcctattcttaataatacattcatatgccttataccgaaagtagattttccccttagtgtggatcagttccgtccgatcagcttatgcaacttctcttataaagtcattgcaaagatcttatcaaataggctcagaccttttatgaacgacttaatatcccctcttcaatcagccttcatccctggtagatggataacagagtcttcaattctcacacaggagatcattcacaagattcggcacaagagaggcaacggagggctcatggctttaaagctagacatgcataaagcctatgataagatggagtggactttcttggagaaagttcttgtggcaaatggttttaatgacagaagttgcaagctcttgatggcatgtgttacaagcgtctcttatgcggtgcttctcaatggatgtcctcttaagaaattgtatcctcagagaggtcttcgtcaaggagatccactctctccttttctgtttcttctttgccaagaggtcctttcgaaacttatatcaaagactgaggttcaaggttccgtccacggcatcaagattgcacaatctgcagccccggtctctcatcttatgtttgtagatgatactattctcttctctcgtgcaaatccttccgaagcaaagaaattgatggattgtctttcaatttatgaaggttggtcagggcaatcgtgtagcaaaccaaaatcgggtgttctcttttcaaagaacttaagcaatggcatgaagaacattatccttggtattctcaacattgagcaagtaaggggagaggaaagacatttaggcaatctgtttgtgtttaagagaaggaaaaaagaggattatttgcgattaaaggaaagtatgttgaagaaattagaaggatggaagatgaaacttatgtcttatgctggaaggctaacgttgatcaagtcagtaacttcggccatgcctgtatatgctatgtctacatcc

SEQ ID NO: 80009 - DNA, 1494 bp, Cannabis sativa
aggttgcattgaattcctattttatacattcgtgaaataagttgttttaagctggttttcaacaatgtaaattattcggaatatcttgaaaattggtgtaatgtcctaaataactacaatgtaccgcaacattaaaaaaaaaattaattacaaattctccaattgccaaaaaagagggtgggggcaaaaggcacgacacacgcccccactgtagaaataatattaatgtatacttatatcttttttcagtgagtatatgacctatgtcatggaggcccttgaactggaagatactataaagaactacgaaaggcgaagttctactggatggtgtgcctctactacgcatccttgttctcttacggtctatatgttgttttctctatttttatatgttcttgtatgtttgttcaggaaatatatttcaagcttcaggcctactcggagtggaaagttaggctcatttattgatactatgggtaaattaattagtgaactagcttttgatcgattcttccatcttttttttggccacaactttattcagtatctcaattatatgtgaattattgaatgtcgatcactttatcctgaagttctgaaattcaattgttatttttttttgtagaatttctttggcgctgcatactaagcaaacaatttaagaaagtcttggctattatgcttggtatcatgtcagctgctattcttttagcagaggcaaccctacttccaaaatttaatttatctcttttctcgattattataaattctgttcagggacaagaagttcttgttcaggtatgcttttatttctgtgctacttataagatctgcgtactcttatgtttgcactcttataaaatagagcacttatttgttgtattttgctcataaattgaaattatcttgctttttctttggtttgatatatatatttttttaaaaagttctgtttctttgctcttccacatccattaactaattacttttgttctttttcaggtatttgcttttattcctctgatgtatatgtgcatttgcacatattattccttgttcaaaattggcatgtttacattttactctctaacaccaagacaaacaagttcggtcaacttgcttatgatatgctcgtaagtttgctcatgacactattctaatgacatgaagcttggctaactcattttatattacacagtattcacttcttgcttttttttttaatcttttgctagtatggttgctcggtatgctcctccagtttcgtacaactttctaaatcttattcgccttgataaaatgagggtaactatatttgaaaaggtaattcttttactttcttgacaatttataattattgtttttcgtgaactaaaaataaattatcatggttgttctctcctaaactacgggatctttttttctaattaatataagatttctgaagagatggattttacggtaacaaacttcaattttggccattcaatt

SEQ ID NO: 80010 - DNA, 1992 bp, Cannabis sativa
caatgtaagccggctgatgggaaaacaagaaaaaccaataaaagaaaaatcaattacactagtataacataccctttcaaaggcgtcatatgaattgtgagcatggcaggctccctcatgaaagcttccacaagcaccttctggtgttccaaagctagcaaactttatctttgtaatcttctgtccggcgccacaagacaagtgggctttaggcctcaaaggtttattgacattaccagaggcttgcatatgccaattcattagtgttggctgccattcatagatatcagcacatacagtgtctacatcccttctatccaaaaagataccattgggatctccaccccactcttcgaataccaccaacaaattgcctgttggtttaagccatgaatgaggaacatgatacctgaaagtattaacaatatttgtcagtttgtgaccttcccaccaaagcattagagcccaaataaagttttagttatccacttaccatctttgtgaagcttccccacagttacttaggcatttcttctcatgatatgttccagcatagttgcagccaccacagctacctaatgctgtataagaaggccagtaacggccaagactttggccattaatccatatttgacctttgcccatgctgcccatatccaaagctaatggtgcatagccttttggagcatcaaaactagtctgaaagaaaaaagagaatgtcagaaatcaccatttggattctggctcaaaaagtgcctattagtttctttacacaaccttggataagtaactaatgaactgaagttgaaaattaagatactcactttgaaccatgtcaaaggctgctttcgggctactagagacccttgaatccaatcaactgaggaactcccagtgagtgaatgaagactcaaggcttctcctttaagaccaacctgaagagagagcatagacttattaatcactaccattgcggggatttatgagaaagtcaagggaaaccaaccttgtaagaccatttctgccatgacaagtctctcctaccctcattgagaccattaagtgtaacagggccaagaacaccagcattccatgtctcaaagtgtggacccacattctgaagccaaatcataggtaaacatgtcatattcaaatatctatgtgcatattaatgcgtgctcagtaaggggaatatgagagagatagagaaggagaaagggacaaaccggaagaccaacagcgatacttaaaagtgcaattgtgttgattccagctctcaagttcacacctttactgaatgttagttttgggaattctaagcttccatacgaagtacctgaaaaggtaataagaattggcatgtcatggagagaaatcctaaaatgattaggctaagtgctcgccagaacaattctgcctaaaaagttttcctggtgtgctcataaacacaaaagaatcaacaataagcagcctacctgctagttgaccattgacaaaaacatgcaatgcatgcccagctgacaagactgttagtacaggggattttccactcctcaaaaatccttcgttggaatcaatcttgatactggaaattcaaatggtattattaagagaaaaatgccacaaattaagagaaacatttatggctatatgtcaaaggaaatgaaaacagatcagttatgttactcactctgtcatgtaccacagataatcagaggcatctctggtggtatttatctgctccaataagccaacaaccgtgaacgatgtatcactgtaagaggtagtctcttcattgtatgcttgccaagaaaatcctccatgcataggaacacgggtcatcttcattgttgcactttgagctccaacctgaattggaaaagaataatgtcagtttcgttttctgtagccaaacatgcatgcgactaatgacaatgactggggatagaattgtgcagaaacacaataaatatgatctaactcaatgaacaa

SEQ ID NO: 80011 - DNA, 1780 bp, Cannabis sativa
tctttctgactggttcaatatctacttggttccactcgtttggttgaatggccgaactcggacccggttgcaaggtgatcagcttatggcccataggctcactcgtttgtctattttaacgcctagtgagtctgtctgactgcctttttgagcccaacattattgtatctattattgatgagctcgtctgactttcatattgaatttttcaaaaatatctcaaatattaagcgatttttacctctacagatattattactgttgtaatgtaatatcttgtctaatatattttaatataataataattattattaattatttataatatttcaagatggtatcagaactataagtttaggtaggctaggtccacgcgtctaggcctcacctcttttaagagctcatatttaatttttttttaaaaaaaatatacatatttttttaaaattttaaaaatactgtttatttttataataaaaatttagaaatttatatttttaaatccgttcatttcaattcaagatttagagtggtggtagacactactaataatttagttaattacaatattcttttctatatattttgtaaaaagtgtgtatacaaattttattagtatacaccacacttaaaaaatagttagcgtttttatatatatttataaatttaaaataaattaaattagacagaccaaaagtgatatatataaaaaataattaattaattttttttttttatttgggatcatataataatatgtgtcattttcagaacacaaccaaccaacctgcccattccacccacatttccatataatatgatatgatgatgatgatgatcatggttggtaagagatatatatatgtagaagaggtaaggcacatcccattccctatctaacttttctttctttattctaataatttaccttctagaagccaacccttttaatttgaaaccctttttaattataattattattcataattaattttagtaaaagaggaaatatttatatggaagaatcatttaaggttggtgacccacctcctctcctcttcacctctataatatatatacaaaagtcaagtgggcctttatttcctatgctcctttcatagtctcatacactactcatcaatcatctattctcattcttttaattaaccctaattttattttaacttgtatataatttaattgattagtcataagataagattcttgtgtgatgccaaatatcatattcatatatgctaataataaaaataataataataataattttaatatatttttgtctacactacttgtcttgaaagacgtgtgtctaaaaatgaatggggtctctattagattaggtacaccggaataaataaataaataataaaacgttatatttatatttattaatgctactccaattatatatatatataatattattctaattctaccataatatatatttgtcttttttcttaatcaaatttcatctcacctcattacttatttatttattacttaaacaataagagactatataatttgattcagctgaactaaaatcaccccctccataaataataataaatattggaagaccaattaatccctttttcaattaactttttctcatttcctattttttctttttataaattttaacggtcaaatgacttttttcatttattttggttgggagagttgacatgtacagtataatatcttttctccagtgagattgtgcgcaacgttttgaggaaaacgacaacatttt

SEQ ID NO: 80012 - DNA, 1144 bp, Cannabis sativa
atcaatgtcattgattttatagactcaaccaggggtgcctgtgtcagtctattttttgttcagggatgtcaagacccttctctttttcctgatggaaataatacgtagtacttttttatttcttaaaagaacatgcatgttcaatttttctacctttactttacaggttctacactctcatggtgttgtctactgcattatttggcaagcctgcttttaggaatctcatttgcaatggtctagttttggctgaggatggaaaaaagatgagtaaaagtttaaagaactatccatccccagtagatgttatcgatgattatggggctgtaagtccatttaagtatattaatttctacaagttctttattaaaatgtatgtttatgttttatctattcatttaacttttctactttatgcacttcactaaattttaattttgaatggcttattatgacaaaatggtctttatcctgctggttcatttgcaggatgcattacgtttataccttataaactcgccagttgtacgtgcagagccgttgcgtttcaagaaggaaggagtttatggcgttgtgagtgttttctcttttcatttccatttagatgctccccttagcttgtgtcttatattttattgtgttcaaaattgttgtagccatccttctttaaatttagttatccacaggtactttccattcagcgaaaaaaaaaaaaagaaattcacaaggattttcttctcatatcttgttatcctctttccaggttaaggatgtgttccttccttggtacaatgcatataggttccttgttcaaaatgctaaaaggcttgaggtcgaggggtctacattatttgtacccgttgctcaggctacacttgaaaaatcatctaatgttcttgaccaatggattaactcagctactcagagtctagtacattttgttcgacaagagatggatgcctatcgactttacacggttagttctctattgtttgagtggatactaattcctttttactagtaattttgtgcagtccttttctgttgtttgttaccactgctttcctccatactttgggaggatgtcacttatggacacgtgacctttgtctctttttctaaaaaaaaaaaagtaatttttcca

SEQ ID NO: 80013 - DNA, 3136 bp, Cannabis sativa
tgcttctagtcacgagaaaatttataacacaaatacaaatataatttaataataattattataacaacacaagataaatgaaacaacattcattctaatagtactactcataacatgtcagccaaaatttcttttaagaattaatcttcaaattcttacacttgctcaagtacaattaataacacaactacaacaattactctcactatcccaaaaaccagtcagtaaaaaaaaactaattaataaaaacaatttaaaaaaaaaataatcttcaccatcgaaaaggacaggcaacaagaggatgggacacttggtagagagagaaagaaaaaggatatagagagagaaagagaaaggttaggaatgaaattttttaatcaaactttattatatatataataataataataattatattataattattattaattaatactaataaggcttaagcataaactgagccataagatagagccatcaataacacagccgcttgttcctcttctcccaacttctttctttgcctctcgaccgttgatctttgcatcaaaacttctcttcccaaagctaataatctttgtttaagcccatcgccgagcttgttgttgttattattactaccaccgccgccgccgccattgttattgcttgctctttttgcctttcgatcatctgagcttcctttatttaaacccaaaatagctcttcttttcttcctgcttctgatcccacaagcattacataacgactgaaacagtaaacagagatcgaaagtttagattgatcatatgaaacaaaatgaaaaaaagggtttgatctgtggatcaaaaagggaaaaactgaccttaggcccggctggaccgcctctccaaagtggggttttggtggtaccacaatcagcacaggttttcttatggctttcttctgatgaaaccccacttgggtttttgctactcatgtcttccgaatccgatcgctgtaataaaacaaaagaaaaccgatccgatcagtaagtttggaatcgtaacctatcagtaagctattttaaaaattaaataaatatatatattgaaatatgaccgtttgatcatcactgaccttgtcagtctgatccaacatttttttttgtatcaactatttcgaagatctgagatcaacccagttgagataaggacaagaacagtaaagggtatttaaaagattgaaagaaaaaaaggaatggtttacgaataaaagggtcaaaacagagcaatcagagaagtagtgaaagagattgaaatagatctatttgatttcgatcgaatgatcaacatttgaggtggaaagagatcagactcaaaagactactctactgatatagaagagcagaggtaagtgtgattgaaaatagagaaaagctatctggtttgagcagcaatggaggaaaggtatttgaataagaggtgggaatgagagaaagatttgaatggaaaaggaggggtgtgattatactgagctgcgcggcagaagagagaaagagaaagagagagagaaaatgatgagagggaatctaaaccgacatacacaacaacaccagccgcaccatatctgaaaatactctccttatataaaaaaaataatggtacactcgaaaccctagccccttctgaaattttgtgaaatgtcaatagtacccttctctaagagggaaattaactttttggtcttgtgtgttgtgttgtgtataagtataacaatctcaaccccgccaaagagttttttctttttgggatgaaataatacaaaaagggcgccatttgttgttggtcattcattatttttattattatattttagatttatttatttatgaatgaattaatgaaagtaaagtaagtgagagatggtgagtgtgtgtggtgtgggaattggaagaggatggatatggagagagtgtgtaggttaaagattttgggtcctatttttgtgagtagtcaagggagagagagggtattgtgtcattgtgaaatgcaccgtttcataggtcaaacccaatatcgtgagttatttgctatgttagctcttcaatgtttcacattggcggcaaactaaattgattttaataatttgaaaaaaaaaaaaaaagaacactctatttagtttagctttgtatgttgtggtctctatgcaaattccttccatttatttgcttaaatattatgccaactttagtttcttaaaatttggttaattaaactttagggttcttatgttttgggcgaatttcaaaacccgtttggtacgttgtattatagtaaataataaataacaatatgtgttagataaggcgatgttttgtattaattattacggccacaatttttaatacaatgtaagttgtatatttaatacataagaaatagtattagcttgtattatgatatttacaaaagattcgggtcaatcccaatctccgacccagactcggacccgggacccggaccccgagaccgaacaagaccagacttggacccgagattggactagaccggacccggaccccaagatcggaccagaccaaacccgaacctagactcgagattggagcaaaccggacccgacccgaacctggactctagaccccggaccacgaacttggacctcgaacccggatttggacccgaacctaaaccccggacccagacccaagaactggacctgaaatcaacttgggcctaggacccagacccgggactctaacctctgagtttgggacccgaacccgaaccaagacctcggacctgagacccgaacccggaccgggacctggacaggacccggacctatagtcagtgttgggtcgagtttatcgaaaatatattataattttacacaatctatcaatacatgtcaataccatatatagtactgtgttaaataatacaatacaatacaatccaatacaatacaatacgacatactaaacaagccctcaatgtataaaatagcacaaactcattgaatggagataatccaataataaaaaagacatcaatttagtttgctgccaatgtaaagtatttagggcccgtttggtacgcagtattgaactggctaaattatctagttcagtgttttggcatgttggaaatct

SEQ ID NO: 80014 - DNA, 1091 bp, Cannabis sativa
tctcataagaatggtgatgggacaaaagtagggtttcttatgtcgacaattgacaaacaaatactcttaaaaaggaaagaaaaaagaaattggttcctcttgccatgatgggatcctgccacgtgccacgcgttacttctcctttaataaaagttgggtttgtacctacccaaaggtcgaagctttaccttgtaaaaaacatggggttctaaattcatcttcttcacttcactacccactctcaattcattttctctctccttctttaccatctcaacaacccactaagaaagaagaagcacaatgggaaaaatcatttttcttgtttcccaacttcataaacttgctgggtatacttcaaaattccatctttttcttcttaaaatttatattttttagttttgtttttgagtctttaacctgtttgttaatatatttgcaggccttgtttgacattactttatcccttgtaagttttttgctctttctcttagttaatgtgactgaataatctctttaactttcttaagttgtttgaatattgatgagttttgatttatgggttttctttttatttataattattattattaattcaatatattaatatagatatgcatcagttctagccatggagagcacaacaaaaaaagatgatgaacagtggctttcttattggattctatactcatttattactcttgttgaaatggttatgcaacctgctctagaattgtaagactaagctttaatttcttcatagaaaaatgctatacattattaattgcataattgagtttgaagtgtttttgtatagatttcctgtttggtatgatgtgaagttggtacttatggcttggttggttcttcccaaattcaaaggagcaaaattcttgtataagagatttgtgagagaacatatcaagaagtacacagggaaacatagtcatttcaagggaaagcattaaaaatgtgagtattgatcatatttcaatagaaagattttgatacatttgtagacttgaatttacttgttctgatttgtgttaatttttgttctttgaagagggagagcttcattaaatatataa

SEQ ID NO: 80015 - DNA, 1724 bp, Cannabis sativa
atctctcacactaccatggatatagatatacatatatatatatatatattgctacacttatcgatgataaaacttacaatcatctatatcattgtagaagattttatcttttctatagtcctctatctcttctagtaatggtgctaattgctttgcatcataaaccaaagcaaataaaattaataaaattaaccctaatatatatatatatagattatatataccccatgcatgcatgcatgcaaacttttaatgcctacgtacgtacctctgatttccattgtccatgcatatatttaattgggtttatcacatacaaagaaaaaaaaaagaaaaatattcacacctatgaaaccgataatctcaaaggcatttcaatttcttcattattattcctttcatcattattattattattattattattacaacattcattttccactatttgatcaccactactcttaccatcatcacctccaaaaaccacaactggtccaaactgcaccctcctatgatcattaccaccgccaccacaaccgccattatgagactccaaatttccagagtcagaggccgaggtattggcagttgtggtggctgcagttgtgggttcacgtgtgcttcctccacccctggaggaacgacgactgttgacattaacagaaagaggcggtatttgttgttgttgttggttaatattgttattgatgatagcaaatctaaaacatctatagatgaatgtgaagaaccaaaaagcccaaggaatggagactagaatcaaacctaggatgggataccatgacggagttgtgggaaggaccatgtagagactgaggaagatgccgccggagattatgaacaagaagaagagacttatgatgatgtacactctggcatctccttttctatgctgatccattatttatttaatattattattgtgaagaagaagagaagaaagaagaagatggtgatggtgaaggtgattttgatgatgatgatgatgaagttttttttttttttttttgtgaatttttttgattttgttttgtggtattggaacttattggacagtttcaaaggagggatttacgaagaaataagttaagcgatgaagacggattttctatggttttctataattatgtatatttgttttattaattcttatttttaatttatatatatctagttaaatgtttaactacttttttattttaatttctcaattcaattaaaaataaagtagaaccataaaacatatgtaagaggccaagtttttactctaaaaaaacaaatctggatggattagagatttttttttatcattaatattttttaatgtaaaatttgaaaagatatttaatagaaatgaaagcatatatccgatccgatctcacatatattttttttctaatctaattagtaatagaaaattatcattttatctaataaaatacataaaaactaaacaatacttgagttgttaggatttttttaggaatttttttaattaagtgtaacaaaatttatgaaaaactaataaaggtaagtaaaaataaaatttaaatgttgttttattttatatgaaatgattatttccttagagtttaagtcaataaacataaatggaagagctcttatttcaataattatattagttcactgaaatatcatttataaaatacatagaacgataaatttatctctactcgatgtaa

SEQ ID NO: 80016 - DNA, 1983 bp, Cannabis sativa
atatataacaataatattaataaaattaaaatttaactatagttatttttttaaaatattcaaaatcattatatagtacttattaataaatgttcgatatatatttctaccattacgctatatttatagtctaggacaactcttttttttttttaaaaaaaaaaaaagaagaaaaagtcttttataaattaatctacacacccatttaaaactaatcatggtaaaatacatttgtccaaaaaaaaaaaactaatggtaaataaaacgttagatggatataaaatatatactatttcaattcaagagatatagagttgcatccatcctcctttgctagcatttttcctaatttgattgtacataaatattattaactactaattactaccataattgtcatctattgtttttttctaattttttttaacgagtattatataataataaataatgaacgaatatgatgaaatgaaaatctagaaagagattgtacataccaagttttgaagagaggaatttgagtactgaaatggagaagacccaaataatatatgacaatgtggtgggtagctagctagtggtgatgttgagtagaactgaaagctgatgacttggctagctatctatttagagagagagacagagagtagagaaaagaaaagaacagaaagatgtagctctgactggttcactatctttggggtcaagctttttattgaaataatagtgagatctctctttctcacatcacatataactgattcccctctctacaaaataatagttaactcatgattttatagcagaagcaatgtactaccagtgattcgcccattacctaaaatgcccctgctctaataaacaatggatagtaattacataaacacactgggcatgcaccgcagatttggcaaatggcagaatggtcatatcatcatttaatatctacatgaaagcgaaacggcagcacttgcaggagatgggtaaggatactctacggctgcattgttttgtgaatggtgcatcaccctgcaacgtctggaagatttagagaagagtcaatagatcccacacgtcggagagaaaaccttattggtgggattatttaatgagatgagagaacgtgtacacaggatcaccgtagtgaaggtaatgaatttgtctgcttttgtatgactctggcttccatgtttgatgccaagtctcctacctctttctcttcactaccttcttagacacgtacgtacaaccactactccaacttttcccttcattattattttatgaagacaattgattagtcaatttggtcattcatttttgcatactagtatattatccatgcgagactctttctcaaataagacataagtgacacttttctatttttaaaacaataattattttttggaaaaaattctaacaattctttacttcaatttataaaagtattttctcaaacaatatcaatatctataagattgtgcatataaaagaaatatctcatgactacggcaaaaaaagcttaattatggaaacgcaacataccctttggccaataatagtgtttctataggtataggttcaaaaatgtgcattatacttacacctacaaaaacaattagcattgcccattgctgtggatacctacgaaaatggacattgcccatttatgtaattcgtatacctacagaaaacaccaacattgccaatttacaatgcccatttctaggtgatcaagaaaaaaagtgctaaacttttgtttttgaacaattttatatttttattatactatgcacaatcaactatatattaagaaacaagataaatttacataaaactataaatacaaattacatagtgttgtcaaccttttttgtaaggacgcgcgcgctagtggtgcccactcgatgataggcccactaaagtaccggacacattatacaccttagaaagagcatttagaaagagcatgtttgatat

SEQ ID NO: 80017 - DNA, 1178 bp, Cannabis sativa
  modified_base (1119)..(1133): a, c, t, g, unknown or other
acaaattaacacgaatacaacataaaaatactgtactttctgtaaataaaattaaaaaattcgtaaaattatatttttataattttttaattatttttgtctttgtggaattatcccttaattttatatgtatgtatatgtatgtgtaggtggagctagtggacggatcatcatacttggggcaaccactaccattctcaataacaagtctgatatggatagaggttttagtagtcgggtacattgagtttcagagaaacgcagaattggacccagaaaagaggctttacccaggtggaaagttctttgacccattgggccttgctgaagacccagaaaagaaggccactcttcaactcgccgaaatcaaacacgctcgtctcgccatggttgcctttttgggctttgctgtccaggccgctgccactggaaagggcccactcaacaattgggctacccatttgagtgacccacttcacaccaccattattgacacattcacctcttgaaattaaaaaaaaaaaaaaaagacaaatctaatgagaattaatcttcttgtacttttttttttttagttggactacttctctttatctctttctctactttttcttgtaaaaatattattgtgaaaatagaggtatgatcaattatggggatgggatcaatgtgtgagctttgcttgttttgtatgagaatgagatgtatgtgaaattggaattaaatttccccttcatttcataggaacgtaataataaaaacatagcaagttgctaagagcacacacaatatgcatcaaaacactttatttttcggttaaattatagacaacaagagtgttaaggaaactcttttgtactttcttttacactctctataaattagtgacaaatgtcatcctttgagattagtgtatttgtatttaataattagacataatattattacattattatatctatgccattacaataaaattattctaaatttttacttagagctaaatataaatatatatcttaaacaaagttatagcaccatttaaaaaaacaaaacaaaaaaagaacaaaataataaagtatgattagaatttatttaacaatttaaataatcatatannnnnnnnnnnnnnntattttatttatatgcttttttacaacactttttattattattat

SEQ ID NO: 80018 - DNA, 2352 bp, Cannabis sativa
ggatcaaacttgaggggattctcccagatggaagggtctctctgtgtggcccaaacattgatgaaaatccgagagccttttggaatggtgtagcctcccacagtgcaactttcacttgggcaatgaggcactaacaatggtagaactgggtgcagcctcagagtttctttcatcacagcttgtaagtaaggtagcttatgaatgtcagactcctctactatgttgtctttgccaattacagcttctaactcttgttgggctctctttaaaatctctggctggttcatgatttcagccatggcaaactcgattgtattagaggatgtgtcactcccacccacaaccatatcctgtttagacatttataaacaaaaacatgaaaattggttgatgaaaccgtagtactgtttatacttaaaataaattcaagaaaaaaaaaaacttcatttgtttaaatctcttacagtttctcaaggccattaatatcagttaacatgaataagttgttcaaaaacttgttactaaatttgtgaattaaagtcttcaaaaattgagctttagctcctctgtttcaccttaacgtgaagatatataaagtgtcaaatcccaataacacagcggtactatatagagataaaaaaagtgtgtaccataagcaaagctttcacatgggtaatcgtcaatggtgttttagaatcaacttcttctttcaattccaacaagtactgcaagaaatctctgctctgaccaccaccactactatctctctcgtcccgaatcttcaaagacgaagaagaacgttgagcaatcaatttctcgaacatcatatcgaatctaagagccagcttagtcatttgctttccaaccccttgaaggtcaaaccgagcaagacccggataaaagtccgacaaattaggcttacccagaagatcagtcatctcagaaacaatctgccgaaactcagcgcccaacgaatctctctcgtctccctccacagccccaccccaaagcatattcgtaatcacattcagaatggtcagaaacatctgctccccaacgttaacgggtgacccgacccgactgtaacagtagccaacagtttgacgaacctcccggcgccggagttcatagacggagtccaaggtggtattgctgagcatcttgagaacgcagacttttctaagcatacgccattcaggaccgtacggggtccaaacgatgtcgtatccaccataggtggctatacggccggcgactgggacgtcgcgattagcgaaaacgacgtcgttttctcttaaaacttcacgagctaaagaaggtgaggtgataactataccaaccttgttccccaactgaagcttcaatattgggccgtgagtttgggccaaatctctgaagtagctgtggagctctggatccagagataaaaggttgcccaataagggcagcccacgtgggcctggcggtaacggcggggaggcccgtttaccccgtaatttgagatgaattagtaggaggaagacaacggcagcagcggagagagtgaagcacacgcgcgtcaagtcgacgttatgtttcaagaagtttagcaaggttgtgctggtgatgttgagcgtcatggtgacaacacgttacaaaataggaaagatcgagaattttttgggtatattaatgggcgaaaggtaggcattgtatttatatgtgtttatttttgtctttagaggattttgtttcaaacgtatcattagccgaataaaaaaaaaaaaaaaatctcgggttaaagagcattaattgggtacaacacggatgtgtggcattattatttgtagcagaggatgtttatttagactcagtctaattatatattagatgttaaattttattaaccgattcgatttaattaatttaagtaatcgaatcaatcaaatattcattacatattaagttggatcggttctatttaatggtttaatttagattaatctaatattttaaaattagtattttttaatcagatcgaatctttctaatattttagatcaagtatgtatcgaattccaatccaaaaaaaaggagtaaaattttaatgttaatttttattttttttgaatgaatagacgtctattaataagaacagaagctagacctcgtggtcattacaaaataaatctttcggaatttgagagataggtaaccgaccaaatcgattatgggtgaatgcccacttagccacattatgggcaacaaaattacaagttctgagaatacacgaaaacaaacaaccattaaaatatttagagagctctaagcaacaattagagtaattctcaatctcccaacaagacgaagcgc

SEQ ID NO: 80019 - DNA, 803 bp, Cannabis sativa
agtgttggacaacagaatttaagcaaaaacaaaaattataccgaaattcattaccaatggaatgggcatacaatgattggatgaagaaggccacgttggaaggaggagttgcctcatatatgtatgagaatttccttgaaagccatacccttttcatctctgccaaattagttgattcatcctgccacagtataccattcacaagtaaaacaaatatctatacaaaccattctgatttgagcagtgttggtagtacctcaacgaactcagctataagctcatcgatgtccttcttgaaaggtgtcatatccatgattttcagttataaaatttaaactgaactgaaaaggattatgggttggggcagggcagttgaatacttcaatttagtccatgagacatgcctgagaagaagagaaagaagaaagcattctcataagtattgtttttgacttaaagttcataacatttttgaattaattcaacactattattataaataagcaacacttgtccagttatatcaaattagtgtataactgcataacatcaaatttagtactatactaagaggcattatatcaaacaatttgcagacacataagttctgtccaccttccacaacacataagcttactttatataacagaagaacagaaaaaaacctctaatgattattttttttgaacataaaactcaatttaataaaataatggatctacaagctttacgtcaatccaaaatgctcagtgcaataaattacaaatttaccaaaaatcttagagcgatagagcaactctatt

SEQ ID NO: 80020 - DNA, 1343 bp, Cannabis sativa
agcacctgtccctgcaccgccaccagcacctgtccctgcaccgccaccagcacctgtccctgcaccgccaccgccaccagctccagcacccattcctgcactccaagtaccggtagcaccatagccaccaaaatcccatccatatgtaccttgtgcaaaaccagttaatgcacgagaattaccactcgtgccaaacttaaaattaattttgaagccactaaagattgtggacatggtggagacaatcgccaaagcatttcttgctagctggttcgcagcagagagaccatttgacatcatctctgttttaagttgagaatcaaatatgccatcaaggcatgtatgctgatacgatacagcagcactcaaccaattcaacagttcaccttgtttattataaaacgcactcaagtcagttcctcccatagtcgaaaagctagtctgaagttcatcaaccgcgaacccaagcaattcttgacaatcttccatatacattttcttggagccagaggaactcgctgctatactagccgatacattgacaatggcgctcacttgagagatggtggattgtattgcagcttggaaatagtcaatggggttagcattggccttgttgcccatagacgcaatgcttttgatgcatgcatctctgtattcgcatgtcccacaaaatatattcgcagcatgagatatgcccgcgaatgttgttgccgcatgatgagctgcacccggaaatgagggtatcttagcatgaaaaccggcattagtattcatatgtcctccaaagcctactcctagacctccaaatggaagatgaccattgcttatttgtaagcttgaagcaattacaacattaatgatcactaatctcaccgtgaatgtattcacggagactagtccttctcctatctttgccttcccactcataagtatctaagtttttatcaattgtatataatgaattagcactgaatagaagtatagaggaatgtaagatatatatataggtgaaagtaagaatgactaattatagagtgactacaaattatgtggtgtagcaattaaagctaccaaatattatgaatctatttccatttgccgctagcttaaggtggttaacctcatttctctccctatttcttgcatttctttagagacttttattaatactaaataaataactaaataaaaacctcatgtaattatagcaagttaaaaaattgtgcatatttggacatttagtgatttaaaatcttgaatttcaagcatgcctttatgtctttcttttgtttttttttttttaagagcaaaattcggagggaagaaaatagagtaacaag

SEQ ID NO: 80021 - DNA, 1038 bp, Cannabis sativa
tgtgagggctaaaacttcatcagtcgttgcattattccattgtatttgttgcaatgcttcttaaagtgttatgggaacgctggagactaagtaggtttttggcttgtgaatacttgactttgacctagttttcatgatgtgtttattgtgttgttcaggagcattttgacacccttcaatgttaggaagagatgctggtattgagtgattagtttcaggtggaattgagggagatgacaggtttgttgcaagattagcttgcagtgaagtgctatagggaactgaatgtaactctggtggaacatctgttgtgagatcatgtaaaataggctactcattaggcataggttgactatcaagcacatgatgctcatgattcatatcaacacattgtcttgaagattcacctacatccaacacagatggttgacttaggtgccaaatgttagtcataagatcaaaagtattgttgtttggctatacatatggttcaataatatcagttaaaacatgttgttcaatctctgaattgttgtttagcaaatctgtcatggtgtaagatggtttaaagtgaggacaaacatggataatacctgacacataggaagtctttgtttgctgagaggaattaagacttgtttgagcactagactcttcataaggaaaagagaattcttcaaaaatgtagagtcttcatttttgccaaggcatttgtagcctttgcgattgaggttataacctaaaaaagtgcatggagcagacctaaattcgagtttatatttattgtatggccttatattgagaaaacacttgcatccaaatgttttaaaggatgtgtaatctggttgaatcttgaacatggttttaaagggagatttattgcctaacactggtgtaggcaacttgttgtgaatatacacaacaattctgaaagcttcatcccaaaacttgaggggtagagaagcttgagctaacaaagcaggaccactctcaactatttgtctatgtttgcgttcagctagaccattttgttggtgt

SEQ ID NO: 80022 - DNA, 1255 bp, Cannabis sativa
atataaagatatatttttttttttttcaaaaaagttattttataaaaaattaaaaaagttgaaaaatatgaaaaaaattaagtaatggtaaccagatacaagaaacaattataagtgttcttttattgctcaactaattcagaaaaataaataaaaaattacattacattacaaaaataaatgatgtaaataaaaaaactatgaggatgctgatgaagaagaagaagaaacaagcatgtcccaattgcagacaatgtgaccgattatcacagaaatatcatccattttgcctcctttatgttttcttccagcctcagcagaagcaatggtataaggacacacaccatatctatccaatgacctatagtaagcagctccagctattgcaaatgccaaatctttatacttattattatacttatcatcatgatcatccaactttagctctgtcttaataatgtcttgtatttcccaatcaaataagttgtccaataatccatcacttcccatcacaacaacatctcctttcttaacacccaactccatttccacaacacattcagggccatcactcctcttatggtttcccaattgaaaaggacagttaaatcgcttttgttgagttggcgatttgtatattaactttccttctctaaacaccaagaatccactgtctcctatgttcgcacctctcaacataccgttgttgtgtgttacaacacacatggttgacgaaccttcaagattactatttttagagaaagcttctctaatgatagttttcggatcaataatttcagataataatttgttgttgacattagtggaagagttaacgattagtgatcgagcatatttacccgaatctattccatttttgtcccaaccaccaacgccatctgctactccaatagtttgttcatcgcgagacacgaaatgagcatcgtctcctaagggtttgaattcgagtttgctttgtttgggtatgtaaaatgaagcgcaacgcatctttagaagttttttcttgaaaagaattttcgaacatggtggtttcttgtctacattaattttgttattcatgattgtctttagttttgtttctttctaatttataactaataaaagtgttaattaactataatgatcgaatacttgatacacgatcactttcatttactttaattaatttatagtagtaggcgctgtagatattatactaatttgagtaggattattagtagatattatactaatt

SEQ ID NO: 80023 - DNA, 889 bp, Cannabis sativa
ttttgttctcatttctaaaaacacttttttaaaaacaaaaagcaataccaaacatactctaaggtgttatttaattgataaaaaaccaagtgcttcatggacaaaacaaattgatatcaagttccatttcataaaagagattgtggaaaaaggagctgtcaatattgctaggattagtactaaagataacccctttgacatgttaaccaaagttgttccaagcagaaagtttgagtactgcttggaattgatcaatgttggggttagctaagccctcagatcttgattggacagcaattagagctatgtttgactcatgttaacttgaatcaaggtgaagatttgtgaggaatggttacaagttaccattttcagttagttactcactaacttggatagagtttgttagctggaagtttaattatttctgttagaggcttgggactttgtttagctatatataccattctccttttacttgtatcatttaaattatacttgtaatccaattcagagagatgaaagttagagagtgatcgaacacaagtgaggaaagttttctttgtaactcacttgtctttttggttcattcaagaacacaataaaaaattaatcaaggactaatgctttaaaaagaaaaacgacatttttggaaaatttaaagatgatgctggtataatgctatagcctagaattgagagttagaacaggaagtgtctttgactaaaagtgaagaagtaaatccaagtgtagaggttgtcaaatcaaactccaaaagattgtcctccaattgaatcccacctataacaattgaagttcttggctcaaacccaccatccacaaatcccaaacacatcacattctcattaactcccaccatcgaattagc

SEQ ID NO: 80024 - DNA, 3367 bp, Cannabis sativa
caaaatgtataagtttttaaaataattttttttttgtacattttttgtaattatgttatttttgctgtacatttatgaaaaaagcccttttcttttacaggtagtggcgaaactacattgtgattcttctgactttttatattatgtattacacttattttttctatagaacatatttataaaatttactccatacaattatatatatttatatattattaattttttctacataattaattacttttaatatacatgtatatatgtaaactttatattatacaataatatatttataattaatagataatcttatgctgtctatttttctttttattattacatacgttgttgttatttagaattacttattaaatttcataaaatttttaatagtttatattactaagaataagatttaaatattttgttgaaacacgtaattatttttcttatacaaataataaatatttattttaactttattttcagcactgtaaactatttaaattcttttgaataattacaagtgatcctaacaaaatataatgtacgtgataataaaaaaatatagactagaaagctctcatagatgacgaaacaactaaaaatataccaaaacaaccatttaacaaagtgtactacatatttttccaatgtagtttttagtctttcttttttcttgaaaaattatcattacataagcttatgaattagtttaacatttaaatttttagtctagaaccattaggttttagtctaataggtttttatttttgtgtaatttaagaaattttatctcaaaaaataaaatttaatactatgtaattatagttataagaataaatattgacatataaatgtattaaattttcacctttgtctcaataaaaaaaaatccccattgtgcaagaaaaagaaattctttttaatttgctcctcctacaattgggagctggttcggccactatttattagtggtatatttttcactagtagagaagcaaatgagttgcacatgttttcggccagttatgctttggtaaaaaatgtaagtgctctactaatttggggtggacaacatttcctatgtaatgtttgtaaagaagatttacatttcaaaaagaaaaagatatttaacataactttacactatttacaaaataattataaaaaagatgtataaaatataatatgacataaatacatacaatatttattaacatactttatttttaattgcattccataattactcctataataacaagtaacaacattcttagaatttatttttattattattattattattattgttttatttggatatatataatattactacatatttaataaattaatctttaacatgaaaaattagtataattttattctatctgatatttgattgcttaatagtatcttttttttttattatttatttatgtttgactatctaatagtattcattaattgttagtatatataaaattttaaacatatattatgaattagtatatacaatttcaaattatataaggaatagtatcttttcttgttaatattttacaattttaaatttataccaattaatatataattttaaactatttataatttattaggatttattcagttttaaatatataccaattagtattttcgattttaaatgtatacctaacagtatctattacttgtttttctctctctatatatacagttttaaatttaaatatagactacttagtatgtatattttcaaatgtatacctaattgtatctattactttttagtatctatataattttaaatatgtactaattggtatgtacaatttcaaacattgtattaattatttcctacttgttaatggtaattattatatagtcttaacagatactaattagtatatacgatttcaaatatatatttattagtatatattatttgctagtattgattacttgttatttgttaataatatttattaatatatctactaaatgagaatatcaaaagcgtaaaaatataataagaaatgaatattatatttcacatactaatgagtaaaataaaaaaataaatagacattaaaagttatctatttcaaaaaaaattaatgtaaaaaaaaataaataataacataaataatttatactataataagaaaataaataaaagaataagttatatatatttatatgtcaaggcatatttatgttatacctctaaatatttttagaaaataaaataaatttcttgaaagaaatatataattcatagaaactgattctaaattaagcacaaactaatatctagctttttccattcaaaaaaaaaaatatctagctttttttttggtttatttattacgttattaatgataataacaactattttctggtatgatcatttaacaatataaaaaaagaaggtattaatgtaaagagaaaaaatataccttataattataattatttataaaaatatgtatctagatgtaatttttctaaaggtgactctgtatgcttttgcaagaatccataagatagtttaagttttagtagcccaagcccaattggagtcttggcccaaaaaattaagggcttttacaaaaatattagattttgaaaaaaatttacaattttactgtcacacggaatgttttacaaaatactatcttttaaaaaagaaccgtaaaataataaaatagaacaactaaaacaacattggaacaactaaaaattaaccgtgaaaacttaacacagtgcacaatataaaacttacacagtatttttgaaaaaaaaaatacagtattttgaaaaaaattctgctcacagtaaaaaagtaaaaatgttagaaatttcattatatggtataaaaatctcaaaaattaattggacttttttgaagattttcttttatatattcttagtatatagtgataataataaaaaatagtatttttttttaaaaaaaaaataattgagcatttttctgactaaaatctaaaatataagattagtaaataaaacaaatcagataatttttcagaaaataattgtattttatttttaataaatagtactaaaaatttaaaatattatatttttttaaaaaataaaataaattttcttattattattttttttcttttagagacttttggactagatttggacgccttgggtgatagcctagctagccccaccctgggccgggtttgtaccaattatagtatggattatttacaataatatgaggaaaaaaagaaaggaataattacataaggcaccattttgtgtaaaatatttatatttttacgttcaaagaatgtatttttttacatttttacggttt

SEQ ID NO: 80025 - DNA, 1967 bp, Cannabis sativa
taaaggtgttggtgccatttttgccgagtctcccagcaaggatgtttcttcatcttggaatttacccatgttcgagttgatttcacaaccggaacaactatactaacatacacagaaacaacgaggtagtctttgctacgacaactttatttatttcatgcagaatctgttccttgtttgattgaaactcgcaaaccaaatcgaactttccatttcttgatttttcaatttctgtattccattatggaactcaatttagtttaaaataaatccaatgttgtcacccttcttagaagtttctcttcaatcaatgctcttataaagttttcatgtttcaaacatcaatagattcaagttgcccaaagactcaaataatttgatatcatgataatgtggaactctatataggaaccctgttgtgaagttttctctgacaagaacaacattgggacaagaaatataccaagttcaatctctccttctgttttgaaggtatttttcattcatacacttacacaaaacttatgtatacacttccaagtttaaagcttttaatttacattatattgaaatgttctatgcagcctgacattgctgctcctggtgttaacatcttagcctcctggtctcctactgcttcaccattgcagctcgatgcctctggtcgaaaactcccacttcagttcaagatcgaatctgggacatccatgtcctgtccacatgttactgctgttgtagcccttctcagaagcacctatccaaattggagcccggctgcaataaaatctgcactagtcacaacagcctctttggagcatgactatggccaaagtattgtagccgagggagctccttataaattcgccgacccttttgactatggaggcggtcatgtcaaccccaacaaagccatctatcccagtcttatatttgacttagtaacctaagattatgttcatttcctttgcacaatgggctacaccaacactgccattaatcttgtaactagaactgttacaaatgtaggtccagttaattcgatttacatagctcgtgttcaaactccattcgggatttctgtgaaagttaatccgtcggttttggtgttcaattcttctgtgaagaagcttaaacttaaggaagatacttctttggaaacttgttctgggaagatggttggttctcatgtagtgagaatacctttggtagttaaaactgtcattagtcatattttttcagagacatgatgataaacttggttggaatgtattaaatattgttagtaatatgtggacccaagtctcatgttcctttcagaaatcaattatgaaatgtacataagttggtaattttcatagcaaggggggttatagtagggtataccttacaaataaggtacattttaactattaaatcaatgaataatgattagactatagatgcacttagtagttagtacccatatttattctgcatttaattatactttggtatttaaataaaaaatttagtataagttaggtattttcagcacaaatatctatttaaactattatgtaacgttagcatttaataataacaataacgacagatttatatatagtgcaactaaaagctattctttcttgaaagagttgtatctactgcagttacgtaccttgaactttggaaagttgctcagttgaaaaatggagatgtttcgacatctactagccatgtctcgattggttctgagctatgaagaaaaccatctttgggtgagttgaaggttaattgcgatgcagctattttttcaagagaaaagagtcatggtttggggtggattgctcgtgacccggctagggtgcttcttattgttgctgccgagaagagatttggtggtgtcgaccctgtggtggctgaagcaatgtcaatgaaggaagctttaagctggcttaaacaatcttggggtgatggtggttcgtttg

SEQ ID NO: 80026 - DNA, 2785 bp, Cannabis sativa
ttcactaaatgggtggtagttgaacccatgaacatagtgaattccaagaaagccctagactctatattaagaatatagtgtgcagatatgaacttccacacaagatagtgtctgataatagaaagtagttcaatagtgatcaaatcaatgacttttgggccaaacatggaattatcaaaagcttttctgctgtggccagacctcaagcaagctgacaagtagaaaccattaacaaaattctaaagactaccttaaaaaagaagcttcaccctcgcaaagcacactggccagaagaactccgttctttgggcctataggactactgaaagaacttctacaagccacactctgtactccatgacctatgaatgtgaggccgtaatccaaattgaatccacagtgaaaaattgaatccttggatttaattaaggagcttcgagagcagtcccaggtccaactttagatgtataaaaacaaaatttccataaaatttaactctaaagttaagagcaaaaaattcaaaatcggcgaccttgttttgaaaagattatttctagcctctcaagagctcagagtggggatcttaggaccaaactgggaaggtccatatgaagttatagaaaaaattggtgatgaaactaaccatttaaaacgactagatggaacgagaatcccaagggcatggagtgctgaccacctgtgctaatactattagtaaactgagggtggtcaggttcctttttgtttgtctttactttttattttagtatataatttccatacacacctcatggccgaaagtctttgaataatagaagaagttttcatttcatatttggtctttgaaagttctaccatttaacaagtgatcaaaagtctcaacttttaatcacttgggggtatcatatattatattgttaaataaatagttttacctctttcgtaagaaatagaaaaattaaatcctcaagtataagagtagggagtatcgcctgaatttggaaccctagggaactggaagtaagccacaaccttattatatttgaaattaatatagcgtttaaccaagaataagagtagggagtatcgcctaaaataggaatcttagggaaccgaaagaaagccactacctcattatacttggaatcaatttcaacatatatgaacagttaattcgggttaacttaaaataaaagttcatgcttcatggttaacttaggttaacgcaattaaaatatttgagctacttaaatgtaataattaaattagtttaattaaatatttaatccttgaaatcatgtagaaattaacaagaaatgtataattctaaaataattaattagctcaagttaattgattatttaagttttaaaaatattttaagaaaaacactttcaaatatttttattcaaaataagttaataccaatgttcaggccattggaatcgaattctaaagaatacaaatgacttgttgaaaaaaatatgtaaatttaagcattttaaatctaaaggttcaggcctttggaaccagaaactcacaaggctagaagcattaaacttagcaaactctaaagattaaaacgaaaaatatctaaggagtttattaaatagtactacatacttgaaaaccccacaacaagggtataatatattatctctacacacatgaaaagtgggacccttgtcccctaaaagacaaaaaaaatatgtgatacagctgttgaaaaaaggcaagaatggttaaggctgggctggatcctttggcagttggttatcttcagtttgagcatcagatgagacatccaaaattgcaaagttggttcagagaggaacatcagatgctcaaagattagagtcatccaagttctcacctacaataattgtagttctaggatcgaccattttgtagtctgagttgcttccttagccttgtctgcttcctccagtgccaagatctgagccatcagatcatccctatcttcatcatccaagaggtctattacagatttgtcgtgctgccagatagtgtacatcgagtagacaagggcatgtttcagatcattggaggtctaggcttcctgctcttgcttttataggattacctactgatgttgtcccttcaggcctgatttgtctccctctagctcgatgaccttcttttgggactcttcataggctttcccaaatgaatccaatttagtgtcagcctcctcagccctttggatagcctttttgtgatctttctccaccttctgctgtaactcctaatgaagcttaacctttctctgtagagtagtttccctaatgaacttgtcatttatgatttcaacatgtttgtcatactctcaagagaggatggtaagcttttggtctttttcttgcatgtccaactttgcctgcttcgagtcagcttccaggtctttgactttagtgagagcgacagaatgtaaatctttatacttatctccacgctccctctccatcttggttgcaatctttttgcgagttagggccctgtgcaaagattcaatcactctttgctttatgatagcctccatcttggtattggttttacctagagcattaacaacttcctccctgttttgatgagcattttcatgttccaccctcagcacattaaatttgtaggctagtaggttgaccatggagtagttcctctctgctattaggctcacctttgaaaagtaaagtgcaaattaattaaaccattgggaggtgcaaagtgtttattaaaattaaaggaaagtcaaacttacaacatt

SEQ ID NO: 80027 - DNA, 1430 bp, Cannabis sativa
tttgtaagatatattttaaaggacaaaattgtcattatgtatttaatattaaaaaataaaataaaaataattaaaatccattaccttcattagtcatattccacaaatctcttcacaaaaaaatgttgcaagttcaaatctcctccccaaaagtcaaataaaaagacaccataaaattttttttaactgccacatcaagtttattttggagagaagtggcagaagtctacgagtgttatatacttcatggctatttttgccaaacaaaataaacggggagaagagtttacaagtgttgaagagtaaaaaagttttctgtccatattttatattttaagatggtaatatggattttgctagagaaaaaaagatatatacgatgtacacatttggaacaagtacgtagtttgtagcataactttgttgagtggtttgtagggtcctctaagaaacgaataagattcatgggcataaaacatctcttttggacatggtggaagctccataaaacaaaagcaccaatctttcattctaaagggaatagttcttccatgaaaaagacagggtatcattacacatacacatattatatataaatattatataatcattagtagaggaaaaaagaaatattgacacataaagcaaattgatagtggcaataattaagtacgtttatatagtgtagtgcttgataataagtgtagtcatgacaatactcattcttctcttcttccaatgtatttcttcttcttcttcttcttcctctcctgcacaacaaaagcttaaatattaaaactctctattcatcaaataaaatggctcccaactctataacatgcttcttatctctcttactcttcttatcaaagttttattcatatgaatcgaccatcaccaaagccaaccaaacagaatttttcgtcctcatgaagaaatcactctccggtgccaccttagataattggtacgttggattcggggctaaacaaccaatatgcaacttctctggcataaaatgcgacacaaggagccatgtcatcgaaatcgacgtgtacgattggtcaatctcagggaccttcccagcaaacatttgttattatttgccaaaattaagggtccttcgacttggacggaaccgaatctcaggtgagtttccggctaccatcaccaactgtactcagctggaagagctagacatgagttacctttacctcactggaaatctgccaagcttttccaatatgaaagctctaaggattctcaatctgtcttacaaccttttccaaggacggttccccatttcggtcttcaacctcaccaacttggaagtcctcaacttcaacgagaatgggaacttcaatttatggcaattaccagagagtatcgccaacttaaagaagctgaagtcaatggtgttgaccacttgc

SEQ ID NO: 80028 - DNA, 2431 bp, Cannabis sativa
  modified_base (2045)..(2053): a, c, t, g, unknown or other
  modified_base (2102)..(2104): a, c, t, g, unknown or other
ttactaaagcggtcattacattgagggcaaatgtttctacgtttctcaacaactgacacatggcataaaagggaagagatcatctcataatctcaccaattaaaacccctcagtcaattttagtcacagagatgctctactgatctggcacaggttaagaccaaaaatcatgtaaaggtccatcttgccttattatagcttcccaaacacggaagacttactaccgttctaggacctagagtggtcccagtactaaatctacccaagtgatacctatatgggtactcgaagagcctatcacggacactgactgaccaaaaggttcgtggacatctaccttcaatacaaacccagagctcccaacaacagttatgctttttttgacacaaaatcatatcttgtcccctgtgtccagacatggtagtgtgtgtactaattacacctttttaccagacagtattccaggcctctacttttaaatgttaaaccttttggcaatacgtgtcaattaagtacaatgtcccccaattgtccacatgccgcatgcacgagcacaattatttctaaggggcccaatagtcagctctatttgcatgttatttaccctattagtgagttttttgcagaaactctaagcgggtcatgggcatgtccataccctcccttagcctataaatacccttctattcccatacgaagggggatcacaacctagatagttgaaactctacaaaaattgctctaagctttcctcttcctcaagagaaacatagagcattgagttagggtttcctgcaaaatattgtaaacaaatcagatacgcccttacaggttaacagactgactcgtggactggggttaattaacacctaaaccacataaaaacttccatcttatttatttatgcatttgactatctctttagctcttaaatatttagtttcttataatctcggtaaacaagacccattcactcaacataaatgtacaaagaaagaaagcagagtttacagaacctaacatcttccataaactatatagaaacaacttaacattttatttcagaccacacttaaacttctccaatggggcttaatcctaaatattgtttatcacgaaaaataagcgaatgcaaaaagaagactgaattcaaccaggcacaccaacatgcaatttagccatattacacaaaatgtaatcacactacaaaaaagcaaaaatcctagaaatgcaagagagtaattacgtgctgaaggaaaaagccttggggaaggaatttggatgtcgtatacttgtcgaattgaaggtacgacaataggggtttgatcgagacgcccaactcttgactgaagggtacaaacatgatctataagctcatcaatgttcgctaggaaaactattgatctcgattgctttgaggaatcaattgtaaggtttggggtggcacttttgtgtttaatcgtgaacttcaatgaagaagacaaaggcacttgtaaatgtaaaagggcattcaccaaaaacgattttgggttttttctctctcctttgaacaagaagattaaaattcagagggaaaatgagcaaaagtggtagacggttgattttcaccgtatttataggggaaataacaatcaacgtgcttccggttcaatggcttagattgcctctcagaaaacacaattatatccaacggtctgggaaattgaagcgttagcatttaatgatttctgcaagatccaggtaattcaaatgattatacgccctaggatgcccacggacaagatcaattgtcaccttgcaaacctaggtctcacgcactttcccaatatgtgtaacatgtacagattaagataataaagccatgtgtaatccattagtagaaggcaaagaattcattgtcatccacaacctattgatttggaaattaaaaaggtccatgttggaatatatttgaccaagatctagatttactaacaagtatgtttttaacatcctaatatgaatttcttgaacgatgaatctaaacacataaaaggtatgagaannnnnnnnntggttgcagcagaattaaatgacccctcccactcagatctctaaccctnnnatcctttctgtagcagagtatcacgaagatctgagcccgattctccttcttgttggttggattcttcacagtcttacatactatgattgaggagtcacttgatatgtgtcggcatgcactcaatcactaatggatgaatttggtttgtgaagaatggctattgtatttcgaaaattcaagaggaagaagaaaaaggaataggtctcatcaaacctagagtgaaagctaggtttgtagctttggaggcattagttggatgatcagaccttagctatccttttatactaatttccatagggttagggttgatttattttggaataaaaa

SEQ ID NO: 80029 - DNA, 1538 bp, Cannabis sativa
atatatatcaaatcaaaacttataaaacttatctttctttattttcccatatttttgtaaatagcccaagtcaaaataaccttgatgggcctcactgcctctgcctacataaatatcacagtcattctaatgaaaaggtccatgaggaaagaaggcttaggcttgttgtgactttcaatgaattcttaatgttgtctttgtcaagatatttcatatcaaaatcaaactgaaaatataccttatacaaggatttgatgagatgagtgaagggatgataataataaacaagaggtcaaatcaaagtggttatgcatgctcattcgtgtaagtcaattgatgttgcttgatgtgcccttttatttatctatgtaatattatttctaaaatatatttgtattacttttaattttctattggattatgtaattatcatgtttggtgtatatatttcgaaagatgaagtcaaattaataataagtagattaactctaaaatatattgtatcatccaagcatgcatccaatatggtgttcatatctttactaacgatgagtatactgtatacatatgactatctttacttgaatagtaaatcaaagaaaaactttaatctttaatttttacatttttttaacactttaacacaatttttttttatatatattaagtgacaaatctagaattaaaattaaagtagacatacttttacttttttttttagtaaaagggcaaaaaataaactaaacattaaaaacatatgtttttacaaggatttgaactcttaacttccataatgtgtgaaatagtctaaccaacatgccaaagttactattatgtttatatttattacatttacttacaaatatatattgtatttgtaactaactaaaatacatatatatttttttctcgatttttatttttattttcagggaaaacgacggcctcctctcatctcaatgtgggttacctatgtagcaatccacataacaactaatagagaaacttaaaaatttatataaaaactgctgaagtaatccgaactgtaaattttaaaaacaaaattaaaaaaatattatataaaataattcccctcacggagtggttagtttataagccaaaagatttggttcagtggtgggggggtgtttgttagacactcaaatgaacccggtctctcttagtttcaattaagcacaaaatgtgctaatgataataataataataaaacttaaatgtttgataggttgacattaatttaatgttttataaatatatatatcttaaacttgttcgaaaagaaaatgcatccagttagttgagctacaaacttttttttttttttggaagtaaacgtagaaacttaattcatatagcacaattttgtttttttggcaacttttgcacaaaagttaaatcttcattagagagggtcttacatcacatgttcttattggttcgataaaaataaataaataaataaaaattggagtttattaataacattaatacataaagattctttgccaaaaacatgt

SEQ ID NO: 80030 - DNA, 1586 bp, Cannabis sativa
tgactcatatggcattacactttatttggtgtatacacggtcaaatatggttttcacttcgcgacatcattagaggaacaacatgttccttctacttctaactctcaatgtaattggtaaaaagtatttatggaatttgaatttgcttccaaagatcataatttttgcttgaaagttgttctacatgtttttcttgtggctgcagctctttataagaaaagaattattgattcaactgcttgtttgttgtgcaaagcagtttgggaatcgattgggcatgctctatttggttgtaaacatgctaaggtagtatggaaacactccaaattttctattgattatggacaagcacaacgtatgtttaatgatgattacttggtgcacctttcctctctacataaacaagctgatttggaattaatcttttacatttatgtgggctatctagagtgatcgaaatagagttttgcatggtggagtggtgggtaggaaaagttcctcaattgttgtttacgcaaaaacatatctcaataattttcttaaggctaagaaatttcaactagaacctgttgcaacaacaacaactgcaacaacttctacactcagaagtgacatgccaaaaggtgtttctttgtaaagtaaaaaaacttggtgtaggtgcaatcatatggcaaggtcattgcagccctttcaaaagttgtataagaatgtttcagatcggatgagatggagggtaagtcattttttatagctttaattgggtcacgcatctacaagtctcgataacacatattgaaaccgatactttaggagtccccaatgctttaaatgctacatctttaaaattattatgttttacaaatttaattttggatgaaagttatttttttttagagttattacttattatttcttaatattaagagaaaatatttgttggatgggagaaattcccattcccattttgtttgtaaattactttttttttttaatgataagaccaaggattagagtgagatcagcaaaagaatgaaggaaatgaatttggtctaaatcctaacttcattcacaatccacaatttgtcttcgtaacttgtgaacgacgtctctatcacataaattctgtaactgcaaacccaaaatgaaaaatggtccgccagatcacaggacccaacccttaatcaacggtcaagattcaacttttacatttactaattttaatataatatatttgtatttctttaattgatgaacagatcaaaagacaaaagaaagctgatttttttttctcattgggcttcttctccggccgtttgggaatccaaaaatggcatcttggaattcatttccactcgaaatcacatacgaagtagtgggttggattgccttcttctcttggtccatcagtttctatccccaagtcatcttgaatttccgtcgaaaaaggtaactattcaaaaaattaaaaaaaaaaaaaaaaactataattaacgaactcattgttcccactaatcacaattttcatgaatttgtttgatttaatttctgggttttatgtttttttcttctttcatagcgttgtgggg

SEQ ID NO: 80031 - DNA, 1575 bp, Cannabis sativa
tacttttctaaaagacctaaaacaaaagcctcataccaatagaaatagtgtccatctttatatacctatgatttttcctattgcacactcacaatttgatagctgattctatttaatgaatagtttatttgtttttttttttaagaaaaacaaaagaaaagaaaaaagtttctttgccaatttttatgcaatcttgaaaattttatttaatggtgtttagtattgtggtcaataataattaggattaaaaatccacatacatacattaaaaatattatatgtagctccggtgaatctggaaaaagaaatttttgtaatgaaaaatgataataaaagcatgtgcaaattcgacaactcctttaaattatgcacttttgttttgaaactgttgaatataaagctcttcacatttttcacaaagtcattggatatgacctttttttttaataaagaaaaagtagcagaaagtatagtagaaaagaaaaattagttttaaataaaattattttactatatattaaatcaatattgccactcaaagtagtgtttttattataagaaaataaataaatgagtaacaaaaagaaaaaataaataatataaagagtattgaggatggtgattactttgctcaacatcaaagatatgttgtctgggtttatggtgacactttgcattatattatatggtttaatatattacttacaaacatataatgttttgaaataataataaataaatacataataaaaaaaaactaatggtgagatatggggatattattgaattgaagagaaaaaatattgtacctctatgcttcacttttccatgtactgttctcttcattttaattacttcttttcatgtattattatctagtatttttttataaatgtactaattattattatggttctttaaatttgactatgcttaaaaatttacccattattaaatttgaaaccccaaattaatttataccacatatacctatttttacctcttttccctataataccaccctcatataacaagaatgataaaaaaaaaaaaaactctctctctctctctctccacaagcacaatggacgacatcggcgaagagaccactagggccacgaatcacacacattcaccgtaaaaagttcactgctcatctagctcgctactaatccactgtggaaacccaaacacgcacattctcttcaataatggataagtatttttcaaacatttagaagagtatgtaattcatttccattaaatctgagtggttgttatttgtattggtgatattttgctattttttgcttgaaatgacgagatatggttttccagtgaaagttaagttttttaggaaaattcgataggtttttgatattatatcaacgtgtttttgatgattagcgtaccaaggttaatgatgacacttttcgattgttttgagatagtttctcaattatttttatggttgtctggtttttacttgtctaaattttcattaagttctcgacaggatgttgatatcttttttgatactttcacgatttccctcgaaaagtgttgttatctttc

SEQ ID NO: 80032 - DNA, 2107 bp, Cannabis sativa
ccataaaagttaataccacttataattttacaatataattttacataaaaataaattttacataaaaatattgttacataaaaatattgtattacataaaaatattgtataaaatacaattcaatataatattatatattacgatttgatgtaatacggcgtaccaaacgaaatcttaaagttttaaaaaatatcttaagttttaaatgtgacatttgatgttgagacaacataatataataaagagaagcctttagattaattgtgacaataatttattttaaatgatgtcttaatcaatccaataaaattatcggtttatttttgcaaataactagaatcaatgatggaaaacttttggtggggcatgaatgagaatggtacaaaaatacattggcgcacttggaatttgctatgaaaaaaaaaaaggatgatggtggtatgggttttagctcttttgtccacttcaaccaagctctacttgcaaaacaagcttggcgcttcattggaaaacctgactccttgcttagacagctgctgaaaagcagatacttcccacaaagttcttctttagaggctcttatcagtcattccccttccttaacgtggcaaaggaatacgttgggataaagactttcttaaatcgggactgctttggaagataggagaaggcatatttattaaaagtggtattgatccatggatcccaagacatagctcttttctgccttttcgatatacagggccaccaaatgctgttgttgcaaacttaatcacaccagaacgtcaatgggacattgctctcctgcatcagttttttttctccacttgatgtggaaagaattttgacggtgccacttagtttcttagctccaatgatagactcatatgacatcaccaacacacgggcattcacaccgtacaatctggctatcaataggccagatctcttgatgacacagagaattcctcaagctctacatcgacctcttcatggtggaaattattctgggttctacaacttccaccgaatgtcaaaatctttgcatggtgagttatcaatgatgctttccctattgcaacttctcttgttaagagaaaaattattataaattcgacatgctcagtttgtggccaagcttgggaaacaattggtcatgcacttttcacatgtaaatatgccaagaaagtttagacatattcgaaaataacatttgactggcatgcttgttcttcaatgagaaaaggtgactatcttctacatctccactccatttactctaaatctgaaatggaacgaattttttgtacactttggtcgatttggagtgaaagaaataatgttgttcatggtcaaagagcaaaaccagcaaggcatttagcctcttttgcatctatctactgctaaaattatcaatcagccactcacaaaatgcctcccaaacaagatcgcagccacctccactagtcattcctgccccagcaccctggaagttgcctcttactagtgcattgaaactaaatgtcgacgttgctatggatgataaaaacaatataattggtgtcagtgctttagttcgtgattcaaatggatgtgttacggctgctctttcaatgccagcaattgagaatttctcttctcatgaaatggaggccaaaacactttttcatagtctaaattgggcattacaacaagatcaaccgatttcaatcattgaaacggatgcacttatggttgctaatgcgttgaaatctcccttcaattgaatttctacttttcatgatctgattgttgatattacatgtctgttgtctttttttcctaatgtaattgtttctcatgttaagcgtacagctaacatggctactcatggcttggctaagtttgtgttagagatgaatgagacttgtttttggttggagactatccctccaccaatatactatgttattatatgtaagtgtcagtattttgtgacaattttgttttgttcaatgtctagccgtgtctagagtttttagtctgttatatctgcactagcgttctgttaagtcggttattgttaagtgttagttagtgccaggtggactattttgtggatatata

SEQ ID NO: 80033 - DNA, 1213 bp, Cannabis sativa
aggactattcggacagttgaggccattataacggggctgaacgtctcgccaaagtcaaaaccaggtcgctgattaaagcctttggcgacgagtctcgctttgaacctttgaaaagatccatctgcatttttcttctccttataaacccacttgtttccaacaacattcatatgaggtgttcgtggtaccaagatccatgttttgttttttattagagcagtattttcagtgtccattgcaccctccaacctttgtgttacagagcttcttcaacactacttggtattttgctggtgcttgaccacttggtgtgtcccaagtatgtttttggtttgaagatttttgctttagatcttgtcaccatagggtgagttggttgtagagatttggggctgctggtgtcatctgtaattgaagtctcagtgccagcagatatatcaggctgggatgcattgagattttgttgggcagcagtatctgttgttctttcagacatgtcaatatcgataggaataggatctgtgttacttacctcacgcacatggcctctcgcaagggattcaacagttggcattttgtttggtgagccaagatggataccatgagtttgactttgagttgacacgggttgaggttcatctcgagataagggagaagtggaggaagctgaccaaaagggcacaaggacagatactggtgtttctgttttgtgtgtatttaagaagccgtgtttgaagggaaaatcttcctcattgaagatgacatcccgagatatgtaaagtctacctgtgcttgacaagcacttgtatcttttgtggctttcactataaccaagattgacacacttggttgagtgaaattggaatttgtgattttgatatttccttaagcaagggaagcaagaaacaccaaatattttaaaaaacatgtaatctggttgtttcttgtaaaggacttcaaagggtgttttcatgttgaggaccggggtcggcaacctatttattaagtatacggatgtttggaaagcgtcccacaagaatttttgtggaacattggcttgagcgagaagagtgaggcccatttcaacaatgtggcgatgtttacgctcggctctcccattctgagccgaggtgtgaggacatgaatgagtaaactcaatgccatgatcactagcaaaccgagtgaaggcttgatattctcccccccaatcggt

SEQ ID NO: 80034 - DNA, 2434 bp, Cannabis sativa
aaataccatgtcacaaaacaagacgcttatattatattttccacttttactctaagtaaagtcacaaattattctttttaatgtagtgtagaattgaaaatattagttgtgtgtgtcttaaataatcaatgagaggttaattaagattcaatgtatctattatcttatcaactcgtattttccaaaagtattttataacggataaattttataataagtcaattcattactccgcaataacaaatatagtatcaaagaatacaatgacatttgttcgagcaaagttgataggtgcattttctctaagcatttatggaaatctgagatacatatttgtccttaatataggatttctttcattacttttttgcatgtaagtttttctttccatatgtgtcttcaatggtattagttctcttcaacaaattttattatatttgtcgttttcataaatttcactaaccattatgacctataaattagtataaatacaggttgttttcacttgttaatctccacacctcgaagaaaataaaaactcagtgtcaaaaatgaattttcttctaacatctgatagaggaaatgttcaaaagcgtcgtgttaactatacatgcttttattgccgtaaatcttttaagagttctcgtgccttaggaagtcatctaaagtctcatcaaaataatgttaattcaagtttaaggatgaggaacttgagcttactcaatcattccaatacttgtaatgattccttgagtattgcaaaccctaaccctaatcctttcatgacaactgattgtcatcctcatattcattacttctctagagaagataatccatggaagaatcaaatcattagctctccaacaaggcacatcaaccctaacccttattgccaattcaatactgaaaatcccttattgccaaactttgatcaaaatcatcgaaaccgtggtgatatgaataatcttggctatccatcctttgctccctcgcgccatactactccctcttttgtctcaaccccgccaatcttacctcgtttatcaactcaaactcgattgacagttaaaccagaaggatatggttgtcaatgtcgtaacaaaaggcgcttcactgatgaagtttctgaagtacactacaagaaagatgaattttcgaggcgagtttcgaagaaacgacctaagatgcatgaaaatgataaggtggtgactaatgtggttggagtaccaaacaaacatgttgatggtgagaaaattgagcttcttcttttcaaagatatggtggaatccttttctgggttggatataaaatcttcttatgaggttgatgatgaagaacttagcactaatttggatctatctctacatctctagctttgtttttatcgtttttctttcaatttcagtaataataatgtggctagcaagtcatgaatagttgaagttaataattgtaatatgtttaagcataaatatcaatgttatcttttctcaattctatataattgactcaatatattataatctctatcaagttctttcatgaataattataatatgtttatgcataaatatcaatgtaattttttctcaatgctatatataattgaatcaataatataatctctatcaaattcaagttctttcatgaatagttttaatatgtttatgcataaatatcaatgtaatcttctctcaatgctataattgaatcaataataacataatctccatcaagttcttttgaaagtgtaatattagagtttgatatatacaaagataatcccattttgaatttcaaagaaaccactcatcatcaaaaacagtatctggttttggtgttttttgtttcttctacggttttatcttatctcctctatatatgtggttttcttttctatatcccatgaaaaattttgttgacttttttgtcatatatggggttggtggacatacgttttatgtcataacttgcaaacacacgtggcttgtatgaataacatacaaccacaataaatgtcttgtttcttttaatgaaaaatgtttgaaaggaaaatgtgactttttttttatgtttaagaagaaaggaggtatatgtattaaatgtgtaattatatttgtgaatccaaattttacatatggccatagatttttcaattaatagagataatttattatatgcagatattgctaagtgagccgaatcaaacatacataaacaatccaagccgtttaacaatacttacaacactttctactaaaagtccactaaaacaccaacgatgaagcataaaaaaaataggaagaatgctaaattttcaacctaaatgaatcaaaaatggcaaacataatatattaggtggcgtttggttggaggtaatgaaatagaatggaaaggaaaggaaacaatctccattccattcctttgtttggtt

SEQ ID NO: 80035 - DNA, 989 bp, Cannabis sativa
catgcctaagtctatattttttcctaccgtatcatgtctaattcatatttttttcatattgtgtcgtgcctaagcacatattttttgatgtcaaatcgtgcttatgctctcggactcgagatttcgtatcgtgtcaaaaaattcgcccatatttacaccacttttgttgtcaatgtcatgccaattggaaggacccacatagtgcatgcctttggctttttctcctttagtaccatagcattttcattcttccatttatgtgctcttaaatatgaaatataattaagagacatgaatatgatgatgacataacgtaaaactaaaacaatttcatttatcttatcttaagggaattacacttaattattcaatgatcagatctaaaataaaatagaatagaataaaaaccagttccaatccaaaaacgacttccttatctattattggctttgcctttgactgttgtaccaaagtcatgggtcgaaagaagcccattggtgaatacagatgaagaaatgaatcacaatctggccgtgctgacgtggtatcatagatgccattgattgagagatagacagctttaaatggggcccacagtaacagtgtttgggttgtatgatggaattcattatccaccgtcagttcggttcatcaagttagccacccaaatcacgattctgctctgctcaaaatttgctaattaattaattaattgctcgaaagcaaaaaatgtggcataatgtactgataaacataggatgtgtgaaaatgaacatatccctttttttcttttttcgatgaaaaaataatcataaaaccttagtcaatcaagagaaaatgagtgtaagtaaagctgtaacccagtagacaatgaatcgttttgcttgcattacaccaatatataaaatgcagtcctcttcttgtagtgggctaagcttattttattattattttttctttttaccttcttttgaacctatcaactacta

SEQ ID NO: 80036 - DNA, 1115 bp, Cannabis sativa
cgagccaagggcggaactgggtcgccttaatagtgttttctgggaaacctgagaacaaaagtcatgcagcatgttagtacaaaaaatgtcttattacattgaccaaaaatgagtgatttgagagtaatatttgcaccactaattcctaacacattcatttaaagaacattacagaataatatctctacttggaaaacagaagtactaataatctccccatcaagttaattagactaaccattttcaaaattgactcgagtttctcttttgatctggacgatctgaaggccccgattatgcagagtggagtattctcaccacatacagcattaaagttagactctgtcaatactggtatttgactctccgaggattcgttagactctgtctttctagtctgacttgaagctgccttcttgttctttttttcaaaaccatcaagtaggagactgaggtcttgaactgcagacttcaaattttttacactaatccctgattttagaacatatttttctccatttgataaccaaccaacaacagctggaattgcattgactcctaacttttccacagatggatcattagcatcctgaacctacataatcaattaaagaaaaagaatttagcgaattgtaacagatagaaaactgtgctaattttaaggggtatttcactacaaaggaatcacagatcaaaccatttgaaataatacctgggcatcatagaagttgaagcgcttgcgatacaagccactaaggacgcgccatataacaggtgtgtcctttttggtggaaagaagcatcactgtgggcagtttttcggttgttggagatggaagttcaaagcccttcaaatcaacacgttttgagaaccttggtaaatgatcatggcagaagtttttcaaatccttaactgaaaagtcaccatcatactccaccaaagagcccttctcaccagctttatatgaataaacgaaaaccctgggaattctgcgaggaaatatgccaaggtccttacatagagactgttctgtctcacagtttatgcttccaacctgacagaaaaacagaatggagtattttcagttttcagtgcttaatatacagccaattagg

SEQ ID NO: 80037 - DNA, 1831 bp, Cannabis sativa
gaatggttcttaacacttatgttatgtgtctaactaagaatagtgaaaaactattgtttgtcatctatagtgtcacatgtgttgtgagatataaattgcaaaagttatatgatacaacaaattcttgattagatcaaataaagaaataaagtactaaaatgtgattggcaattgctagcactaacaaaatcatacccatgtttataaacacaaaatcacgtgcaaaaaatgtgagaaacatatataatgtgactaaagatttagtcttcaaccaacaaaacattgccacgtaacaattttgtagtagataataaaactagtttgatgcaagatataaatgttgatcattgctataggcaccagtggtgcctaacaccttctcgatatgtcacgttgtgattagctagcgatactttctaaaaattattatattaaactatatgggacctgatacttagttggaccaatagcgatactaacacataaacgagtgctaagcaccacaggtgtcctttagcatttttcataaatgattatagtaataatttataaaattttaaaaaattcagaataatttgtaatacaaaatttaatgttcaaactatctatttcagacacatataaaataataaagtcgtgcaataaattctttgaatcctatttttagcgtgttaaattttttcatttttttttaaaattttgtaagatatcttaaacaaatacaacgtatgcgatcataaaaaagtcaaaaataatttttttagataccgaaacagataaaaatatatcagtgtacttcttttaaatagtgaattgtaaaattttccaataatttatatggatatagaggctaagaatgcatcttgtcaatgtatttagatgatttttctaaattaggagccatctttgtgtacatgtcctaggtagagatttggtccgcctgtattagggttacgcttttttatagattttcaattcgaataaacatggatgttataaggtgaacataatttcattttctaaatgtatgaaattcaaactctatgtacgaatttataaaattgaataagtagtgtggagagtttacatgatatgtttagggttccaaaaaatagagtaggtatgaaaatcagcagtggggtcaaaccaaagatagaattgttgctctctattccccttgccatgactaaacacattagtgtgaagaatataaggatcaccactcaaatttcccaagaactcaaaatcaatctcatcccaagttgacccttttgaagataactgaaccaaaaaagaacacccaattaataataataataaaaaaaaactaataatatatacatgtatagtcatacataataagcagtgactgttccagctgaattgccaggtacaagtttgatttgcatatcaatttttccaaacaaatactcttttttggattgaaatccagagcctgaagctttgtcaagtgaaagagttagaagctttccattgttgagcatatgagctcttccatttccccaagtgatttcaaactcttttcttaagtcatcaccataacaaacacctttgtttatggtcatgagaataaaaagtagtgacactaaaataatattatgatgaatatccatggattaatatatatattatatgtgttatgatatgttggtttgtgatgtatttataggttaattggaataataatatgtgcatgggatggtcaagaggtgaggccaaactattcttttaattacatgtagctgtggacagttgtttggcttgtgagaaagtgttaaaacaatagctgtaaagagataagcattaataa

SEQ ID NO: 80038 - DNA, 2065 bp, Cannabis sativa
ccttctatttttggtttatttgttcaagattgtcaatctattttattaatgtttctattagtcatgttaaacggtatggtaacaaaactgcgcactgtatggcacgtggtgcttgttattggtcaggtcgttgttttactgagagcgatgttccccttgctcttcagtccattttttagcggatctttctgtctaataaagtttattttcattcaaaaaaaatttgtcaaaaattaagctcagggtcctttttttactattttgaaaaaatacaaagtctattttgtcatttaataaaaaagagggtccaatcaataacttttacaaaatacagagtccaaaatagtatttaccaaaaaaaaaaaagtgtaaatattaaagtcaatataatatgtaattaattcttcaaaacaatatttaatcaaataaaaagttagaaagctttttttaaatatattaattagatttatttatcatgtaagctcctagattatatagattttaataagttggttttcaaattttcttttaagcatggttttgtaccaaaatttcacttaaatatatttagtataaatggcaacaaaactccaaatagtttcattttacttgcaattaatcctcaaaacctaaatttgggcggtaaaacgtccaaaactacgatattgttggcactttacaacttccatccaaatttgactgttaactgccatggtggattgtacacatagacatagtgtacacgtgacacaattttattagtttgcgtaaataattatattaaaaaaattaaaataaaaaaataaaaaagattacttgagatttatcacgagagtaaaaaaaattacatgtaattgagatttatatattttagctgactataaattatttgagtaaacctactactctatagaaattggtaaataaaaattaaattatattatgacatataagatagatacaattgaaatcaataaccctaactctaatcattgtcaattttcattctagattatttattttatgcttttattacttttagtcttaaatttttctataaaaatttgttattgccaaatagaaataaaaatttaattttataatatttaattacaatttttgtgggttcgacttcactcgtgtaattacttacaatcaatacgtacacttgcataaaaaaattcaacaacaacatcacttagaaactgtggtgatggtgctacattttaaatatatttttgcaatctattacttgaatagctacaagaattacaagattttgtagtttccaaaacataaaattatgatcattgagtttgattgagttcttcttgtggttgggccaaaaccaggaggtggaccaaatcaaattcgagcttggaaatgactctttaacaaactcttaactaagtaatccgctaactaactgctcaactaacaactgacttcctttacatcatattactctcaccaatgttttatatagactttgcaagatactcatttttctggttttgctatgtgtccaaatggaatgataattttctttgtacaaaaggcaaggtatgcaatttagtatgcaatttaatttaatcttaagaatgcttatgctatgggagcttatttataaggatgtcacttggcctcaaaagattctgctcctatgtgggagagaatagaaaccattttgtgtacttcatgatttaaagtagatgatggtgaatgaaaactttttttttttgccttcttagtctagattcctaaggtttttttcttttgaaaagaaaaaattaactatatatttatagggatatgattttgtctcgtgatgtactttcacggaatgtatttcgtggtacattaaatgggtctcagggtacattaaatgagtgtcagagtacgtttctactttttaaccttaattaccggtagatcaatctcagctgtcagatcaaataactccctcatctgacgattgccgtacatcacagattacaatccgtgaaagtacaataatggaacaaaattttatccctatatttataattgatatatttcttattag

SEQ ID NO: 80039 - DNA, 2275 bp, Cannabis sativa
  modified_base (1355)..(1356): a, c, t, g, unknown or other
  modified_base (1601)..(1602): a, c, t, g, unknown or other
ttttttttttttttgtagaaaaataattagttgattttatctaccaggaatattataaaatattcaaatagttaggttggtttttttagaataaatttattttagaagaattagaactaaatattaagaggcagtgttgcttagatgatcaagttggctcaatagaaattatcaagaaggaggagctttaacaacttcaagaagtttaagaagggacgaactacgattctaagctagtcatgatggaggacaaggctaacgagttgtactgttatggaagaggcacctgcgtaagtacataacaatgaataagttgagttaagtttacgctcgtttttgcgagtacttggccaaggattgtagcacccatattgggatataggaaactcaataatagacagctaacgaatgactagatagagctagaaatgaaggatcatgatgctgcactcgatatggattggctatccattcatcaattgctaaaagtatttggctgcttttggcaacaaaggctagagaccaatttacttttacaagagttaagatagccttatgaacttgtttaatctcattttaaagaatagtcggctaaggaaggtatgatgttaagcattgttagttaatgtagtgcaccaagcactggagacacaattaacaatgaaaaatatgcacatagtctgtgatttccaaaaggtctttctaaaagatctaccggggataccctcagatagtgatgtggagttcatcatcaagttagctccaagagtgcttcaattttgaaggctccatacaaaatggtcattaacgagtgatagaaactcaaagtatagctacaagagcacctagacaaaagaatcataacatcaagttagtcaccttcatcaagaggaaggacggaagtataaagatatgcacagaatactaagcgctcaatgaggtgaccataaagaacaattattagttgcaaggctctattgtgatctttgaaaataaatttgagatctgggtataacaagttgatggtctaaaaggaaaggcatacccaagatggaatgcagaccatgatatggacactatgaattttttttggtaatgtctttcggactaactattgtccagggaaccttcatggatatgatgaataaggtgttcaaggagtacctagataagtttgttatcgtgttcattaatgccattcttatctactctaaaaatgtggagaaacacgaggaacacctaaggtcgactctaacctgacttaaggagaatcaagtatacgccaaattctagaaatgtgaattctagttagagaaggtggcattcctacgccacatagtttccaaagatggagnnaggtggatcctacaaagatcgaagcggtcaagagctcgccaatgcgtaagactacaagtgaagtaagaagcttcttgggtctagctggttactacaggcactttgttgaaggcttttccaggatcgcaactcctctaaccaacttgacttgaaaggcgcaaaagtttgtctcgtcagaaaagtgtgaggatagcttccaaacacttaaggacaaactaataacaacccctgtattatgtgttccnnataacaaggataagtttgtggtgtactacgatgtaacgaaataagggttgggatgcgtgttgatgaaaaataacaaagtagtagcatatgcctcaagacaacttaaggagtatgaataaaggtacccagtacacaatgttgagttggcagaagtagtttttgtgctaaaaatataatgatactatctctacgaggagaaatatgaaatttataccgaccacaagagcttgaagtacttctttacgcaaaaggaactcaacatgaggcaaaagcgatggctagagcttgttaaggattatgattgtgaaatccactaccaactaggtaaggccaacgtagtagcagacgcgctaagtagacgtagttatgccagcttggcaatacgggcacaaatggaaaagccactacaacaagaactccaaagaagtggtatagagatcattacacaaaaactggctaacctaaccattatgtcgatgctactacaagaacttaaagatgcacaagttattgatgagttcttacagaagaaaagggtaggctttctagataaagaggtggagaatttctctataggtatagacgacatgctgaggtataagggaagagtgtgtgtagccaatgacatagagcttaaaagaaagattatgatggaagcacacactacacccta

SEQ ID NO: 80040 - DNA, 1254 bp, Cannabis sativa
tcctttccattccattccatttcattacctccaaccaaatgccacctcaatgtcttaacccaagtcgaatttattgttggctgggagcctaggatgaagttggcaccggcgagttcacaattttggaatacgtcgatagcctagccaaagatgaaatcgacagtgcctgccatggaaagaaagaggggcaacaagagtgcaagagaaagaaataaaaaataataataaatacaattttttatttttttgtttattttttaatttaattaaaataaattactttttttattttaaatattttagattaaaatacttataaattgatatgtggtattctaaacacttaacagacatgttaaaagagtattgatggaaacaacacaaaataggatttcgaatatttttgctattatttttgagttttggttattttataacaaaattaataaaataaatatttataccataattatttttttaaaaaaaatttaattacacaatgaaacaaaattttgaaagggctacacgttatgttgctatgtggctacgccactataacactatgtttggtagaagctagaggaggagggagggaaaggggtggagagagggatagaagaattgatgaatactcttgtttggtaagagggaggagacccttctctccaaatacacaatttttaattcttccaaaaatgagagaattgaagaaaaagataaaataacaatctaaaattactttttcactcttaaaaataaaatatataaatgagtaaatgagtaaattgtattgcttaaaaatgatcaattacaaatgtataaattagttgatgcaactcaacttttcaaatcaaattttattctctctacttgtacattttttctcttttaaaatgagaaaacttatcactaatatatttttcaattctatttacaattacatgaatagcatatattttcacttcccaaatcataatattcggagcttcttaaattctgtaaaaaactgcattaacagttgcgatataaacatccttttggaattttgaatgttggcacctctctcttgatccaattcaagactttgtccgactcaaaaaagttcaccacaatcccttcccaataggagattctgctactaattttattactacatcagcagccaaaaaatatgacaatgagtttcagtgcaagtatcacaaaagagaggtatatatcattatgaatgacaccaaatttggatagtcggtcttg

SEQ ID NO: 80041 - DNA, 1830 bp, Cannabis sativa
actttttgttcaatgtactttaaaagatgcaaaacaagatttaatcgccttgatcgaaatgaagctgcaccttttgtctctctcaatcttacatatttcaattcttaatgtcatcccttgaccaattataaagcctcttgatcataaccttcgtgaaaaaaccgagtggtgcatacttcagaattctctaaaaaaataagcttatttgaagttagtttgttacctctcaataataagctatcttaaatattattttttttactctctatctctctcgttccttaatattatcacaattaacagtgaacatctggagaagatcagacaagaatatccaaatggtaaccacatattttacatagaaaaacttttcgccagtggtttcataagaaggtaaaattagagtattttaaaattttattatatttttatcatattaatacatttcatgtatttagatatatgagttgcacaagcttgactccttataaaatggtgatgaattgctcactttagcatttggcttagataatttagtaaccttttacaaaagttgtatagtgaatagtgtttgatttattacgactaaaagagatgtcaagcgaaacataaaattgtaaaataaatgttgttggaactgaatggtttaattattatggcacacttgaagttgtaataatcatattttatattggtgcatatataatgacattgtttgaatacaagtggtgtaacactaatccaattagaaagataacaatcaatgaaaaataatataaccaatataaatacaagcggatttaagtatcaagatgcgtcgtatatacttgctaaccaagataagaaagttttctatcttcaacactcacttagaggtcgtgattggaaagttgttgaagatgttaaccatcaaccaatgtgggacagtgatgactgttgactcccaaaaattgctaagtgtaatttttggagtcattagtgttatgtccaaaagttcgccaagtgtgaattctaaaaggcacccaaagggatgtgttggtacgaagaggagcaaaggcacgggtcatgttccccgtgcccacgcccgtgcgcccaagctcctcgtgtgcatgcccgcacgccaagcctccatgcaagcagccctccctgcgcgcttagccctcatgcccaggctctttttcccacgtgcctggcctccacatgcccatcctccttacacccccttcaaccctatttttctcctcatacaaatggtctgtgtgcttgaactctatattaacatcttgaatgtgcacataacctcacaaatacaggagatggggagcaaagatcaaggctagggtcatttaagcaaggatatcacatacaagataacgactacacgataagtatggataatgaagacaaagtttacctcatccaaagtacaagtagaagagagagcttttgtgctattgagaatgcctaagacatcagactatttgaggtactagtttacctagtatgaaagtgacctgacactctccaactagggatctgatggaatttaaaattgtggggaactcactataaataggtcctttgaggtatttgtaaggaagactttttttttttttgaaaaaaatcaattgggtgatcgtcgaaatcattaccctcaatatcatctacttcccgcttccttaatggatatggatcatcaaataaatgatccccatgctaatgccaagtagtataacttctattgaaacctcttaaatacacacaatccttaatcattgtaatatttccttttgatctattacaacgatctacacatagacaatgaatacg

SEQ ID NO: 80042 - DNA, 743 bp, Cannabis sativa
cccccttaattatcgaggttctacacttgtttcttctattccgatcagatgtattgagttaaaatttgtatatattagtacctattaacatattgtgtattatatttcataattaataattcaattataattagggttgtttttagggtggggagagcccctctacttttttttttttttttgaaggaattttttttttttattttacattagtatatgagcccccaatgcctaagccaacactggtttggatttcgtaatagaatcgtatttttttttcttaataaatggaaaatcttttttgtttcttttaaccctatcctagtggtaagttctatagaaattaaacgatcttatttagtctaatacttaacgacaaacttttatgttcctttcattacaaaataatacagctaaagtaacaaaaattagacttaaagacaattctaaataacaaaacttcaattattcaatttctatgaaagagaaaaaggaaatgtaatatttattcttaaattttaatcgatattactcatgaattttaatgaccaaaatttaaaaattgatacgttaagtaactataaaataaatgaattatcacttaaggtttttatatgaattgttcgttcaattaaatttaaataaattctataggctagttagagaagagtggaaataaaaggaggacatgaattcgaactcaagatccttaagaaagaattataggttagtaacttcaatcc

SEQ ID NO: 80043 - DNA, 1178 bp, Cannabis sativa
ctggcatcatccagagaatccaacgcgaggatctgctggttgattcttttgtgcccatacaacaatcaacggtccagatttctctgtgaccttatattgtcgtttgctacagagattcagaaaaaagaatgtgaaaaggagagttttagagagagaaagagagagagagggtctctcattctcctccaccactgccactgctctttctcatagagcccaacaccgaagccgtagaccgctaaacgctgaagtcagacccttcccttttctcattgctggcgctagcttcctaatttgtctagaaggagaaatttcgttttggagatagaaaagaaaaagtcatttgttggatacccgcatttttgtcgggttagttctttgttcctcttcctgcttttgagtcttgaacgcttattgtttcattcccagatctggggttatacttgtttatgattctcttttcttgaaaattatggatgtgtgtgttttgtttggatattacttttggttttttgaggtgggatttgcttggttgatgcgaatttttttgttcgggtaaaaaagatatttgcttagaataatttcttcccatgaaagtttgcgttatctagcaaaatggtcgctttcaaataccatttttattatgttgtttattaaaacccttaaagatctaatgatgccatttttcagaatattcttttctttcattcgttcattttttttcttttctttttatataagtttttgtatttctttctgttttttattgtcttctccctttacttgttgaaatttgatagccataaagtaatggttataagcatttttatgtgattatgctgaatttcccggtcggtggtcgatttgataatggctgatatttttggatttccttttcatgtggggccaattacgtataaaaaagtctcttagtggaactagaatccagaacccaattgcgtagtagacttttttaattccttctcttagaagcaacattaatgagtacaaatatacaatggatatctatatgttttatagacgtgcgtgtgtataaatatatattgggttttctcctctgacatgagacttttctgtttatttaattaaattcatgatttacatgtaaaattatgtttttgtgtgtggaaagaagaagatattattaagataatgct

SEQ ID NO: 80044 - DNA, 1876 bp, Cannabis sativa
ttgctgtttagcttctctctctctacatggtatcattgtcttctgactaacgtccatggagtcttcaacctccgatcctcatactactgctactgctgcctctctgaatcactggaatcccttctccaattcgttaacagcatccctcaccctgaaacttgatcgcaacaatttcctatcttggaaatctcaggtggtacccacggtgatcggccatgatctggatcaaatacttttctccgatgtctctcccccagcaattcttgttacatgaaatccaaatcctgaatatactatgtggaagaagaaagaccagctccttctctcatggttacgagcgtctatgtttgaaccggttcttgcatctgtggctaacttccatacctccttcacaatctggcgtgcccttgaacagcgattctctagtcaaacaaaagctcgcctattacaactcaaaagacagttctccaatctgctcaagaataacctctccatttctgaatatgtcgacaaagctcagtcgattgctgatgccttaatgattgctggctcccctgtttcacaacaagatttgatcctgtagcttcttaatggccttgggcctggatacgatcccgttgtgtctggtataacttcaagaagcgatttactttcattcgaagaagtgcaagcactccttctttctcatgaaactcgaatcgatcaccatcattctatgaatgatctttctgtaaaaatgcaagccaatcttgctgcaagaaatggcccctacagacccccttttgcttccaatcgtggcactcagcctgaaaccaacagaaacagaatctatggtcgtccacctggtgcaagattactttgccaagtctgtcttcgcactggccacactactgccgtatgcgactatcggttcgacaagaactgggtcactcccaactacggtaattctcaaactcgggcttttcttgttgaaactgacattcactatgatcctcaggttgccacaacaaccatgtttcctgaacttggcgatgatgaatcttggtacattgatacgggtgctactaaccacgtttcaatggacacatcaaacttggtcgtgaccaccaactacactggcaatgaaactattgctgtaggtaatggtaagaagcttctcattactcatattggccatacctcctttccttcttctttacctactaagcccctccacttaaattctgttcttaatgttccatctatgaccaagaatctcataagtgtttcccaattaacttctgacaatgatgtctttcttgagtttcacaaatcatgttgttttgttaacgacaaacaaacagggactgtgctcgtcaaagggaaggctaaggatggtctgtaccagcttggtgaagcctccaatacctctcttcaatgtcatctcactactctgtgcagtgatcctacaaattccaattgatgtacctgtaattgtcattcaaataacaatgtaatgtcatgtaatattgatgatatccataaagtttctgtttcccctaattcttcgaatccagtctttaccattactaaacagaacgatatcaacatttggcattataaacttggtcatcctgccttaaacactctcaccaagattctaccacacatcaattacacagggtcattacaaacattgaatttttgcaatgcttgccaccaaggcaagagccataagcttccattcccacactcatctaacagagcatcccaaccccttgcccttatatacacggatctctggggtccgtcacacattacctcaaaggatgggtttaaatactatgttcatttcctagatgactttagtatatattgttggatctttcccctcaca

SEQ ID NO: 80045 - DNA, 945 bp, Cannabis sativa
tttttctatcatttagtcttctaataaaaaatataataaagggtatttgtcaaaataatatttttatttgagttatcttgtataatgataacttttttaacaaaataattaataggtcattttacaaaagatgttatatagagtaatgaaatgtacaaccacaaattatattttgtaattatcttaaattagttaatattagtatcacattattaatgttggaaaattttacaatccacccttttaaaagagtataatgatatatcattatttattttagcatttgagagaattttataatttaattttttttatgatcgtgtatgttgtaattatttaaatatctgcacaattatgaaaaattttaacacatcgaagacaagattcaaataacctattgaactcgtgaatttttaattttatatgtctaaaattaattgtttgaacattgtttttatattgtaaattattctaaatttcttaaaaattttacaagatgtcttgaaaaactataacatagacgacaataattttttttaaatgtcgaatcatatgcactccttctagaagggcgcatagtagatgcatacaataatgagatgatattttagtctaatttattagtgtatatatctttacttttttatatgtataaaaaattactttttctacataattattttatatttatataaattagaaccaatataaactagtttaaattcaattcacattaaaaataatttatttttatagattagttgtgtgaaaaagtaagtctatagtatacatccttaaagagtgtttcgtagattttttatatgtttgagtatttaggaaaaaatcttaatttttcttataatcgaaaaataaggtttaaatattttattacatgagtaattattttttttataagcatggtagaaaattgttcaaaatttattt

SEQ ID NO: 80046 - DNA, 968 bp, Cannabis sativa
catctgatttatgttgcaacagataaacccatgtgaaacgagtgtggtcatctaccaatgtaagaaaatatttgtagttggaatgggatggaatatgatatggtccccaagtatcacagtgcacaagatcaaatttgttatgagcaaaagagtttttattaggaaaaggtaacttcttttgctttgccaaagggcaaacataacaaggagaagttttatgtacattgttgacagtacaattcaattgtttgctcaaaagagctagtcttttatgagacaaatgtcccaatcttgaatgccatagctcggcagtaacagaaagaatctcttctggtttgcttgtatccaaaacgtaaagtccattgttatttctacctttgccaatcaccttctggtgtgttttgtcctgcatttgaaaaatgtcagcagaaaattccacagagatggtattgaaattggttaaatcacttacagatataatgttgtatttgaagtggggagcataaagaacattggttaatgtaagattattgttgatatagacagaaccactttgttggacaaaaacatattcattgttcggcagaattagtttgactttaggtataggacagacacattgaaacatcttaatattattacaaatatgtcttgtggcccctgagtctatgatccatgattcattgttaggggtaagacagtgattggataagacaatacctgtagctcctgaggaagaacttgggtctgtagtgatcataccattttgttgattagcaagaagatttaataactgttggtactgagttgcattgagttgaggcagcaaagtgtgagtttcttcactggtcttcgattcattgttggtttgtatctagtttgcagcagcatccttcgaacaattgcttttgaatcctggtggatagccatggattttataacacttttcgatcgtgtgaccatgtatg

SEQ ID NO: 80047 - DNA, 640 bp, Cannabis sativa
  modified_base (26)..(26): a, c, t, g, unknown or other
  modified_base (589)..(592): a, c, t, g, unknown or other
tcgcatattcatattacacattatanacagttcttacctcctttccagattcaagttagttggtcgacctgaacgaaaagtcggggacatcctgggacctcaactagcacaagaagggaatcgtcgtgaagaggcccacattggtgaccagcgtgatggagcgacagcctccataaccattgtcggagaaggtgtgacgcaagaatggagggttcattcaatcagacatcctctgcctccaacaccaaaggatccaaggacctcgcgtgctagggcggggaaggagaagtgagtctactctgtcacgtcaagctcccgcacccgcgttcataacgacgagatggataagtcaaagataaataacttgaggttagaggagaccgtagcaaacatgcagaaggtgctggacgagctcctgaaggggcatttcgatgcacctttattccagcaaagagaacttgaagttgtcagaatggagaaagacaaactggaagacgaaggactatcaaagtattccaccagtaacataccgaaagcatcgccatcaaaggtgaggccctggaaggacccagtgttgggttttatgccnnnnataaaactctttacaatctgattagttatcaatagaagattagaagtc

SEQ ID NO: 80048 - DNA, 690 bp, Cannabis sativa
aattatactaatatatattacaatatgggttctaaagaaaatgaatgcaatgatgttaatccctttattattatgtggacagggagttaagttacatgagaaaagaagaagtgttagtgagtatcaatctctttttcctactattgatttttcactcgtaagtaagtcctaattgatttttcattcctctccaatatttattattatgagtagacatcaatataataattataataattagggagaaaattcttatgaaatatgtttttcttttcaatttgaatgtttatgtaattacatagacattattaacaaattacaaacatgattgcatagacatttttgttgtaattttctctaataattaaaaccataacttactatttaatcaactttttttaggtagaaagtgatgaagatatattgtggaagcctgatattagagagactaaagatgaaatattagtcagaggtcaacaattttttaactggtaattattaatttttctatcttattttttaaatacatcatcaaaattttattattattattactttttatttacattatttaaatcttatactttttcaaaaaaaaattatttatttatttatttgtttatttaaataaatgagatgagagtgaaagattgaaaaataaaataaatttagacaatgaataatgtttgg

SEQ ID NO: 80049 - DNA, 1774 bp, Cannabis sativa
tttatagatcaggagattaagtttggacccaaattgatgacataatctcttgtggaccttttgtcatcaagatagcttgcccaatcactatcagagtatgcttcaatggaccttcgagtagctggttgaataagcaaaccttatgaaattgtgccctttaggtatcacagcagtattttgcaagcttcccagttcacatttgttggagcatgaataaactgagaaagcttatttataataaaagcaacatatagtctcgtcaaaattaggtactataaagcaccaagagtgcttctataaagagttttatcttcaaaaggagtgccttctgtgagagcaagtttaagagaagtactagtagaactagaacaaattttaacaccttccgaataaactttgactaaaagatctgggatatatatgctttgataaaggtacatgcctgtagaagttcaacgaatctccactccaagaaaataatgaacttggcccataaaagtaagagaaaatgaggagttgagatctttaataaccttctaaatgagagtagaattaggccctataattaatatgtcgtctacatagacaaatataatgaataggttgttactagcaccataaaaaattataaatatgttttagcttgagaatcttgaaaaccccagctaaatagtgtggtcttgagcttatcatttgaagctctaggagcttgttttaaactataaatggctttatgcagtttacacacataagtaagatgattgggatctttaaaacccttaggttgggtcatatacactgtctcttgaagatttccattaagaaaaacattataaacatcaaattgttgaacttatcagttgtatgaaactacaagagctaacctcacagtcactggtttaactacaagactgaatgtatttacaaaatcaatcccaggctgttgaggataacctttggcaactagtcttaatttgaatttatcttgtgagccatcaacattaagtttagctctaaaaacccacttgtgataagagccatatgaggttcataaggaactagagtccaagtaccattaacaatgagagcaaaaaactctttgttcatagaagcattccagacaagattttgaagagatgctttaaatgattttggttctctaggaagcaaagattcaggcagttgatgcttggtagctagccattaggctttaggcttatagatacctctctaatatttgatcaccatagaatgagttctttaaggctcagtaactacaacaacaagttttggaggaggaatctcaaacactatagcaacttatgaagaaggaacatattgaggtagaggttcagaaagaacaacctcatgagaaataagagacgaagttgaagcgaaaacttcaggtaaatgataaggcaatggtgatctagttgtagaagagttaaaagtagccatgggaactagtgaaggagcatctgatggattgatgcttaggaaaaccagcaagaaaatagaagaaagagtaggattaacactggtgatgacattgtttgtaaagaaaggaacaataggacatgagaaagaggtagaatgtacctgagatgaggatgtagatctaaatgctgggaaggagagtgcatcaaacactacactttgagctataaatgatcttatagtagcattttgacactagtacccttacgcttcgaagaatatccccaaaataaacattcttcatgtctgtagtccatcttgtgatgattgtaaggcc

SEQ ID NO: 80050 - DNA, 1774 bp, Cannabis sativa
atcttaatagttcagggggaatttgtaacggctaaaatagttcagagggcatgatttagtacatgtcaaaatttggggaaaaaaattactaattacccttaaataatattatggaaattggtttggatatatttaatgattagataggtcgtaatattaatttaaacttcgaagtgaagcgtgcacttaattattaacattatcttcaatacttaatattaattactatacaaagataatactttttcaatctatactatagatataaataggaaacaaaagataagaaaattaattaatgcttgccagctctgaaccaatcaaagctttttctacataaaatttattcaattaaatagccttgtccctaatgactataaatatattataaatgaattagttagtcctttaaaaaaaaaaataataataataaaattattagttagttataatgtacatttaaacaaagtagacttataaaaataatttgtaacttcatgtagatttcgcaattgttaaatgtaaataaaactttaaataattaccagaggtttatattttttattataatgttttagttaacattcacatttgaaattacactttagaaattttttttataacggtattcgttatagttacaagattatttttgtaatttttttaaaaaattcaaatagtttacgttatcgtaaacagagaacctgatatttcaatttaccacgcattttcaaaaaactttaaatatatatttttggcacgacaaactattcgaattttttttaaaatttatgggaatgatatattgtaagcacaaacgaataccgtcatgaaaaaaaaattaaaaaatatttcagcatgtgtttttgaatacaaagaaggttgattgagaaattgtaatggaaaattgacggtaccattctactattacttgtgtgtctttcttttaaatagtagccttatcctgtatggtttatatattataatgtaacacaatatttatatatattaattaatatagattttgagatgtataacattatccattaatttaaaaattcgtgtgagagttcatatatagattaagagtttttctcccaaattgttagaagcacttttaaaaattctcttacaaaaaagagagagaaagaagaagaagaaaactatttagtttgacacaaacttagctatgatcatataatgaagaaaaatatgtaataatcttgcaaagaatatatatggattaatttagatacaataccatatgatattgcaaatggacaggttataatatgaaaaatatgtatttaagtacgatatgatacgataaacttaaaggcatgacatctaataagcaaaaatgcgaaaatacactaacctgaaaacaaaacgcattaaaaaaaattagataataataataaatatttatttattaattaaaagccattaaaacaatggtacactactatttaaattttaataattataaatttctttatgtgactgtataatttttgtaaaaaaaattacaaaaaagtaattaaagttataaaagaaacacatagatatatagttttgtagttagttgattaattgtaataaaaatattaaaatatggagcacgaatttgtataaaaaaaaactagtcaatccctgtttgagaaaaacgagtcagttcaaataaagtaaagtacgaatctaaaacatgataagaaaatattaaacctatcttataaaaatattaacataacacgatacgatatattttttcatg

SEQ ID NO: 80051 - DNA, 2523 bp, Cannabis sativa
  modified_base (2468)..(2498): a, c, t, g, unknown or other
ccgaccccagcctccaatggtaaaagaaagcattgtaagtacagttaaaagaaattaggatgtaatagcatggagtcattctgacattctagggattaatcggaataccatcttccatgccttgaacatcaacaaagacaatacacctatttaccagaagcagagacccttagatctgataagggcagaagcagtaaaagtggaagtggacaagctgacctagaatgacttcctctagaaagcattatgtcccgtttggttggctaatttagttttggtccctaagcctaatgacacagggaggatgtgcattgacttcacggaccttaacaaggccagtcccaaagtctgtttccctctttcgcaaataggctagatggtggatgccacctctgggtaccaattattaagcttcatggatgcttactctggatacaatcaaattaaaatgcacatagctgatgaagaacacaccatcttcaaaatagataaaggtgtgtgtagctacaaggttatgccatttggattaaagaatgccggagaaacatatcagcaattggtcaataagatgtttgagaaccgattggggagaaatatgaaagcttatatgtcaatgacatgctagtgaagtctaagacatctggaaagcacaatacagacctcaaggaagcattctaaattcttcagaggtataggatgaagctcaatcctaaaaaatgtacatttggtgtctcctctagaaagtttttcgctttattgatagctcccaagaaattgaagctaacccataaaagatcaaagccttcattgatataccatctcctaaaagcacaaggttgtgcaaagtgttattggaaggattgtagccctcaacatattcattttgaagtctacagactaatgcatctcgttatttaatgtgttgcgaggaaacaagaaatttgaatggactgaagaatgtgaggaggctttccagaaattgaaggagcacttgagcaaggatccaattctatcaaagtcgatggaaggtgatgatttgtacctttatttggcagtgtctgatcatgccataagtgtcgtgttaatgcaaaataaaggaaaggtctagctatcagtgtactacattaggaaaagattactgggtgaagaatctaggtatcccatgattaagaagttgaccttttgcttattggttgcctcaagaaagctcaagccctacttccaagcccacactatcatggtactaacaaatcatcttctcagctaagtgcttcaaaagccagagtcatctgataggctgctaaaatgggctatggaacttagcaaatttgacatctaatattagcggagggtgtcaatcaatggtcaagccctagtagacttcatagtggaatatttcagattgagtgacctcttacacgagccaatcccaaagttaccaacctggaaagtctatgttgatggagcatcgaatgaaaagagggctagagtaggaatcatattgatctctccataaggacattagctctagagtgctctccattttgaattccctgttgttatccctattcttggataggttctacatagagatagcaaaagggtgccatatcaaatcatatgagaatatcacagattcaatttccttttaagataggatcaagggaggcatcaaagtatctaggagagcacatctgttgcaaaggaggaatcgatccctgaagttgtaacctagtgcttccggtatttaaaggcatacgcgaagcacaggccttctgggggtacttaggaattggctattccaggaggtcctgagggacacttcctggaaggcccctgcaaactagcctggagatacactcggtgggctacacctcatctgacaccaagtcagatctagtcccataaatcagaccgtggctgtgcgcgtacgtgcctctgtagtgctaattgtccaacgacttgtttgggatattgcttttaaatgagaaacctttgaacgacatgtgtccatatccttacgtgacaacctgcatcgatggaagagctacgtaccaaattaacgatcagatgatcttatagtgtttcacagcctcacttgcgtgctgagtaagaaaccctagttgggtaaaaggtatgcctttacccacacgtgggtctataaataccaccatttttttatgtaaagagggtgaacaatccttacttacaaaaactctgctgaaatttctagagagctttcttcttagagagagacaaaaggaatacagagattatcattgtaaatacttgtaatactcaaaaaatttccaaggaagggtaatactactgactcgtggactaaggatcattaatgcctgaaccacgtaagaaatatatttgtctattatttaatatttttcatttcctcaagctcttattaatcaattcccaaaaatctcagtaaatatttgttggaaattattttnnnnnnnnnnnnnnnnnnnnnnnnnnnnnnnttattaacatcctaaataagaactt

SEQ ID NO: 80052 - DNA, 2249 bp, Cannabis sativa
ctatatttctctgattcaatcccatgattgtagggattgctttcgtgtcttggcatcgcaagattactctgaagtgattaactctttggaagtagttcgacaagccaaacttatcaaaggtcatacattgcttggatggtctattttcatcctactcaggtaatcaaaggttatacatgctgacgtacaatatcgagtctattcgggacattcacctccgcctagatacaagaaatgcaggacacgtgtcacctgattcttttgccacatcattatgcaaaatattggataacaatctcaaaagagtgctattatagatttttataagataaattttaaatcttgcttttaattatattttaataattttggtggaatttttttctattattttatatcatttatttgtggtaggatatttttagcctattatttatgttattttttagaattaattttttttctttattatcactttttagaatagaattacgcttgttttcgttaatttcaggattcgacacctagaatgtataaattggtcaaatctcacaaaaagatgatctataaaatagagaaaattgtgtaagaaaataaagctaaaacttcaagcttaaattagactatgttctgatcagattttggagaaagtcaaaatataaaagttatagatctctcttttatatttctgggtcgtctttaatcgtacagttctgagcaatatcgagaaagttataaccaaaatactatcagtcgacgtagtagttaactcattgtccaaataaaaggggttatgcctaggcaatttgttagctaattgagttttgttacattttttttttgaaaaatagttaatttaagttgggatttaatttgttaagtttgattaacatctcaaattttatgcatggtgtaagtttaattaactagtatatttttgcctgagaagacttaggtcaaataattgaacataacaaattagtttcgatataatgatgacatgctaagtgaaaagaaacacttcaaagataagttttttcttgttaaaataataattacgttttatttttaatttaaaaattcacaatattatcgttgtatagtatgctagtttatttttttatatctatttattttgtaggtagttttggtttaattgattgtttatatgggatgtttcttgaagtcgattttaagttgttttgcttaaatttttgagataatttggtcatatatatcgttttatttgtagtgactcatattctaattttgtatatatttaactagagaattaccttattaattgaaaatttctctaacgattatcatgaatcactcactctaaaaaaaaatatatttaacattaattttaatttttaagacagtataaggctaatattgaaaaaataaccattaattagagatatttctttctcctatacacaactgttctgatttgaaaggtaataataaagacaaaacctttattttgttttagaggaaaaaatgcctagactttcatggatccataaaaatatgataactcatagttaaaccaccaccacctaaatattatttgtccttcatgacaatttgtttgtgtgtgtttatataaatatatacatatatataatgttgtgtattttaaaggcatatataacattagaaaaattaagtttgcagtatactgatagttatttttccaattaattaagatgttggagggaaaagctgtggtgcgtgagacagatatgacagaggcaatgcaaagccatgttatggagttagcctacaaagctcttgatcttcatgaagtttctgattgtcaatccattgcaaattatatcaaacaggtttggttttttctttaatctcataatttaaaaaaagaaactattatattgtattggaagattgtgtttgttaatgaaagtttaacttttattcaaaaaaaaaaaaaaaagacaaagaaaatattatatgtatacagattatattcacctggtatatatctatgaactttcatgtatccatggaatatcatagttcattcaccattattaccataattttataatatactttaatcatcaattttatagaatatgaagttttatcaatttagccaaaatcccctcttaattctctcatagtttcaatacatatcatgaaaaaaaaaaagaagagaaataccattttagtccccgtgttttgcaaaagttattaagtggaccatctgttttgttaaa

SEQ ID NO: 80053 - DNA, 796 bp, Cannabis sativa
cagaaaacgacatctaactatgtgaatttatatttgaccgctgcataaatttgttttaagtttaattaaaagcttaattatcaatcaaacctaccctagctatagctaacacatcacatcatgaatgaataaataaacactattttttctattactattattaatactgaaatattaccagtcattataaatcacatgtcaactctaggacttacaaatattttaacaaggaatttcattaaattcaagtcacagttcctgcaattgttgaaaaaaaccaataaatatcgttatccttatcatttggtgataaatgatatttatttattggttttcaatgtgaataattccatcacttgtagttgtgaaatgacttgtatatatttttgtcagtataataagatgtcatgtaaataaaaacatgttatattatttacgtattaaattaaattttagtggtgtcaacacaagctaaaaaagactaatattatcaagtttaatatattttgtgctttggatcgagctttgtgataatgaaccatgcatgtttccattaattagttctattcttataaattattagacattttaaggtgtgtctaatattataccaatacaatgaaatatgtgtaattaatgatattttatattatttattaaattatattaataataatatgcatctcttataatgcatgcaccttagtcttcttaggattcaaaaaaggattaaaatataggccaatcacatagtactgagagtgagtgtttgggtaatgggattgattgatcatat

SEQ ID NO: 80054 - DNA, 1276 bp, Cannabis sativa
tagtcattctcttattctttacacattgtaatctattactgaactgtgctatttacatcttcaacaattttgtttgctgaacttgaacaacccttaaatatacacatgtttctattagttcaaatacagtagcaaacaactgctgaaaccacaacaagaatacgatgcacctaacttgacaagtcagaagacagccaactaatccaatctttgaagtccaaaggccaaaatcgattacccaaccaaaagaaaatcagatctaccactctgttggaaaggtaacaagaaaagaaaaggtgctcatgcgattcattctccttttcacaaactgggcagatgggagattctaattgaatttgcaacctggccatattgtctctagttaatagctgggagttaaccacttgccatagcacaaaatggtgcttaggtaagtttagagagctccagattgctttgtggtaggggacctgttgttgcagcaatgaaatgttatataactagttttgaatttttcctgaggttccagccgacttgatatccatctctgagaatctcttccttaggtgacctaatttgcaccaataccagctagtgttaggctttagaacatatgaccaaaaagaatctgattttagataaatggtattaatctatttaacccaaaaaagatctttcttgctggctaaagcccacacaaacttagctaggttagcataattccatctcactcaaactttgaagcctaatccatcataggcttttgggagacagactttctcccaagaagccatgtggactttacttttattgtcattgggaccccaaaggaagcctctacataacctctcaaattctttagtcacactttgaggcaagaacaaagatgctcatccagtagctccgaagaccaagtaaaactgagtgaatcaattgcattttaccagcataggacaggtgcctactagcccaattatacaacatctgttttattttcttgatgatgatgccacaatcttcagctttccacttagtattccttaagggtatcccaaggtacttcagaggaaaggaccctttagcaagcttaatatcagtaagaatattatgtttcactataggttcaacaccaccaaaataaatctaagattttttagaattaatgtgtaagcctgaggctttgctaaattcctcgagtacctgtttaagagcagatattgattggatggtacatttgctaactagagtaagatcgtcagcaaagcaaaggttaact

SEQ ID NO: 80055 - DNA, 1103 bp, Cannabis sativa
ttttaaagcccatacacggctggaacactattttgccaaaaacccatattgtgtgttttgtagtttctttaggttattttagtacagcagcaaaattaacatctcatctctgaaaatgatgtgttttatttagcttggaaaatcaacatctctccaaatcttagctaggtaaagccctagccgttctccacttcagttgttcccttcctcttcacttcactgaactatctctctttctctctctcattttctggttgtgtgagttaactggggacgaagattttgggaagggattggaggtttgcggcaggtagtgttggctttgaggaggtgtttgtggaatcagagattggagtttcagacattaccggcggtggtagtgctgtgaccggcggcaattggggttcagatgagggttcttctttctaatcgattctagctaatgtatttgtgaccggagattggagttcatttccaattttataaactctgcaactgtttttataaactcttttttttgtacattcaacttcatcaagttgtacattcaagaaaagatcatctcccatggcttttttttcttcccctgatctttaccacttcttcttttttgcttttaggaacagtagtagtagttgctagagagtttgagagatttaagctgtagaggttttcgtactatactcgtattaatatatatagtagttaattaatctcttactatagtttaattagtacttattagtaagtttgtgctagaaaaattattgtattatcaagagtttctcatgatgaaagccatcttaatttctgtgtttttctatgtttttttttctcttctccattaacatattcacaagagtatgtatgtatatgctatatatataatatctgaatttatttatgtataaatatttatgtaatgtgttaaaattaaaattcatgcagtaagatcaatattgactttattttgaatttgtatgaactatagctcatcatttgcaaatggcatatctttttagttcaaattttctttgatataaactcttttttcttcttttgagtttatttctaattttagtgttgaaattgtttttacagtg

SEQ ID NO: 80056 - DNA, 1756 bp, Cannabis sativa
tgacaaggaatcaaggttttcttttttcaaggccccatgacagaaagagcatgcaatctatatagtaaaatacaatttgtatttctaattctctaattactaaaaaccaattttaataattatttgtggcaatcataagaggggatattggaagctgagaaaaataaacaaagaaaacagttggaaatagtttaactgccacccaacaacacaaaagatttcttaataataataattattattattaatcataaaaatgggttagacagtgatgttgcaaagattttcccagaccaaaatatttgaatcaacaaataacttcttacaaagctctgaggtggccatgacacaactgtcatacacccaatttttttgtttgcttcttctttatttattttcatttttttttagctttctctctctctccttgaaaaaacagctcttgttgtgagtgagttattatataaaaataaagataacccaattgcatggcctaatgggaatactgatcatccacccaccaccaaggggtaccccatggccatgggtgtagagagactagagattccctaaggttctctattatgaactggatcaaaatgatcatgaccattgattttctttctagggttaaatataatatataccccactacacaagtttttgatggtcccccacaccacaccgcagatgggaaagggatagggataggtttggaaatgaaaatagtgttaaaagaaaaagggaagataattattattattattaacactcttgactcaatgatagaacctcctaatctaaatttagcaatacattcaattactatactttcttttttttgggtttggtgtttgttatggtttttggcgttttgttagctctggcgacaattattataatgagaaaatattttttattgtgacggggttctgtttgaagatattataactttattgtttaaattttcggaggcaattttattctatgtggctcgcgttaagaattctgcagctcatggtatggcaaaacatacctttcggttaggcgataagctatcctgatttaaagaggttctgttgccgattgtggtttattgtatattcttaatcataggactctgttcaccgcgtccgcgtcaaaaaaaattactatacctttttatttttatttttattttttaggaaattggttaattaaaataacaaagattaaagaaagaaagaaagaaagagatattaattggattcttttggtttgtttagttgagtgctttgaaggtccaaactggaaaggaattgatataattgtgaaaagggttagctaagctgccgcaactggcttttctcctaattcgccttgcctctcacgcctctctggctttggccatagtatatttgtatgtgttgtgacttgtgagacccttttcctccactccacaccaaacttttatcttaagcacacaccacatttctctctctctctctctctctccatgtgttgtcagcagcaaatatttaccacaaaaaataaagctttggtaggacttgggttgggaggggtaccttatctacttcattataagatattattgaacatactcttagtactactactactatttctaaagccattaatactatactttcgtccttttatttacaaaatttatacaacccaatcaaatgggaaaattagataacaacattctttttttggtatattcaatcataatatagcaattgtataaaatttg

SEQ ID NO: 80057 - DNA, 2354 bp, Cannabis sativa
ttaggaaaaattcaaaccgcgaccgcatcgcgaagaatttcaaatcgcattttttttgcggtgcgggcggtttgatgaacacccctaggggctatagcccccacacttttattactgtgttcgtctctgatcaaaggtaaatgcctctctattggtgatgcctctgtggcttcggttccttgtgcttcggcagttaaggctctgtcctctttttgcctttaagattgtggctcccatgagtgtggagacttctactatgcaagagtacactttgaatacgtgggaaagacatgtaacagtgggtgctttggaaggttttaagaacattaactgctatgtctttggtttcaaaaatgctgaggacagtaaatgggcattggataatggcccctggtacctgggcccgtgtatgaaagggttggaggtgagaagggccttagtggcaatgttgttggtgggcttgaagctgacaattttaattcggttggtaagaagcctgttgggcctattgccgagttatgtggtgaggccagcttgggatttaatttggctaatgggcatgggagctcatctattaatgcccaagagaccaatgttatttttgatgagggtagggccttgtctaatttttttcaagcccaagatactttccttcaagagctaaaaatgtttggtaaccttgagataaaaaatttgggtggtgatattggagtaaagacttcctccgagcaaaatgagagaactacacctatcaagaagaggaaaataccggagtcttctactcctcttcactatagaccgtggaaaattcagcgtcctcctccgaaggttgttcgtgatttcccttgggatagggaggctaggattgttagtggtcatggtgcttctctttctgaggaacgcagtggccaggagagctctgataatttgttccttagcctgaagaaggactatgtccaagagaatgacttgtcacaagtggaggattctggttcccttgtttcttctggtacccttgtggaggaggataagtcatctcctccacaggaactatgagaggagtggcctggaaatgtagagggttggggcagacctctacagttcgcgaactgaagtccctggtgcggtcgtgctcccctggcttcgtcttcctatcagagctcaaggtggacacgtctcctttggtacgtatttttaattctttaatttttatttgtgtttccttctgctggcactgcgggggtatcatccttgcttggagaatggggtttgattttgaaactatttctatctccaaaaatcatattacggggttagtttattcggatccttgttcccatccgtggcttctttcgtgtgtgtatggacctccatatttttatgcaaaaaagaaattctggtctgagattattggtttgggagatcggtttggaggtccttggttaattttgggtgacatgaactttattcttcaagaaattgaaagagaaggctcaaaagggagagaccaatttattcctgtcattgatgggctggttaattctcggggtcttatcaacctcccgattcagggtgacaatctcacttgggacaaccatcgttcggggaggaatcatgttaaatcgaccctggacaaggcgttagctgaccaggactggatcaatttgttccctagagcaactatctgcttgttccaaacctgcaactctaaccaccgtcccctgtgcttatactcttgtggtttggctgataaattcaaaaggagtttcaagtttgaagaaggctggacgagagatgattggagcaagatggttgtcgaccatgcttggaagtcgatcttgcacttgtggcctcctgctagaatttttaagaaaatcggtgcgacgagggttgctctatctaattggaatagagctcaatttgggaatattgacagtaccatatcagatttagagaaaaagcttgatgctttgcaaaagctccttgccggttcgagagactggagggaggagcaggacgtccggcgctccctgaatgtctactgggagaagaaagagttattctagaagcagagagcctgggtatcgtggctcaaggcgggagacaaatgttctaaattctttttcctatttgctgctttaagagggaggaggaatgcgattgaaagtatcttaagcaaggataatatctggttaactaggagagacttgattgggcaagagttcttgaatttctttggtgagatctttgctggatcaagtatgagacgggacattaactgcaataatctcattcatgaaagaatctcatctttagaaagtgagaattactaaggataccatcgcatgacgata

SEQ ID NO: 80058 - DNA, 1433 bp, Cannabis sativa
aaaagcgtaaaaatgtaaaaaaaattctttaaacgtaaaaatgtattttttagtgccttatgtaattatccctacaataaatatggacttacggattatataaaagaatttactcaacatattaatttttctttcaattttatatttatactttaatttttatttttacatttataatttttacttaattatttttctactgctttctatttaacaaaacttctttttttccattattatattcctatggccaaaagtgaagtcaacatatatataattaaaaaaatatttagaaaaaaatctttaaacaaaattcaaattatattatatattatatcattatatataaaaaaatatatatttatattatttagagatatttagtactacgtaacaacttaaaactttaagtttataaccagcaggtacctaataacttttttttagtagtaagattccaaagttactaaaaaattgtcatttggtcacttattaatacaatttggagggagaagatgaaactttatttgaattcatgaatacaatggatgagacttttatatagctaaacgttatcacctattcaactaacagtttcaataacagaaacaaatcgactaactaaactaattataacaaattgaacctaacttaataggtcctctcaagatagagtataaaatttttttgacacccatcttatatacaatctcgtgaaagtgagtaggaaataaatgtttagttagtctgtcagttagattggctttagaagagacatgattcatcttcaaactactattggtgatcttctcacaaagaacgtggcagttgatctcaacatgttttgttctttagtgagaaattaggtcctcgaagatatgtataacagcattgttatcacataagagaatgaatggaagtatgatattgatgttgaagtcttggagaagagaggtgagccaagttaattcacatagcattttccatggcatagtattctgcctagttgattaacgtggcactgtctgcttctttttcgatattcaggaagtagtgagggattggcctaaaaagacacagtatcaagatattgaaggccaatctgcatttgcgaaggcttgaagctagagtttagatggagatgaagcatagaagaatagaccttgacttaggacccgcggattgaggcccaacccgtgggactgtgttatttagtacaactgaggatcatttgatgtcgatagtaggggtgttcatccgatccaatctgcacttttttggtcaaacaacatccaatccgcactaagtgcagatttcatattttggatccactctgatccgtataataatatccaatctgcaatagtgcggattagatcgattattttttttaataataaattatttaatatttcatagaaaaaaaattaaaa

SEQ ID NO: 80059 - DNA, 777 bp, Cannabis sativa
tattaaaagtgtctatctaacggtaattcttggtttaacggtattttatttatttatctgttaactttaacgtagctatgttaactttaacggaggttactaataatataatttaattttataataataaataattgctattgttatgcgaatgaagcctcgaatcgtgagagaagattctagaatgccgaaaaattatacctcaaatattcaagatatctaactaatttctcaaaaataatggtaaaataggattcttgatttttctttctcttctctgttgcgactactgaatggaaaagagagaaaccatttcacctattctctctctggagcaaaaaccttagcctccaacacaacccataccaacatgtcgaattattcgtagaggagaacccatagccatgactttacagaaaagcgacttctatcgtcttctcttcttcgagcacactcgcaccttgatgtcaactttactgtcttccgcttaatgaattgtaaatttacagtaatggaagatatagtatctcttccatcgtcttctcttcttggatttctctcagccacagtcgattcttatttacggtaatagaagatatagtatctctgttattgaatttgtgcatatttttgttggtatcgtagatttggccctctttaaaataaggagttgttcaatttaattatgtttttttgttaatttatgatttttgtattttagtttgtacaattagacacatttagctttacaattagtacaattgggtttattatata

SEQ ID NO: 80060 - DNA, 639 bp, Cannabis sativa
tagaaatttaacctattccaagatcaggatgaattacagcaatgtttaacttcaagctatcttttttggccatattgtactttctttctggctactccaccaaatacctctctgcaaattaacatacataacaaccttaaaattcccaatgaataggcatatccactgcacaagccatctttcagaaactacacaatttataacaacatatccatgaacttgtgggaaccattctcaaatggtagaaattcaaagtaaccaaaagtgtacaattgcctttatatagataaaatactaaaaaattgattacaatagaaaaaaaaaaaacacttactattcttcttattgtgaagaatttttctcataaatattgacaatctcatatgaagttttttcttatgtatttacaaaccactcacagtcagttccaaatttcaattcttcttatgtatttaatttacttaattaaaccacaaaacataaatttaacaaaatcaataaaatgaaaacagaatctctgtataattaatatatgaatgatgctacaacaaatgatccattgacactaaattcatacctgtgattgatgttagcaacccgaagacctatgctcaagaacctaaagggaattcctcttag

SEQ ID NO: 80061 - DNA, 784 bp, Cannabis sativa
acaaattttgattaaaacttagatctaatcctaaggtaaaagccgctctgttggatgtgatttctttattgatgatttgcaatgacaaactaattataaactaggatcaagagcacacttctataaaaccagatgtgattcacaccattatacaaaatctcacttgaggcctcacaatcaaacacatgtgaaagctttttccaacccttgataacactcaataatcgcatagagaattcatctcattacaatctatatttaaatcttaaactcttataaaatgagtcctaagactttattatatagaacctaaacaactaggaatgtcccaactattttaactatcttgacagttggtagttagtagttttgatgattaggagtaagtaaactaaatctcatgagatctatagtttttataatattttttacaatcttttttacaaaaatatggatgattgtttttgtgttgttttcacgttactatatgaaagcaacaacattgtgaaaaaaagattttatgaaaaagaaaaaaaaaatacaagaaaaaaacttgtaaactacaaaatttgaaaaaaaaaaagataaaaaataatagtaaaaatgtaagaaaaagtacaattttaggtatttgtataaatccctaaaataaaacatactagtattgtttctatgttggtcttttggccaaatatatttttttaatgttaactctaatcttaagcttttttttcccttataatctaaggattatgattgtgatactaattctaatttagttttt

SEQ ID NO: 80062 - DNA, 904 bp, Cannabis sativa
aaagtattgaaattaaataaatgtgatgtgttgtaagtgattaatagcttcttatgttatttatcaaattaaaatgtatgagactcgatattaaattatactaatagctatatgtattacatatactactagcatatcctcacttttacaataagaacatcttcaatggtactttatatttttttaactaaaattgctaaaaagttaaaatatagaattatttttattgttatttctttaaccatactctctaatatagataatatttgattattttaataatattttataatttaaatttctcaaacaataaaaaaaaaaatcttttaattaaaatactattaaaaaagtttaataaaaaagtaaaaagttctctattcattctctattatagagtcattttttgtatgattaaagcttattttttttttaaatctttccctattttagctaaggaatgtatttagagagcatgattgaagatgctttgagacccgatattaaattatactaaaaccatctccaatgacactttaaaaacctaaaactaatgtaatttttcaccaaaagcctctaacccaactctaaaagattttctattttggtgggagtctatagtgggcactatagaccataacatttttactttttaataattatataataataatctattaatcactgaaataacatccttcttgtgttgatttaacacataaatttagatttttctattagaattgccctagtactatgatttcctcactttttcacaataaggaagtaaagaaaagggtgaagatctccatggccatgattcatattcagtaatattcaacataagattctgactgacattaaatgattttggacactgtctacacgaatggtaatagtaataata

SEQ ID NO: 80063 - DNA, 1242 bp, Cannabis sativa
aagtgttactgtcggtcgccatcttgaatccagctgattgattttggccttttgttgcagaaaggactggtagttttgctgtgttgttaagaactcagtcctagcagcaagctcttgctcatgtagcgtagcatttaggggttctccttgtagctttccctggatttcatctagcttatttttggcctgtattgaagcaacttgcagatcagaaaaaccatgttgattgatctgtctcatgataggttttaaggcctttagtttagaaactatgtggtacatgttggtgcctcttatgtccttcctccatactttagcaaccctctcatcatactcaggatgtgttttccacatacgaaagtacttgaaaggctatttccaacaattccatatgggaaaaacagacaagatccctggcgtgtggtcaaaattcccctcatttagaaacaaagcttctgcattagggtagttatcaaaccaattttgcttggctaaaactctattaattttcgaatagattctatcctgaccatctttcttattagtccaagtgtagaaacacccagaggccttgatatcttccagctggcagtgttgtagacattcaataaacttagctttagcttgatatttcactctatgagcaactctttcttccttggaaataatggcaataaagtctcccataatcaaccgattatcttttgtttttagagaagacggatccttccataattctaacctccccttactgtcattaaatccatatactactgtcaaaaaactgctatagcttccatcaattgttgaaagttttaaatgcacaagttgactcgtacatttgataatgtcaacaataaaacgaattgggttccatgctataacaattctccctccttggtgccaattttacttaataattaattataattattaaatacatagatctgacatttatatgattaaaaataaaatatgatatttgtgaaagaaaagataagttgttaaattaaatggcaaaattgaaactagtgggtccactacatggccgaccactgaaaggaaattttggccattattttatcttttttcattctttataatttaaaccctaaccctagataaaatcctataaatagataatgagaggctcataactggacaactcttcattagactattcagttagataactaaaaagagaggctcctctctatgttgaaatctctctctctctctctc

SEQ ID NO: 80064 - DNA, 1318 bp, Cannabis sativa
catttacttatctaggtgtgcccatttgtgctaaacgaatatcagggaatgaatgcattgccctggctgaaaaaatgacagctcgaattaaaacatggagctctaggaacctatcctttgcagctagggtagtgttgatcaattcagtacttatggccatacatacatactggtgtcaaatgctcattctgcctaagaaagtgataaggcaattggaatctatatgcaaagccttcctttggaaaggccaagcttgtacatctggaccaagtttgattgcttgggaaacattgtgtcaatctaaaaatgcaggagggcttggctttaggaaaatccatgaatggaatcaagcagccatgggaaagtacatttgggcaatagctcagaaacaggacagtttatggctaaaatggattaacagtgtatacctcaaggaccatgaatggtggagttacaaggctcctccccagagtagttggtactggaggagacttgtgaatctgaaggatcaattccgagacatagctggccatcagaactgtactcaacaacagaattaccaggtacaaactggttattcttttctatgccctgttcagaacaaggtgcagtggtctcaacaagtgtggggtagattaaacactccaaaacactcatttatcttatggttagcaatccagggaaggcttcgcactaaggatagattgaggagaatggggatgaacattgatgaactatgtgaattctgttccacacagaatgaaagtgcagaccacttattttttcaatgcaggttatctgctgaatgtttacaaggaataaaacaatggttgtcctggcaggtttcagctgatactttgtccactctaactaggtggataggaagatcaaaaatcagtcagtttaggaaaaacatactagctgctgctcttgcatgtttagtgtataacctgtggaaaaatcgcaatcttagtgtttgggaaaagaagaagccgaaggctgacaagatgattgcagacatgaaaagtgaagtgctccaacgagctactgcagtgtggccgaagacagttactgtagaagatgctaattggtttcatggattgtaatgagtgataagaatacatagaatgtatagttgatgttgttgtgaaaaaacaaagaaagaaagaaagatagaaagaggttaaagggatttattatacttgtatataatttcagattgggccggtgggtgccatttgtttgtacaaaatagttttgagcaatacaaatttccctgattcatcaaaaaaaaaaaataaagtgtgatttatttttc

SEQ ID NO: 80065 - DNA, 893 bp, Cannabis sativa
agacaactacaaacctttccaacttatacaattcttgttagtaaaaaaaatacataagaagttagtgatgctatgctatctttgtttgaagagtaataaatctactaagcatttccatctccttttcatatatttttttgggcattgatccattggcagcatctttcatcttcaattttcttacaaatataatcaatgtaacttgcttgtcttaatatcatcttcccttcatacctatatatgaaaatttcataccgaaggatcattgtggtttgttagtgatggcacattcaggctgcccttcggcccaaatccaagtgccaaagctgcaccctatatactcttgtaaacaagaatgtgagactctttccacattacacacactaggacacttttatattttgttaaaatattcatcgaaattccaataaacatatatactacaaattttgaaaaattacaaacatataattataagattattagagaacattgtcctttatggattaatgtgaaagtattgaaccatatataagaacatatgctattctactcatcaccaattgtttttgaaatagaacctcatgattctgaacatggtatagtaaaaccatatcccaagcgagcaaaatggtattccagccacgaacaagaataagcgagcaaatggaacatcgaattccataattttcaaagataacgtgtgaaaattagaatactttcttagacaacttagtattaaatcatgcatgcatggagttatggaaatgtcataagctacatgcacaataattctacgaactcttattagtttatcattgaagctaataatatttgaagccatgcacacctcattaatttttataaatttcatttacatgtgttgaagttga

SEQ ID NO: 80066 - DNA, 745 bp, Cannabis sativa
aaaaatggatgaatgaaggaggagtgttgtagaatcaaacaagttacaaaatttcaaaaatatctagtgtagttggttaataatcttacaaataatatattaatattattaataaatttgtaatagtaaaatattattattttaaaaaaaagttggtatatgtgtaatattattttgtgttttttaagttaaagtgcagatgtagaaggtcggccaagtcaaagttattagtggggcacgtacatacgttagttgtaacatattataacattatatatgatgtgatgatgtattaatatttatatatatatatataaaaaaattaaatgatgattaattaattaatttttttaaatagaagaattgatggaggagattcatgattcacacacgtgtataagtcaaagtctccaatgccaaaacaggttgagtctatcactaaccttaatgtaagtctttataatatataggtcatttccaaaattatggatctaaaagttaatcttagtaattggtttataaatttttgtgtaattagattaattaactcctggaaccattatcctttccagcaaagaaaattttattattgttttggaattttggttttgggtctttagtcttggcatctgccgttgtagaagatattataaaagttgttataattggctttatcaatgagaatcttttcatagaaattttaaaaattagctatgatcctcccaattaagtgttattttttttt

SEQ ID NO: 80067 - DNA, 810 bp, Cannabis sativa
tattatacaaacttcctttctggggaaccaaacagtaaatttgggtagagaagaaaaataaaaagaaaaagaaagaaaatttagattgattggtaccttgggtggtgagctttggagagtagtgtaacgtggacgttgttgctctgcaactagatttctgattcttcttctcttctcgttatggttattacttactttagtctttattatttttattattattattattatcattaaaaataacaaaaacatttagtaagatgagaatgacatagtttcctttttttttctttttcggaaattaagaaatagtttcctttattatttattaatatgtgtatataatttcttggagtcttggactgtaattacgaaaatgccactggccagagcccaatttgactgtattcgcttcaaagttggtgccacgcgcgttttctgcgagtgacgttagtctccattcatcattgtaacacgtgtaatgtattggggtttgccttgttccgctgctctacattgacttttttttatttatttaaatttttaattaatataaaactgaaaacttaaataaaaatacttaattaattatggcacaattaatattaagatggagatgaattgttaaattgttaaaaaattggtaaacaaaagaaaggcatgttttggttgattatgacttagttttataagatatttatttaatttgtaataagtttaggtggcgtttggtaaaaattttttaatcagttttctgtttttaaaaataaaaaagtgaaaaaaaaaatcaaaaacatgttctataaaact

SEQ ID NO: 80068 - DNA, 1125 bp, Cannabis sativa
gatataagtggaaagattgcatattaaatacagaatacaccaattaagggattcggacagcttgccatatctttgtgatctgatcccaaaattatatggatttcttcagtgactcatgatgcgaaagcggaaagtgttggcatgctgtgcagattgctcactgcccggctaagagggcttcgttcgagcgaatatatgtggtgctatgttcagcatatatcttacgaccaaatacataaagttgatcccacatgtcaccatcgtatgatgccacatcagagtgtaaaaattaggatatcaatttgtttcttttactgtttaaaaaaatatttttatctcttaaattttgatcagtacaaaattttgcttccatttactaaaataaattaattttaaaaattgtaatgtttttataattctaaaaaaattataaaaactattaaaaaaaagccttataaaatattaaattaattaaaaagtattaaatttacttaaaaacctaaattattcttaaaaaatatttttaaattttattttatttagagcatcttcaatagtacaccatttcaccaaaatagtgtgaaattttcacaccatttcactctaatgacacactaaattatgcaccaaattgtacatcattaatgatattaaattttgaatctacaccaatttggtgtacaacttttttttgcattctaacccttattttattttattttaaaatataatcttacattttagttcttaaattaaaatttatcacaaaaatagtaattggttcaaaacactaatatatttaaaaatacaaaataacaattaagaaaaatttaatactagtaaaataaaaacatcataacactaagttattaaaataaaaagaaaaatattaagtaaaataatatctaatagacaaattgatcacttatggatcttacccttgataaatatcaaaatattggatatatggactttaagtattacaaaaatcttgatatttttgagatacttgatattattgatgagctcttttttgcataattattttttactccttttgaaaacttcaataagatttttttttttaaaagaaatgtatattgtttaattgatttaataaatatt

SEQ ID NO: 80069 - DNA, 2886 bp, Cannabis sativa
  modified_base (2230)..(2230): a, c, t, g, unknown or other
ggttgaacccgacccgctcgaacaaaacaattttttttaattttttgggttgaccggttgggtttgggcgggttggccgggtcagagtgaaacttggtcaatatgttcagccctaagttggatcgtggcagtaaaaagcggatcattgactaatcgcattttactacttctcgtaacgttaaaattatttaataaataaataaaaaaaattatttaattaaataatttttctttaaaaaaaattaagtgacacctcactcgccagcccagcccagatcggtcggacagacggcaacggcggagcgcgtgtggtggtctagtgtgtgagtcctcacccatgcgcgtaaaactgagtaccccttggggcccatacccaaatctcaaacatgcactatatatacacttctaatgaagtattcctatctcatgtgggactctaatcatttacacacttcacttttcaatttttatataatttcacaaaggttccaacagtatttttaacccttttacaatgatttattgaaacaaaagcaaacaatttcctaacatggataatatttgaaagaacaattccaaatttcgtaagcattgcctgaggcagaggcagaggcagaggaggagcccccaaagtaatgcaacaacctctaaatcaagaggaataagtccccaccatcagaagcaccacaaaacagagagcttggccattgagatcggtcaccacaaaccccaatcccaccttccaattatccagactaattctcatatcaacaaacaagattaaattccccaaaattacttcatctttcccagtagcagaggaagtcgggagcccagatgtcagaaacagaataggatcgacattagttgaactttgagcctcttgctacttttagaggtaactaagagactaggaactaaccatctcatcactcaaaagtttatggtcatggacaaacgagttgcgcctaaaccaaattcaccaacataaaaaactaaaaatgttagacttttatttaggcttacattaacttttatttgctttattaaaacttagattgattaaataactttttgatgtgttagccagtattgttggcgatcaatagttaatgaacttagcatctgtatgtgtaaaatctaagtgaagcagaagtgtagacttttctaattaattaaagtttttgataagcagacccaacccaactaagattatgtagctataagtctcctccctaactttataaatacatattgtctcattacaattgtatatttttgataatcaaatagaaattaaaactgcttctgatttaaagatctaggaagaaagacttagttaatagtattacattatcaaattacggtaattgttatggatcactcagatacaaattcctaattattatatatatacttttttatattatatacaaattttatcttggaattattaactttgttaacaaaaaattcctcctttttatgtttcaaacaaaacatccaaacactcaataagagtccaaaaaaactagagacatcttttaaatgtttgaaaccacgcacaatccactgttggtgaatatatcatataggactcgtttggtacgtcgtataagggtcgtattatattaaataataaataacactatgtttggataaaacaatgtattgtattaattattacgaccaaaatttttaatacaatggatgttttattatttaatacataacaaatggtccgcattagcttgtattataatatttataaagaattcagggtcaactccaatctctgacttagacccagacccggggcccagacccaaacccgaacccaaacccaggacccgaacccggacctagacccggaccttgaacccagactcgagagttggactgggacccagacccaggactcggaccttgaccgaagacccagactgagaccgggattcgaacccaaacttgggacatgggacccaatggacctggacccaaagccggatccgaacgtggacttagaccgggactaagacccagacccggacccgagacccagacccggaccccaaattccaaacctgtggacccaggacctaggacccggaccgagaccgggacctggatcctgacccggactcaggacccagacctgaacctgacccgtagttggtgttagggtcgagtgtattgaaaatataatataactttacacaatctattaatncaagtcaataccaaacatagtattatatcaaataatactaatacaatacaatataacacaatacaatacaatacaatataacacaatataatacaatgcaatacaatacggcgtactaaacgagcccataaacaagtcatttacaatatttttggtttatatgacatgataattgataattttattgtcatattatttatataatatagattaaaatataagttgaaaaattaatattttgtaaattaaataagtgaataaatttaatcatgctaaaatatgtaactttattttatcatcaattaaagttgtttaataaaatgagagttacacagattaaaatatgaaatccaaagctataagattatagtggttgtagaatggattaatgttctaacacaaaaatgttcgaatgtgcttggggatgattttgtaaaaaaggttgttacaaaaagtggtgatgagaaaatgaggtcatagagggtgtgtatgttatgtgatttttaattgtgttaacttttactaattaaagagttttttttttaaataaaaaaaatagtaactcaagtaaaaaattaataataattaaaatattactaaaacaaacatcgtttacacatttataaatcgagatctcgtttctagttataaaatgc

SEQ ID NO: 80070 - DNA, 742 bp, Cannabis sativa
attgttaattagtactggtccctcgatcagtaaactacttataatttattttcatcatgatatatatatgtgtatgcatgagtactactttatatatttgtcactttattaatcagtaatttggcttttgtattttgtatttttgttataatctatatgatgatatgatatgcttaattattgtgttttaattttttttttttaaaaggcactttattatttcaaatataatatagcaataattatttcattcagctggttttttttatataggaaatcataaaggttattaggtaaaaacaatgttataaattaatgtatactactatattactaattttaggtttttttttttacaactctaatctaaaaagtacaagattatgatcatatacatattgatcaatataacactaatagtttggacattcgtgaaaaattagacataaaaacttgtaatatatatcctctaaataataaagatcctaattaattaactaattataaaataataaaattagcttagaaataaaatacaactatcatagaaaaataactaatccagataacgaaatgcaactccaatagtcacaattaataccactagccaatgataattagcaatcaaaaagcccacaaaaaccttaacctgtgtttatggatagatagaaatgtgtggaaggaaagaagtggaaggagaggtcaattcctttaattgttttggtaggaaggattagaggag

SEQ ID NO: 80071 - DNA, 2453 bp, Cannabis sativa
tgaccttcccaggcggtgtgggattgcactgcttacccgatatttccccctgactatcacatctacaatgtcattgttgtatcttttgtttaattttactgttttatgtatcagtgggagaaatgatcatatggttatagttggtccaagatcactattttattagcaaagttgcttgaaggagattttcaatggtcattaaatttataatcactacgattgcatttatttttaattattaaattactatatatgattaatttagaaattaaaaaatagataaataataatcatcttgtaacttaatactttattttcttataaaattcattataattaattatatttaaaattaaatttataataattattaattaattttttataatttgttaccgtaaggatttttacttattaatttttttcaatatattattgaaatatttgtaacaaaactttttataatattctaaaattattacacatatatcatattaatataaaaaaaatagtaagaatgaccttttattataggtaattcttaaagcggtggttcaatcgattcctacgtatgtcatgagttgttttcaactacctaataacatttgcagccaacttatgatgtcaagcttttagtggggaaaagataaaaaaatggtcgaaaatacattggaaaagttggaattgctttgtaaattaagggaggtgtaggtatggacttttgatattttgtgcattttaatgagactcttctcgccaaggaagcatggagaatattagaaaatccacaatctcttttctgcagagttctcaaaagtcaataattcccaaataattcttttttggaagtacatcatggacattcaccatctattacttggcaaggaattatgaggggaagagagagcttttatcgactggtttgagatggaattttggtgaggatagacgagtcagatgtggttttgattcatgaattcctggtcacaaggaattaaaattcttgcttagagagtcctccaagatgctcttcttgtagctacttcactagtaagaaggaaagtgataacaaactctacttgctcgatttgtatgagaacttggaaatctattggacatgaactttttggatgtaaatatgctcgtttggtttgacggcattcccaaatggtgcttgattgggctaaagctttcgttatgcataaagaagatttttgggtacatctttcgtcaatacttactaaggttgaaatggaacaagcttttttgtcttctctaggcaatatggactgaaagaaataaagcagttcatggagatacaccgaaaccatcctcaatagtagctatctttgctataaattacttgcacaactttcgagtagcttgcctaaaattccatctggcgtagagtgcaaccccaaggctctccccaacgatactagttcaggttccattgacgccgccaactggtgcccttaaactaaatgtagatgcaactttgaatacttatccaaacactattggagttggagcagtgatccgtaatgacaaaggccaagttgtagccgctcttgctaaaccaataattggaaacttcacatctcatgagattgaagctaaagcaatgtttcatagtctcacttgggtccttgatgtcttaggggataaattttttttaggcccctgagctaggtgggccttaggcacaggcctagtccgcctatgctcagagccgccctgcctttcagccacaaattacaaaaatctaaagtaaaattttgaaattcatactttgatataccttggaaaaatgcaattcatacaatgctctctatctctagatgctgtttcattaaaaaaaaaaaaaggagaaaacagaaaacagaaaaagaaaagaagattagcatgcataagactgtagtaattactatattaagataaggagaaatgggatgttttggaccgccgctataaaaaaattgaaaaaaatactctgatatgtgatttcggacgtagaagttaagtaaaagattgtaataagatgtaattattacaatattaagaaattaaagaccaaaaaatacattgtcttctttagctcattttgcacatgtaaaatttgtactggtaggtagcaccaaaagcaattaattcattgactacctttctttagataagtttctacttttattattactctttattttgagcttaaattattaatttaatgttattaatcctttagcatttcattatatgtatttgtttttttttctttattatttatatggatacttacttcttattattaagacttaaaaaataacataatttcttattattatcttttgataagtactgttaattacaacttcgttctcaggctctatattagaaaacacatgctatttttttttttttttaattttaattatttttcatggtgttgtcgt

SEQ ID NO: 80072 - DNA, 1485 bp, Cannabis sativa
  modified_base (34)..(36): a, c, t, g, unknown or other
atatatatgaaacactttttaatgggtattaccnnngaatggttactaaacaaatttagtgctatctctctacacacaaataataaagaaaataagaaaaggaaaacacataagttcaaacaaaaattaatcatataataaaatgaaatacattttagaaatggaaacaaaaagaacacacacctagacaactcggttgaaatgtcaccatccaaaactatctgaaagagattactacataattttcatagcataaggtatagcagagaaatatatgtcgtcgcgttcataaaatctaagcacgaccaactaagaaggtagcaacacacaaaatgactctactgctaccagtgcaagatgattcttattgtcacatatcaatgaatattatatgcattgcaaaacccattatcatctcagcaacaagatgtttgcagttgataattcttgaataaagagttctttgtcatgtttttaaacttaacttgtgtgtgtgtgttttgtttattttttagttcttttctttcctttcaatgttattttgtatttttatattaatttttttgggtaatttggagcgttagtgataattattaagtttgatttgagttttgttgaagaaaaaagtttaatagagaaaatgcaagattttgctaaaaatttgcagggattttactgcagcaaaagtagcaggggctgaatgttgaaaaaagatgacgtgacaattcattaattgatgtggcaaaaattagctgaagtggcataaatatatgtggatcgtgattgatttgtgagaaagtttctagaaaattcataaggcacatgtggaattaattttatgaaagatatttttgtggaaaagaggaataatattacctagtttccattacaccaatttgggaaagaggaattaattttatttcatttgggtatcttttataaccttgagcatgtactaattttcttgtagttagaacttttaataaatcttggattgtgaattttattaatgttttatgaatgtgtttttggtaatagaagttttgttcattcaatgatgcttaatgtttgtctacatacttttgcttgatcaccaattttaagttgttagctaatcttgattttagaagaagtaagattagtggaaatactttgaaaggatgcaagattatcaccttaaaaaagtttgatgtgtaaattgttaaggaatattttatttattttgtatgacccatgagaaattgatacttaatttgtattatttaagtctaaatttgcatagaaatatattaatttagtcttgagagctcataatatataagaaattatatgttttggttgataaaatttaattactaatacattcttccatgacatttacattaaatttgtattctaagagaatttaattgttctagctcatcacttttcccctttactttcttgtcatatttactttattatttagtgctggtttaattcaaa

SEQ ID NO: 80073 - DNA, 1706 bp, Cannabis sativa
tataagagaatgaatctttaggtacaggcaagttgagaatcactctcttaggaggcctcttggaaggtatacctgtagacataggaaaatggtgataagcacggcctcacatttttggttcctcttgagaattctacaagcgtgagcttttgttctaggtaatctaaggaggaatgaggaaagaatggattcaactccatgtctctaattaaggttggctcaggaatctcacaagaaggtagaggggtgggctcttaagggaaattattctcaaggcatagtagctcactcttaatttcagttagtgacatcctaagcctatacaagtacaagtcagagtcagcaactcggctatcctgctgtccactcaaaactaaatgaattttgttttgaggtctccaaatgctccatgcagctaatgatgcaccctaaatggtccttcctctcagaaaataacctaatatatctctcacaaggatcctttggggactctcagaatctgagatgaaatataaacaaagtcggccctaaggggtattttgctcgaattcctcataaacatgaggtgagatgaaaaatatcaacaaggtattaccacacaacaccctcacctaagaggtagaagaaaaattactaaataaaagaggaatatagagataaagaacctatgagagcggtatgttgatcaactctcaagcaaaatgaggagtaagaccaacatacataaatctataaaaagataacaaatgaatcaaatgaagaaggaatgatactagataaaagatgggcaacgagttacataccttaagatggtggaggagagtcactagaatgcaagactcaaaaaatgaagagcaaagcaccttcaacaaaaaggagagagatgtcaaaaggttgtctaaccaagggtcactcaaccatgactaagaccaagggtcacttgaccaaccccaaaggtcactcagtcatgaccaaggccaagacccaagcaaaaggtgacttagccatgaccaaggccaagggtcactcggccatagcccaggcctaaggtcactcagccaggaccaaccctaaaggtaattcggccaagacacctcaaagaaaaaaaattatttatcttgaaaaattaacaaaaaagaaaagaaaaaaaaaaagaagaagacttgctaggattcaaacctatcacctcttagaatagagacttcaagcccaccactaggccaagaagatggtcttgaaatgaagttgaagggcagagagatccctttaagtgttttctttaagtgtgtgccaaaggataagctcataattcagctaagtgaactaggagaagaaattagaggtattagtcaataagaacacttaaaataattcttatagactagagcaagcgttaatcccaaaattaacacttttaacccaccaaattagccaactactaatcaagagattggtggggacacgctcaaagactctttctagatgcataattgtatttgcttctctaagtgcttgaaagtgactcgacatgcaccaaggggtgtcactcgaccatgcatgctcgaggactagtcactcaacatgcactaagaaaggtcactttgtaagcatgctcgagggctagtcactcagcatgcataatgcatgtcactaggcatgcatgtcactcgatatcatgcttgagaactagtcactcgacatgcatt

SEQ ID NO: 80074 - DNA, 4707 bp, Cannabis sativa
  modified_base (34)..(34): a, c, t, g, unknown or other
aagaattttagttatatagacacactttatatanaatagatatatatatatatagattgtaagaattctatacatataaatgtatatatatatatataaataatataggaattattaacttttttactttttttttttattgtggggcaaattttttttaaaaaatactgtaagttttataagtgtattgtattaagttttcactgttattccacaattattttttagttgttccactgttattttaattttctgttttgttgttttacggttgttttataaaaggatagcatttttgtaaaaaattctttgtgacagtaaaatagtaagctttgacccaaatccagtatttttgtaaaaaccctataatatacatactcatcacagataatagaaccaaataaaagacatactactaattaattctctttgatgaatttgtctaccaagctaaatgttaaaaacaaataatctaatgctttaaaaaataaaacaaaactaatcgccctttaaacatttagactagattagaaagtggagttgtcagtttttattgggatagttggtttgaccgaaatacccctaggttatatataacttaagtgttagaggaaagggtaaaatagtcattttatgagttttagaatttttttgtctttagtgttttctaggctgaattagaaattatagtaagtttatatatatattttatttatttaagtattacttagaaaaataagatgattatccaaaattaagaaaagtcatacaaaacctctctctcttcctttcctttttgccttaggagccagctgaagaactaaaggattttcaactcagttcaaggatttcccaactgaataaaccgattttaagaggttgtatgacttttgtagtaattctccatctttttcttgttgttttcctaggttttaggttaagttttgttgagctttatgtggttttggatatgtggtgttgaattgagttcagagcttaattttaagtttaaattaaagttaaactgaatgaatcttatggatgttaagtttgaatttggtgaactgagtttaagaactcaaagttgactcaagtgtggtgattttattattttgataaatttttgagtttttatgattgtatacattgtattcatgatataaaactgttctgtgaagtttgggaacaatcggttaagtttggagcaagctttgggactttaaaggtctgaaatttttgagtttctgctgtagtgaaccgaaattcctgatggtatagggcagtaccaaccgaaattccgtttggtgagttttttaagaattgccaattttcgtattttggccataatttttcactcaaatgtccgttttagacattctatataccgttttcgaagcttatgaagagctctacagtatgagacatagaatagagcaaaaagatataatttattttagggtgttttcaccataagattcggtagaaaaccctaggttattttatgcgagttttagacagtattatggaatagacccttattaatttacctttatcgtgacataggacccgagatcatcaagcatcgttccactcaggtcggcccacacacctgactttggacttgaggtaagaaaagttttatgcaccgctaagtggttaaataagaagcgattataatcgttagtgcctcgattaagatcgagattaatgataagtatttgttgtgacttgattgtgatcgaggtaatgatgagaaaagattatgatcgtttgtgactcaattatgatcgagggaaagacatggtcattaccgttattgtgaatgaataaagatacggttattaccgttatgagtaattactcgttgaaactgcaaataggtttcttacttatcgttcgctttatcgagctacgatagtgacatacatagcacgtggataacgggtagtaagggtactttatgaagcactgcgattatgtgattataagaatgtgagattaaagtgctttatgaagcactgagaatatgtgattatgtattgaatgaatatccgtttagtgtaatgatgaagttgttgactatatgatgctatgattttctaatattgtgtaatatatgtgtttgtatagacgttaaactatatctatgcatgttgaatatgtgtgaatcacgagtatgtatattatgttgagatgtgaatacttacattttcaatgctctcgatctagtagtttttcttgctgagtcattgtgactcacgggtgcttcgtggtgcaggtagggaggataggaactgtgttcaaccatgagtcagaggtctcccatcaatgtacatatcagctgtggtgtcttggcttccggaaagtaggatcaaccctttttctatgttggaaatgtaaccttaatttgtaatagcagttttgtaacttgttgtaaaagaattttataaacagggcattcccgtattatggttgtattttatataaaagttttattttaatttaatcaaaatgtttttaattaaaccacactttttctaaactaatggattagttagaaataagtttgtaaaaatacacacacgtggcgtccctgtgagtcaatgcgttacaactctcgtgtacaagtccaagtcaatataaatatttattcaaaatcaagatgtaatgacaagaaagtaaagctagggatattagagagaaattaagagagtagagagaaagaaagaaagaaaaagtagattaataatacctcaactcaagccattaattagtctctcttttacgatctgagaatgagaggagaagaaagaagaatttgcagcaaaaaagaagagagaaagagagagatagggatttgtaggaaaacgagaaagacaattaagaataagaaatataattaaattaaaatattttgataaaaatatatattacctcttcacttgcttccattgatccaaaatgaagaaaataaaagaaattggtcgaaaaatgaatgaatgtgcctaaaaataaaagaggctattaattcttctttctttcttgcaggaaaatgatcagagaaacgattaattatcagggaaaaaaatgaaagaagaaagggagggagagaatgcgtatattattatcaactgtgactcaaatgttttttgacatctttaacgatgacgacgactaagaaggaatttgatgtacaaagtagttttagtggtcagaccatacaaaacacaacgatgttatttttggatataatgacaagaaaccctaatggagagaaatgattattaggaaaaaaaatgagaagggaaatggagggagagaatgaatagagagaatattatattattaccagttattccttgattattttttaaaaaaacgcctacaacaacgtttgtaacttaatattttataaaatattataataatattataaaatattttataatattaaagtattatatgattatatttttatatattaggtactttttttttttgtaatgtaaaggtaatgatgataataattgatgatttagtatactctcgatgggtaatgatcgtgttatttcatctttttagtaatataaccttaaagggcatttttgtcattacaacctaacgagaagagagagtactactgggtgcatggtggtcaggtcaatatgtgtacattgtcccaacggtttgtattatatatttattttcttttttaatagtctctctcatttttcctgcaacaacgaaagaaagaaagaaagaaaatgaaaaaaaataatactcacttctcgtctcagatctttgctgcaaaatcacacaattagtaatttagtattattgatcaagattttcactcttctttctattgattttctttctctctgatatctttcttcttctattttcagtacacagttaggcacatttattctatggaggcacgtactgaagaggtaattaataattattaaaattttgtaccttatagttcttattcttaatcgcatagttaatcgctcttatattttttgttcttaattgcatatatagttaatcgctcttatatattttactatgaatcagaaaatagaccgtatggttacggagtggcgaagaacaccaggagtattaactccggtctgaaatcataaaaatctaagtgagtatcagtatatatatatctgtaaacatttttatttgtatttaataatagtttgtctgtgctataaataataaataaaaaggtatatgagaaaaaaaaaatatacccaaaatatcaatatgaattctaagatgaatttaaatttgtgaaagaaaaaaataattattcttaaagtgaataaaataaggaattatcaaaatttattagttatatatatatgaaatataaactaataatttaaggctataatttcgtagtactttccatctgtatattgcaacgtaagataataataatctaatcctaaaagtatcacattaataatctctttaatttctaaattagcaccttgtacacacatatatatagtaaatcaatacaaacaaatatcaacaataatatattcttatattattataaaaatatagagcttagaaattattataaaatattttacaataatatataaaaatataatcatataatactataatattataaaatattttataatattttacaaagggtcattatgtagtccttca

SEQ ID NO: 80075 - DNA, 3379 bp, Cannabis sativa
ttgtctttaccctgtctctaaatttgtcatcgtaaaagatgggtctaaatgccagcaattttctatttcactgggcagtgtggtgtgggtcttgtaagttgttaatcatacacttcaaatgtagaatgttaagtttagagtttatcttaatttgtttcttacgtatatgttctctataaactgttgattgaaatcttgttctatttttcaggtctatgtaggtagatatctccaatcattggacagttgagcaagcagtatcctcctcatgtaatagcatgtaagattgacattgataaggtatgaactatgaagattctgtggttttatagtatgcttatctgttagcaatcactagattttaggataagtgtttttcattatgtgatgttgtttgtacataggttaaatcatctcacttactgctttccttccttaaattgctatttgatcactctatgtgatgattctttcattctttgagaaatttaaacttgttttaaagaagcattcaagcataattggacaatgagctttcttattggtacaagaaatttgtcattatttgtagcagctctactcttgttttaagacaccaatttttgtttgttcattcttttgggatttaaaccaactgttcattttcatgtcatggctatacatgattttattttagttcttagaaggaatttttgaacactctagaattgaggcaattatcatatatctgcattgagaatggttaatcagctagattgaattcttatatttgtggtattaaaatttgcttaaattattgcttgtgtatcgccttgcacaatttttctttttacaaattcatgctgaactaaattgccaatttttgtttcttcaaaaaaaaaaattgccaatttttgtttgttccattttttatttatggaaggcaagccataatcttagttagtatctaatatttatttgctctttctggagaaggcaagctacaattacttgcttgttgattttatttacatgcttacttgacaaatttttttgttgaatgatgcattaaaacatgtacaattctaagaaaatatgagatattttgtatgttttcttttagagagaaagagagagggagaaacttccagagctcttatgatttaggtatcgagaagagtatcaacaagattatcttttagctgggatttagagtaacaaaatgataatttctattttagagagagaaaagaaaaactcacgaagtaggtattggagtttataagagaagaaactagctgaagacagtggagccattcattaatttatccattttataaaatatagtgaaatgcttttaagtctttctcataaaactgtgctttaatttacttatcacttttgcttttagatattttcttttaaaatgaaacaataaaacataaaaccttttccaaaattaaaaatatacaaaattattaataattttaatgagttttgaatctttaacatcagctactcggaatatagcaaaataatttttgtgttgtttgattgaccttaagctggttttgttgctctgctctttttctcttttcagaatgtctagtctctcctgattctgggctctcggcagctaagtttcacggacaaggttagtggtgatgatctgttttaatgatatgaatgaatgtgtgtgatgtttgcttttaatacgagtaaggctgatagtttgatacattgttttactagttgatgtctgatgatttgtttctaacttggttgggtttgtttaaattagttaagggatccagttatcttcctaaattttttccaaataattaagttgaattaagaaagataataatctaagtatctggctagtttgattttttctgtatgtattttggatggagagtccagttatcctgattactcatgaaaagtcgttgcaagaggttttgcctcacatgaatgtacttagatttttattcttggaagcaatatgaatcgactcaaaagagatatattagtatttcaggtttgttcattacatgtcaaatgaaacatatcttttggtaattgcattgtcttattttggtctagacactctagacagctaaccgtccattccatatattttataaccgtaacaccctacatatgcagggccaatccaaaccagagagtttgtgaacgggaaaatgttattcccttcaagaagcatcaggcagattctttcatgcactaaagcaactcaattaacttctcgcactctcagctgccactccgtttctaatcacttttacccaactagacgcaatcacttctgttcacagaaccagatcatagtcatcccagttgtttacttttggtcctcacctttctttgttgttgcaagtaaatgcgttggcagttgtcagtcattttcaactaaagcatctgataatgaagaggaagagcgagtccttaatgaaattttcgctgccatagaaacccccccaaggtctgcctcagaaatatgtactgctcatattgataagctgtgcaagtctggaaatatttctgctgctgctagatttctcaaaaccttgcatgataaacatatcttcattagctctagaacgtacaatgtcctattggcagcagcctgtgaaaagaatgacactgtccttatatctcaagttttttcagatgcaattgtgtcttctacaacattgccttcagcttcttatctttatattgcaaagtcttttgcaaagactaatgggtgcacagatctgcataggtttatcaaagatatcttggagttgaccttgccaagcatgaatattctaaacagtatcatttcggcctttgcagaaagtaggaagagtgatcaggctcttctgatatttgaccagataaagagttcaaaacacaaaccagatctgattacatacaatattgttttgcatattttgggctgtgctggtcatgttgataaaatgcttcatgagttttcctcaatgaaggaagctgggatcttcccggatgttatttcatacaatacattgttaaacaatctgaagaaggcaggaagagtagacatgtgcacatcatattttaaggaaatggtcgacaatggaatccgaccagatttgcttacttatagtgctttgattgattgtactggccgcgcgggaaatgttgaggaatcgttgagactctttagcgagatgaaggctaggcaaattcgtccttccatctatatctataggtcactggtccataatttgaacaggatagggaaattgaagttggcaaaatcactcttagaggagatgaaagcatgcagtccctctgatctggctagtacagaggattttaaatcatattcatagtgactctaacaatacta

SEQ ID NO: 80076 - DNA, 1287 bp, Cannabis sativa
atgaagataggccaaaattaaaacaatagtaaatatttcataaataataataaaaaatattgtaagggtaggacatatattaagaattatttatatggaattttaaaaattcttcttaaaatacaacaaaaaaaaaaaagttacaaaaatatgagagtcatatttgtaatgaaatatttatttctccatgaacaaaatttacaaatttaataatataaaaatatatatattttgtaattataatttataaatttgtaagtataacttacaaactaaataaaatgttatagaattgttatacaaactgttttgtgttttttttttgtaaatttttcaaaatgtagaatggtattaatattatatatatataaagaatattaattatttatattaatttattacgagatataagcatatatagatatattgttagggacaaagctccaacagacaataataaagtcaagtaagaaaacgttaggtgtttgttgaaaggtaacaacacaattaaccacatttttgtgttataataataaggtgtaattctattatcatcatcaatattaattaatatatataggatatattagaatgaatattattaaaagtgaaaagggtagtgaagtgatagtaataataatgattttctcttgtgtatatataatctttgaattggataagacaagacctattagctactaatttattctctatagctcttagttatatataaatcctttttggacttttaacctaaaaacatatagactctactctttaattcacatcattgctctccacaattttcatatgcaaaatatatccttcaaataattagatttctgccatatatgtatgtggatgcaaaatatacactagtataatttagggcctatctaattgaagtataattggtacttgtttgtaagtaggaacaaaaggatcataaaataatatatctcattgattattaaagtaaaaataatatataaggttcaacagaccaaagtatataggatgcctaaattggagttacctttaatgtaatagtatttttttttttaaattgtggattcaatcttaaaaaaaattgtcaagtcacttagtattattatatgttagtgtgcgtatcattactccaatattaatagctatacctaggagttagaatatggtctcggtctttaaaccaaggtcgagtatgtactaattacattgagcattgctattaggcaccagtggtgcctagcacctttgcgacatgtcgcgttgcgattggctagcgat

SEQ ID NO: 80077 - DNA, 626 bp, Cannabis sativa
aagaaaaaagaaatggtatttatattttttcttagcttaaaaaagtttaaccaacaataacataattccttataaggaaagggtctccttagttacttcaaaatgagaccttggtaagattctggcaactatcaaaatctagtttgattcatacaataattttcattattaataaaaattgtaatagtttttcagtgatttcaagtgcattagactttttttctcttcaatactctatcatagataatcttacaaaacaagcatgaattcagacaagagtgggaagatgtcaatatggagtctcatgatggaagcaaaaatgaaaagaaaccatgaaaattattttgaagataaccttgctggtgaagataaaaaaatctcaactaataaaaacttcaaatgatatcacaacccaattgaacccaataataattttatattttcttttattcaaattccatcggtctagaggatccaaaaatccacaatgaacaatacaagatgatctaaattttccgctttaacatgcaagcacaaatccaaataaaagctaatttgaaatattaaaccaaaactaatttgaaagattaaatctaaaaacctaataaaagctaagaacaaatttt

SEQ ID NO: 80078 - DNA, 875 bp, Cannabis sativa
tataattataataatatattcttgtaaatcttatatattttttcaatatgaaacatgcatcagtttcttaatgactaaggattatttgtgtctaaatttattttgcatcattataatttgtttggatactatgtttaaaagaaaaattaacccttttttttttttttatatatttttcaatgttgtgcttcataaaaaaattataaaaaaaaagttaaaattaggtaatagattcaatttttatcaaaatattttgttgaatttggaactcctcataatactgaaattagatctaatcatctacaaaatacaattaaattattaaatacaatatctaattatcaaataattaataatattttatattgtatttaaaaattgacatctcctataaatacacgatgatgagtcaaatgagataatttgtgtagcaaataaaacaaaagcacgttagagtgatgatgttcaatcataagttttgaacaaagaaagagctatagcatactaaaagacattattaataatgtgcactatgagaaatgcggaaacactacctaacacacacgtatacattcttcatagggccctcttatctctttcttctctgagctcgcgttctggaagaaggaaatgaaggaaccgagaagaaagtatcagcaacaaccggttttattacgggacagctaatgatgttcatattgatctattatgtgcctctgcatatctagcattgggtagatctcatacaataactgtcttagctttgatcttttttgttttatttcttctggaacaatcatattggtgtaattaagtattgattcttatataactataacaatatttagagaatattaataatcaatcgcaaaaca

SEQ ID NO: 80079 - DNA, 2432 bp, Cannabis sativa
agagaagcttcccctcgatcttgaatcgtctttctcttcgctgtgtcgtcttctccagcaaagagttctgtcttctttcctgaaattctgttctgaatttcacctctattcttcgatcagtgtttcttcctgatctgtttcgtttctgccatggaaactcataatcaagcagagatccaaggagctgataacgatggtgtttccgcgaccatcgaagaagttactggaccgcacaatcaaagcaatcatacgcagcaaaggaatccattagaagatccttcgaatccatactatttgcaccatggagacaacccaggtaacatactcgtgtctcaacctcttactgggcaagacaactatatgtcttggagtagagccatgcgattggccatttctgtcaagaacaagattggattcttggatggtaccattcctaagcctcaatcttctaattcgattatgtacaatgcttggtatagaaacaataacattgttatttcttggattctaaactcagtatctaaagaaatttcttctagtcttttatatgatgaatctgcagctgctatctggactgaccttaaggtgagatttcaccagaaaaatgggccacacatatacaacttaagaagaaatctgatgaacttgaaacaggaaaaccaaactgtgagcatgtacttcactaagctcaaaacagtttgggaacaattgtctaattacagaccaaattgtgtctgcaatggttgtacatgtgggggtgttaagaaattacaagaacaccatcatatggaatacataatgtcattcttgatgggtttgtcagattctttttcacaggttcgaagcaacattctcatcatggaccccctgcctgaagtaaatagagtatttcacttggtcacacaagaagaaaatcagaaagggaacattgattccactgctgatccgaattcgaacatggcatttgccttccaaggagacaaaagcaacagcaacaagaacaactctcaagggaacaagtctaatcaatctaaaagaaaccgacctttttgtactcactgcaacatcctcggacacactgttgagaagtgttataaaattcacggataccctcctggttttcacaaaaatgacaaagggaaagaggcatctgcaaaccaaattcagactgctgttgaacctgcaactggaaacgagggacaagctatattgcctcaactgacagcagcccaatatcaacagttattgaatcttttggctggacaacaatcaattaacactaattctgaggctggcaataatacaggtaaaccaggtatagtactttcgagtatgtctaattttcatctaaaagaatcttggatactcgattctggggcaactcgacatatatgttatgataaaaacctttttcaaagcatatgttatgttggtccaactaggttgattctacctaataatgaaagcctcactgttaatcatagtggcactatagctctttccaaagatctaatcttgaataatgttttatatgtgcccaagtttaggtacaatataatatcagtaagctgcctcactgatgacagcaatcttgatatattatttacttctaatcagtttgttatacaggatcttgccaacaagaagaagattggcagaggtgagtccaacaatgggctgtacattttggattctcaccctcatgcatctcctattcttgctgtcaaagctgatgtctggcactcaaggcttggacatccctcaaataagtgtttaaaactcttagatagcaaaataaattgtaattcctcaaaattacataaagatactccttgctatatttgtcctttggctaaacaaaggaaattacctttcaaaaacaacattacttttgctgataatatttttgatttgattcattgtgacatatggggaccctatcatgttcaatcccactcgggttttagattctttcttactattgttgatgacaaatctaggtttacttggatatatctcttgaaacataagtctgatgttcatactgttattcctcagttcttggcttatgtaaagactcaattcaattgcaagatcaaaagatttagatccgataatgcacctgagcttttctttaaagatctcttctcaaattatggaatattgcatgattttacttgcgttgaaacacctgagcaaaacgctatagctgaaagaaaacaccaacatttattgaatgttgctcgtgctctttgttttcaagcccacacacctctcaagtattggtctgaatgcattatgacagctacttaccttgtcaatcgtgttccctcttttaacttgaacaataaaacaccttatgaattattgtttcaaaaagagccagattacactcatcttaaaacatttgggtgtcttgcctttgctactac

SEQ ID NO: 80080 - DNA, 1807 bp, Cannabis sativa
gcagaccctaatgtggatgatgacaaagttgatgttgcttcaactattgcatctgttgttgatgttgtggaaaaaatagtaagtttatttttagtctatttctttgtgttttttttgttttggtgttattttataattgttttgtcatatttcctttacaaaaaataaaaaataaacctatttatttgttaatagattgaatcctcaaaccctgttgtcgttgtttctagctctgaagatgtttcccaaaagaataatcttgaaatggttgtttttcaaaagactcatttattacgtcctcagaagtgggattgggagaaaggaccaattttgaagtatccattcatggagcttacttctggtgattccaaatcaggttttacatctgtttcacctgatgagtctctttttaaagtggtaaaatatgttggtggcttgtgctcgttggacgacaagattggtgaaccagttgattcccaattggagtctgagtttgacatttggcttggtaaatggcttagaaagcaaaaatcaacataagtctttaagttgtttataatttcatttttgtttgtttgtttgtttgcttttatttgttatgtgatgtaattatttttccatcttttgcacaacaactaatgtgtattgcaagggtaaggaaaaaatatttctgccattttgttttggtgttgaggaagtgagcagcaagatgtggttccccaacctaagctatcctaattacttcctttcttcttctgtatttttttttattgttgtttgttgttgtttgtatttcatttttttttttcatttgttgttttatgttgttctgttgtttcttaatttattaaacccttaaaatattcttatttgcagcacattaacatcattttctactatcttcgcaagaaaattaattttgccaacgagctgaaaattagggtcacaacaactgattgtctttttaatgttagcataacaaacttgtatgataagtttgttaaaaaaataatgatatatctattttgtctgttgagcataatgttgcacagtacatccgtgatagtaagatattatgtgccactccttggcacttggtcgatcacgttattatgcctattaatgtgaaactataggatcattggatatgtggtcgattaaacatttttgagcgtcagatgtacttatacaattccttgaggtctagcaggtttatatcagttgccaaagaggcttgcaagccttttttttgtgatcttaccatactatttctctatgttagactttcgagacttctacaatgaatcaaagtttagcactatggaaccgtttaccatatttctgttgatgggttacttgagcaggtcacagcgtaagttctttctcatctattatgttatattatttatatttttattttattatttactttatggttttgttcattttcttattttttttagtgttgttctgttgttgtcattcagtgactgtgggttgtttgtagcatcttttgctgagtactttattgacagcaaacctattccatcttctgattttgatgtggaagttcaccgtgatcgattggctgtgtcatttttgttgggattttatgccctagataaaatctatttcaatataatctgatttgttatcaatagaaaattaaaagtcatttatggttatatgtagtttttatgtttatggtttaatgtgtacaatttctattaagtccagaacatatagttattcacaaatacagtgatctcaacactgtagaagataattgggattatatgcttcaaaa

SEQ ID NO: 80081 - DNA, 1981 bp, Cannabis sativa
taattgggtagtggctttcttgtgtgactagagaagattcgatgggagattcgcttgtgggctccgaatgggcccactcagccgaggaagtcggctagaactttctccacttgatgacctggcctgctctttaatctttatactttttagttaatatattttctgaaaaatccaattcaactagaaaacgaatttgttcttgtagcagttgtaactaaaatgtatgatctactttactctactattactatatagtggccagcattataactagtaaaactttatgattcactacaccattttggtaacattcttacctattttggcatcttcctttttagtttaattttttttttcataattatatacattatagttatttaatttttttaaaaaaaatttaaataatttatgtttactgaaattttcataaactaattaagcgaaagcttcaaaaattaaataattattaaataattgagacgattaaatttatatagttcaagcgttaattatttatagtcaatgagtcagtatattagctttataagctgcttaaatgtattacatgtaatatttataaagtaaaaccataactctgctcctttaaatttctcttaaagaagaagaaaatttagaggatattttgacaaaactttgattattttttttattcccgtttataaagaaacgaaagggtttatgtaggttaaagttcgactccgggcatatccataacccagttagagtatttataaaaagtctatccactattgggtcccttaaaaggtttcctctcgttgggagacggttccgtacaattgggataattgttatgcaaggcacgtgtcgggcaaaagtcacgcttggcaaactaagtgctcagaggagccgtaggacaaaacaatattctgaagaggtgcgcgcactatcgtggtctgatacatgggataagatctgatcctgtgttagaaaggtaaacgcgtcgaggggatgcccgactaccacttcgtagtaggcttcctgtattcccgtgcacacaacatccattttatactcttcaaatagctcccaagtatctttttctggacttaatggatttagtccttttcgggtcccgaaaagctgagaaggcttccggggcctgggcggttgcctttcaggttagcttagtccttccaggaccttctacaattaaagagacttaagcgataattattcagatcaccatcttctatattttgccgtttgtccctattccgaaaacacgaataacaatttacaatgtcgaaaataagatttaggtattttgttatatgcacgactgtttttttattacatgcgtagtaagtaacgatgtgaatcttaatttcggcatgctaaattatttaaatttttttaaaaatttacaagtagtcatatataactacaatgtacgcgatcattaaaaaaaaattaaacaaaaaaagttttctaaaaaaattgttctcatgatttatattgaaaaaattattgtactaatttaaattaaattacgtgaacaaggagtgtcctttaaaactatacagaaaagatctgtgcttgtttaatatactagtttaatatactaaatatccaatatcattcaaaaaaaaaaaaaaaaatagaattagtggaaagaagcaagatgcagaattttatttgaaaatttgttatggactactaatatgatcaacttggaattgcaaattcaaacatttaaccttaaccttattttactcttctaattttcattataaacaaaaagaaactcttctaattaagtaggaaacaacaatgtcaagaagcatttttgctggttcagtgcacttatattaattatgctgaataataaatatataaatatatatagactagagaatagtcagcaccacctcaaaatcgcattttacacaaagtgaccaagtcactgtggattggagacgtccataatcagcaggga

SEQ ID NO: 80082 - DNA, 2570 bp, Cannabis sativa
  modified_base (28)..(44): a, c, t, g, unknown or other
aagaaattcagttatataggcacacttnnnnnnnnnnnnnnnnntatatatatatatataaatacctgtggccaaataatagctgcagcaataatacccacataattgagaagggtaagtccatgacaaagaaatgctatggtttttggtccatattcagttgggagcgttgttataccaaacctataaataatcctcatatagtttagttttatagtaaattatataaaagaaaaacaatgaaagacaaaagcagattaattatataattgatataaacttacttgcggtcaccttcaatgtctggaagatctttgcccatggagaggcatacagcaaacagtaaaacaaaccaaaagagcaaacaaaaagcaggcctggacaatcacaattcataatacaaaaccattattaaacatcatccacaaaatctttggtgtatggtaatttatatgaagttttatctcaataccagttagtatataataagaagagaaactcgttgcatcaggcccgaccctggtataagcgggctaggcatgtaacactaaatttcagggtcagtcctacattacatcttattatgaaatcgagactcaaaatagctaataaatcactcattatgaaaaatgtatcaatataatgttgagtttgaaaagaggtgaatagtgattggatttatgataaagaaagagagctcttggttcaattctctgtcttaacgagaggaaaaaaggattgatcaaattctattgagtttgactcatagtgatctttatcaaagaatgactccggttattaaatgatagaacaatcggaagcaattacttcgatacttaattgacatttataaaaagtctctaataaattatgagttgcatacatcatgtttagcataaagaccgcggatattcttttaatattatcctttaacgtaataactcacctccattctattggaagtccaagaccagccttgcaagcataatagaccccaggagttgtgccaacatgcaactgtataatttgttataaaataattaacatttttttaagtgtaacatattttaaaatagtagttattaattgtagtaatataaatatatataccacaaaattacacaaacaagctgtaaaaggattcttcttcaatctgaatggaggagcagaatagagaaaactagccacaaaaagaccaccacaatatagaaaaggaaagagtgggcctgagttcattgtaattgttaatatgagcccacttattgtaccaaatatagtcaaaaaccatgccatttcaattgacaattctcctgcagctattggtaaataaggtttgtttaacctgaaaaaaatatataataatattaatatcaacaatttataaaattttcatattattgacaactatattcatatgacatattatctctatttgcactataagaaatcttaaatttactaaatgattaaaattatataattattttattcatatagtattccaactaaaaagtccaagtatattgttataaaaaataaaataaatttataactaaatgaatttttagttaatgttaatggtatactcatctgtgtctcaaataatatatatatattcaatatataatattaaatgaatttaagaaaattatcttatatattatttttttaaatttacggttgggttatttcgttggttgctctagtaatttcatgtaggttactgtgtgaattttgattgcaatttaagttgctatatgagttttatgtggatttttttaaaaaaaaaaaatccctattttattcatacaatatggagatattttcttagcttttgatgtctatgactttgtgtacacattattaatatatactcgcatgtacctcactaatttagtacactttttagtacactactaaaatatagcaataaattacttttttaacactccattaaaaagataattgaacaaataaattataggttgttctttagttgaagcaaccgaaaattgttgatggctatggcattgaacaaatgaatttattcttaaaggaaaggaaatcacttattcttatgcctcttcttctttttttcgtcaccgattagggttttgaaggtagtgacgagatctaagggttcacgggaactcaagcagcgatgagatctaatttcttttaaattgtgttttatattgtagtgttttagaacatgtttgatattgtcttttatttcaatttaaaaatacaaacaaattaattataaaataataaattatattatggtatatattacctgtcgatgtcgagatcataaatttgattgatgccatttatacataatacatattgtcatacaaagaataaccaatgcaaaagagagtgccttaatcatcaaaccccaactacatagattcaggttccccaccaactcttttgcaaacatagcactacatatatatatacatacaaacaattaattaatgtatataaaagagattaattaataacagccaagtttaatatatataaatctatggaagaggtttcaatggttacatttttattgt

SEQ ID NO: 80083 - DNA, 1482 bp, Cannabis sativa
caatattattggtcttatttttctacaccacacattacatgcattaattaatcaatttttaatttaattattatcacaattttaaatattttactcacaaaaacaaaatgcatgtgtaatttagaaaaaaaaatatcattttcatgtaaatattattattactaaatagtgatagaaaatatgtctaattttttggctgagagaaaagtatatttttattcataataagttagtataattattaagaagttatttataataattaccataagaaaaaacattttttttttaattataatcaatatatattttaatatttttagtaagtggataaaatttttattaatttataaatatgtaaaatgagttatttaataattactatcattattataaaccaataagtaatgaatagactaataaaattataaataaatgagattaaatgttataagtaaataattaaaaaaaaagttattaactaatgaattaaacatacatgcttcctcatgataacaaagtttttacaactcatagatcaatattggttgtataagtgaaattaataaaagacgttatttaggatttttcttcccgaactattacaattactaaatcatgttttttaaattttattactcattcaaattttccatctgaagaaaatactgatatggttgatgtgtcatattgttataattgcaccaatctacactaattaactaaatatttttatctcatttttaaatattttacttaaaaaaagcatgtccaatttaaaaaataaataaataaataaatcattccatgtaaatatttgttactaaagattctataaatttaaaaaaaaaaaataatgatgaaaatatgtgtaattaattaatgatcttaaaataacttatttttctcacctaaaacatgccacttactattattttgctataatgtttttgtattattttttaatatatatatatttatatatatatttatacaccatttaagttacattaaaatctaccctttatatatagatagtcaacatcatatggccgacaaaaatatgaatattaaatttattattaattaaagcttttattaatttggcaaaactatttatctcttcttttcttaaatcttctaagggtcatattttgtgtggtacgtaggagctagtaattaattaataattttgtgacctaatttatagttatcagtaaattaattatctcaaaacaagcactagaatgattatgttgtttgaatattgatgtttcctattttaaattactcaaagaatatataatagtattttaaaatttgttaccttttttttttttgaactcatcttaaaatttgttattacttgtaacatgcaatacttaattacttttttatataaatatatatgagattattgtttctacctacaatttttttaatatataacttaaaaataaatattaataggtcttaatcgaa

SEQ ID NO: 80084 - DNA, 2473 bp, Cannabis sativa
gctcgccgtcaacaaagactgccctagcgagctttggtcgtcgtctccggcaaccgaaacctccacatgtcgagttcgagctcgtccaaggacaactccattgacccacttcctctaatcacaatcttcgtcacgccaagatggatttcgactgtgtgagccctcacatcgacaccgaaacccttcgtctcggccatgggggagcccctggagtttcttgtgggtcagaatggtggtggacgactagatttagggtagtgagagaagagagcacgagaagaagagagaaataaattaatttattattttaaattaaattatttttcttttttatggaatagattgatttattattttaaattaatttatttttacttttttttatttttaaatattttttaggtgggctaataatataatgtcatgtatacattatgtccatctggaaaataccctgtgtacacagacatgcccacatagaagttaactgccaaaaatagatggaaatggctaagtgctaacagaacatgaatttaaggggttttgccatcaaaattttagaattagaggttatgtgtaataaactcgacacttacggaagttacgacgcaaattactctataaataaataaaaatataactatttggatgaaaaaaaaaaaaagagtattgatacatattttaatggtgcatcctagaatttctaaaatcattttcgtggaaagttttttttttaaatagattaaatcacatcaaaacacaatatttactcaattattaaaatcatatcataaagtttagacttggtaagctaattcattgtaccttattccgacataatattgattttaaatagaaacgagttctgttttttaaatatataattaacttctgttttcttccttttaaaatttcaactacttgtgcacatttttatttttatttttggtagtacatacacatcactaaaacttaaaataaagatgtcacccatcattattaaaaataaagatataatttctatatgataataatgataataataacaatgatggagtgttacgggctcaccttttcaaacagtaaaatacttgtgtgatattttgatttttctaagataaggccaatattttaaccatttgaataacaatgggttcattttttttgcacggcagtgtgctttgtacacactttcgtcccttgaacaactccaccatgtcatgctcgcaagcatatatgagtgtatccatgtataagttctctagccaaaatactcacattgtcgataggttcccattatggtagagaaaatccaaacaccatcgcccacttagtcacttgtgaccaaggtagcatgtgtggtcaaatgccaacattaattagttgacgtgccaatgcatagtcatgccccattcgatactttgaacaatctctcttatggcccaaggactcccatacatccatggtctaattctcaaggcaccatgtttccatgcatgtgggcaggccttcaagtgaaccaactagactagtagaatacattagacctctatctctttctagcatggtgcatctatctcatgcacgtatgcaaattaacttgccccacgaatgacgacatgtggcatctcgtttgagactcgtaaggtcaaggcaccgcaacgtctcatgaagatttaggtcatgttccatgcaagtagcatatcgaaaagccaatagaaacgtaccagtgaacttctagcagcctttctagacacactaccagatcgacttgataatatccatgagtacttcaactcatagagatatcatggtccttatatgcatgcctactagttctattgactagtagtacctcacttagcactaaagtactaagggtggtggagagctaacatcaagtagttctccccctaaaagagcattctactagaaatatacataatttttgctctgtaaacatatggctaattggctatgactatatactaattcttatagttcttcaaatctaattgtgacattatattcttagaccaaaataaatgacttataccaagttctattttaatttggaaaatattaaaagatatttataaaaatatcacttatcatataaattaggcagcatactactataatacacaccaaccaacatgtaccaccacttggtcacctaaactcagctaaacaagactattgtctactatcaaattttaattatgccaaaaagaaatattaatataataaattttgtcatgtaggtccaaaaataatatgatgatgcgaaccataaagttttattcattgtcatcattaaacagtccaaaattcatataatttattgactgcatggcaatggtgatgactattttggtgtattatttaagcggatgtatatatatatatatatgtacatatatacatcatacattttgtgctgcaactaattctatttcagtctttctacgtg

SEQ ID NO: 80085 - DNA, 1740 bp, Cannabis sativa
attacatctaattgagcaagagtcattaattacccacacaaagactcaatattaattttggcacaaaccaaaatggaaaaaaaaaatagagtgtttatataatctctcagtataacatcacattgatttctaaacaacgtgtgatttttctttaaaataaaataactaaaatttcaaaaagtaattaaaaaataataaaaaaattgatttgaaatttttttagtaagccacatcatgtgttttgtgctgttttatatttatatataaaataaaactagagaatatagccactcttcgcgcgactgactgatgtaatttttttagtattataataaatagttacttaaacatacaattctaatgtatagtaaaattatcaatatattatttcatttcatattattataaataatttatttattaaaaactaaatgcacaattttattaattattttttaaaattatttattaagaaatttaaaatatataatgtagtattttaaattgttttgttaaaagaaattatttttataaaaataaataaataagatggtatagaaaaaaattacggtgttttccataatgtattattttcatatctcgatcattcaaattattgttattattgtatctcacttgttgttaattatgaaacaaaacaaaaattgaaatctagatcatgttaatttttttttatatatgtgataatatatatttttttttataattttattataattatttaaaatagcagatattttgcttttttatttaattacttttgtacagatattttctacgataatttattatacggttagttttatctatatttataattcaaaacttgtttaataaaagttaaaaaaaaaataaaaaaaaaagatatgatatatataaaaaaaaatgtaaaaaagatgttatagttattaatttaaaatatattttgaaatattttatacaattcaaaaataaccaataattaaagttataaaaaaaatattgtgaaccatgaagttgtacttgcatgagatatgaacaatttttcactccttgaacttactgcaacacttacagaatctctctcttgagtgcacaagaggttgaagttgacacctcgaattgttccaacgaagaaaaccttgacgacaccaaagttgtcacactaaaaaattcctatcaattctcttttctgtcataagttctcgtgtcatataaaccgcaaaatattagttttatttaaagttttgatgttttttttttgttttttcagatttcagtaactaataaaatactctttacattattaataattgtatagatagagtgcaagtgaatcatctaaatacttttaactatttcataattaacccataaccttaactattttatttatagcataatatcaatgagaaataaaaaaaatgaaaagaatctattaagaaaataacaatagaaaaatatatagagaaaaaagaaagtactatagttgcatggagaatagctatccaatagaaagaacaaaaataaatcaatagcaaattcattatataatgctagaatatgtagagaagaaagatgaagatattagataaaagattaataatattagtaatattaaatagatatggtgatagtgtaacgccccaatattttaccttattttacaaagtgctaattttgatgcattaattaaaaagattcaaagctgtttgaaaatacacagtgagttttacaata

SEQ ID NO: 80086 - DNA, 1469 bp, Cannabis sativa
aaaaataccaaacataggatttagatataaacaagttggtaagatggatgcagtaaactatgtatcttatatccatataaaatcaaatccacaacgttcatatacaatttaaatcaaatatagaatcttgtacatggtatacaaagtattttacagatagccaaaaatgactcaaactaacttacaagagagaagagaatatacaaaaattaacttgggaaaaccacaacgaccacttcaaacctctccttacacaattttgcttgctggagctttctcttgctgttgtatgtaagctgagggaaaccatccagccttccccttacactctccttcagaccagccattaggggccacctgccaatatcacaagcacattgtttcaaaagtacaccattccaaatttacaattacaaacaagaatacattatacattgacacctgatataaaaatatccccacgcgtcttttttaacataatccatcatcatcatctattatttgaattttgaagtctgatttctcattctatgagttataatctttgaacatgaaaatgcagctacctatattatttttaggtggtatacttccaacttccaagaaggaatgcctactatggctagacagtaattctccacttatttgagccatgactgatattcatagagaaaaacattcgacaaaaacaagattgaacaaatgagagctgagtttgcattgaagttggtatccaggaacactcttaaatacaaagaaagatcaccacacaataacccttttaccgcccaatactccttattcttatcagaaaaccctacatcactatcacaccagaatatattaatggcaccactcggccattatatctccaaaaaaagtcccaaacaatcccagacataacttgccataacaccacttagccacgtattgctcaatctggatcagccttctctgattcctttttctcataagtgaataggacacactaagaagaaacaccccttttttcaaataaaactaatgataggaacaaactgagggaacagtcaagggacaacaattctatgaactaacctgattttttttttttttttactaattgcaaatcaacttactaaactacactaataacaaatatcttcagtataatttacttacaaacttattacccactttctttctattccttatcttttattttcccctttattcctagcctccctagttcatttcaactgcagacttttcctgaaataaaaaaaaaaatcccacagtaacatctctgcaaagaatgaatggagttggcatatgctcatataattgttcacatttgagaatatgcaccaaagtcagagaatgtagctaaatgatactccgatttttgctagtcctaaagtaacaattttggaaggctgtaggcaccacagtatgaatattcaaggaagagaaatacataccgtaaaact

SEQ ID NO: 80087 - DNA, 3102 bp, Cannabis sativa
ccttatggagacttagcagaatgtaaaaaataagctagtgaagatctctttttataggcatggaagtccattaaaatattaataaaatattataaaaaattaaaaaatcataatgggctaatcttgaccattgatggtgatttagtagttgaaatgactctggatgatgatcatcaatttttagagcttgaatcatgtctggtgaatcattttcaggtgattttgtgaacaaaatagcactttgactttgggatgatttttcgacttgaaatcttcataattaagatatgagtgtgagacatgtgtaaaaatagcttgaaaaagatatttccaatgcacttggatttgcatcaatcggagtaatattgagtgagttatagtcattttattgaagactgttcagcactcagcgcccagattgacatccagcacccaggttgacaatcttgcgatttaaggagttgtgcaatgtcaacctaaacattgtataagtgggaaatcaagccaaaactttattttttgaagcttgagtgatattttgacatcacttagataatttcttgataatggtgaaatcattcaccagttcttgttggttttgtattttgtaaaatcgggagactcgaaactacctaatttgtaactattttgtcgatatttcactttttcaaaaaaggtaaaatatcaaaaatttgacttatcacaagttttagctctcatttactacaaaaaatagctagattctcaaaacgcaactggaatcggataagtagatccatcgcaccaggtcatatgtcaacctgggtgatgggtgcttattactgaacttctcgggactcgttttgatatttctatggcagtcaagatcgcaaacgaggtctcctatcctgttttggaccaagatagtaagaggggcaaaatttgtgcttgagcagcagaaccatgtgaacctagttaaatgtcaaccaggcctagccccaatgtcaacctgggcactggtcaagtattttggctcccaaatgctcttgtttgctccctgagaacacttgtatctttgttattgatgaaaacggagaaatttcctgggagacttctcgaggaaaatccttagaaacgacttgagcactgggtcagcttattggccaccagacgacttcatttttttttcctaaatcacctgtatcttgatccttggaaatgacataggttgatagtatgtcaacttgggtgctaggtgcctttttatcctctaggttgattcattttttttcttttcaaaagtacttatatctttagtttggatgaacacaaagaaatgcataagaaacatatctaggaaagtgattggaagtgccccaagttgacaacatgtcaacctaggcattgggtacatcactaggtcaacttggacaatgggtgcctaggtgcttcaaacaagagtgttttgaaagtaattatgatgtctctagttgcttgtgacatgtcttattcatatctaagtatacatttttagcaatctacactaaaacgaagctgaaaactgaaaccctatgtccaaatgtcaacctgtgcgttggatgaagccttaggcacctgggttggcttctgcgatgccgaattgacatcttcaagttctcaggctcgtaaattgaagtcgtcttatcttgttggtttagaatactgaaggattgtgacttgaaaacaattttacgagatctaaatacctattttggagctcctaaagttaacctggcgcaggactaaggacttactaactttacaacctaactatttacaactcaattgtataattaattgtgactaactaattaacaacttctctcaattggattaacatgtgtgtcacacatgaattaattcatttatatttatgtgatcattaaatttattatttatagcttatttattaattattaaacatgaagataattataaaaaaaaaaatagtatgtaacatataacttattcagacttaataattaattatttgaaacttatatatatttttgtttagcaaattattcaaataagtcaaaatgtcaaattagcgtacactaaaaaatgtaaggaaaattaaatatgtgatactaattatctcaatatcaacattaaagtgtaggataaatctaattgatatatgaacacgataagttaacacacaaatatgataggtcaatatataaataccataagaagttagaattgagatttcttgaaacaaaatataaataaattatttatcaaaatatataaataggtcaagttgtgattgaccaattacacatgtcaactcacatggcataaaatatgacaaaatgacataaattcccacccaccatgaatcccaatacaagtttatctccttaaagaagagaactacaagccaaatagacacacaattacatatggtattattatatgtaagaacatttttaatagagatgtaaattggtgatttagtgctaaaatacaatttattttgtaaaaagtttgttctaattatatgccaaaaattaatccaaatttatccatagtaaaaattaatctaaatttgttacataacaaaaattattataaatttaaattattatatgacataatgtaaaatttgaatcacaataaatatattacttttatgctattttttatattttattattaaatttatttattgcattaaattataaataatttacatttattttttattgttttaaataataataaagttattatttttttatatatttattgcatcaagttttcgtaattgtatattagaatacaatactaaaaattaatataaatatatcacaaaattattttttgtgttaaatataacacaatttttaaaatgggtgatggtcttgcattattttggtcagaagaatcaaactatcccctacttgcattgcccaacaataatacctattatatatgtaaaattgttaatagaaaagggaccattttaactttgggataattacataaggtactatttttttgtaaaaaaaaaataaatttttacgtttaaaaaatttttttatatttttacggttttccatagaaacaacaaaaaaa

SEQ ID NO: 80088 - DNA, 790 bp, Cannabis sativa
tatatttatattatagttttcatgaaattatttttctaattatttttagttgttttatagtttatttataattgatttatggttgtcgtgtggttgattaatttctcgctatttttaagttacttttttttttatattttactaaataaagtgtatttttgtaattttaaaattttagaagagtatttttataattaaaaaattaagattgtaaacttataaataaatatatttttgaaaattcccaataaattatttagatttaattttttaaggggtagatttactttttttaattatatcatatattttttgtgtgattatttgaatattattgagaaatattacttcatagataattttaaatttataaaaaaaaatcttaaaataatttagttaagttgaataaattagtgtatggatatgtattagagggaattgatgatttcaattgaatagtttgacaattgcatgactagaattttaagagaattttatttgtaatttttgtgttgtgggaattagaaaaaatatctttcaaaaagagaaattgaattttgagaaaatataattgcatgtaaaaaaataagagagagagagagagaagaagagaaagagagagagaaaaagtcatacttattttgttttggaatttggtaccattaattgtgtacttttacttgtactccctcctttgaccaaaaaaaaaaaacagggaaagcgagaaaaactttctaggaaagtttcaaaccttatatatgaagtgataaaagcctatgaaaaatgaaaa

SEQ ID NO: 80089 - DNA, 2807 bp, Cannabis sativa
ataatctatcatttttcagcactactcatgttgataaatgcatttcgtatgtcaatcatcctaatggaaattctgttaaggttgtgtgtcttggtacaatgattatttcctcaaaacttactcttaaaaatgtcttgtatgtgcctgatttcaacataaaactactatttgtcccttccttgcttgaatctggtgactgtatactcacttttcatcctgaccattgtttgatccaggacattttgacgacccagctgattgggatggctaaaagagaagggaaactcttctacttgcaaccacctgataacaataacaatccctttatttttttctcttaaatctgattctcaaatcagtgatgacgcagtgtggcattacagaatgggacatcattcttgtatcaaattacatgccttgaataaagaattaaattttcaaagccaatcttgtcctaatttttattgttctatttgtcattatgctaaacaaataaaacttccttttgtttcaaattataatattgcaaaagcttattttgatattgtgcatattgacatatacttactattcaggggcatagttatttcattactattgtggatgaccactctagattcacttggattcactttataaaaactaaatttgaggctcaagttgctattcctaatttcattcagcttattcaaacacagtatcaaaagactattaaagtcataagacctgacaatggaaaagagttacaatttggtgagttgtttagatccttaggaatagttcatcaacattcttttgtccatagacctcaagaaaattctgttgttgagaggaaacatcaacatttattgaatgttgctcgggctctcttgtttcaatcctatgttcccctatcctattggaatgaatgtgtagctactgctgcatatttaattaatagaacccccactccaaatttgcaaaatgtttccccttttgaaattcttaattccaagccacctaactacaatcatttaaaggcttttggttgtcttgcatatgcatctaccctatccaattcagggactcaattctctcctagagctactccatgtgttttcatagggtatcctagtggtatgaaagcttacaagcttttagatttgcattctaataaaattttctaatcaagggatgttcaatatcatgagactatcttcccattctccaacaatagtggtctttttgttgaatatcgccatttttttccaccactgttgctgctactaaatctgttattcagcatgacaacatctcttcacctgctgcttctactaaatctaatatttagtatcaaagcacatctccacctgctgctacttcccttggaaaacctgttcacactagtaataaaccttcttatttgcaagactaccactgtttcttgcaaacacaaattcctctatcatgcctgcacaaccccctcttgtcacactttactctatatctcaagtgctcaattacagtaaattggcaccacactttcgtgctactgttcttgctatttccagacatgttgaacttgagttttatcatcaagctcgaggcattaaattgtgggatgatgccatgaataatgagattgatgctttggaaagaaatcacacttggatagtggtttctcttcctgctgagcatcatgccataggctgtaggtgggtctataaaattaaatataatgcagatggttcagttgaaaggtgcaaggcaaggcttgtagctaaaggctacaatcaacaggaaggtattgattatactaatacttttacccctgtcaaaaaattagtaacagtcaagcttgttctagccttggctgcaattcatgggtggtttcttcaccaattagatgtgaataatacttttttgcatagagatttacatgaagaggtttacatgtctctcccaccaggcttcactccttaaggttctcttccaccaaatgatgtctgcaagctttaaaaatccctctatgggttgaaacaagcttcaagacaatgtttccaaaagttttccactgccttgattgctgaaggttttcacccctctcctactgaccactctttattcattagacacactgctgatgccttcattattcttttgatctatgttcacgatgtaatattttctagcaacaacttggctgccttggaggctcttaaagttaagctgaatagtaaattttagcttaagggtcttggcaagttgacgtattttcttggtttggaagtggctagatctcccaaaggcatctttgtttctcgaagaccttatgccttacaattacttgaagaccttggtcacttgggttgtaaacccgtttctactcctatggaagggaacctacaactaagtcaagctaaaaaggacaagttagttgatcctaagctttataggaggatccttggcaagcttcaatacctcaccattacacggccaaatattttcttcactgttaataaactcatccaatatcttgctgttcctaaaaatttccacatgaatgctgctcaacgggctcttcaatacatcaagcattgtcctggtcaaggcatatttttccctgctaattttgttattcatcttcgtgcctacactgatgttgattgggcagcatgtcctgacactcgtcgatccactataggcttttgtatctttcttggtgactctctgatttcttggaagagcaagaagcaacaaactgtttctcgctcttcagctaaggttgggtatcaagccatggccaacactacttgtgaattggtcta

SEQ ID NO: 80090 - DNA, 1509 bp, Cannabis sativa
gggccctccacgtgtgcatatttacgagttaataacgaaagtggtagtaacggtgtaaaagaattgtaacattaggtatttttgcctccaaaaataaacattaagtatttaagtgtataaaattgaaaaattaagtatttataccgcactttagcctaaaagttaatatcaaattatgcatttcatagaattggatgtgaaatgaacatttgtgcaggtccttattatcagatccaacatgaaatgcctattacttaatagttagtagtaaactataattattagtaaaataaaatataaatgtgatttcatattaaattgtacaaaaaataatatgatataaatttcttttaacatttctttgtctagaactagaacagtaaaatgatgaagagcagagtggatgttggggtggcacgaggacctatatgagagaatggcagcaagttaatcattctgaggacgtaatcaattggaaccccaaattccgatggtgtctaggcgttaattacgctaccaacgtactttcactctctctttctctctaccactctagttcccatctcatccaatcacacaaaatctccattctcagtagtaaatactaattaatattcaaaaacacataaaattagtttcttgaaaatcacaccttatataattgccatcatcatccaacggctcaatcaactttgatcttttgccaaacaccaccttcctacccctctcctctgccaatctttatgagaccttataattacgagctacccaaagctacgactgcatgtacgtacgtagctacagttaatctaaactaatactaaaagcatctataatggtaatataatttttatattattttttatatttttacttttaaaaatacttcaataatataagccagcactctcttgacgtccaaagaaacttggttatcactaagcattcttattttaaaagaaatagatatgctggacaatcatcatggacacacttacaccacaatacttctaaacaaaaatcttgccagaaagcagaagtaaggaagataacagttgttgtccaatcctggaaaatataaagcacagacgtgtatcccaataccacttctaagaagtgttaccaagaaagaagctaaatagctattaacaggagtacataatggctctacgacaatcatatcggaggcaaagctaaccgagtgcagatgggattaaattgtagcatcgacctggcctctaaaaggctggccaaccatatggcctcaacaggctagctggccatggaatcaacaacctggccggccactacctccataggctggccgaccatagcctcatccaactggccacgcaatgctcactcaacgtggctggccacctggtctgtaccctagctggcccgatctgccaatagtctgctctcatacttttggtctacaatgaccaagaagtaaaccgcatcttgctagcagaatcccttgatgaaagggaaagaagaagagaccaa

SEQ ID NO: 80091 - DNA, 519 bp, Cannabis sativa
ttaatattaatattaatatttcttccttaaatcaatttttattttttatttgtttttcttttgaacaaaaattaattttatatgttaaacacgtgaatgaataaacaacaaaaaaaaaatgaacatttgtctaaatatttcgactataaaccgatattgaaagagagataactaaaaggtattattggaacttaccattttttgttagtatccttaagtatcgaatttcatataatttaataaagtaatttttcaatttattaaaaacaaataatttttattaaatatcattaaccacctgtgtggcaccacttataaaaaatattgggcacaataacattgttcatattaaaattatacttttaatgcaaaatttaatgtttaattgatatttttattgaaatataaataaattattatgaaaataattaaaaacatatataaactaattatactaataaaataataaaaatagcataaaaattaataaaaaagtttaaagggcttttttatttaaat

SEQ ID NO: 80092 - DNA, 1679 bp, Cannabis sativa
  modified_base (65)..(68): a, c, t, g, unknown or other
  modified_base (1410)..(1420): a, c, t, g, unknown or other
ggaattgatttctcctttatttttaattgtaatcggtttgaattattgtgtgttacttgtttgtnnnncattatgttatataaccggttttattttagttaaactggttctaatttagttataattagttttagttattttaatttatttgtttttattctttgtgttacagaaccgattatatttcaattataatcggttctatttttgttatatttgaaacatctacttctggtgactttttcagtaactttttccagcgacggtgactttttcgacgacgatgacttttccggcgacagtaatttttccagcaatttttctgacaaaacttattattctttacaaatatgggatttccatctttttttataaaaatatggcattaaaaatacctatataaatgtaaaaaaacagaaaaactcataatcctttaactttatttatttatgcaataaaaaataaactcttttttttatatatatataaaaaaaaaaagtaaactcttaaaattgtaatttctacaaccaaaattcgcttagaccctatgctattcgactgcattacacctggaacttgcccaacaaaaccaataaaaaggttagcacaattatcataaagttgggcaaggaatactaattctgcatgcaaatttctttctacttatataatggtccaaataaatattaaaatgatcagtttctaaatcctccatagataccaagctctaactatgttcagtaaaaaaacaatttcaacccatttcaacttctgcccacattttaatgggttgttcggcccatttttgtgtgggttggctgggttggtcggcctgccgggttgcatattcagccttacctatgatttgagtcatttgttataattgcccttaataataaaagttaaaagattttttttttttaaaaaaaataaggtaaatactattttggattatgtgttttgtaaaagttactaactggaccacctattttgttaaatgacaaaatggaccttgtattttctaaaattgtacaaataggacccttaactgatttttttcattaaaataaaacttaataataatctgatttagagatgttatgacaaaagtaattacatttttttgtatctgttcgtgttaaaaattgtcttaattggtcatatttaaagataacactgttgaaaattgaactcaaagtcctatttttaacatttttgaaaatagagggtctattttatcatttaacaaaaaagaatgtccaattagtaacttttataaaacataaggtccaaaatagtatttcaaaaaaaaaaacatagcatatgccaccgaaatgggacaggtaggcggttgtaaaagatatatctattctatataaagtgtgctatgagaaattcatgggtgacttnnnnnnnnnnntaaaaataaaatggtttattaataaaaataaaatggtttatgagaaattcatggttttttttttttttaaaaaaattattaaaaaaataacagtttttttattaagatgtattttaatattaatttttattaatttttaaataaattaatattacttttaaattttaatcgtataaaaatttaaaataactaacccaagttcgataattattagtcttccaatcgtgattatttgggataatcatttataatttttttt

SEQ ID NO: 80093 - DNA, 1825 bp, Cannabis sativa
atcataaaaactgttgcttgtacagctattttgttaattgtcattttctgtggcttcttgttttgcacttgcctacattctaattgatttttgggtttcattttctggtgtccttctctgaagttttgagttcattattctgatacatacatgtttgtatatataatataccataatatttttgtcaactgtgattgcctaaagtgtcatcatttcgtcttatttttgatcttattttgaaagcaatgtgagtaatcaactcctggatctatctcttctattgggtacatcaaagatgtgtagatgtgtgtgaaaagcatagttttttttttcttttcatttactatttttcctgtgaagtttctttggaatgtgtttttttgtctcccacgctcctttcttttcataaaagtagtcatctttctttctttttttcttcccattttttatactctagtatcgatttaatgctaagaattttatgtaataatatattattctctagatttctttgtaagtttcaagagattttctttttatgcgtgagttttgcactctttttatgcttgcagcctgttatgtgtggtttttagctcaatgaaaaaggatttttgtccatttcttgtggacaacattgattttttattcttctcccttttctcactttacctactttttttttctttaataatagttaaatctctttctaccttctttctctcttcatttatggatttctagggaaaagcttttgtttttaaatgtctgacaatttcaactgaaaaagggtttttgttgccatgatcttttttctagtctaaatgaaggattatgatttatgacagcgaatttagtggctttagcatgccttcacttgttgctttctctcctatttcaattaggtttttaatgaataaaataatgcatctgtaggtctcagttttccatttaatggtaatagtaatgtgtaagctttggagaaagaaataataattataataataacaataataaaacaaaaacagtgatgattatgatgtgtgaggtctcccagaacatggtttggcttgttaattacttaaactcattttcttgggatgatatgttcttgcctcttaatttgtcactttgtttaatgaattctaaaaactttggtagccaaagactaaaaagttcagtttctttttcctaatttcactcattgtcagctgtatttttgtcgttttctgcttctttattcttcttttctttatattataaaaatgggggcattagtcagtgcacccttattttttcccattcagtgctgatagcatagtagtaattttgggaccccttattgttttaacttgatttttatcaaatcattataatataattcaaaattaaacaagttaacaactttgttaatgcatatgttctctttaacaacattgcttatggcagtattttaagttaactttcaataaatgactgtctttttaagctttgaagtgatgattgattctctaaattcttatgtttttgtatgctctttcggtagatgtcgcgaaaagcagaggaaagaagcctctcgacttcagacagttaatcgaaaactgtctgctctgaacaagttgttgatggaagaaaacgatcgtttacagaaacaggtctcacacttggtttatgagaacggatttatgcgaaatcaactgcacactgtaagaagttacacaaaattcagtctttgcttgatgaggtttatgcttgtgacataactttctaataatagtaatgttttatcattcttaataggcatctgggacgaccacagacaatagtt

SEQ ID NO: 80094 - DNA, 2308 bp, Cannabis sativa
gctcttcaagtctcctcctttgtttctgaggctccaaatatgaatgaatatgaattttcacgaactcccctctctttaaaccaagtctaatctttgaaattcgtgaaattacgaaactgttcgaaaatcccgtcattgatgcttcgctgcggcgaaggaattgcctgtcgcagcgaaggttgttgtccacaatttccataactctctgccaatccccatctcggcgaagctttttccccgtcgcggcgggactaggcagcaaagtgacttgtttatttttcttctcaattctttcacctcttgtcctcaactctttgcaaatacttctttaaacatccgagtacctgaaacaaaagaatcaagcgtaaaatagccctaaaactagaaacaaagagtgaaaactaaccgaaaatacgacccgaaacttagactaaaattagcctaacactgtctctagggtttctatattctataaatggggacctagagagcaaccaaatatttttttttacctcttctagtttcatttttactattttcatctttgtgaggagagaggttcttttggaaaaacctagagtgtttaacaaggttttagtctttatttattgttcttatattgttcttaaaatatgttgaagaactccattaaacaagagaatggtcttcgggaaaagacttatcaaagccttactttgggaagaagtaagcactcacacatcaaaagatgaaggaatttcactatttggtggtgttcagaaatcagattggcaaagtaaattacaaagaattgcagcaaagctttaaagggggtttaaacttgtttaagtcaatcgtatttgcaattatttgaaatattactaattgatttcattctctgagcgtgaccacgtggactaggagtgtttgaaagtacattgatgccacataattcgcttgtgtcaattttttattttttgcactgttatttatgttttgttactgcaaatctatgtttgtagtaacacgttttcattctgttactgtagatctttacagtcgtatttttctttacgattataaaaataactttttgacagtttttcactacataatttatttcttttttatattagttattgttgtatggtatacaaaacacttttattaatctcttttaaccacattcaaattcccaaaattgatccatatttattcttcttggggaggaggacaatagtagcaattataagtgaaatgtagtgataacaacagatgaaatacaacgattaacaactttgaattaatggtcgagattgttaggtttatttttatgtatttttagagtattttagtatgtgctttagtaggttttatttgtttttgttcaggtttacgcttgtttttttttttttgttttaagttgtaacggtcaaatatactatattggttaaaataagagaatatatgctaaataagatgaattttatggatttagcatgaattttagagttgtaagatacaatgggtgaaaaaattttaagttttggatactcaacacgcttcctttgtgatcaaaaataaaatctaaagcttcaaaccaatttttgactatgatctaatcacttccaggaaagatgttttgaatgaaagttctagtatatgaatcaagtaaatggaattggacgactcaacatgttttgaaaagctaaaagaaagatctagaactttcatttagaatatttttcctagaagtgaatggataatagtctcgagaattggcttgaagcttcaggctttattttcaatcactaacagagcatgttaagcatttaaaacttaaaaattttcaccaattgtatttacaatcccaaaatgcacactaaatcgtaaaattcatcttatttagcatacattctcttattttaataaatatggtatatttgaccattgaaaccataaataaaaagaaaacaaacgtaaacttaaacaaaaataaataaaattactaaaatacatactaaaatagactctaaaaatacataaaaaaaaaattaacctatcagagatataaagataatacacttctttctttttctctaaaacctacttatttattaatttttaatttatttttattacctatttactttacttaatttatagtacacttttatataataaaaataataataaagaaaatataatgaagaacattaacattaatattatgatgaatagacttaaaaaagattaattgattttattttattttttaataaataaaattaataataatatgtaattaaataatattaaggagtttttt

SEQ ID NO: 80095 - DNA, 910 bp, Cannabis sativa
  modified_base (46)..(60): a, c, t, g, unknown or other
ttttagagaattcatatttagaatgttaattcaacatacttgttannnnnnnnnnnnnnnggtaaaatatttccaacacatacttgtacaaatttgaaatttagaaaatatggttactttagtacagatttaagatttagagagtaagagtactcatagaacaagctccttatgaggtctatcaagtcatcaacaagcacactcacactcaattattaggtgggagactaggtattttaaagagtcttccaatctcatcactaaggtagttggtaatggagtatacaaactccaaactaatgaaagacacgacatcaacagtagctggtaacattgttcatgttaagcagtatcacacttaaaattccaaactactgttctgttctctttacatttattttgtttaacggtctcatgagacccactctcctccacacactacttctaacaaatactcactcatacaaggagatagaactgcatttgggcttgatccctaaaaagggtatataggcagctttatcgagtgcagtcccttatcataaccatttttttccctctttttaagaatgacattcagtgagaaagtatgtgaggaagtttgagaaagttgtacatagaaggataacgaagtggtttctatcagataagttaagaaggagagagcatatcttcagtcccctttcattattccttttcaagaaaaaaagtctctgaagcttaagtattaccatctcgatcaacaacaacaacaataattacaatgatgaggctcattacttggattataattttcaaatagaaatgaaaagagtaataagagacagacttgtaataatggttctgacatagtggaaaagcttggaattggatatgggtcatgcatgctctaaattttgaagggtattgg

SEQ ID NO: 80096 - DNA, 794 bp, Cannabis sativa
gaccataataatcacacagtttaaatttatgatcgaaaaaaatttaaatttatttttcaacattgtaaactattagatttttttttttaaattttaccgtaataatattgtaactataacaaatatcatcgtaattttttaaaataaatgatatatttcagcatgtaataagaacaattatttacaatttgttatatttgcatatttcaggggattaaacatctttgttcagaactattggagttaaaattggcttcagatgaagaattcaacaaaaacattttttcaaattactcagttttcatcaggtaataataacaaaaatcttggctctataatttttcccatttgaaaaccttaaataataattttttccaaaatatataatatggacagaatatttgaagaagcaaagcatttgggaactgagctgaatgaactgaaaaacaatatttcgattcaaaaaaggttaattaaacaagtattagatgtaacatgttcaaaggttttagtctcagaagtaatagaacctttacttgaactagattattatgtgtctaatgaaccattggaagatcctataaacaacttatcagaaacattagacattttaattatagaaagaaagtttgatgaagccattgaaattatagaattagagcaacaaaatcctgaaaatgactctataatttctgagaggaaagtagctttgagtgtgcaattgtctctcttggccgaaaacccgagaatcactgtatcggaactccacaaggcacttttaaggctatgtagat

SEQ ID NO: 80097 - DNA, 1825 bp, Cannabis sativa
aaaaatcaaggtaactaaaattcaaaataggcacaaaaagaatttgatagatgcagaggtgcaactcacttcatatgcataaaatacatatcaacctgaggtctgtagtgtttgccattccactaagagattatgagcagttctcaatgtctatccgaggctacaaattcagcagaaaagaggtacttgactcaagaaagaactgaattgtgagcagggtcttatgttagatccttcgatgggatctccagtatggctgggatgggtgtgttgaaggtgtacattaggaaccttatcatactcaggataatgttttaagggatagcagactctcaaatttatataaccactgcaaacatgatataatggtttctatattagattacattagggccattgagattgttgctcagcaaacttacatattggctaattaagacaatggcgacatcctcctttgtggtgaactctttggatgcatcttcagttgctttcactgtgatttctgagcaaagacaaagattattagtaatgaagttaaggattaattttatcttggttctagacattactgttaaacttgagcttttaaaactatttttactatatatttggcatcattcaagctccataaatcaacgacatcattggcagttgtcctaatttaactcgttataaaagagctgacttgtcatgttcagcaacttggatgccaacatgataaaaatctacatatccatatgttttgttgtgatgggaatagagggagaaaggattgtgcaatgatagggaaaaatatcccaatgaaagactttaacatcaaagttatgctatgtgtgaaacatcaaacagtaaagaagacatgatttaatttaggttgtaagctgacagtagccattccacagtaacttatatatcattccaactatttagttcaatagattagtaccaaatggctaacatggaaaaagaatttaatcaacctttctccatgtggtactggggattacaatcaaatattttcataaaaacttttcatccctttcttttgtaaagcagctaaaagattacagtcagatatcactacgaggaaaaaaaggatcctagtttatctgcagtttttcttttttttcttttcgtaatgtaaatctttcttgtacagagtaatgactttagtagttggtactcgtcgtagtcctagtttttaaatttacgaccgttcttgtaattgcgaccttttagtggaataaatagaaaaacaaatttacagaaagtatgaaaaatggataatattttaatgatgatggaatataaggtttcattacattaagaatttcatatgtaatccaagattgtgcaaaatcctaatgttagtttatacttataactcgtaagagtcgtttagcttcactgggtctctggctctgcctcccaagctgtagcagacttgccaaaagttggtaggccatgcatctacatgatgcatgttggctggccatgagatgtccagaacctatgtccagaacctggccagcctctgctggccataaggccgactaggaatggctggccaacccccttgagttgactagttcgtcacttcgtcatcctgcttgagtattcaaacttttcattggttatagtgctgagtaggtgacttagtcttcttgctggtaagttgtactaccacatgacactgatgttggccacgtagacatgccacgtcaggtgagcaaaaatcaagataatgttagacttttatttgggcttacattaaattttattggttttattaaaacttgggttgattggatagttctttgct

SEQ ID NO: 80098 - DNA, 862 bp, Cannabis sativa
acagtttatagaacatgtttttgaaaaatattttcacttttccaattttaaaaacaaaaaactaattaaaaaagtgttaccaaacgctacctatgttaaagtaacttttatggaatgacattttatatttttatattacacatagtttttttgaatggaaatggggacattttattagcaaatcgcatcaaccattacaatatttaaaagatccgctggagcattactcgcgatgaatgtacgaactggatgaaaacaagagctacgagccataaagtgtgcaaccttgttagcagaacgtttaacaaattaaatctcaacagattttaaagaactaattaaagctttacaatcctgaatcactaatccgaagggagatagcatatgaatcgaactatgtaaggcttggacagcaagaagacaatcagtttcaagctgcacttcatcccaattcttgccctttatccaactaagagcctcctttatgccaaacgcctccaccacaccagcctccaagcaacttggtttactgatagaaaacgcttcaacaatgtgaccatgacaatcacgagtcaccccaccagtcccgtaccagccgtccgaagcgaagatagctccgtccaataataatattttagtactttttcataaaaataaaataaaataaatatgttaattgtttaacttgtgacttatttagtcttcaaaatatttttactactacattaaataacttatcttaatattaacttaagaccagtcctaatgactttagctggaacaactgccccacctaatctacacttaacttcgtcagatcacatacctctttatttttggaattttttatttttacatttca

SEQ ID NO: 80099 - DNA, 1705 bp, Cannabis sativa
gaatggtggggtgtaaagtctgaggaggaggggaagtggggatggcggaggtggaagtaacaatggtggtggtgcgaggtggagaatgaactcgcagaaattggtcgacagcatgttgcaggctgtgagctggagaagcgagaggagggaaaagttcctcaaaaggagtggcattggatatttcaaaaggattctttttgttgtgggattgagccgaagcacgaagagtgtcacgatattctaaaatgggaggggagggaaaattgtcacaaggagaagataacgggagcatcgattgtaggtatgatccatacggccacagaagtagcagaaattagggagactcttatacttaaaacttatccatttgggttcatgaatggaccggaaacgaatggtcattcccctgcgcagaggcttactaatgtcaagtaagactctaatcctaaggaaaggaccagagttctcaagcagtgaaagagggtagatttcaattagatcgcccagttcatccgctatgaactgagccaactgagggcttctgcggccaaaaggaatgtggtgggcttgaatccagaagggggtgtatcggatactttcaggagtgggggtaggtgagacattagggtgggtgaacactatgaggaacttatcaaagtgccaaggttgttcttcaaggacgcggcggcgatccccatcacattgaaaagtggccaaaaagaggccagagtggtattcagtgatttgggcaggaaagcgaagggtccaggcctcggacattgctttctcaatccaagcaggcttagcagttctagaggataggagcttaaagatgaggcagaaggcattggggtcagaagaggaagacagagagatgtggtcaaagtcatggatgaggctttcttcttcagagaggggggtgagaatgttgggattggttgaggaggaagccattggaggataagtggaggatagggtaaaagagaaggtgagagagggagaggataacgattgaatataacaaacagagaataaatagacaaagggaaggaaagaagagcgtagaaaatacctggagatgagggggcgcgtcgggtgatgagggaggttgtgaatcatcgcttcgattcctgaaatggcaatctgcagaggcggaggagaaatgatgacttaggagtaaatgttggagaagatagaaaagatggtttgggtggatttaagaggcattacagaggaatagaggagaagaagggtctgatcaaacattaattgcccaaaaaagggtgccgtcagaattaaatgcaactgggaaagagagattgcattaaataaatgctgagcacgaaagatacgggggttatttgtaatgattatggttgacatggagaagttaagggagaaattaatgcaaagaaagctgaagaaaaacggagaagagggggaaagagaagaacacagagacacgatgctcacttgctgtaccagagactagacctggaagaagcttcaagaagaagaacggtcatttgaaacttgaaataaaaatattattaaatgaaaaagaatagtattctccctgattctagtacttgtttttagagtttaaaaagtattgacacatgtaatgtcatactcaatttttttaatttttatacttgttgaattaagataaaattttacttacacttcaccttaatataattta

SEQ ID NO: 80100 - DNA, 1711 bp, Cannabis sativa
aacatcaaacacacgaaaaacattcaaggaagccgctcgcacagcaagacgataggccaccccattatccctgcgagggatccaactaaccccaaacaacccccctaaagagaaaccagaaaatagagagagaaacacctgaacaagtttccagtcagacaccatccgcttcgtaaccgcatcaaaaaggacctggcagtccgaaaaataaattaaaatctattacaatattaaacacaaatttaaactaaaatattcatataaaaagtggatgacaaaaaaaatataaaaaatttacgtgtctaatgcatagtaattaagtatcctcaattttaataaaagcataacaaaaacctgtaggaagctgctattttcctcagtcgtatatctgcagaaagagcataaaagaattcagcataacacttttacattcattaatatttaaaaagaaaataaaatgaaagacagaataattgccactataaattacttgacccacaacattcaaattattatgtaatttataatgacaacttatcagtagttcaagcaaataaatgtttcccacatttcaagttatcaataattacataaagaaccctatgatttaatctttccaaaacatcttttactaaaataccacaattaattaaaaagcttgaatcttgatcctctaaatgaaatgcatgaaaatatagttgttcaatcatgaggaaacctcatcaaattatcaattaacaattaggatcgaatctcgaaaatcccattgagaaaaatccaataaatcttaccatatagacataacacttggagacttgatagagaacaagctccaaagcttccgtgtcctcctcttctactctttcttcatcatttggttagtctcttgttcgttgttgattggccttgggaggccagggatggccgcggcttcgtcgtctcggaggtggttcgtcgtcttagagaagaagaagaaatggcttatttttttggtaaaagttttctaaatgtaaaggttttctatgcatctcttatacctaaatttgttccctaaactaatacttataactattgaaaaaatgagcatactaatattttaaaacccaaaatgccccttatacacataatctatccctcttccctcgtcactctctttctcaaaacctcatccattttctctcctattctctaacaactcaaggtaatttttttagttgtaaattaaactctccaaactactacaaagtggtagaagttagaggatctagtgtgagactccatttttgaggcacctagcgtccataggcaaaaatccatgggtaagcgatttatttctttactattattatattaaatttagaatgttcttttcatgattgatctgtggattattgctgtttttcttttattttgtggtaaaatggtttttgtctggttggtcctgggtttttctgtatttttttcgtctagctcgataggggccggatactagcctgatgcttctttagtttttgatgttggggaaggtggcccgattaggcccaatgggggaacctgaattgggtttggcctgatgggggtgaacttgaatggggggtggcccgatgtgacccgattagtgtcccgatggttatgtcagagaaaaataaagcccgatggggcccgatggtttggcctcgatttggctcgatggttacaaatttattacttt

SEQ ID NO: 80101 - DNA, 852 bp, Cannabis sativa
atcaaaaggccatgcttgctgaaaggtcaaaaccccacttggtagttgttctaacactcttccaacagccaatcccaagagttgatttggatgacttttctatcataatattataaattaatttatatatttatataaatatatacgtacgtacgtacatacatatatacattctccctaattcataattcatatcatgctgccatttttcgagctattagctatatataccaataataaggatgatatcactaatcatgaatgtaaatattttataagggtaaatgaggtattataggaaagtaaatgatcattttaattaacatttgtttttcaagtactgtttatggataggatccaagtggcaatcaagaaatatatctttgtttattataagatagtgactttaaaatgttagtcaaatacacaattattcaaacaaagaaaacgttttgtactatttgaatcaattaagatatttccacccaataaatttatattttttcaatttatactaactttttttcttcttttttacatttttaaaaaattaaatatataaaataaaatatactctagatattgacacaaaaagaaaattaaaactatttaaaatcttatcagaagaaatataaaaatatgaaaataaaattaaaataattattgaaattaatacaaaataatattgtaagaatattaaaaattaattaaagttaaaaattttaatattaaagtgtatttataattttataaggtacaaataaattttttttctaatattaagattttattatctaattttactgagatatcttatgcccattgtagttacctttgttattttaacatttt

SEQ ID NO: 80102 - DNA, 541 bp, Cannabis sativa
  modified_base (27)..(33): a, c, t, g, unknown or other
gttaaaccaagaaatgccgttagatannnnnnnttaatatatagatataatttaactttttttttaatgaaaaattttctccacttaaataaatataattttttatgattatttaataataaataattcttttataaaaatatcgaaatttaataatatagtttcttatacacaaccagacaagataatcttgcattcctatactttaatatttcaattttcagtttccaagaattgataaacctattcccatcaagtaaaaccttgtaccaaacgatccctaagtaatatataattagaggtaataaaatgaaaagaaaatgttttttttttttgatttaaaaagaaaatgattttagttgtatttgaaagtattggaatgttatttcaatatgattttctcattattagtggaataattattttattttgaaatgaaaagaaaattcattccaatgtgttgaccgagattttcggcaactattaaaatataattatagtattgagctgtaagaaagcgagatgaggatttttacgtggt

SEQ ID NO: 80103 - DNA, 1322 bp, Cannabis sativa
atggtcgattgatccccaagtaagggtgattattacctctagtacatctccaatattgacaacaaaagcattagggagaggattgattgggagccacatgccatctttcttgacttggaggccttgtacttcattcacttgaagaagaaaggtaaggcatcccccatctgagtgatgactgaggcctataactttctctggctcaggacatggagggtaacaattcatactaaaaagctgcaatccatcttcaaacaaattcgaaatttcatcgtttttgattcctaaaatcttctccatttggcgaattagatctttggcaagctttgcgagttgtaatgaataaatttccaaactttgctttaaagtaattgggaggtttggaaacaagtgaggcttcctcaaagcaagtggtaaggtgaaaattaatatgtaatcagtccaatcaagcttttgttcttcactgaaaacctgagtttgtccaaatccttctatgtctcccggaagctggcatagttttttcttctcttctactgataatttgaacaaatcttcaactcctttctttacattttctatcaaacaatcacttattccatggttgatcaactgcatgcatgcatgcaaattatatatagtacgtcaatataaatattatcattattaatatatatgtatatataaattaaatataaatatatatacctggaagaagccccaatccttacaagctgagtggaggttagatagttcagattgatgatgatgatcatcatcatgaagaaacaaattttggaaattgataacagggatttgatgatcaagagaaacagaattattgatattattttgaggattttgaatgtatcttgatgggatggtcaccatgttgggatcctttgccaataattcttgcacacttggcacaaccaaacgagagctcttaaattccattattattgttattttccactctaaatgatctatgattttgattttgattttgattttgattttgaagacccagctataccatatatataaaaaaaaaaaacaattttgcatggctttttgcatttatatctgttgactttatgcaccgctagtatcagtggcttagtaactcaatatcactattaatacaattaagtattgtgtcttatataatttaatgcaataatttttaagaattatgactaaccatttataagataatacgttcagaaggtgttaagcaaatttggtgtgcaaaagcaacgctctatttttttttttttttttgacgcggtgatccaaatcacacatgattaacaaagcagcaa

SEQ ID NO: 80104 - DNA, 1531 bp, Cannabis sativa
ttaaatagctataacatacatgaatataaaaaaaattagactaaaaaattattctggataccgaaacaagtagagggtgcatcaatacaaccttcttgaaaatacgttcccaaatattttgttttaaatttttttttataataatatttattatagttacaatattgatttatttctttttaacacgtaataaacataaatataaaaaaattctattgttgatattgtaaattattcaatttttttttaaaaaaaatttactatggacattgccataataagaaaagaataatttaaaaaaaaaattcaaaaacaataaaaaaaaaactacaaaaatatagtatgcactcaattttcaatacttttatgattttttagattttatttacataaaatacaatcttttttatatatttttatattgtactcttattatttcgttgttgattttttattatttatatattattttttatgttgttttgaatcttttgatgttgttttcttgatacttccatgcagtttttttttgttgttttcttgtttttttataaagtatcgtaaaaatggaaaaaaaaaactttgaacttaaaaatgtaaaaaatttacaaaagttattattttatgtaattatccctaaacatttgaaaaacacatttcaatattcattattgggcgtgaaggttgagtaagaagttaatagataaaattcttataaatatataaatgaatgaacgagaagtgctaattataatattcgcacctaaaaatatatgtcaaataattaggggtgaaaactctctctctatatatataaatgaatggggagtgctaattataaaagcaattgcaacttttgtaaagtaatagtgactctaattgttgcatttactgtgtggtgtagtggtaggggctgtctttacgagcatccttctttgcttgggtcaagagtttgaaactccccacagtccctcttgaaaaggattaaaggcttggcccttttaaaggctaacttgtcgtaagtggtgttatctgtgtaatagaaactctttaggtagttacctatttatggatgacccaatcaaagtaaggtgaagtataagcccctatagcttatatgtggtttttgaaattgttaaaataactgaagaagcagtgaagagatttacactgtgtaatcaccttatttatatatataaataataatgatacgtgcacacataaattatatataaacataacacatacatatatcacaagtcacttttaataagtgagactatttgcaattacttaccacataaatgtgtaatatttgtgtgtaaatcctgttgcacatatcattacttatataaaataaataaatattaccaattttccattttgttctttatctttaaaagacttcagcttttcaatcactaactcctaatgttgcaacaaaggggtatatttttcttctttttttttttgaaatgggagctgcaacaaagggatttaagctctcttttcttattaagtagcaaatcaa

SEQ ID NO: 80105 - DNA, 892 bp, Cannabis sativa
tgtgactaaaagtaaccgtttttttgtagtgaaaagcaatgctccatttgattttttatctattagtatgtttgaagcttcttgctaataaagtttctatttcaattaaaaaaactataatattaaagtatggacaatttctatttctttaattgtttaaaattaatgataaagtttttatatacatattttcaagatcaaattttaaaattgtgtatggagtacaaaatactagaaattaatacaaatatatcacaaaaatttttttttgtgatataatgtagactttatttgtaaatagattagtgctataatatagaaattaatacaaaattatataaatgtagactttatttgtaacatgcaataaaaaaaaggttaaaaaagaaaaagaaagaaaattaatgagattgggtcattcactcctaacctaaccaacgtacacattataatttatcataaataatattgttgggcgcaattactttctaactgttaaagtaaataacaatgacactacatctaccaaatttattatatcattcaatgccatgcaactgcatttgttgagacatacaataaaagcttggcatgttcataaaaagaatattgttattaaatgtcactaatgtctttcgataaattattttcttaaattatatgaaaccagatatttaattataccataacaatataatatttaaaaaagtaataagtatcaatagtaccttaacatttctctcataaaaattatagataatttaatttgttctagctggatggttattattcgtaagaaaattgttaaaagatagagcaatttgcggccaaaccgccttatgttttgatttttatacacttaacccccttatctttatttttggtggcaaaa

SEQ ID NO: 80106 - DNA, 609 bp, Cannabis sativa
tgttctatcaactatttgactgctttgtacatggttatcattccaaagaatctcatttctggcatgccaaacattgtatgccaaagctgctagtgcagcagtatatactctgcacttaaagctgctggttttttctctctgcagccaccgaaccagtttgctaagagatgttgagtgagcattccattgcagccaagatttcagctgctacacgcatgctggtggtgtagtgcagccaacaaataggtgctccaagtcttctttttcattcctgcaaaataaacaagaatgttctgcaataatgttaaatttacaaagtttttctcttgtctttaaccggtcttaaacagccaacactacaagaaaataggtcctttacctacaaattattagtgtaggtaaaatttaaggaaatgtagataatgagattgacctacaaataaacaaatattttgtatttgtagataaaagattgtgaagaaaggtcttctcctacacttatctatatttgtaggtacaaaatatggtggaccccactacttgattagatgatgatgattaagcaagtgatgtggataatgacatgtcatcctatgtggtatccatgta

SEQ ID NO: 80107 - DNA, 2025 bp, Cannabis sativa
ttgattgtcaacctaggtgctaaggccaacaccatatcagcatgggcggtgggcctcatttttaaaggctcgagtttatggttttctccccaagttttcttgaatcttcattatttttttatgatgaaaaaatgcatggaacccttttcgatgaacttaattagaaacagcccgagttgataatatgtcaacttgggtgcttggcctagccccaagtgtcaacctcggtgctgaatcctaattctggacctttagaaattccgtttaatccccaaaattattagttgaatcttaataatatttttttgaaaacaaagaagattcttggaagagttcttgaaaaacttcatcaaaaatggcgcatgttgacaacatgttaacctgggcgctgggcctcgtctttagcacccatgacgcattgtttcttccccaaaaggacctatttttgcttttttgatgaatatgaagaagataaaaaagtcagatctccgatctgatacttggaaggcacccatactgatagattgtcaacttaggcgttaggtgcttggggtttcgggtgttcaaaaataaacttgctctgatttttattctaatggctcaaatatgtctatggtatgtctacttgatgtctcgatgcaatttttgacccatttgcactaagacaaacccaaaaacaaaaatcatagttaggaatgtcaacttgggcaccaggtgaaaccctaggtgcctaggttggcttccgagttgcaggtttgtataatttcagctctcgtggcttagattaggttgttccatgtcttcgtggtacgtaatattgaaagataatatgttggatttaagttatgaaagtccgaacttccatcccagagattcttagttgtatatttacttaagtttaagtttatttatggaagttttatttattcatatttttcaataaaccctttgaatagcaaatgattgcacaataattaagaaaatattatagtgtgcctaatctagtagggtgttacaatttggtatcaaagccaccaattgtattattttctaaagatcgtcatgatatgtacaatcatcatcagagatgagcttgactcacgactcaataagtctttatatgctttagtagtttgatttattagtatgtatgtaagaaaatcttgatagaaagcatgttggtagcctgatagttgagtaagcaatgttttaaattctcaagtaagcggtagttagattataatcttgatcatggtccgaacatgctaacttatgatttcacatgctagtccaatagaatggacgctcgacaaaacacgagaagccaaggcagcatggtcggatccagtgacgatcgaggagatcaaatccccctaaacttctatggttggggtagaggtcaaagaggtagggctcgcgattggggtaatgttaacccatcgcaggctgcccaggattgggaacagaggtttgcaaaaatgcaagccagaattaacgaacacgacaaagagtttcgatgcttaaggcaatagggtgctgaagcatgcctgataacatatgctttggaaattgtacaatctgaagatgaaccataaccaaccacttatgaggaagcaactacaagcaaatcaaggaagaaatcgctagttgcaatgggagatgaaatgcattctttgaagaagaataagacttggattttagttcctagaccacaagaaataaggttatctcttgcagatggttatttaagaaaaaggaaggcttggcaaagggagaaccacctagggacaaagctaggttggtggctaaaagattcacataggttgagggaataaaatatacatacatattcttacatgttgtgaaatacaaaactatcaggatgatgttagccattggtgtacattatgatatgttgagcatttatatgtcgaaattgcattcttaaatggtttcctagatgaggaaatctacatggaacaaccaactggtttttaagtagaaaatgacaaatcaaaatggtat

SEQ ID NO: 80108 - DNA, 1580 bp, Cannabis sativa
ttttattgatatcagtgacattacaagaggacatagatgaactggtatggcatttacaactacgcttattctttacatcagagtttgtagacagagttgtaaggtgacattgcagcgtggtgttgggaacttcaccaagttgatatagaccatccttagctctccctatgagaagcactgtccctgtttgtttgtccttaacaaaacaatatgatttgtgaaactcaagaaagacatcgttatcagaagtaattgagagacacttataaggttcttagtcatggtaggaacattaaggacagaatttaactgtactggtttagaaggtaaggcagatggaaaggaagtatggccaatgtgagtgattagtaattgcttaccatttccaattgcaattgtttcagtaccattgtaagtggcagccatatccagattagatgtatcaaccgagacatgatttgtagcacccgtgtctacataccaagaatcatcatctccaatttcagggtacatagtggtagtagcagcctgtggatcatagggaaagtcagattcaaccaaaaaggcttgagtgtgagaattaccgtatttgggagtaacccaattcttgtcgaaacggtagtgacacacggctgtagtatgaccagttcgaagacacacttgacatagaagtcttgcaccaggagctcggccattgcatctgttttgattattttcattgattgtgccacgattatttgcattgggatgcctgtagggaccatttcttgctgcaagattagcttgcatctttattgagagatctgtgacagagttgtgatgctcgatgcgtgtttcatgggagaggagaagagcctgaacctcttcaaaggaaagaaagtcacttcttgaagtgatgccagaaaccactggatcgaattccggtccaagaccattaaggagctgtaaaattaaatcttgagtggacactggtgagtctgcaatcatcagagtatcagcaatagattgtgctttatcaacttattcatagatcgtaagattgttcttaaggagatgggagaattgtcctttgagctgtaacagacgggcctttgtttgacttgagaaacgttgttccaacgcacgccagacagagaaagaggtgtggaaattcgcaacggacgcaaaaaccgtttctgtcatggacgcacgaagccatgagagaaggagctggtccttcttcttccattgagcatattcaggattcaaaccacctgtaacaagattcattggaggagacacatcagagaagaggatttcatccaggtcatggtcgatgaccgtgggaatcacctgagatttccaagacaggaaattgttgcgatcaagtttcagagtgagagatgcagtgagcgaattcgagaaaggattctagttggccatgtgattcagaggagcagcaggagccgtggtgtgaggatcggaggttgaagactccattggcgcaagtcagatgacgatgataccatgtagaaagtaacaagctaaagagcaagaaaagaaaaacagagaaatgaaaagaagccttaactcaactgagt

SEQ ID NO: 80109 - DNA, 957 bp, Cannabis sativa
ttttttttacgaagcccattacataagcccaaacccattttgttagggtttcttcactagcagactaaaacccccaaagaaaacctaccttctaaatttcatatcttcctttctcgtaccagaactactcttttctacgcatctttttagggtttcataacccaatcaaaggaacctagtttctactataacctctctcagttactcaaatctctctgtcgacctcattgggtttcttctgccactaatttatcagagaagaggaattacgtttagatacggggtttgtagtattgcttcattcatttcaggaatatgctttgtatttccaataataatttttatctccattagttagtttgaatatgttgtattctaaactcaaagataatttaattgttcaattatgttttgtgctgtgaaatttcggggttattatgtttaggcgaggatttatttttctcggttttcttttgagttttaagtagagtatattgttggtgaattagaatttttattgttcttgttgattttgggaaatatttgcttgcagtaggttttttcttcataaaatacttgaaaactatgtaaaatttgtttttttttttaagtatgtgaaatagttcgttttatggtagagataaaagggtcatatgcattcattagagctttgaagtttttatctctgtggattgcatttgatatctgatgtgagtatacgaattattcatttattcatcctttgtaaatctctttcaggttaaagcaagcgcaattataaatggagtctaagcaagcgcaattatcgatggaagttgagacagtaccttctgaaatgaattctgcacccgcttctctgccaacaaaaccaaagtttgagcctttaatggctcatgagatgtctgatggccgagttcaatttcggaaggtgtctgtccccccacatcgttattcacc

SEQ ID NO: 80110 - DNA, 933 bp, Cannabis sativa
atctagataggcctaaaaatattggatgtgatctaatgaacacccctagttcctaccatgttggaaggaccacgactttctttacattacactaaaccttaaggctcaaaaatattgagtggctgtagaggtggacattttgaagagtggcgacttcagatgtacgataatgatctttcttgtactagcaagaaagatttggaagtcattatgaaaccctggttggacctattatcacacttattttcgtcaactagttatttcgaactcaacaattgcatccctaacattacattagaggatagtagccaattacgaatgatgctttggaaatgcatgccatgtgaggtcatctcctagggtaaaaagaagtaagtatctacctccttctttctttatttcaattattagtaattcattagttttactagtaactaaaatgtattattttattgtttgcagtagtgattatgggatgtacgccatcgagtgtgttgaccttagaaatttaccaaccgacagctgagtcaaatgtaatgctgatactttccacatgttacacatttagataagaaaagtaaatagccacatgattttatagaaattcggcccccttagttagtgggtaatgatctactcctcttttgttgtattgatatcgagagataatactacttagatcactatagtgatgggatctaaagtggctctcttaagattacaatatatgatcagtaagcaagtgtcatgagagagagatagagccttcttggaggcatgtgagagagagggagagagccctttgggcatgtagcagaaagggaaaagagaagattggggtttcaaacttagagttgagagcttatgacttagggttttagagataggctaatactctttatatagtagagtttacatgcctaatatccttag

SEQ ID NO: 80111 - DNA, 1213 bp, Cannabis sativa
tcgattaccataacttttccaccacgcgctttgtctagattcttggatttaggcactatgagcttggctctaatgtattaggccacgtgtggatcatattcatcagcattcttcgacttctcttcatacaaggcatggtggcttcaaagattaacttatttcaactcagaaaaactgcatatcaactcaagacaaccctattttaaccttgtcaaggcaagatcaaggtgactgtaccaggcaggaaagagagatttcaacctaaatagctcacaaaaaattgtatttctcgatttttagagctcttgtcaaacgagtttaaggatttccaattagttttgaaatccttatatcaaattcaaaagaagaagaaaaagaagaagaagaattgaatttttttctacctgaagaacgctcaaaaaattaatgaagttgaaacactcaagctctcaagaaagctataggcgtggagcagtgaagaaaaaagtggagaaaaactaaataagagttttcttatctatagtgatccaagtatcttaattctaaagtagttgagagtcttttaaatttaaagtttaaaagaaaaagataaatgataagtaaaagataatcatcttttctcttatcctttttaaacttaaatttcaaattccatattgaaaaaggaattgaaattcaaaatttaaaatatacaacaactcctaatgcaattagaatttaagtaaatttaaagtagaaaagaaaaagataaatgacaaacaaaagataaatatcttttctcttctcgtttctacttaaaattttgaaatgcctctactaaagggaataggatctcaaaacttggaaactcacttaatcctaatgaaactaagatttatgagaatttttgagttttaaaagagaaagataaaagataagtaaaaaatgataagtgtttttcctctttcctctacccaaaaaatttcgaattcttctttaagggattgaaattcgaaattctaatcctatcaagaatgcttgaaatatagacaattactcgagattatcaaatttgatgtccacttggtagttttgagagaaacagctcagttcacgtcatcaagtcaacctcatacaagtatgaagttgacttggaggcacatgttagcctaaaaacttaccctagtgacgtggacatcaatgtttgacatgtggcaagaaagtaaatatctct

SEQ ID NO: 80112 - DNA, 675 bp, Cannabis sativa
gtcgtaaattcatgagtgatttaaatcactttgtcaaaaaaaaaaaattgttcaactaatagttataaacaataatgtctttacaggcttttcaagacctaaatcctaacaaagaatgatttgaaagtttgagtatggaggaagaagagaaattaattttgattttaagttgtgtttttgtataataattagtatataataataaacaatgtgtaatattttaattttatattatttattaatattatatttcaatttttaaaataaactttattttcttattagggaatttctcatcacgttctcgaggaagaataagaggaaataagatagaagtaggaattacaattgttaacgtgaatgaggacgagagcactccccgcaattccatgcctcttgtggatccctaatttttgattgaaaaaaagcatacttagataaataaaaactgtttaacctcaccgtcattacataatatatttatcgaaatagttgataacagaatcaagatcattacataatatagttatcgcaattccatgcccctacgatcattccatgccccttgtggatccctaattataatatattttttttttgaaagaacttgtactttattaaaacaaccagcagtacaaagccacaagctacatggaaggtaaagaaccattccaa

SEQ ID NO: 80113 - DNA, 697 bp, Cannabis sativa
ggaatgtgaggggtttgaataaaatgtagaagtagaacacagtgtttgatttgtgttgtttgaataaaataggggtttatgggttattggagaccaagttaaagagtagtagaattagagagatgatggataggaaattcactagttgggaattttatacaagttctgttattgagaacctttttttgattatttagaagaaaagttttacttggatgattgttgttagagaggaccctcagttttttcattattatgtgaaaatggatggccattcgaatgctatgagcatcacttttttgtatggttttaacacaatagaggaaagaaaagggatgtgggatggattactcaatcttaatttctctgctaaaccttggctagtaacaatagaattcaactctctttttgaatcagaagatagtaagggtggcaaagaggtaactttgaatgatatcaggcatgcaactaattggctagctcaaagccacatggaaaaacttcttaagacaggatcatgatataactggacaaataatcaagatggggataagagaatctactcaaagattgatcacacatttgtgaatgaagataggacagatagttttccttcagctaaagctcactataattgggagactatttctgaccactatttgtgtgttgtttcgatggccaccaatgagaaaatagg

SEQ ID NO: 80114 - DNA, 3380 bp, Cannabis sativa
tctctctctctctctctataacacgcccctaatagtgtagaagagactaagtctcccttatctcaccaacttgagatttgtctcttgattctcactattgtaatcttaagagagccacttaagaatctacaacacttgtgatttgactggtattatctctaatatgagtacaaataaaagggaagtaggtcattacccgttaactaaggggccgaacctctataaaaataatgtgtccctttttatttatttgctcttatagtgtacacgtggtgatattagtcatatatacaactccattgtcggttggtcaaatatgtggtcaacactttgtttccttttcataaattgctcgagcagtattacggtaaaatggtatttgaaattcgagtttcccccctaaaaagaacaataagtaatcattaaaggtacaagcgttagaagaatgtttccccataattgtcctcacaatacccaagatcctatttcctagggtaggcattaaatgcccaagatactgaagagacaacaaaggatttacatcgtgcatatagcttaccttaaatgaaggaaagtgcatggggtcaaacacatgtcacccatttgagcaactaacatactgaataagtcaacacaagagcaattgttcccacgcgaacttgggggcaaatgttatcctaatttttgcacaaggtgacatggcactgagcaaggtgacgcgtggagagcattctaagacttggacggactgcgcttccttaatgtttcgtccatgagggtttatccttgagactcgtttagcctaagactttagtaagcaacatttggacaactctcgttcaaaatgttctgtccagaatctcaccagtcagcagagtaggatccttcgccaagaaggatgcagtaaatttagattcttaaagatattttccttatatatcttctcatttatggcatgtttaaatccctacattttgtgggatcaaatgtatacagccgagtgattctgggaattaatgttagtttccattttttcacaattattttaagtaacaatattcattatatttttcctataaatagtggagtcattctattatttgggatccgagttaagactatggagatagaacttatgctatcaaaatatttataagctttaatcaaggttgttaagaaattcacttggccagctccttctgatcttgaaaatcttgaaagtagtacaacaaaaaggggagtaagctattaccatcatcacggggccgaacctctataaaattctttgtgttcttattgctcataattattgttctattattatttataatttcatcactttaaagactcaatgtcattagctaaaaatgaggtcaacaatatacattctagaccaaatagcggacccaaataaaaatactgggctggacccataagtagtcacccttttcgaataagtagaagactcgtccagacgaatgatccctcttgcatggcctacatctggaagatattagacagtgcatccgagagaagtgaacagagagtatctggatgtccaacttagaggaattctcaataattacgagcacccaagatataaaaaactagctcctaaagatctcatccaaagattgtatcttcctaaatatggaaagaaagtaattaggaatcaagaatttaatgtgtctttattctccatgaagatagtgcacgattttaggcaactatcaacatgatgtgacatccacattagcatacactaagcgcttcatgggtcggacttcaccaaataagctcaagttagtgtgttatttataactacccattagtgggaagaagttaaattagaagaatcctacacactgtaaatacacgaataacccttcatgcaaagggctagaaacctatttctcaattgctcaggcaaaaatatagagttcagatattcttgtaagccttaaggattttctagttttaaagtaatattattaacttgtggactaaggctaatcgtaaaaatcctcattatcatttttttttatctttgatcaatttcttttagctttcacatataataaataggttttaaaaaatttcgataaacaatggctttggacaaaaaagtaatttccttttggtggtgtacgcactccttaggactgacagaagggactaagcctctaatttggtgggatcttgtgtcagagagatgccaagtaggatgctttccagatgtctccggatgcctcttcattcactatttctagattaccccatgagagaatccggatatgtcttgatgggcctttcatctttttggggaaacaaccttttttggaccaaagtggtccgactttatcatgcctgtaagttgggcttgtatccgaatatgaaactatagcctgattcagttgtgggttgattcattaatttgatttggcttaggaatggatccgtcttgactaattttgggctttggaagtacgcttgtcattaatttagaaacgcgaataataatgcgcaagcccatattttttcgtgtctagtgacgcttctaccaattttatgtcatatcaaaatatctagcctatatttacatcaatactctgaaccatgagctatttacataatacattaattattagtaacaatgtcatttaatcacataattaagtcatttatcaaaacttacaaaaatacttcaaaaatggacaatttacaaaaatatcattttaattttaaatagtgtttttggaatgtattgtctttcttattatattacatatcagcgtgaaaaaagatagacaataatattattactgacaattttgaatttcaagtaacaaaggatgatgctattggtcgttttcaaatttaaaacaatttttagttattaactaacaaaagaaaaacagtttaacaaaaataaaaatagctaaacatcacatatttataatataataagacttaaattaaaattttgatttttatactatgtaggtaaaaatatagtttgaaaaaatagggagagattaaaattaccaattagggccaaccctgaaatataatcggtcattaaaaaaatatttgtatctttatttaattataaaaaaatatgatactattctaatatcagtaaaataacatataattttaaaaagagaaaatttttttagcccctcaactattgagacaagggccgcctataccgaggccgagccgagcttattcccaattaaccagttactgtttactacattttttgtctatatatttttcaattttgtcaaaaaaaaaaaattcatataaattaccaattaaaaaaatatgtatatttttctaaacttcaaccataaaaatcataaaaaaaaaaaaaa

SEQ ID NO: 80115 - DNA, 1029 bp, Cannabis sativa
gtttatgatttgagaaatgttaaagggtacaatggtgtttagtatcctccaacacatgtcaatatcgttgttattctaactaaatatcggataataatttttaaaaaatatcgctaatcaggacacgtgtaaaagttgctaggcaccacttattatttatatttaatgaaagttatggtttatttaaaaaagaagtaataataataaattaaccattaaggatttagtaataaattttctaatgccttttattagtgaaaaattttacttggaataaatcattttgaactaattggcttcaattacactaatactattaaaccattatgaaacacccaagttctgcagttaccgagtttaattacagattattagttcaactcgattcaaatgttttgactgtaaattgataaagctaaaattggaaacacaattaatttacaagtttatactgcatgaaaacacattttaatcgagtagtgcttgaattgcttgaaccagagtaaaaaactttagtatataatttgcatatttacaaataccacttctatacaaattgctaattccttgcagtaatcaaattacacacaatgtcaatttccttggcaaacacagcaagatcttcttgcttctaaactctagatatgaacacttccatatttgcttgcaaagatgtagctgaaatatgaaatgagttcaaatttgtatgaacgcaatattaatgactacacaggtaaactatttttaattatttaaaaactcagaaaaaggaataaaataaagtcacagctcaaggaataataataataattcatccacttgttcagaaaaaaaaatcacaaagaataataatccaactacatcgcatattatcatttttgagtctcgtatggaatatgacatttcgtttcacttggatttcaattcctatcttttgttaaaaataaaataacttctggtaactagtcctgttaatttaaccatatacttaggtttgctgatttctaattaacaaaattttttaaattt

SEQ ID NO: 80116 - DNA, 1821 bp, Cannabis sativa
gatatcaatccacataaataaggtattgaaatgggacatttcataggtggaaattgatcgagaaaaacagaagaaagaaagggaaaggaagaaagaaaaagaaaaaaagccaacaagatgaattgatagcaacaatgacattaatacctcataaaaaaaaaaccattaataatcattaaaaggaaacaatcacattaataaaagtgtgcgtaaaatattaataaggttgtttagaaaaatatatataccaaatatgcaaatatatatatacatgtcagaaatacttttattgaattaaataaatttaattataaatattaattttaaatatattaaattattagattctaatccaatataaagaataacagaagaaattttttaatatttatgcttatagtttagctacttctaaaaaaaaaatatacttacatcaaaaaaaatatttacatacaaaatattaaagtaaagctcaactttttttttttgcctaaaaattttttttgttaatttttttttttagccgatggaataaccgtaacccatataatataaaaatgagaggttaaacaaattagataaaaaaaattaagcttaaaatcttaagtttacctattcatggataatactcgttaagaatgtaccatacatataaccttaataaaaaaaaattaataataatataaacctagaaatcttcaattaataaatatgttgaatgttattgaagcaacagtccttaacaatatttttctcaaaaacaaaaaaaaaaatccttaaaaatataatttcgttagattgcaccacagtttaggctttccttaattgccaatcccaaaatttgaaaagaagtttagttcagtcttaaacaagaaatcattcctatattcaatcaccttgataaaatgaccgcaaacaatatacaacatagataaatttattaaaggaaatcaccctttttaggatttttttttatttgaaacaggccttttttaggattttaatattgtaaaattatattttcttttcttcttcattatttcttaaaatatcatatagttatgttgataagtgacaaatcacgtttgtggataaacaagttacaatttgagaaacatattataggttgataaatcacgttgatagagatatattgagaaataaaatgtatttaatttatatcaaaaacatagatcaaataagattaagattgaaatggtttatctccataaccaaccattaaccaaacttgtcaaatcactaataaaactgtgacacatatatatcaataagagaagggtacatataaaatgcatggtaccaataaaaaaaataaaaaataaaaagcatgtgactatctattttatattgtaactcttgaaagtttcaaaatgagagattccttttgattaaagtctaaatacaatataaaagatcggtattgactgttgactatatgtataattagtataatataactggtttcctaagttaaatagcttgaaaagtataaaatggattcggaattaggggcgaagactaggcaaaaatgaatatgagagtttgatttgaagatgtccacatggctttcgttgcaccttcatacgccattgtcaagtgcctaactaaattttaaagccataatattgtgagacattcaataatgtcaaacggttaccctgtttctagttggcacctctcagaaagcaccacccctatcttttattaaatataaaaatttaaaaaaaaaataaataaatatccatcatatggtgtctaatatgatatacattatagatattttactttataataagaaaa

SEQ ID NO: 80117 - DNA, 1766 bp, Cannabis sativa
  modified_base (993)..(1016): a, c, t, g, unknown or other
aattttatgatatactgtacataataaataattaatatttatatataggtgaagtcggttgagggaaatttgaaagatgcatcatcagatgcggtgaggtactgggtaaataacctggagagcagctattacctttgtggaagtgttgtgggacctcatccatgtccgacgatggtaagagagttccaatctgtgattggaaaagagacgaggaagcaagccatggagagatggggatccaagccagatgtactggtggcctgcgtaggcagtggttccaatgctttgggattattccacgactttattggagaccatgatgtgaggttgattggtgtcgaaggagccggtcgctttgggctcgaccatggcccacattccgctacattgaccagaggacacgtgggagtctatcatggagccatgacttacttgttgcaagacgcctatggtcaaattctaaatccacattccattgccgttgggtaattaatcttttcttttctcttttctccaatttaattcttcccaatattaatcaaatgtttttattatctttaaaattttagtgtcgtgtacacaaatttactggaatttaatgttgttgacattgaaaggtggaagcctcaaatttgtaaataaaactaaaattaaagggtattaatgtataaaaattaaaggctaatttttttgttgttatcaacttttttttttattatttttgtaatttttttttaaaaaaaaaattgacatccaaaaacaatgtctaatttatttgtgcactacaaattttttttacgtttagtcacaacaaaatttgtgattaaaagtaaaaaatttttgagtaattataaattattattgtgactaaacggtccgtgattaaatatatttttagtcacaatacttattgtgtctaaaattaaattagtgacgatttgtgtctaaattgtatgttttagttacaaataagtttttgttgtgactaaaagnnnnnnnnnnnnnnnnnnnnnnnntgttgtgactaaaaagttatcactaaaagtagcagttttttgtagtagtgttaaaaaaataattttaaatttttttaaaaacaaaaaatatttttttaataatacgacaaacatcatcaatctagtgaagatactaaattgtactaggaaataaaaaaaaaaagtaagaaaaagtttgttgcaaatcgaattttttaatatttaattgtgtttgaaaaaaaatatgttacgagtgatgcacatttgcacacatgtacgtaactgtttgaaaagtatttattgtacattaaaaaacacgtgtgaaattgagaactcgcaagtactaattctactctactatgtgccaaacaataatagagttggcactatattacttctttttctcaactctcataatcattatttcaatttacacttgacttatgatacatcccatcattctaataagttgttaaaaatctctttcaaaaaaaaaagttgttaaaaaaaaaattaaagcacccaagcaattcattagggaagaaattaagaaatataaaatagaaagatttcgttttaatatataatgattaatatataaatgcaggctagagtgcccgggagttagtccagaattgagttttttaaaagacagtagacgagctgagttttatacggtcactgatgaagaagctctccatggtacgtatatatataattaattagcaagtaaaatgaagattaattaagtaatataattaattatatgtt

SEQ ID NO: 80118 - DNA, 1525 bp, Cannabis sativa
  modified_base (1489)..(1497): a, c, t, g, unknown or other
aaaaaaaaaaaaatgtctctcctagctggctccgccactagttcactgagtggtctttcacacaatatgtggtcatataagacaaaaagaagataaaataggctcccaagtatttccagttgagtcaataattgcgatataaaaacaccttgataacgccaaattaaaccaaattcagtcaacttctcaagacttatagtacgttggtttagaaacttacaaacttttaataattatcatgagtttgggtccagtccagataagtagctactattacaccactaactactacacatacgtcaatttagatattaagaagacttttaggaaaagccatacatcatcaattcttttttaatatataaggaatatttgcaagataatgtcttttttaacgcgtaaactacttaatattagtaagattatgatttatactcggtttcatcgataattttttttttttgaaaccatcgatacttagtttgtttgcgtcttgttgtttatattatttttgtattatttgatagtacttcgtaaaattataatttcaaaagtaaaacatgataaaaaaaataataaaaaatgtaaaaattttatcgacggtagaatattttttttgtataatagtgtagagtataatcatttaggagatcacactgaattttgtaaattatgttcaaattcttaaataatttacggtatccttttcaaacaaaaaaaaaaagaaaattaatttatggtattattgaaagctagtttgaaaactacatattttgtaattttagcataattgattatttagaatttctttaaaattttctaaaattgtacattatcttataacaaaaatagattataattaaaggataatttcacaaatacacaaaaattataaaaatataatttcacgaaattttaaacatttatacgaatttttttgattttatttacagaaaatacggtttttttttatgttgtattcatattaatttgttgttgattttttattatctgtatgttattttttgttgttgtttatatgttattttcatgctacttttatgtagttttattgttgtcttcgtgttgtttttatgaaaaatcgtaaaaatatataaaaaaaaaattctaaatgtaaaaatataatttttttttttacaaaaaatgatgtctgatgtaattatccctatcaaagtatcaaaaatacaaaaattaattgcttttactcatatattataatagattatagccttaaccctagtttttaataaataaataaaatttatatgttttattccacattgctcatgtgtgtgatttttgagatttatattacaatcaaagctactaagttataacacaatgataaaattttagtaattaaattatgagaatagctaaaaaatattattaatgtctaaaacttttttcagtatcatatcattattgatgtaattaaatatcaatcctatataatttaagaaaatannnnnnnnnaaatatcactaactaattataagacacc

SEQ ID NO: 80119 - DNA, 1174 bp, Cannabis sativa
aagtcaactaacttgccaaaaaaacaagactttacacaaagaacgattgaagatgctctaaaacaaaatatcaaattttatatattttcttaattttttactaagcactatctttttatgataaattatagtaaatgacctaaaattataatactatatatgtaaataaatatttacaaaaataaaaatacattaatttaaaatataaaaatgatgatgaaaaaaaatatttatttacgtggataaaaaatatagtgttatgtgtacattgtgtccatgcaaacaataccctgtgtacacatggacaaccaatttgatagttaactgtcaaaaatagatggaaagttctaattactaatagaacttagatttagaggattaattgctagcgagatgacagtattgagagttatactgcaatttactcaagtttatatacacgccaatattatttattatgtttattattttggttattaattttgtgcatagcttctaaacactactaaaaaaatagctttttacttcggtttttaagtgacatataataacattacttttgtgcgaaaattactttttgcatagcttatttttgcttcacctcataatcgataccaaattttttttgcttcatttaataatcgacgcaaactaaaaattaaaaaataaaaaataaataaatctaaagatggtttcagatctgagatagttcaatgcaccaccccgaactgatcatcccagaacccagtcgcacgccacaaccctgaacttgaaaaatatgccagatttggtgcgttgagagagttgcgaccgagagagaaagagagacacacaaagagagagaaagagagagagagagagactgaaaataccttatgtgtgtgacggctccgtcatggtctggtgcgtgctccaacgacgccaccaccccgaacctgcaaaacaaaaagaaatcaaaccaacattttttcaaaataaaatgggaacaagagagaaagagagaatgagaaagagaccccctcatttttctcatggaggagaagatggtagcagggttcgaaaccaccaagagaaagaggaagggtggcgttaatggaggttttttattttcaaagagagagagaaaggtggagcaggagtagtgttaagggaggttttcgaagagagagagaga

SEQ ID NO: 80120 - DNA, 1310 bp, Cannabis sativa
actttgaaaaagccaagagggagatgagcccatttagtggccatcttctgaactacactcggcctccccgccagaccgccatgaggaaaaaaataaatatttaatcctaaataatttataaaattaattaataaatttaaaactaagagtgcgtttgttaatattttgttaataagttttttgtttttaaaattagaaaagtgaaaatcttttttaaaattatgttctataaaattgtttttatttttcaattttttaattaagaatctaaatttaaaaaaaaatcacttttaatatttttttaaatagttttttcaatcaatatttaggactccgaccccaatttagatcttggaaattgaacttgaccccgacttcgaacttggacctgccctcggacccgacttaaataaaatcaataaataaaaataaaataaaatttatagagcacacttttactttttgaaattgaaaaataaaaatagttatagaacacatttttatttttcaaaattaaaattttacttatatttttgtgattaaaaaatttaaaaacaaaagtgttactaaacactacctaaaataaaaagaaatttaggtgcaaatttttcatttaaataaaatactaaaatatgtttagtagtcttttcttcaaaatatctgttaagaaaaattctttcctttagaataaaaaattatcatgaatgtcaaaagggttgttctttttaaagaggtgcagtaacattttttttttacaaaataaataaatatggataaaatattttttcacattttttttaaaagttataggagaaatagatttaattaagattaaattatagtacaaaccaatttttgtactatgagagaacaaaattataaaattaaaaattacgaagtacaaacttagccataaacttataatagtgtaattataatttcataaattattataattacaacatttgtgtaattataattataactaaatttatgtaattattataaaattgtaattatagtgtacttcataaaattataattatgaaaaaaaattacattatcaaaattaaatttttttcacaaacatagccataaatagtgtaattttcacataaaattaagactcttctaaacataaaaataggaaaatggatatttaacattttttttaagaaaaaataagttttcatatttatacatttttatgtaaaaatcccttattattattattattattattgaaaatacctaaaaaaacatacaaatttattcccaaaaggttatattgagctttctttggatgtctt

SEQ ID NO: 80121 - DNA, 3682 bp, Cannabis sativa
gagctgcatagtacgtttaaaatcacgttaacacgcctatgctagttagggtgttacatcaaccttggttcttctaagcccatcttctttaaagtcttcgtttagagaatattgatggaactcccgttattcacgagaaccctctttatcctcttattggcgagttaggctgttattaccagagaatctatgtgaggaaaacacacatgtgatgcatcttcatcagtatagatgatgagaggttcattagacttggctcattttagggttctggtgtgaaagtcgatttcttattcttgactttatttatatatctttttttagcattattgttgtttcctgcaaggtgtggccctccagaattgactaagatatcctcgcctagggaggttgtaatctttgattattctggttgttaggcagaatttgtttgtttccttgaagtcccacaacatctctagcatgagtggtctgtgccaccttggccctcagacgacctgaaggctcctttgaaggtccactagctagacctctcaacttggaagacatatttgcaaaaagaaagtagtaaagtcagaaaacaagttataaatatttaatgcaagataagaatataaaagatggtgcaattaactatcaaataccatcatctttagaagaggaatcatttgaatcctcaacacctgccttgcccttaactctagatacaagaaagaggtgagtaggccctacagagatctggcctccaagcctaatccaaagagtagtacccccaactgcgcccccacgagccaaccactggtagaggggcctctctctcctctccagaccccgggctatccgggacataggcataatgtcatccatttcagggacttgtccatcaccaggatagatctcctcagcagttggggctccatccacacaaactgatggacctttagcccacacaactccagaagcaagaggatacaggtcgtacttttgaaagttggccacactagccaacctgataatgttcctcttgaccacagggagggctaggatgtgattcgccctatccctcgtctatagagtagggatggagcatttgtatgtcggcactcactggaagcagcagtgttgaatctcatggatgtcccaagcaatggagtagttctgggcatacccaccaactttggacataggcgtgttgttggtgtcacctaatcactgatggctggcctgactaaagtattagtatccagtctagttcttctttggggtagatttcaaatcaaagtagtatcaaatctcatacggcgtaagttgaggccagcctagctcttcatataaaacaaacatcaccgagaggtattttatacttttcgaagtgatttgtgttggacatatcccgaagtaagtaacaatgtctcgaaattatgggtgtaatagcaacaccaccccttgctaaatatggcactcaaccatgccatccaattgaaggtaagctagtgtgctctctgatctctagtgggtatcttacactaagcacccctcactagaccactagctagtatcctgtcaaaagtcttaacagggataacagatgcgagagagacccacctgtctccctgtgatccagcatcaagaacctgaggctctgaagactgtatcaagacatgatctagacctaacactgaaggctagcctagcctattcaatggctacttttcgacattatccacctagagggcagttgggaaggacagcacaagttctgtaagtccttctcctgactggcacaacctcctccacctcagagtcggtgtcggagctctcgaccccctagtcaacctcaagcacctctgcctgactgacctccgaatctacatcatcacaaggttgtgtggcctcctctacaactctgactctttgcccatcgttaccaccatatagcaacatgaggatcatatggtggcacactatgacatgattgtttcgttacggccatgactatcagtccaaaatgacacaaaaggaggaaggtgacaaactaaatgctatctctcaaaagcaaagatcacaagacctatgacatagaggatgtcgcctccccaaatcaacactctcacctgcatagaagagacacgggcaggtgagcaacctgacaaagctacagacaaagttctagtcaattgtacccaagggtactttccaagtaaatcacattttacaaggctgggtatcaacaaagtactgtctcaagtacatctacttatacaaatagggagtcctaagttgtgcacttaactataatacactcactacctaatcttatacagagtttccaaggggaatcacgcataagattgcagttgtatatgcctacaagtctgtcacgagaccctagccaaggttaatagaggacaaaagactggcttcctacttagaaccttggccttggccggctagggttcccaagccttattgggttgattaggtcccatgcccctgcctagggtcagctagaaattccacttccaagcataggtaggctagcctataggatatccactattgaccagccaaaccccatggtgaacacccatggctagcaaggtcttaaacaagacctccttggccgggtatggtgcataaaggatctgaacatgtgttttttttaagaactaaaacatgttcttcgtgttcttcatgactcaaagagccaagaatcacaatgaaggttagaatcagaactcttttgtccaaaaattacacattacacatcctaagactaccatgtggatcaaaatatcgaaaaatattacaatctaacgtgaaaatctaaagacattaaaaaccaagaaaaagattcatgcattcatggcaaaatcaactaaaccaagcaaatagcaggaatagaaagcttacccactacaagaaattgttgatgaagaaaatgggaagcttaaatcgtctaaatggaacaaaattcccaagagatggagaaatgtgggttcggcctctagagagaaggaaaagcttttcaaagtttctttttctagtgagagaatgaaaagtgaaaagtgaagagaagtttcactctaaaagacttatatagcttctgtggagccactccttcactaaccacgcagtgtttaactaaaaagcatgtagaactacaatgcaatcaacttttggtaacaaatgagatcaaacagtcaaaaggagatattttaaagactaaaaatgcagcaacatttaatcagttaaggctacatctattccaacttagcttgtaagtccctatctgcataaacatttgcactggaacttagggacaaatgttatgctaatgtttgccgacctcacgtggcatgtctacgtggccaatatcagcacaactcaccaataagaagttcaaatcatctactcaacaccctgcccaatggggggtcctagcacttaaacgggacaacgagtgacaaaccaaccaccttaaggggctaaccggtcacccttggctagccagcttgcatcctgtaggtgcatggctggccagaacttggcctagtaggaatttggtgcatagcattacacgtggacagcaagctagactgcgaattgggccttaacggctcgtgaaagtagatggaaaatatctattttgaagggacattttggtcatttgtattttact

SEQ ID NO: 80122 - DNA, 1287 bp, Cannabis sativa
ccacctgcgccgatactatcagtatactaggggtgttcagatccaaccatattcttctctaattacattttttttcttctcccttttcatgtatgcctccaaattaaatataaattaaatgaaatcagagaaattgctcaaaaaatgtatttcattaatgtattctgttaaatctttagttgcatttcaagaagtgactaggaatttagagacgtctcacttcccagctcacttggggggtaggatacacaactatgtatccatgaaaatgtataatgtctttcattttttattctttaattttcttacaaagttaattaagtatgggggtaggaggtctcgcctgaaattggaacttgaaggaacctaaagtaagttattcccttaccatatattttttttttaaaaaaaaatcaattgccataaatatgggagtggaaactttgtttcaatttagaatatttttagctattttcttaccatactttaaaaggacagtttacatcttgtcgctttacattgttaattaaaaacatgggagtagaaattttttcttgaatttgaaatatttttagatattttcgaaacgcaaattagtattgggctaagcacaaaattaaagagctctgcctgaaatcaaagacgctttgatatggaagtaaacccctctattgtcatgcctaaaattaataatttgctaagttatctagtccaagaataaaagcatagactgaaatctgcgagtgcatgacctccttaacagaaaccaggagtcatctggaagtaactgcagccttatacaacttggagttaacaattgaaaaaggtttctatttcatggaaagtttctaagtccgtaagacgtacacctatctgggagaagaagtttgaatcgaagattttaggtactaatctttggaaccaagcaccaaaaagtgtaaaaagtaaaattacttctcaacccttccaaaagcgagaagcacatggaagtgcatgacttagatcaatcataatcagagcctaagtcttagagttcatgtcgttggaaccaagaactcgagacatttaaagtagtctgaaagacagttatgtaattaaaaatacttgagaggcaagttggagtaaagatagttcacaaacatacataaaataaaaattaagttattacacctagcctcacggttaatgcataataattgtctctgcaaataccaaaagggggccagtagtctccaaagagaaaaaacattgttaggctatttttagcctaagttttgggtcacattt

SEQ ID NO: 80123 - DNA, 983 bp, Cannabis sativa
atgtttttttctacaaacaaaatgttgggtcaatcactacctgtccattcattccaatccttgtcaacatgatttgttgcccatttgaccgccactcgagctgcttgggatgctccaggcaatcccctactgtggacagtttctgccatatcgatgaaaggaaggaccaggagtgtcccaggaccgccatactccgtgtgcaagaaagtactgaatatctattggaaagacatagtaaaagtaagttgaatttctctctagtttacaaactcaatgtaaagaaccagatagaatcgcaaatctgtaagttcagtttacctcggtgcagacatttacaacttcttcgactgaatcttcatatatatctttcttggagagcctcttgatgagatgagtcctgaacttttctgtctcctgcactccgaacatttgaaaacaaaaaatgagacgataaaccaaaacggagaagagcatagacttgataaaaacaaataagggaagtaaatagtaagtacattaagattatagattaacaatattaaagaggaacttactgcctcagcgaattcaggaataggatcgggaaatttgtactcagctgctgctctacaaatcagctgagtggacctggaggttgagtgtagtactgtatttgcctttcttttctcaatcaattgaggagatgggtaaaatgaggaccttctgaacctaaaactgcttggaaaaatagaagagaagcataacacaaccccgctactcgtagaagaagaagagcacaatgattggggtagctcatttttcgaaggagcaactgctgatgcagtggctactacactccaacccatttctctggaaaagaactcctctttccctaaaaacaccaatgcctgtgcaagagaaaaaaaattaccattaaagaagctcatctagaaacttgaacatggtcaaaataaatgtaaaaagtaataaagattgatatagca

SEQ ID NO: 80124 - DNA, 1502 bp, Cannabis sativa
aaaatccaccttgtccaactttggcctgattatctctgctcatttgagtacaaagagcggtaggtgatgtagaatggtgaggcgtgaggacatcctctgacttgcttgccaagtgctcctaaaagaggaaaaattcattaggtttttcgtaaagctacacgatcctccttaaaagtacattttttccaaatttaagggaacccaaatgctttttaaataatctccaatatcaaattcaatatcttgctcttcattaaatattataagaaagagtaagagagtgaataaaacacagcattcgcaaccaaaaaatgcttacctgcattgaaggtttagattgctcacttgcatctaaatcaacagaatcaaatttcaagcttgcatcatgcattgcctcttccactttctcatgatatgtttcttttttatgttgctcggcaaggtgcctctgtttagcttcattctccattcgtctttggaactccaaagtttcttcaagctttctttcctctgcttcaagttcaattcttcgtctgagttcctcttcctgctgctttaagctatcaccatccacagaaacaatgacctcagaagttggatgatcagcatcatatgcaacctcacatgcaaccggtaagggactgcatgcagcaagagacaatttacatacattaaaatgaatgttcctcgtttcataagaggaagaccaataaaatacttcataccaactagagagcaattaactaaagagttgaactgatttgaacagtgagaaaaagacacatacactgggttatcaatctcatcatcatgtgtccgtggctctgaaacaccagtaacctgtggaagaaagaaaaaaaaaaccaatgggtgagcttcacacttattgtgatgcttgtttctacacatttacagccaccacctaaaaatatcacatcagacaataaaaacctttgaatgcttggctttcctagattccttgttctttttcttatcctttgttttctcctgagtgtgtctcgaattatcatttccccccctgacaaccttcttagagtcatcaagagcaagttctgctaaaaatgcttctcttgcagcatcagatttttctgtggcatccttctgagctaatttctccaaatgtgcctgtaagaatagaatagaagccaagatacagtcaagaaataactggtgaagaataatgcaaaatttcaactcaatgaatacaaaccctcaggtacgacttcacaagaggcaataatattgagtgataatcatggacagcaatagagccaagcttaagtttcaactgctccatgatattaacgtttcgcattaactttgcatcagttttgctaagctgcatgacaaagaaaacaaaacttatataagtgcctgttctcaactaatgaaagcacatcaaaattaaaaaacactaacctctacttgtatatgttctttgtgtcttcggattgaagcttctatacaactctccactcgga

SEQ ID NO: 80125 - DNA, 920 bp, Cannabis sativa
aacaacttagcaatggtactttaagattgccctaggaagattcaattcttggaacaagttttcttgagaattctacacacaattctcgtcctcaaggcttataccattgcaagtataagaccttattaaagtcaaactacgacaaggagaacctttaaaggattacatctagaggttcatggctgaggccaccaaggtcaaatgccttacagaagaaggccaatatacgaccatactggggggcatccttccactgagtaacttttggaagaatatctggaggatctcaactaacaacatgaaggagttcctagacagaggtgatgactttatcaagctagaggaagcaatctgacaagcccaaatagagcaagtcagcaataggaaatcatagggcatcctacagccccacgacttaccaggcactagcaactctgcccaaacctccaatggtaagaacactaagaccaagcgtaacaacaatgactctagaagaaataggggcaaaaaggggaagtataacacttcccccatgccacaaaactaaaaggacaaggaggagaagtttacctacttcaccctcctgacagagaaacctaaagccatcttcatggccacttggggaacaatcccatacaagaggccccctccactcaaaaggaagttgagcaagagggacatgtcaaatttctattgattccacaacaacttcgttcatgacaccaatcagtgtcaaaatttgaagagggagattgaatttcttataaggaagaacaatccccatttgtgtcgttatgtgccaaaatgaccagactcaggcacaaggtgtccaaaatggagacccaatgccacatctagtggcaggtcacttaggggtcattatcgacataccccatattgtaggtgagactagcaaagct

SEQ ID NO: 80126 - DNA, 573 bp, Cannabis sativa
atattctgttaaaccaagaaaatgttaaatcaagaaatgcctttagacatttttaatatataaagattttgttattatgaatatctagaccaaattatttattattgtagattgtgcatgtaattgggtagtgttgtgttataacgggataacgtgttgcttaatattttattggaccgtctaactataaacaaattcctttcaaagaacaagtgatctagattgcatctctactctaattgactttatttatattaattaattatcaaattaaaataaatataataagagctttagaaagttactacttaagtggttcagatattgaacttttgctaaatgcaacaaaagattcccgagtttttataaataaaataagagcatctccaagagagatacaaataaatcatgcaaatataaaatatagttaattttgttaaaagtattctaactgtgttaaattatgatgtaaaaatctcatataatcaaaagtgattcaaatttacattacaatatacagtagaatctctatctaagaatacacttgggactaaaaaaataatattctaattg

SEQ ID NO: 80127 - DNA, 1589 bp, Cannabis sativa
cattaggtataagccaagatcggtaatcaagggacaagcccttgcttatttcattctcgagttgccaaatgacgaggttgcaataattacagaagaacgagtcgaccccaatgtaccaccgggcgaggctttgactttgtatgttgatggggcatccaatagtgagggatcaggaggtggaataattctcataagccccaacaaattcaaagtacacgctgccctgaggtttcaatttcccacattgaataacgaagctgaatatgaagccttaattgtagggttaaaggtcgctctcaaaatgaaagtcgaatacctcaaagcattcagcgacttgcaaatcgtagtttgccaagtcaacggagaatatttggctagaggagggtgtttggccaaatatctttcctacacttgtgagttattactaaaatttaaaaagataattgttaataaaatacatcgtgcttacaattctcatgcagatgccttggcccggctggcctcgacgagagaagcagaattactcaacataattcatgttgatattttaacccatccgactattcatctttattaaatgatggaggtcgatgcgatcaaaaaggtcacctggatgatcccaatcattaactacttaaaaacaagagtactccctggcgacaagaccgaagcccaaaacttcgatatcgagccccccgatatgtcatttacgaaaaacaagctctatcgcagaagttttagtcagtcattgcttaaatgcatcgacgggaatgaatgcgactacatactccgagaagtacatggtgggatttgcggcaactatgcggaaggtaattctcttgctttaaaaattatgagacaaggatattactggccgacattctgggcatatgcaactagcttcgccaagagatgcgagaagtgtcagcaaataacgacctatgtaaataggccccctagccaattgaattctatcactagtccatggccatttgcggtctggggcatagatttaattggtgaactgccaaaaggaaaaggaggagtaaaatatgttgtagtcgttctggactacttcacaaaatgggttgaatttaagcctctcgcaaccataacagccttaaaattacgcaagtttgtctacagtgctatcatctgtaggtttggcattccttacaaactaatttctgacaatggtaagcaatatgattgtaaggagatgcggcaactatgtgattacttggggattcaaaaagctttttcagcaatcgcatttcctcaaagtaatggacaaacagaagcaattaacaaaatcatcaagcatatcataaaaggtaagcttgaggaaaagaaaggtacatggctagaagaacttccacaaattttatggtcatataatacaactcctcgcttaatgactggtgaaaccctgtactcgctttcttatggatgcaaagccattgttccagtcgaagttggagtaagatctttgagaagagatgtctttaatatcaacaacaatacaaaaagtcagttgctacaactcgatttttcggaggaaaaatgagatcaggctcatttgaaaaatg

SEQ ID NO: 80128 - DNA, 2508 bp, Cannabis sativa
ctcaaatatttcctaaaccttcctcttgaagaatgatacaaacttgaggcaactccaactccaattaatgaatttgcatatagtttgcaattcaaatttttcctgtggactccaataaaagccaacaattagaaaaatgatgggtgttaattataacaaccatcaaagcatgtctaaagtatatcacagtgagtattcacctcggagcattaattccaagcactacaaaaggaagtgaagtgagcacattagccactgtttccagtacatgctgatcccctagcagaagaaataacacatgaaaagatgtttactagtattttttctacaataaaaatatgtttatcttataatcataccatgaatacaaccctgaataggccttaaacatggcggtctttgctgccatgcccgtctgataaaacatacaattgattagttattaatggagggaatagtgttatacagagaaatcaaatacaatgatgtgaacatgaacaagtgcaaatatatgtaaatagttgaagtattactcactgcattaacatgtaattcactccaaaagctgaacctccacatgatgatttagcaaagttctgatcttgattaatctcttctgatgtaaatggcgaatgaggcaccacatgcactccatgtacaccttctagggccctactagggttatgtgtactctggcgactcataaaattctccagtttaaacttgaaattataaactgccagcaacgttttgctggcagcagctaaagaatccacagaaagccaacgtattgcttaacctgtacccattacacaacaaaaatacataaacaaataatgagcgcagaaaagctaaagaaatcaattaaatcttgcacaaggtatcacatatactacatcatacataaacacaaaactacatatgattacacccttctcatgttaaaagaactactgtatattatccgcattgaccatttttaattcaagggtaattatgctagtcttccctatgtatcaaaaaatcgatataactcttaatatatgtggtttgacagtatattaaattgaaagcaatgatctactattctactagatactgaaaaattgagagcagaggcaaattcaagtatgtacagaattagtcaagcccaactcaaagttagtaaacatcttcagagagggtcattatgatttatatgctggtttaaatagccagctggttcgtttgtaattaactcctttgttattcttaaacagataaatcatttaaatttgacacacaaaactctcaatgtgaagctaaaactagagcagaaatacagccatggccatgaatttgtaagggaaatgaactctcatctaaaaaagattgctcaacaagttctataagctaacaattgcttcagtcacaattattatctataacattgaaaggcttacaaattggtgatataattaactacaaaatacaaaaatacccaaaagctgagtctcaaaatttgaacagagcgaaagtcataccaaatctttggagtccccaaaccacacaatcaaacaggctatcaacattcataacaaatcccaatccaaactaagcaccaaacagttcaaacaaaaatccactttaataaaacgaattcaacttttatatcatattcatatcataatcacgataacccaaatcaaacaaaattaatctggaaacgtatacaagtcgcaagcaacaaccaacattcacatttaaattaagaaaaaaagacacagataattatgaacagtgacagataaacagaaaataaagaaagaaatgagagaaaacctgataaggtatggtgtagcgattagagaaggaaaagattatattaataagatcttattaaaaaaaaaaagtaataatgaaaaggcagttgatttcggcagttgatgtgtgtatatatatagagattaatataaagaaaaaagaaaggtgctggagccaataggaagtgtttatggaaaaagaatataagggaaggagatgcgaatgaatgaaagaatatgtaatacggttaaagatgtgtgggagtatattccactttaaggcatcttacttattaattccaatcattttacctttccttatttatctcaaatcactctcaaccctataaactagggtcaccaaaaatttcacacttcatttactaccttcggttagtttcaaatttagaagtagtatttcaaattataattatatatttaattttaccacgtgttgtgtagtgtagtgataggaattgcttttactggcattctctgaaagtggtatcatctgtgtacggaactgttaaagtgaataccgatgacccaattaagaaaagttgaaacataaggcccctatagttgacatgtggtccgcatcgcgtgatccctttttcgttataaaaaaattatatatttaatttttttggtaaaatattatattagtttctataaaaattgtgttttgtttttcaaaaataaaatt

SEQ ID NO: 80129 - DNA, 4373 bp, Cannabis sativa
gactgctcgttcttaacttccttgacgtatctcttttgggcattgttactttctgtagcgagatgtggccctcctgagataaccaaaatgtcctctccttcaacaagatgaggttataatctttggttgcctaggttattgggcagattcggctggttttgtccattgccttgtctcttcacatactgttgaaagtaaccatgcaagataagactctctatctcgtccttcaactgaagatattcatccattgtatgcccaatgtccttgtgaaatctacacaatttcattgcatcctatttctccctcccatgtctcatgggctcatgtttgctaaatggaaccctgtgctcgtgtgcgagaaagatattttccagagtttattaagctcagtataaatagtgtaaattggcatgtacttatcgtgcttcttttgttttttcttatccttggctgattccttagagtcgtcttttctcttagtgctagagtctgctagattgccagcctttgctgagacggtacttgccgagacagtgtcgagtttacttccagagccagtctttatcaatttcatctcatttcttacttcctcttttcgcattaacacttaagctctttcattgaactcactaatgttttttacagggcaaccttgtaagtcatcccacaactcgcccccagctgtcgagagatcagtcatagtccttgctctaagagcaataagctgtataatgtcattcaagtttttaactctagcagcagctgtactaaatcaactcaagtatgccttgtgtgacttgcctggttgctgctttacgttagtgagggaagatgcttcaggtcgcctatctctcactgcctaaaattgtttcttgaaatctttagacaattgttccaagaggtaatataatgatgggtgaatttattgaaccagctgctcactgccccagtcatcgaggtggggaataaaatacaatataagttattcatgacattgttggcttgcattattgtattaaagttattgaggtgagcgaccagatttgtagtcccatcgtatgacgagacgtgagggttcttaaatccctggggaaatttagcactcataatattaggatggaaaggttcgagctcctcgtcggagtcataatcatgcagttcccatcttggtattttttaaatttgttttccagctcgctgattggcaattggattagatcttcctgctatttgatggaattgagttgtttgtgtaaatcgtgcttcttctaattcaattgctcacgaagatctggccgtcttcgatcatagttactttttgacgttatgcctgagtaactctcagattggctactccttgtatgactcatgctttctcgatcatgactacatcgtgtagatcgactgtgatctcgagatatggtacgtcctgagctagaactggcctagccatgtactggtcttctcctttgggaaaggtttgatacatgtcccctgttggggtatgtatacgcctcctccctatcagtgcgagaaggacgttggcagtgtctccgtggcaacccacttgtcctaggttgagtcccaggatttctctcgttaccacgagggatttcctgttccctagtcctaggttatcttatgttctcgtttctacgagaagactctggtaaatcattgtttacattccccttggttgtgaatccctggggtcttcgaggcacctcttgacgatgtgcttggtcatctggctgttcatcttcaggaacatcccaagtttccccaggttgctcctcctaaatgttcttggggttttcctgggccgtctgctccctcctggttctcgagccccgaggtctacctcgtggccttctcactccaagataacgttagttctttgtgttgttttcttgtgtcgccctggctgcggctacctccctttcgaccacggtacgtatctagtggggtcataggcaccataactcataagcgtggaactgctagcatttgtgttgggttcctcattcccagtttttaggttttgatcatcatcacgttggcttcttcttgaacgtgttgatcatgttgaacgcgttgttcgtgaatttggtggcctccgtgagcccattggctcttttctaggacaatgattagtctcttcaggtttagtgttgtcgttttcccccattatcagccatggagaagaaattccttctttaattaggaggggtttttcgagcttttatcacgtaggctctcaatgaaagcaccaaactcttaacgtagatttttgttaactattagagcctattttcgtaatagatatgacacaaaaattataagaactttgagaaaactaatagaaataaaaataacactaggtttttacgtggttttgtagttaactttgcatagtgcacgagtctatcttattcagatatttctgatacaaaattagggtttttgcaattagtatactcctttttcttctataagattttctctccccttttttgtataatctaccactatttatagtcatataggttggcagttaattacatttaagttcaaatcccataacaatatttctcgaaattgtgggctttaattatgctccacgtaaataaatgcagttaatatttgaaaatcacacagctgtgattaaaattgtttttcaggaaatgctgacgtggattagtacacgctgccaaaggtatctctctaaggcgtctcgcctagtacatgaataacttggtttattcataagccttcagcaatggcctgagcactggtgtactgagcaaacttaagaactgctcttcgaccataaggccttgtagaatggataatcatgtcctccaagtcattacacttggttataatgtacattatacgctaagtgttctaataaccagttcacctcgttcatacctctttacatacaacaaggtagatgccttgctatgcgttgtctatgtctcccttgggcttatgccttctgacacgaaatggtttctcgtcaatacatgactcaatagtttgtacattctgatctcgcttaagactatgtagtcagcgagttataaatatactctatttattctgcatttaatgagttactccattttttatttaatgatataattgccattatatttattgattcatattctctgagactgacacgtgtcaccttctaaagtacgccaaatttaaggtataacactccttaaagcgaagttccactttgtgagaaagcgctcctcgcaaaagcaagttcacctacactacattttgctaaattagaggaggaacttaagttgatctctaaacataacatgtgtattcgggcgatcgcacatttgccttatcaaaaaaatagtttcactttacatatggaattcatcactctcaacatgtttacctaacttgctcattcaacttgccaattaaaattgccaaaccaataaaaactcttctgactacaggaattgaatactcctaacggtccaagaacagagtgaaagttaggcctaaagcatagatagggaaacgaataaaacttaaataagcaaaaggtcaagtcagttcaaggaatcatcatctcccttaaaaatattaaaagcaaatggttgagtcggttcacaaaaccatcatctcccttaaaatagtaaaaggaaaagaagaatcgaatatgactttgagagggacgcttctctaaaaggagtacggattttctagcacccaaaaatgcgctctaagtaccgcagatacaatgtaataggttgagcgatgcctaaaaggtcacaagttcccccaagatggtcttaaatttatgaaaatgtcaagcgtgtcctaaagagccataagctcccttatacccaacgagtaacccataagaggttgaggaatctcagcgagctaacactccctcattgcggtagacacaaacctcaaaagagatcgagataaatcataaagcctacgctcctcgtgaagggtagcaaagaggagaagataagaaaaattaagtcgtaaagatgaagctcaccaaacttagtctataagaacacttgaaagaattcttatagagtatgggacaagtgttaacccccaaaaattacaagtgtagtacttggagtcataagtgttatgcctggaagttttctaaggagaacattgcatgccctgtgcccgcgcgctccatgctcccacgtccttgcttgcacgagcgttgcctgtgcgccccgcgccgtgcttgctccctgcgctcggcctcctccacctcgtcaatcttcttttccctccttacaccaacaatctaagcaaggaggtattaggcgagataacaacaacacaatgagtat

SEQ ID NO: 80130 - DNA, 1120 bp, Cannabis sativa
  modified_base (612)..(619): a, c, t, g, unknown or other
tattttcattgaaagacacaaagcaaagaagatccaaagatcaatacacaaaataattaactagggcaaattggaagggaaacctgaccaccaaactttagcggaatctaaagatatgacaatttagctaacgaatgcaagagcattattagttcgtttacaatgataaatgagaaaaaaagactaacatgtaaaatatcatcaagaaaaacacaatattcattgcaaaccttcatcttcgaggaaaagagaattcactaactaaacgaaggcaatccaaccaaaaaatacctccgccacatgaggctcaggcacaatggtagaagaagaagcagctgaacgtataatatctttattcggccgagacacacctaacaacaaaatcttacttttagtcacaacaaaatttgtaattaaaagtaaaagaattgtgactaattataaattaccatttttatgttgtgactaaaaggttcgtggctaaatatattagtcacaaaaattataatttattgtaactaaatgtatttttagtcacaatgagtaaactaaattagtgacaatttgaaactaaatactatattttctagtcacaagtaacattttgttgtnnnnnnnngtcacatttagttacaaaaaaataatgttatgattaaaaatttgtcattaaaagtagcaaattttttgtagtgacaacaaccccggcctaatccaatcttctacctcttaaaacaagtaccaacatcaacagacagattataattccccgagctcctaacccacatgttcactagaagtaggaaaaaaggaagaggaagtcacatgtgatggcggtgcaagggaagtaagagcttcatggtagcgccaaaggtaactaagagcccaactaatcaccatatcatcaaatgaaaagctttttatcttgcacataggtatcacgacgatgctaaatcctccaacaaagaacaaaaaattcttcaactgggaaatgatatccataaccccaattaagagttgtccaaccgccggagacaccaggcgaaccgaatagacttaagggatggacaaaaccacaagacttgtatagtagtatacttaattatattatatctataatttg

SEQ ID NO: 80131 - DNA, 2763 bp, Cannabis sativa
  modified_base (2559)..(2571): a, c, t, g, unknown or other
cacccgtgaaatgtgaacaatccctgcgtttcacacttacatcaaatgggataatgacaaataacttctcataaccgcttgtgtaattttatctgtaagcagttatgctgactatgattcatccttctcgtaatgtaacaattcctctttagacactttatcataaatcaacatctaagtacacgtcaagtagtacttctcgccttctttcattaatattgactgaggcatacacgagacgcttatcaccatatgacaattgcgaggtgaaccatgctgaagatatcttatctcttaacatactcacgagtatgtgggtcaataaattgcgagctctttcattatatttttatattacaattttttttttttacttaatttatctttttgtactattacattatcttttaatggaatttattgttacaattttattcttttatttttcttcccgtttgatagttaaaaaataactaaaaactgaaaaacaacataaaaataataaaacaaatgcacatatttacaataaaaatattgtctagaataaactgaaaaacatacacgataacaaatatatatacactaaataataaccgtacatataaagcacataaaaacagaagaaaaaataactatagaacacataaataacaccataaaaataattagaaaataagaaaaagataactataaatcaacagaataataacaagacattgattttgtcaaaatatacaaatcattcataaattaactttcaataaactacaaaatatccaaaaataaaatatactatttttattaatcatataaaagataaaaaaaatataggaggagtgtttttaattttttttgtaagagagagaaagagttttataaaaatgagatataaaattgtacacttattatatatacaaagacaaaaaaaaaataatttgagaaaaaagagagagagaaaaaattaaaaaaaaaaataaataaagagaaaagaaagaaagaaaaaatcaactgacttaaaaaaagaatccatcaaaactaactaaaaaaatataaagaagaagaagatttttttttttttttgaaactttaataagtaaaaatagttaaaaaaaaaaataagtagagaaagtatgaatgtaaaatttgaaaaaaaaaatatttagtgtaaatttttagaaaaataatacaaaacacatagtataaaaaaattataaaacctaccaactatgacagcaaaactataatatatgataaaccctttgcattgcatgtagagtattattattattcctaatcttaaaacatgataacaatctaaattaaaaagaaaaaataaacttgatgagcatctctatctcaattgaaaaagaaaatattgtagtttcgtggtaccttcttaccttttcaaagtacaacaaaaataaataaatgaaatataatcattatcgacaaatgttattatgtcattatgaaatgagtggttatgtgcaaagacttgttcaaataataacaaatatatatatttattgcgattttgtctcattgttaagtaaaactatttttaggagtacaagtactagacgtagcacataattaaaccaataataataataataataataatggataatccaataaaaataatgatcttttaataaacaaacaaacttatttttcgtatctttgtgtgtgggccaatcactctccaatatatttccaacgtgattcaaatggtgttcggccttatatgggcttagaacttcttatcttagcccaagtgagcccatggcagaatggaaaaagaagcccaacttatatcttttagggattatttcataaatatacaaaaatgacaaaaattttacttttttatgaatctgctgtttttcttttacactgtacggttttttaacaaaaatataaagtgctattttttttttgctgtttttgaaaaaaaaaatattgttttgacattgttacgggaaaacaacataatttatttttacaataatataaagggttgtttttccgttatttcagaacaatattgttttgatgttgccactacggaaaaacaaggtgaaaatactatttttctttggtaaaaaaaaatgaaaatctttaaaaatatttatatatatgtaataatataaataaaaaaagttcgaaaaactgtataaattctacatataatactttaataatattaaagatcatttgagataacctcttttattttttatttatttgttggaataattatataaggcactattttttttaaaaaaaaattacaattttacgtttaatgattttttttttatatatatttttacaattttctgtaaaaataatacgaaaacaacataaaagtaacataaaaaataatatctaaataacatcaaaacaacaacaacaaataacatacatataacaaaaaatcaacaacaaattaacatgaatacaacataaaaaaaaaaccgtattttctgtaaataaaatcaaaaaattcataaaaatgtttaaaattctgtaaaaacgtatttttgtaattttttnnnnnnnnnnnnntgtatttgtgaaattatcccttatttgtttgtgtcgaaattttttctgaaaactaatgaattttacatgggatatgagtcttacaaaatgagagagtagtttagtgggtgtaaaagaatgagtttcacatgagatatgagtcattatttataagaatatataaagtataattttgacacttgtgatagcccc

SEQ ID NO: 80132 - DNA, 2518 bp, Cannabis sativa
  modified_base (1100)..(1100): a, c, t, g, unknown or other
tataatctacatgaatgtagaagtgtagttttaaaaaatagaatgcgaattgaagtatatgctaaaaagtataagatttatttatctcaaaattaattaaccataattttatacattattttttttttcgtatttattatcaaatactctctaacaactatataaatactctctaacaactatatgttattattattataactatatgttattattattattattattattattattataattttatgctatatatgctatattaaacacatagtctctagctattttttctttattgtatacttaaattaattcgttgtactggttggtagatcaattattattaagagtatatatatgtctaatttgtgatcactagtctataatataattttagtcactctttaaatccaaaaatcaaacattacataagagttcgttgtgattctcaagcagccattaaattacctttattatatgtgaatatgacatgttattcaccagtcatcaagcatattttaggtatgcaaataattaggggaaatttgattaattgtgcatttagactattttttttttggtaacttaaactattcaatattgatagaatattttattttatttttttaaaatctcattctattcctctcatttgaacaactctctctctctctgtaaacacacacggaagagcacacaatccacccacaaccttaattccttctctccacaaccaccatgaccacagtgttagacttttatatgtatgaaataaaaaaaaatatgtatatgtatataaaaatatagaataaacgaatatatatactatataactaaaggattgatatacccaaggacccactaattcaatggccacctgcggatttaacgacttctccatcaactacgacttcactatcggcaatgttgtcaaaagaataaattgtatgattaatatttgttatctgtgagtagatgttagatttatgatcgaaaatgaccagatttgagttttggacaaaaaattagttttttttgttaggttcgatggtagtccgatggtggtccgatagtagtccgatgccttcctgttgttaaantgagtaaaggttgaagacgaaggtacgatggtggtctgatggtagcccgataatatagtccgatggtggcccattgccttcctgatgagcttaatgaatagagcttaacatctataaatgtagacatggtctaatagtggcccaatggtcacttgatgctacacaaaaacataaaaaaatgtttttatgcacaaaaacataaaacaaaaataaaaaaaaaaatgggaagcagaaatggtctgatagtggtccgatggtggttcgatggccacctgatgctaccttttttatgtacaaaaacataagaaaataaaaaaaaaaatgggtagcatctcgggccaccatcagacccccatcggaccaccatcggtatagatcgatgggaatatatatagagtatggatggtgaagttagaagagaagagaagagagaaaggtataatgggtatgaacataaaatgtgcctatttttttaaaaaaaaatttagtaagcttgtgttcaaaaatttaatataccccaaatgtatgtatataaatttaaatttctcataattaatcgtagcctaatgggttaagcctcaccaaatcagttcaatatcaacatattacttgtatctacctcatcaatgaggcaagtttacatgaaatccctatcttataaatataacataaaatcttaatgcaaaaggtttaaaattcgtttcttaccaactaagactaaaaatagggttcataaacactgcataaacacttttgtaatattcaaagacttttacagctaaataacattaactcatgaactagaatttgttaatacaccaaccacataaaaatcatcatcttaatatttgtattgatttattttctttagctttattagattttatataaagcagcttttgaaaaatttagtaaatattttggtattttcattgagagttgagaaaaatttgattttaacgttctatattgcaacaatagtaaccactaaaaccactgtcactaaacctgctgctcatgatggggacactgctatgaattacctgttaatcaatttaattaaatcaattatatctattcaacaattgattaactaaagttaagaaatttagctaaattaactattcttttatcaattgattaactcaagttaaccaatttagtaatcacaaacttaaaacaattaataaactaactaactgattaaaaatcataaccataatgaaagcagcactaaataattagtattaagatacaaaatgatacaatcggtcataattttaaaaactttacaataatttttttagcctcatagtacgtcgatggaattttatttcctttcggaaaagcaagattcaataattttaataattcatcaaatacgccgataggaatttttccacgaactttcaaatgca

SEQ ID NO: 80133 - DNA, 1078 bp, Cannabis sativa
tatctattttactcaaattcttagctttcaaagagttcactctagcacaaacactattagcaatacaattaaaagtgaccttaatagtagggttttttctcccaaagaatcttgtttctagcatgccaaatagaatatattgttgctgtaatgacactcaaaagaacctttcttttgcctctaaatacgtttgccttccgaatcccttttaggacatcatggagctattttttctggctagtaataccgatccaaagccacacttgatgaatcaccaaactgctgtaaatacaactaaagaagaggtgagaatgactctccactccacttccacacaacaaacacaaggaagagttggtatgattaaatcgactaagtctgtccaaggtagacaaacgactcttcaaggtaatttttgagcattgtttcatgtgacactaatgtcatccacttaaattaacaccattagaattatctgaaatgtcataaagaagaatagagaggaatcaacctttgagttgataaacttccactgtattaaggttttcttgagttggttaaaccaagccctaggtgcttgtttttaaccatacaaggacttgtgaagcttgcatacataatttggtttgcttggatcctcaaaacataatggttgcaccatgtaaacatctttttcgagctgactattgaggaatgcatttttaatgtccaattatttgatctcccaattttttgatacaacaatagtaaggacattttgaatggttgatgcttttataatatgactgaaagtctcactaaaatctataccaagtctttggtgaaagcctttcacaacaagactgactttgtgtctttcaagtgagccatcatcattccactttattcgatatacccacttgttacccaccaacttatagctatccaaccttggcacaatagtctagattttcttagccttgagagcaccaaatttagttcccattgctgaattccaaactgcagaacttagagcttcctcaagagttcttggttccatatggctgatattcaacatagcttatcccaagtacacttt

SEQ ID NO: 80134 - DNA, 1130 bp, Cannabis sativa
aatgagaatacaagagaaggagcgggagagtgagagtgagagaggtctaacaatatgcatatttgaagccaatacatgaataaaagttaactaattcaagttgggtttttaactcttaagatcagaaggtaatgataaacagctaacctgtttatgataatatgaaatgtcagaccaactaactggtggcattgtataaactccacctagttccactcttcttttgagcctgggaggcaattccttcaatatgcggacctcatctcttaaagaggtaatgaaatggtccacgtcaaatatgtcttgaaactcactgccatggacagcagtaagtaaataatggagcataatgaagataatctgaactcgaggaaacaaataaattatcaaatgaaaatgaaaatcaagttgaccaacctaggatctgcccaaaaggatgttttgtccaattcaggcactataagtgtgacattcagatatctcgcaatagcaaccatgtcacaaatctgatttgcaaaaacaaaaggaaaaggtcaggaagctgccataagcatagacaccaaaggagattccatttttaacaaatcactcaccgctgatctcatttgattaagtccgccattgcaggaaaccatcagataaccgttgttcttataaacccctaatcacaaaataagaagtttgaaacatgaaagtgaaatcagaaaaaaggatagtcaagaattactccccatggaaaaagaacagaaagaaatgcagtctttgaaagaaagtgggggaagaaaagtccacagaaagaaaatccacatagtaaaatatatatttcataaaatgggaagcgaaaacaaatgaaggaaaaaagtttcgttcttttctatactccatcagcaaaatgggaaacaaacgtgataaattataagcttatttcaacactgacagaatatgtatggtaaaaaagaaaatcccgtggactacatctcacaatatcccaatttcaggtatgatattccacaaatagatagaatttatgatatgatagcgaaatccatttcaacacatgcgcgttcgttccaaattcagaataagagaagcgttatgaacgaaagtgatttaatttctttagaatataa

SEQ ID NO: 80135 - DNA, 1149 bp, Cannabis sativa
atttttataaaaaaaaataaaaatggactattagcgacgaaatttgtagttcgctgctaatactaccattattagcagcggagatggcccactgctaataattttgccgcaaatgaacaaaattgttgtagtgtccatggcgacatcttggtcaggatgagtgggttgtgccacagtggttttcttggtagccaatattgttgcgaatacaatgtagctttagatattccttcaacattcaatgaaagaaccaaaatatttaccgagattttgggaaactaattaaaatgagggttaagaaattaaataaactaatataaaatgaagatggagatttttacctagtttcagtgttaattaacccagtccacgagtcacttatatttggccaaatggtcttgatggattacaataaggtttttacaaggtcaagaaccctagcttcttgctatattattttgtctctttctagtttttttaaccttttagattccaccctttgcatgaaggtataaagtagtatttataggctaagaatcggggtcgtgtatacctatgacccgctagggtttttatgtaaactaggtccattattcgggtaatacatgaaatacatgactataggctcactagcagaatttcagctcgtgaggtggaggtgttccgtacgcctggggaccatgcgattcttgacaagtgactgaagcacgccacatatatgtaatgtagtgtcaggtttgtgtcgttagacttaaggagatttcctttaggtggtgtgcgtactcttatgctctgacacaggggatgaaccgtgatttggtgggaccgagtattagagggcagccatatcatcctatactaggcttccaatgcgcctcttggagttctctttctggacgcgtcccaacgctcttttggaagtctttgactgttccatcccaggaaggcaggacgcgttccttgatccggataagcctcgtctcagagtcgagtcctctgggattacatgcccatccttccatctggatcgggcctatcctcacaaaaaggcctttagctagaccatactgggttaatttataaagtcaaaaacaccacttgtcatcctttcggaaacacggataacactaattatcaaccaaaacacaa

SEQ ID NO: 80136 - DNA, 732 bp, Cannabis sativa
aaagaacgcgtaagtgataattttttttttttttttctaaaagaaaagtagatgagttataaaagagtgaaggaaatctcaaagtagacaacgtagtggtacagccttacaggtgtaattttcgttgttgaaatggctcaccaactaacaactgtcgtttgatggtgctcttaatcccactcactccaagtgttgtttgttcttaaaccttgggttaatatatataccaactaaattaaacaatttagcacgaaataaaaaagcttagaaagtatagaaaacgacatacaccaccacctacgccacttatatgaaatgaagaaatggaaaaaatagggatgaagatatttaatattaaataaataattaattgttagaatttggaggtgtgtaaatatatatgttaaactttgtgaatcatattggaccaatttgatacaccaaatcgaaatgatgggtaaattagatttgatctattttgttttatttctccattaaaaagccatatccacatacgtcaaagaaaaaaaaaagccatacccatttgttgtgctttgattccttttaacttaataatcttcttcaatagtacacttataatagttattttttaaaatatagttttggattgaaatctcttccaaatattacatcattctaactgtattcatatacaaattattaaaacataataactaaagttagtaattaaattataatattaatatatag

SEQ ID NO: 80137 - DNA, 1602 bp, Cannabis sativa
  modified_base (155)..(156): a, c, t, g, unknown or other
agtaattaccctacctattaattacacagttacttccaaacgcaccattaaaaaattcttgatttgtagcattagaatcgggttttgcagtagcaaatcaggtccagaaaggaaactttccgagttgaaccaacatcacgaatttggacttcaannctgccaaataaagtttatttgatttgttctaataaagctgaaaccaaaattattctaaagttagacaactttccataaaagaattcattctcttacaataagttttctaaaccaaaaagggaacagtggagaaagaatttttccttagaaggaaaaagtaaataaatgaaaaaaaatcaatgtaataaaaataatttaaatacacaataaaaatatacattaataaaaaaatattttgacaattaaattgtcaaaacaaagacctaaccgttcggaaataaaaattctaattagccttaaatttaattattaccaaataatgctaacagttcctcctaaaggtgccacctcattcgtaatagcactggacaccattaattcatattatgctcataaacttcactggacaccattaattcatattttgctcataaactttaaatttttttatttgtaacttgttcataaacatgagaccgtgagaactgctctatgcagccatgcatacacatttatacataaataaagtagaatacttataagtatgcattgatgaaaagattaagaggattattttttttttttttttttcatagattaaaaggattattagccacaataatgcataacaacagccattaatcaataaaagtcaaccaacattagttatgacttttttattctcttttttgagtacttttaaagtttaacccatatgaagaaacattccctctaattataactttttattttcttttatgaaccgatctatttctcttataaaaggaggaccagaaaaatcaaaagctgtcatatattacatcatataacagaaaatttttggtgcgcgtttcgataggttatccatttttttgtcaaaaaaaaaaactaggttgccgcaatatttcttttaaatttaccagctgtacacttaaatatcaatactctttcttggattaactgtctaaaaagatcacaaaataaaattatcatcaagaaaacaaaatcacatggccattaatagattaattaataattaatataatatgtgtagagagttgggaaaaagggaaacttccccaacatcgctttctcctaaatgctatgggtccaaaatcaaattttaaaatcttaatggaagcagtactagaatttgtgatccgatgaaatcagacccatacttgttacatatcacatgctactatatttctaaacactagatgaggctacacgtgcaatgcacgtgcctaacggtctataatcaatttcatttatattttattttaacttttataaataattagaataagaatttatgtatttttctttttacatcttaattattataaatacatattttatgagtatattaaagatacaagtataaggaacaaatttctataagcattatagagtactatttgaatattactttttatattataa

SEQ ID NO: 80138 - DNA, 2330 bp, Cannabis sativa
cacattgcagcatgaaattggtctaaagtcaattggtgtgtttggacatctcactttaggaatgatagtaagagtcgtggaattgatctccttaggaatcttctcagagtgaagaaaagatctcactgcttcacaaatgtcaccgccaagtatttcccagttgtcttgaaagaaaaaactggagtagccatctagaccagatgctttagttttaggaatagcaaacatggcttttttgatctcttcatctgaaataggagccaaaagagatacactttgttgcattgtaacagtgggcccattattaagtacttgatctattaccttccttctatttgtcattcttgtaccaagcaactgcttataataggcaagaaatacttcagtgatcttggtcgggtcatctactctggttccttaagtatccacaatggataggattctattttggctgtttctagctttgagatttgcatgtaataccgcggtgttatcatcgccatctcttatccaactagtttttgctttttgatgaagaaataattgatagttcttatgtgcttgtgtgaaagtgttcctggcttcaagttcttcgagttgcaggagctggttaaagggttccggagcaacttattctcgcatctgtctagaatactttttgcttgaattactgctgattgtaaatcagtaaagccctcttgattaatcttcttaaagacagcctttaaggctttgagtttggtaacaatttggtacatcattgcacaattataatggttctcccaaatttgtcgtaatctgcttgcatattctgggtgtgagatccacatattgaagtagcgaaaaggctttttcccattgtgagctaactaatgaaaattcactagagcaagaaagtgatcgaatgctccttcatttaagaatatagcttcagcacctgggaaggattccacccactttgcattagccataaccctgtccaatttagagtaaatacatttcccccttgctgattgttacaccatgtaaaaaacttaccacttcttttgatatcctccaactaacagcaagaaatacagtccctaaaagcatgagaactgtgattttttaccctacttccaaccctttattcttgctttaaaatgtcattaaagtctcccaatactacctaagcatcttgtgttgtaatagagttcaaatctttccataattcctttctaccttcctcatcatcaaaggcataaacaaatgtaacaagaaaattcttaccatccaaagtggcaacttgaagatgaattaattgatttgttcacttgattatgttgatgcagaaggtatcaggattccaagctactaccattcttcctcctttatgcccaacaatgttactagtaaaacaccacccattaaaaacattagagtacaaggttccaagttttgaagccttgactcttgtctcaagaagcctaacaagaccaacatttggagagtgaatcaattgcttgatcaaactttgtttacggtggttgttggctcctcagacattccataatagtaatctatccattttgaagaggaggcactccccctcatcctgtcttatatagctcgatctgccccttgtgcatctgattttctttccacattctactcttgttctatttgttcttgcaatatctcaaaagtattctcggtgctagtacttccttgctgaattttcccctttgctttccaacctttggtaactggttgaaacccatctgaattcacaacagcttctttttccaattcttctttcttatctttcacaacccattgttgattctgagtactcgattttttcctgcattcatcagtgttatgacccaaaccattacaatttttgcaaatggtgggttttcattcatactcaactcctactgatacaatgtaaccgtgctcatcttcaaattagattttcactggcaggtcttgtttcatagagacttcaatgagtattttggggaaattaagtttctgcctttgtttggtgacttcatctaccattatagggtctccaatctgccctacaatcttaaacaaggtgttttggccccaatatttcagttccaaactttcaatttgaatccagataggaacctttcgaatatcctctttcctgaaattagtatccggatcccatgccttcataatcacaggtctcttgttgaagaaggtgatacgaactacaccaacttgtgatgaaacccgacaccaaatatggaacagccaccaagaacaaacgatgttggaatggaacctcgacccaatgcttagcgaagcacgaacct

SEQ ID NO: 80139 - DNA, 623 bp, Cannabis sativa
ataaaacctagttgtgcttcaaccgattaattgtatttattatatcgctagtcatcagtattacaaactattaattataataaaatcatacactattctatttgattaagtgtagtaattaatatatatctagccaagccaaccatattagcaatatacttgacatgagtaatagacacactagggagagagagaaaataagacaagatatatcaacaattaaatctttattaaaagatgagtcgctctctctagagtgttttattctgggctctctttatgagtattgttttttgtcattttggtctctttttagaactttgttttggtatacgttattctttttgctactttattttagccctttcgtattcttcgactttgtctattgagctttttatcttgtgtgagtgtgtttgttctggtggacttatggcgtctagtagcttcaatactaaggatctagaagatcgctggagagccattcaatttaagaagaagtaagctagagacattctatgaggaaaatgcagaggaagaagaagaagatgaagagcaggccatcgataccagatggtgcctcgtagaacaatattgtatccatggaggagataaaaatagca

SEQ ID NO: 80140 - DNA, 998 bp, Cannabis sativa
taataattaattaatacgacttatatacgaagatcacaaccatcaaacatgttagcccccacatttctctatattatattaacttgtggaaatattagccattttataattaattaatttagaaatttagattttttttttatcacttcaataatcaaccgaaatttagatttttgaacaactaaaataattgtatataattatatttatatgtaccgacaatatattatattaatttatacaaatatacatgcacgtctctatttttaattaattacatgacattttactaatgactttaattatttgatacaatgtacaatctttaacctacttcattttcttctattatttaataactattgtatattttttggttaattaattagcacgaatgttaatatataattaattgtttataaagttcagccatagttgttaattttttcttttcaagaatggctgtaaaatttgtctttatataatgttttaatttaaaataatagtaataataggaattttacacgttgttacatgtgagaaaatcctatatatttaataatatttaaaagtaaaaaaagtaaaataacaactgacaacaatatctttttttttttaataagtgatcatatgatattctttaataagctcatcttcttaattctgacagaaaaaaaaaaaattgggaaaagagataaatgctgtgtaaataatactaatgaaaaacaattattatattaacaagtattttttttttaattttttttaattgtttttatagccatataaatatttggaatggatatcatgtcggcatgttctcatattaattaatttaatttatttatttatgttgctaactatatgttaaattacaacatgattatatatgtaagagtcaaattaattaaatgtttgaatatattaattacatatgtgataaataatttaaggggtaaattttgttataaatttaaccatgttaaataaaaatcaag

SEQ ID NO: 80141 - DNA, 1634 bp, Cannabis sativa
  modified_base (297)..(308): a, c, t, g, unknown or other
ccacaccgcctagagaaggtcaagtgggatgattctgagattgtgtaggtatgagactacacagttgaatagagcttaaatggattgattggtatactacctatattaacaatatgcatcttatttttcggtagcctatgaaagaactccaccggttaagcgtgcttgacttggggtaatttcaggatgggtgatctcttggaaaattttctcggaaagcatgcgagtgaggacaaaacacgccggatctcgtgttggtttgtagggtcagttgtcatcagtccatgaagcagccannnnnnnnnnnncgtgtataagagtcattattatgtgggtgtacaagcccaatgaagatttgaagcggtagcgttacaatataatatcgagtcttacttattttattgtaataaagaatatagaaaatttactaactaattataaaacgctagctagtcatcttgatgccccatgctcttatttaaatctacctttgaatgatataatattcgtatcaagacttaaataatttacaaataaatatcaaactcaaaccagcatgacccctttattaatggtatcaaaactcaaaaatttcacaaatttatatataaattaaacgtgttgaattaacacaaccctgtgtaatctgttaaagttaatttagatttttaccttttgaactttgatatatactaatttatgttttttaaatttttcaggtcgttaaatttttttttcgaactattgagattgttagatttaaaaatttttgcctaattttactgaagaaagtctgacgtggatgaaaatttcgagaataaaatttaatatatgttaaagttcagaattaatcatgatttagtagatatctaaagttaattatgagcacaatttaatatatgaacaatcgtcacattgacaaaattgataaaaattcttaaatccaataattttaataatttaaggaaattttaaatgacttaaaaagtttaaaaaacataattaaatacatgttaatgtttaaaaatcctaattaacctatttattggctcaaattatcaacatcattaacttgtttatattatgacaagtttaatatttttgctacacgttaattatgaatcatttaacataagttttacatgtaacaagtaacaactgtaagtctacacgttaattatgaatcatttaacataagttttacatgtaacaagtaacaactgtaagtataaatgtatattttttaaaagaataatttgtgacataaatacttaaatttaactcacagttttaaataaatacttaagtttaatttttagcgataataatacttaaattatatttctagaacttctgtagattatacctaaatgttaagtgttaaataaattgtcacgtgataatttttgattggtctacgtcattaaatttttttttgaaaaaaaaaatagtttagatatatcaataaaaaaatgacacacataaataataatttgacatttaattattgctaaaaataatttaaatatttatttgtataataagttaaaaacttatatatctatgcaataaattactattctcataaatatcaacttacaaaataatctaaactcgtataaaaaaaaaaaaaa

SEQ ID NO: 80142 - DNA, 991 bp, Cannabis sativa
tgcaatttgtttcaatgcaaaaaataacaattatcagtggcacggtgcatggcctagtagctcaaaataaaaggtttgatcatactgtttaacttagcccctcatgctagcattctcactcattaactatatatgtatctcttatgtcataattctcactcgttgtcaggtttactaagaaaataataagtcgatcagaaaaaacaaaaactccaacaacaagcataagtaattgagattaaactagcaaaatcaaagaacaaatttccatatgcaatgacacacaaaaattcacaagtgaagcaaaaacacaatgaaagaaaaagaaaatgtaataataaaacaaaatttacccacatttttattgactttaactgaagtggtgcaaaatcaaaaggataaaaaacattaagagaaaaacatgaaacaaatagctttaactaaagaagtgaaatcttacattcaagtcattgcaataatgaattgcaaaaccattagtactatatgcagttcgactgtgttaagtagtaaccactaataagcaacataattataattttagtaaatatatatatttcaatagccttaatttagatcattactaataaagccacaacatcatttaataatttagcattatctctcctaacaaactcttcacaattcagcaatgaaaatagaaatgttccagatagagatggaaaaaaatgattaaaaaccagattataaagaggatgtatccaatatagttgtagctcaaaactcaatagtgtcctgaaaataagagactccagacaagcctattatgtatccacgtataattcaactctatgtaactaagcttacatactactaaaatctacttttatttaccaaccctaactacctataattctaaactaacttcaaccccaattgaactaccaaactatatagtttaaatttttcttataatatatactccaatttttctatgttgaatagtttattc

SEQ ID NO: 80143 - DNA, 1099 bp, Cannabis sativa
  modified_base (1051)..(1060): a, c, t, g, unknown or other
cttcaaaacagttttttttcttttacatttttacggaattctacataaaaattcctattgcaactagcactgcaatctaaattgcaacaaaaaatcgtatagaaacccctattgcaattagcattacaactactttgaaaacccaaactgtaaattaaaaaaataatatgtaaaataattcccctaaatttatttagtaaccatctatctgtaaaaaaaaaagactccaaatatatataatagatgcagtattgtcaaccctttgatcaaattttgatttgcttcatcaaaacaattttgataatgatgatgaggttttattattatttatctattaattaatttgaccagtcaattaaagacaaataagtaaacatctttggtcatcatatgtggcccctaaataatttatagagaaggaattctcttcaagagcaggtgaaatataatatttccatacaatactcgacaatatataagacaatatattttttcaaataacttttctagtataattatcattatttttttttcttttgggcaataaaaattagatatttttgttaattaatcaattgggtcaatagtccaaatcaatgaagccctaatatttaagcaacacaaacaaatattttacttatctatacatatgtaaatatataaaagacaactattgttttattttatatatatggatttttttaatttaattaaaaaaaaaagttaagaatgatgaacacgtgtaaacgacaatttgattataccattttaacacttcactcaaaataaaatgaaaaaaataatggttgttaaagtcccttaggtgtgctagtactttcgtacatattattaatttttatatttatgataattagaatgtttatcaattttaaaatgtattaaattacatcttttaaattttttagtcctaaatttttttctaaattattgaatttattagatttaagaatttttgttcaattttattcaatttcactaatttggtgattattttgggctcgtttgcaacgccgtattaggtcgtattgtnnnnnnnnnnattatattgaattgtattttatgcaatatttttatgtaa

SEQ ID NO: 80144 - DNA, 982 bp, Cannabis sativa
tgctccttcatactgtaaaataaatatataaatgacgagcttgttagctatataatatattacactgacaaacattgtgttgtgtccactaatgaaattataaaaatataccaaacataactgattaattatatgtaattaatgtgtgccttattttggcatgcaactttaataactaaacaaaattctctatattgataagggacaatgcaatattattaattaatttgattaattactttttaacattttgttttagtatggctccgttttacaatattattttcacttgtacttatagcttataatttatttacttccataaattaggattatcacaaacaaatattaaaaattttaaaaagtttacacaaatgaagccaatatctctttttgagacgttatttggtttcaccaattataagtatatcatgaattgagtctctttttaagtatctattcaaactatatgatttttccatgtatttaatttgtttcactacacatagatacgaatatacttgaaacttattttccataacaatgtttatattcccaaaataaaatattacagttttcaatgcacaaaaaatactatatatatatatatttaaaggaaaaatactatatatattactatattaagtaaacggtgaagaaacaaaatacagtaaaaaaataaataaataaataaaaaacttcaagtacgtcctcagtggataaggcctaaaaactttttactattactaacttggaagaatgtgggctacattatttggcaacttctttaggaattaaaaaaggtcaaaacacaagtttacaaaggcctctagtagtcttgcaaaaaaaaaaggccactagagacagagttacaaaattgtcatgtttccagaaagaagaataaaattaaatcattttatacatttccgcacattcccccaccaaaaacaaaataataaatagtttcataaaatattataat

SEQ ID NO: 80145 - DNA, 1080 bp, Cannabis sativa
ataacaaacaagttagaatgagaagtaataataagagaagacaagatgacacttacagccagtctcgtgggtaacatgagcaaagaaggctgcaatctcgcgtttagagtcatcgacagagccacttctaccgaaaggagggtaggaatcaagagcttggagaaaaacctcacgagagtaaaagttttggccaggacaaccttgattgttagctattccgttgtttattatgtcattgaagaattgtggggtcactatgtcccccaccgaaaccccatttgtggtacaggcgcctcctcggcagtctccgccgcagtaggctgcatctgtgccacaaaagccacttttgctacaacactcgtttgcagcgcacgtgcttgatccgcagggtgtttgagcgttgcaagttttggggacgcctaataaggctataagtcccaacaacaagaagaagggtagttttagattgttttgtgctttgagagaggccatctttgctttactagtgattattgagatgatgttattttataggactctttttggtttggttttgtactcttgactgacttgtctatgagtcaagagtcaagagtcaacacacggtttcatcttgttgaaatatcaatgcattaactagctaagttgcgtgccttttgggtcacttcaaatctttttggttgaaaatgttgtgcaaataattaacatgcatgaatataatttacaagatgtttatatgtagttttattagttgagatatattacattcaatatatgtatacactaataacgaatttgaatagattatttgtataagtagatgttttcggaactaattaagtagatgtttgcaaattgatcatgaaattttatttcttagaatcttgtagtttcatcggagcactaattataaagagtataacactattattttgataggtaaattatagtgaagtgctaaaggacacttcactataattagtatttctgcaaaatataaggtttaaaatagtatttaccctatttatattaaaaattttgtactggttgttttttattttataacgtgtggagtaatga

SEQ ID NO: 80146 - DNA, 4054 bp, Cannabis sativa
aacatgtctaattattatatctatgaaagtaataggagaaatcacttgaatcttttgaatcaatgtgttatgtgtaacattggctatacaactattattcaacggtttgtgaactcttgaatagcgaatatgctagtcaacataataagaaaagctttttaaaattctaactaatgtttcaaatatggtgttgttaatattttacggttttgatgatatattggatctgtcattgaaatacaaaacaactattatgaaaatttttgaaaaccaataatgtattaaatgtattaacaatgtatcaaagtaacatttcgacatgtaaaagctcacaaaaaaattctatttactgtgccaattctatttttttatttcccatgcacctgaaaatcttcttttccttggtatttcaattgcatttgtgtgttttcttggttggattctagcaactgtgtcagcttgtgtattaattcatcatatttacaatcaattgagatgaatttctcactaatttcataattttcttaattgattccttcatcaaactgtctcttttaaaatatgaggaatgaaattgcgtctttttcctgagagtataaaggtttgagtattataagtcaacttcaagacaactgtgataaaactataatgcaacaattatatctgttgcgagcaaactagcataaatccacaaaacaactaataattctacatatttaatacaaacaaacattacaacaatcgtgtttaatctgttcaggtcgtgtatttgacaatttgagccctatttttataatactatgatattatagtagcaaaaccattattcaactacgtgcaacttaattatagctataaatattaaatatgaatgtgtatctataagaaactatttatcagtatttttttatcactgatcgataattaattataccttaatagtaatatgtggagaaataacagttagacctttgtaaaccaactttatatcaactaatttaatatattaataaaattaaacatgttataaaagtttctttgaagagatttgtattgtattgacgatatgaaacacttgcaaatatgataaaatctattgtatcgttatcagtttgtaataaataaattattagaaaagacttgttgcattctcaaactcaaaaaatcgttgaatagtatattgggatctaagattgaaagtaaagaaaaaatatcttaccttgtttcttggtcgatctcgcatcggatggtgaagacactgccacaacgtcacaactacttcatgaagcaaatgaccagtaagtaacaaaagaaagtggaagcagagttccatggtttgatccatctcgtggcggtgatctcactgtaaaaattgtcgatcatgcacaatagtagattgtgaaaagtgtagaccttaatttaaaaaatttgtcaacttactcaatttgaaaattttgtcaaaatagccttttgacaaattaaaatttataaaataacattacttttttttttctttttttattacttttattttgtacagtggcacccaattaatctaaaaaattagattattattaaatatgtgaggtttaaaacctcatgaaacaaaaaaataaataaataaataaaaaccctaactatagagaagaatggttttcttcttcctactggtaagaccaaaaagaccagccaatttacctttcttcatggatggttacaagtgaacgattcttcttcttcttcttctcctcctcctctttcttcttcttgttggtaagaccaaaagactagtcattcttcatgaattgtcgcaagtggttgcagctaaaaaataaaaaatttggcaatcattccagcagagataaactctaaataacttacttgtattttctcatgtcccttcttttttttttaatcttattcacttgtagtcattaatatttttcttctcttaatctcttatttgtaacaattaatcttttagaattataatggaatcaataagtgatacatcaaccacaatacccacaccacccaataaacatgaataaataacatatgtattttattatagtcttttggattatagttttgatttttgtaattttgtggttaaaaagaccttggatttgttatgaatgaccataaacgatcttgaatttacactatgcgaccatcatcgtcttttatgttcttcaacaaacttcaaagaacttaaattttctctgaacgaccataaacgaccttgaatttacattaagcgaccatcatggtcttttatgttcttcaaccaatctaaagaacttgaattttctttgaataaccataatcgatcttgaatttacactatgcgaccatcatggtcttttatgttcttcaaccaatttcaaagaattttaatatgctctaaacgacaataaacaaccttgaatttacaatatgcgaccatcatggtcttttatgttcttcaaccaactttaaagagcttgaatttactctaaacgatcataaacgaccactgaggtcacactgtctattcttaattttttttaattatgtgcgacgaccataaaggttccatagaatcgcacatggtagcacagtctattttgataccatgtttgaccctattcatttagttaaatttgtaattttttcttatagtttttacatttatatttttatcgttatttatttttattttttttcatttcacacattattattgtagatgtccaaaattatattaacaacagagttttcatgtatatctcgtgccattactactaatacagctgcaaaatctaaagttaccatcaaatccccgctgagtgtaataggacaacaaagtttgacaagactatttttaaacattactcccaattggatcgtctcttcgacctcgacactaaagggcttttcctaggcaccttagtcaaccagatagttttgaggagggtagattgtcaaaaaaaggatgagttatggtttttgattaatggaaaacctgtgaggttttctctctaagaatttgtaatagtaacaggattgtacactaatgctggcccaacaactgaagaaaaggagcttgtttcttctaagaacaagttaaagaaaaagtacttcaagaactcgatgtctattaaaataaaggatattagcagtgctctagatagcatatttagagaagcaaagactagggacagagttaaattgtgttttatctatttgctcagtgcatttctaataatggcaagtccttcttcgataataaatcttgaatgactacaactagtggataatctaccaataattgacaattattgttgggagaagctggcatatgagaaaataatagagcaaatcacaaaaaaaaatatgaagaataatcactctaagaaggatattatgtggaacctcttagttgtccttggatatttctaataagaaatttgattatgattatattttattcagcttatttatttttagatattttttattatattttgagacataattttgatatgagtttttcttttatagatatggatttgttaagcaatgccaaagctgagtgacatggtagggcaaagagtcccaggaaattatattcctcgatggcttggttggaaataaaaatatcacatttacaagattatcagaagaaaaataaagaaaataatattgagttatttatcgacatgcaaaattatttattgtcgtgcattaaaaaaatatgatcaaggtaacttatgttagtttcttttctttgtgtattagttttttgtgcgacctacattagctccaacctcaaaggagaaggcagaattattttatgaaaggcttggtagctgtgaggataatgcagatggcgcaattgattagttttcttcctttttagtggctgatgtgattttgtaaaatcaacagtgtattacgccacatgtggagcatccatcttcaaattttgaacctccaactatgaatgtggagcctcatcttcaaattttaaacctccaactactgatgtggaccctccctaattcactta

SEQ ID NO: 80147 - DNA, 1526 bp, Cannabis sativa
attatatcataatatataatagattaaaacttttcacctataaagaccctagtgtagcatgatcatgtcaaaaccgaaaagatggctctccgtaagtctactcctattttctactaaactaaatgctagacctttacctttaatactactacttaatagttgttagaaatgttatctgatggtagtcttaaggaaacaaaaaagatagaactcggatatccattgagcactaatttcagtagctttagccatatcacgaaagcaaaattccgtaaagctcgatgttataagaaacataagaacaagcttgatttataccatcaagcaaaataatttctgagaaagcaatactacaattacgatagcattctgttggcaagctaataaaaatacacttaaatcattctcttgtaaaactgtcaataatttagagcatagaaactatgtatgatctgccaaattccagatctaataaattagagtttagaggaagcacgtcacaatgagtctactacttataatatgcatcaccaaacatgaactacgagtttaaaatttgaaatcatccaaaaaaacaacaacaacagcaacaaagaatcggtaataaacaatcccacatagtaaaagtaatagaagattccaacaaaataaatctaaaaaattttgatagcgccttaaggcacctacatcttttccaatgtactgaagaggatgaaaaatatatctcctttactatcaagcctccatgaaacccatataccaaagctctctaatcagttctttaaccaactaaaaatttaaaatcagaaattaacattctaaatgaactgaaaaatatgcttaattctttgaccgaattgaaatcgttttttacccgaaaaacaaaaaatacccaaaatttaagaaaaggtgaacatagacctaccggaatgtatttaaattttcgcctaggaggctcgtccgatggtgtcgccgtcgtctcgtcttcagcagaaaccttgtccccattagtatctccgttcatggcggcgttttggctttgggtaattggactccacttataaagaagaagatgagaaccgttagtggtagcgttatggacgtgaatctgagagtgatttgaggaggatgtggtggtggtggcggcggtggtagacgctgttccagtactgttagaactcgatggagctatgtggacccatttcttcttccacctcctgaccggcccagtaaacaccgtcgccggaccgtaccgggtcgatgaccgcccaagccgggccccaactccctccatgaatcgattccgatccgggtaaagattattaaaaatacaaaaaggaatttaaatttaaattaaaaaaaaagaaacttggttacttttttgctgaataggaaaattgggtacttggttgcattgggtgtttctctctctctaaaacctcttctattttcttcttcctttctctctattcagaaacgtgtcgtatactttacctttaccttagagcattttcaatggccacact

SEQ ID NO: 80148 - DNA, 1415 bp, Cannabis sativa
ggcttttatttctttgggcccgtgtatatatatgtgcatatataattgttgtgaaaatttaatatacgtgcacgcagtcgtcaacaagtaataaagtgataaattaagtactgtctccacaagaattgaaaattgaaaattaattcacaaactaactactcacaaattagtgtcaacaaaaaataatatgaagtgataagaatatgtaagaatcaacaaacacaaattatgagaaaaaaaaaacaaattagaatattaaattggcttaaaaatacaaagttgatacaatgatgcaaataaatagtattgtaattaataatttttaactagaaatttagcatgtcataatcctttttctaaaatatttatgtttagattctttaattaattagcatattcttatgcccaattaagttcaacaatactaatttaagcataattagattgtaaaagtcttgtgagataatacaattacttgattcttcaaaaaaaaaattaagcataattcctttaagttatacaaagtaaataacatattctcatgtcatttataatcacacctttttaaggtaatattcatgcattattcgagcaattctactaatcctattttctctaaaatcaatattagcttaaagagagaaaaatgaaaaacaaaaaataataatggcatccacgcaaactgcaaaagcccattagagttggaaagccttataagcccattttaggccttttatgggccttgtaaaccaattgactacaagtgatatttactctttttttaatgattttggataactaacaatttctcaaattttatttggataaattcttataattaaaaaaaacaactaaaatagtttattaatgagaatccctatatatattgaaaagtgacagaaaaatacatgcaatattatataagtggaaattatgtggaatacatatacagaaaaaactatatatatacatatatgatttgtatcataatttatttatcaaattaaaaatgtttgaggctgctcatgcttatataatgacacattaattgaagcaatataatatagagatgttgttaaatgataacaaataattaagatattagcaaggaaagaaaaaaaaatactagtgtctcaaatgttatctaattattaaggtaataattataggtattcttaaaaatcataaatttaagccacttgtatagttatttttacattttggtctccttcatcactactccaatttatatatttgacaaacttaagatacatacaattcttttttctttatctatatatagaaaaatggactcatgtttttttttttaagtaggttaagtatgaaacaactgaactttgagcccattaaaaatatacttgacctttcttaaaagaaaacatatagggaattgt

SEQ ID NO: 80149 - DNA, 1521 bp, Cannabis sativa
agataaaacgaaccagctcgaatggcatttatggccgcacgacgataatcctccaccacctcaagaatttcataggtttccaaggctcgaggctcaggatacgattcaaatgacccctctggtaagagaactttccacttgtttgaaatggctttgttggttgaagatattggtgaccccccattgggttgataaactacaatatcattgtatcactcatcaaagttttgttaattggttttatttatttacatgtatatatggaataaaatgaatcatgtgttccaaaataaacaaatgagtcatgtatgatttttttttttcaccttgatgagaagcacggccagcatgccaaagttgacagaaaatgatggcaccttgatcatgaactgcatccactatcttcttccatgcctcaacctgttcttctttgtaaatcccagggacatgtgggaaactaacccaccaaaagaaaaagaaaaaaaaacgaacaaatcactcttagtacttccaaaggagaaacatctataatagacaaatactgtatatgtgcgtgtgcatatattaatacttggattggattacgttttatattaactttacgtgtttggtagaaaattagaattctgtatcaatgaaaaacaaaaatagtctggtcctacctcaaactataggcgaatattaaatagttatgaactttttaattgttacttcctaagaactaaaagccaactatatttatagaattgctagaatcactatcgaacaacaaagaatactattattgttgcaatttaatgttaaaaaggctaacttattgtacttaaaatgtgtagtttcatatgtcaccaaatagcaactatatataaatagtaaaacgtacccaggtgaggtgttggagatggaagtggcttcagtgatgagtaatcctccgttggtggacctctgtttgtagtaatcggccagggctggtccagggatttcatctatagctctgcaccttgtcattggcgcaagtaccaccctgcccaagtgccaaccacaccaaaagtaaaagtaaaagcaaaagcaaaatcagtccaaacccatatctaagtcctctgagttttccatactaacggaaatctatcgatgtggatttgggtgactaacctgtgggagagattgaagttgcccatcttgaaaggggaaaacaggtcaatccccattgttgaaatgctttctcccatttgagctggagctcaatttacaacactcacaaacaatattgatctgtatgcataagaaaaaaaaattaatgattaaattgattaaaaaaaaaaaagaaagagttatatattgctctggcgtcctccccacatagcaataattaacataatattgtgtagttattaataaaaatatcaacacttgacgttgacgtagtaattcacacatgccatttattataatattgacagttgttcgcaaaaaccaactgtaaacaatttatatttataaaatattaccttaatggctccc

SEQ ID NO: 80150 - DNA, 620 bp, Cannabis sativa
cctaagtttttctctgctgctgccgtgagttgagagaggaaatatttgaaaaagatttggttttttttttaaataagtgaggctgccgtgtgtggttatgttttagggtttgtgaataatatatcttttatattgagtttattggatctttagggttttatttaggtgggccatttttctcttgttgggccgaattttagtgtgaaagtggagagtcatagtttgactctagtttgaccgaaacatatattaagtgagaaaaggaattgaccttgattggagagagaaagcttctctttgggctgattccttttggggccgaaccataaagtggttcccttgagtgatatataattttgattggtaagacttcttgttgggctcttctgtttgggcctgaaaattattgcaattgttatttttaataataccaattattttgtggacgcataaaataataaaattttagaaaaataccaatttgcatatagtattaacttgtttctctaagtgtgttggtagaacaaataatttccaacagtggtatcagagccaagttatttccgcaaagagattcaaaataatacaataaagaagcaagtttgaaagatattgaaaat

SEQ ID NO: 80151 - DNA, 1122 bp, Cannabis sativa
atatatttatccaatatagtataaataattagttgatttggcttagttttactgtcaaaatattgtgttttcttattgtgcttttgagcttgtcgtgctaatttatattattgtgtattttttggctcaaacttatattttttgtaccgtattgtgctcgtgtctctcaaacttatactggacttgtattgcgtcaaaaagtcatacccgcatttgcaatagtagatgcttcacattattattaaaaattttgtttttgtttttgttttgttttttgtttttgtttttgtttttgtttttttttttttctacttatatacaattataaatgtaataattatattgtgttccattttattttaatgtaagcatgaaaattcaactttccacgtcaagttataggttaaaaaccatatagattggcgcccctaattaattgtattacttgatttatttgtttcttttatttatatacaaaccaacaatataaaggtgtcaactttaaactttaaaggaatacttttcttgtaaagtaagtgtctatacatacatatatatagcattgttgtaagttttgtgaccacaacaaaattttgaactacgtacgccttactcaaatttttcttttttctttggttcaaacctaacttttcgaggcaattaatataatgttttgtttcttttctttttctaaacttttgtacagattctctattatttgtgctaccgacagacagctatattatatactatagatatatatatatgtatacagtaccaataaaatagtgattggctttaatacatacacctataaatatacagagtactaatatatatataatattaaaattggccttattaaagtaaatcgaatgagaaacactttaagagaaaaatgagtagagatattagtataatttgggtatagtcacaccattaaatatttgggaattattttatatattaattttttaacttttttttttttttttaatttacggtttagatttctatagaagttacagcgctagttgcaataggggtttttgtacgattttttgttgcaatttaggttgcagcgccagttgcaataggagtttttatgtagaattccgtaaa

SEQ ID NO: 80152 - DNA, 1293 bp, Cannabis sativa
tcttcaatgtcagcaatgttcctactgctgtacattatgctataatggccgatttggctattataagttaatgaagttcaccttctattcaaaaaaaaaaaaagttccttgtttgtagtttcttttttatcaaccgaagttttaacactggtagatggtgtagctaaaaaagctagagttgctagcgagttggctattttgtatcaaagggagggtagtcccattgtgattcccatctactttcttaatcaatgaaaaagtagttctttcaaaaaaaaattacacaaaatttctttaaattgaagtaaagtattatttgttaactgcaaagacaattgtaaccccatcaaaaacataatattttatggcacgtttactatacagtattcagaattgaaataaagtaattgaaaaatataacgtaataaatgaagaataattggaattaatatttgtaatatgttgtttactaaaaatttttataaatggaatgatagtgatctatcttgtttaccttatcaggaaaagtcatcgaaatgcttaaattgactaaattatccttttgagttaaactatagtatatgctagtaattttgtaagaaatattttaaagaataaaagtgttattataaatttaatattaaaatataaaatagaaataaataaaatccataccattaattgcattccttaaaaatttggtaggcaaagttgtctctttcttttctcctttatttaatcaagttctttctttcctcaatttaataaattaaataaataaataaatgtaagggaatgacttactttctattgattctcattgcttattaataaatatgtcattaaatcgaacaacacaagccggtaataaaaaccagatacaataagtataaatcttatttttttaattgtacgtgggtctgaattatatgacaccctgtgaaagaagtacaataataagtatatgactttatagaactgtatataacaataaataacataatatgtagagcataactaaatctactgctatacaaggcaggttggaatcgggcgccatatatatatgagtaatatatatttttattattattattgttagtatatatgttttgatatatatttttttgttatacggtatattattattttttaaataatatttaaattctatcttttattgtacttttgctgacatgatatataattttattagcattttatatattttatttttatttgttgttattatatatatatttctactgcaatgtatatattttttattatatg

SEQ ID NO: 80153 - DNA, 535 bp, Cannabis sativa
tgctaaattgttacaacttggtacgcgagcccataactattgtgcaagcccatgggcttttgtacgatcccatggctattgtgggaccccatgggatgttgtgcaagcccataggtcgttgtgtgagcgtggggcatttgggtgagtcatggaacctttctgcaagtggtggagcatccattcgacccgcagttgagcacccctgctattcgatgtttagtaccttagtgatccaatgacaagaacgcgggtgaaagaaggagaggctatacatgtatggatagacgtcatgtgcaggagagtgtcaaagcgaatgcatgggggctcgcttgcgaaccaacggggggctcgcatgcaagttgtgggtgagtggtgaagggtgagcttggcatggtgagagggggtagggggctcgcacgcgagccatgtgtgcattatgtgtgcatgtgttttgtgtcgagggatgggggcttgcatgggagccaggtgtgtgtgtgtgtgtgtgtgtgtgtgtgtgtgtgtgtgtgtgtgtgtg

SEQ ID NO: 80154 - DNA, 1796 bp, Cannabis sativa
attattattttttatatataaaatattattctattatccattactataccattacaagttaatttgagcttattataatttataatatttgatttataatttaatctctttaaaaaatatattcaaatcacaggatagtatgagttatggtatattgacatcttaaaatataatataaaatttttacaatttatttgtcccaaagtaataatgcaacacacacacttcatattcatttaggttaattaagattaaaaaatttctgctgaactgttattattagatttaacgatttttgtgtaattttattaaattttactaaatcgataattgtttatgtactaaattatgattccgagactttaatttctactaaattatgtcttttaaacttgtcatgtccccaaaacttttatctatgttagatttttcttactaaaatttgataaaaattcttaaatctaacatttgtaatagtcgaaatttttttaacaagcttaaaaattcaaataacataatttaatatatcaaaattaataacaaaaattttaattagtctttattttagttatagattgattttaaataaggactacatatctattattattaatgttattaattacacacattttccttgtaatttaagacttgtgacaatgttgatgtatatcaaaaatctacaaaaatgatgatgaatataatatgtaatgccaataatgaaattaatacaattattttgataaataatgatcaactaaataaatgtcattacattacttaataatatagatgagaaagtattttaatgaggttggtgatgattagataagacattgtgtgaatgcagttaattaatataagtaagagttagttcaatttttccaatttcagaatcattatttttagtccaagtcaactatttcgggcaaccaccttgtgacaaagaatcaatcaactaataaaatataaaataaaaatagaacaaattattctgtaggaaaattataacatctatgaattgattgataatttggaattcaaataattttttatttaaaattttcattgctatatttgattacatataaaaattaaaattactaaaattacacaaatatagtcacatggttaaggagtcatagtatttttgcacgatcccatgtgggtgtttgttatataatattcctcttgctggtgagctacattgacttgtaattattaattatatttatatatttagcttcaattttaaaataaataatttaattagtttatttttcttttcaataatttgttagcttgttttctaatttacttgaattgacaaggaaaaatcataatttacttgttttctctatttattttttcatttttcttgggataagctataatttgatataggtaatgcatatccccaatataaattcatttaggtatttctattggtaaatgattattttgggttgctgtacgtaaatttaagcaatttaatcactagaggcactaatgtaattggaataatattatatgtcaataattaaggtcagccttaaaattaagtgggtcataagaaacaaaaatatatttaagcttttatttagaaaaaaaaaattatatttttcaaaattaataaaaaaaattaatatattttaaaaaagggaagaaatttttttagatttctgggctaggtgagaccttagcataggcctaactcgccgatgcatagggttaaacatatcaataatatagaaaaataaattttttgaaggcttattataaaaataaatagtatt

SEQ ID NO: 80155 - DNA, 2407 bp, Cannabis sativa
tttcagggcataaaccctaataagggtctcctctagtagggaccaagtggttgtcatcaacgggatctccatgtctcatagacgctgagaaggtcttgacatcttcaattgttagtgaaatattaaggaatcaacgcagttttgacctttatcatccccatagacggcgccaaatgatgttaattattggaaaatcaatgcatgtatatcagagagtaaaaaggtagatgaaatcatggagaaacttaagaaaaatttgcagaagaacgatggtaaaaaagtgagtatcttacattatcaacttaagagctatggttacaaggaatttccaacccctttgaatgaaaggtgagactctacttataggtgagctctaatggcttaagttacatgtggtccccatggggatagccaagtacatggtacattggtcaaatggaaaaaattagagtagtggctgcagggtgatgcatgtagcatattgttggtcgggtgtaccaggtgttgcaaagtgcatggtgatcccattactcactcagaccttgtgtccatgctttgtctaacatcatggatgagcatgcaaatatggtccccacttagtggtccaagcatggcaaaccttgtaccgtctctcttgtccaagtttgctttctcattgttcgtatttccttgccaaagattcagtgtctagacctaaagccaactttttggatcgtttgagcaccaaagaggcagtagtgtcatttttattcaagtataaatctatatccatttaagtttaattagtatatgtatataattcataataacatatattcttcatatgtagaattattaaaatcatcaaatggagataaagtttttgctcaaatcttacaaacttaatgattatagtgaagtttcaaatagcaaagatgatttatatcaagatttacacatgctatataacttaccaaaggaaacaaaaaagagttatggatcacttgaattatataaaggaaatagctttaaattactttaatgtgtggattatttatagaatttcgttaacaatttcagttattgttgcccatgtagaaaacaattttttcaaaactgaggttgatcaaatcggttaactatgtcacaagaaaaattaagtggtatatgttatttattgaaaaaaataatgggaatcttgattacaaatttacagattcttgacttatctatatggctttttttttttttttggctttttgtttttatatgtattttttttggaaatttttgtatttttaaatgtatatttatttaataaggacctccaaatttatatcgtcttagccttcatatatttagaaccgttggtgaccctattttccatctttcatggaagaattaggaaggagaggaagagaataaagtcaagagaaatagtagatgtttggttgtgacttgttagatgggtatacaaaggtaaatcattaccatatttttgagatagggagattaataatatgtaagaaattataatatgcacatacaaacctcacacacatctattaataagtaatttcaaccaatcatggatagcacttatatcaattgtatatgagtgtttatttttattatggggtgtcacttcaagcttagaaactcattttttttttgtttttctagtacgcaaaacaagaagaataagaatatatgactgcatgggctagctacatatagctaaccagctcttgacgcaattacctaagatctccaagttttgtttagtagctagaatacaaaatttccaaaataataattatatatatcactatgttatcgcttaattattatataaaataaaagtaatcaaacaaaaatgaagagacttcgttgtcttatgctgtacaacaaaattttcccaaaacttatattgacagccataataatttgaattattaatcacaagcataatttatatatatagctatctcaacatggtgagcatatccttttacattaactaagcttattatacatatatgatctatcaatatggagaaatattgaaggtaggaatattcttattctttcattacaatttcttgttaaacctagtagttaacgttacactattctacaaaccaatagtttctttaacataatatacacattatttataacgggttcatcattataaactgtaatacaaaatacgtaccactaatcatcatctcagtacgtaagaaaaagaaaaagaaaaatggggatagcagtgcttgatgccctagacaacgctcgtacacaatggtaccacgtcaccgccatagtgatcgccggaatgggcttcttcaccgacgcatacgatcttttttgcatctcagccgtctctaaactcctcggccgcctttactatttcgacccccaatca

SEQ ID NO: 80156 - DNA, 1696 bp, Cannabis sativa
  modified_base (472)..(475): a, c, t, g, unknown or other
aaaaaaactatggcctatagagacatgctacgcgtgtgagcaaatctgtttgccaacgcgttatgcgtgtcgctaaagccacgtgattacgtggctttagggacacgcataacgcgttggtaaatagatttgctcacatgcatagcgtgtcaccatacaccctttcattttttttttaaaaaaaacaattaacaataaaccctatttattaaaaaaaatattaaaaatctaaaaggttgcacgcggtttcctgtaatttcagctttctttttccataaaaattgatcaaaaatataaaatatttattaataaaaaaatgaaataaattggggtctgaacccctctttctctttcataaaaaaccctaatcgttttgtttctctatctcttctcgcctcttcccgtctctctctcttcttctcgcctcatccaagaaaggcctattccaacccaataataataataataatannnntaataataataataattctcattatcatcatcatcatccttctctttaatcgtttgggagattttttttaccctttggaaagcgcagatacaaggctaaagaaaacctcaaagctcatgatcgagcagcagaagaagaggacgactactacgattattatgacaaccaaaaaaataaacgcaaaggatatagtccttactacagaggacttttagcaaacaccaaccccagcttcctctcgcctccgtggatgcaacgagatggggttaggtgcgattggaatcgtgcgaggatcaatggtgctcaatcgcgcaagatgggttctggttagcttcctctcgcctccgtggatcactagacgagacccaagttgtgctcttcttcctccaatcttcgtcttgctctgcggtggttcactagacgagtttccattcatggagatccgagatacaccaacaaccagatctattttttcttctttttttttgtatattttttaggtttttacatgcctaaaaacttgttacagccaaaaattatttgtggagatactcaagttttagtttttctgttcatgaaaaattgttcttatttgcaggaacaatggtggcgttggttacaagcttgaaagccatggaagtcaagtgttttgcagcaaaggaggagatattgagctgtggtcagaaatagctatgagctctaaaaagagaattgaagaagatgggttggaagagagagtgtttaggaagaatttgatgggaaagtgaaggacatgggtggtaacaagataaccaatttgggatttggagggaacaaattgtttgtcaccaaaacagaccaacaaactgttgaggtttggcaaagttcatctagaggattttgatcgtataaataaagcttaattttattatttttttatcaaacaatttgtaaatatgcttgttttgtttgacaatgatattgtgatacgattcattataaattaattttttttaatataagttttgagtaattaataactctgttctagttggttctgcgattttcataccctatatatcttactccatgctgatagtgataaacaaaattatcaaagtaatattataacttaaaagcatgtctgggatattgttgtcactcgagtatacagattatttgtgtacattttttgtatttgcatcaaatattgtttatttaattaaaaatattattgttata

SEQ ID NO: 80157 - DNA, 1351 bp, Cannabis sativa
tcgtcgccgtgagaggatgaagctccgaggttgaattcagaagcgtcttcattggtggaaagttgaatctttaggacatcgaatgctcctcctgtggcacaggaaagtgtgtaatgaggatgttgttcaaactggccttaggagcttttgatggcgatgatttcattgtcaatgaacttgtaccattaaaaaataataataataataaatttaatttataaataaataataaattaaattattacattttttatttttaactaaattaaatttatcttaagtaatgtaacaacgacatacgattgacactttgaagtgataaacgacatatatagctatttggaaaaatcaatagagctctattattattttttttcaaatattgctatttgctaatgctatctaatcttcatgcatcaccaaatttcatatttttattttaaataataaatttttcatttaatagtaagaatattgtataaaaaaaaattaagattataatttaatgaattttaattttaatttctcttaaaaaacattaaaactgcaaaaaaatatagaattcaaacattaaattatatgtcattttgaaaggaaaaaaacattaaattataattatacacctataatttgtgatgaactcccttccccgtacaatataattttaattaaataaagaaaaaatatgctgtagattttgttgttaatgtaagctttttagtgataccaaaaatcttattatgtattctaaggttaggtatttgttgcagtaatcacacaaaaaacctaccaaacgagtccaatatgggcaaactagattccattgtttctgaatccgagggagaagaagaagaaacccttcaaaggtcgagttcagaggaacccagaaatcccgccaataatgatggaaaagggaaacaaggcggcgcatcagagtacgagaaacagaggctatcgagaattgcggagaacagggctagaatggaggctctgggtctgtccaaaatggcttcgtctttaatgggttcggctcagaaatcgcggaagggtaagggcaaagccaagcttactgaaaaggacgatgaagattataagcctcaagaggaggaacccacttcttctgccgatcgggaagagaacggagatgatgatgaggaggattatttgggtccaaaatcttctgtgtcaaataaaagaaaggtactttcgtgcccatatacacttaaatctttcctttgaaaaaagaaacaaaagttgtatacagttcactagtttctttgagttgatcgttctagcccatgtttgttgatcttgcgtttaggtgaagaagaaagtttcaaagtctaataag

SEQ ID NO: 80158 - DNA, 2823 bp, Cannabis sativa
taataataatatgaatattagtgggcctgggcctgggcccatgggtcatctcattacctttgggaccactaatactactgctactgttcctacggctggtgacgtgtcactcactctagggctacgccatgccggaaacatgcctgagaacaatacttctcctttttctgttagagactttggaagctgagattattttcatttttattattattcacaccattattatataatcccaaatattaatttctcaacatatatattatatatgttaattaattagcttcaagggggagaaaagagagagaggaaaaaaaaatagaattttgaattttaatttttttttcttttccttttttaaccttttcaattatattctgtgaacaacaaaggatgaagaaaaaaatacgttactgagacgtagctttacttttacattagctagctgtatggggatattattgtaattgtatagtagatattgtttttttccttttgttttttgttttctgtttttatttttttctcatattcatatccgcttcatcctttgatctcatgtgtactttaattaggtatttttaattactgtaataataataataacaacaagaaagttaacatatcatattcaagatgagaaacatgagttaagataaatttaggactcatttggagctagtatgtgttttaaataatgtacacttagggtggataaccttcaattcaatccaattgatctaattgaaccgaatctaatcgattcaatctaaattatttataaaaaaaaattagatttacaattacaattaaattaaattagatgttaaagtttggattttaattggattagatcgattattaaaatgtcaatctaaaaatacaattaaaaaatgttccaatctaattacatttatatattaaaaaattatttatataataaaaaaatacatgttaattatattttgagttttttgcagctaaacctcctcaattatcactccacttgcacttaactctctaagctcaaattttaacagtaaaatcctccaaactactaaactgtttgcaaatttaaggtgtcatccattttttacagttaactattaatatagagtgcttgtgagtacacttttgtacatgtgtcaaatttatattggtatacataatattattattttaaaaatataaaaaattatttcaaattttataatatttttttatttttttaaaatatattatttttattttttataattttataattttatttaatttaaatagtaatattagttgcaccaatataaacgtatcatgtgtactagagtgtacacataaactcatagtgacagttaaccgaatgacactttaaatttgttagttcagtaatttagagaattttaccgccgaaatttgaacttaaaatgttaaatgcgagtaaaaagatagttgggaagatttagccgcaaattttgtattgaatttgtataagacagagttgttttgtgtatttagtttttatgatgttttgttatatattctattagttgttttagctctttcaaactttcattctattacacttgtaatataatgatatattattattaatagagtattaaatttaaataaatagtaatatttaaatttaaatttaattaaccaattttaaatttagagtatgattaatctcaaaacaccgtaagtattggtaaaagtacagggtatcatttctgttctttgaaaataacatcatgagtattttaccataatttatgtcgaatatgcacatattttttgttaattataagcagataatcataatttattcattcatttagaatgttatcattaattaatcaattcatttacacagtactactacacaacttaatgcaatttatacgaaaattatcatatattatttcgttatttaatcatataattgttgtgttaattaattttttttcttttttattttgatgagaatatatatatcatattttgagtatttgacatgtgattcgatcaaaaaagattatttaacatgtgattgatttaacttttcaattaaatttataaaaagaagaaaaaaaatcttgatatgtcatcaagctatttattgttaaagcatcctacattgataatgtgttaaaactaaataatatatatatatatatatatatgatgcatggactactcttctcattgccaattagttttgagatagaattttatgcaccttaccatacacttccgcattctaacatggtatcacataaaatttaattactttgaccatttaaggattaccatattgtaatttacttaagacttaatcgttaggttacagaattatagcatatgtacgtattattatcaataaaattaaatttaattatttatttataaccgagttaaacttaattatttataccgcaaataattcaaataaaaattcattttagatgtacaataacctttagtagctaaaaaagttgagaatcaataaactagagtactctttaaagtggacaattaaaagaataatttttttaattggtgtgttggacgtgaagcatacatgagatcgattctcagttacataatttacataaattaatatgtatatatgtgtggaaagttttttttttcttttaatttaaaatgagaatttcttaaaaaaaaaatattggcgtctgaattgtggagtaggttttaggttttacaaaacaaagaaaaattccattgccatttgtatatatcaatatcatgttgtttatttattccaacatatattccacagaattaatactattcact

SEQ ID NO: 80159 - DNA, 2801 bp, Cannabis sativa
agagaaatccaaatgctatatcaagatcaataccttgtgaattttgtcacaagtaattttttgttgcgactaataactgatttagagaatatctcaaccacttaaagagaatatctcaaccataaataaatatatataacaacttttaaatttaaatttaaataaatatttattttttaaaattaattaattaatctaaaaaaacaaatccaatgagactcattatttgcagcacctctcgctgttcttacacagtgatcgacacttgtaataacaagacgatatcttctctcgaaaaattgtcccccaatttatttaaatgataaatttaaaattagttatttattacataaataaataattactattttactaatttaaaatagatttttcttcttcactttattttgcatcatccatactattgacagtgttatatagtgacgattcagagtcacatacctataatactaaactccaataaattaaattatttattgaatcttattaattaaataattctatatattaattctattattatttcactataaatatagaatttaacttttaataattatagaattatatttagtgagtttaactatagtgtgtctattgatataataaatatcagttattagtcctacatgtattggtccataattagaattggctaaattaccatttagtccttaatcacatctatatctcttagtacaattactttactagtaaaagtataatttagattcgatctaaatgtgcacatttcaattcgagaattaattacatattggtcttgtcatacataatctctattatatatgacattttcaccgaggtgtctattatactagcgatccgaattaaaattgtttgcaccaagtaacggacatcagtgaattgtactagtaatcgttaattagacatttcataactttagtatgttgctgactattttatttctagttcacgatcttaatacatacaaaaactcacaacctcatatataaattatgatatttatatagagattattaataaataactcaacattcagatatatatctcaagttataattcaaatcaaattttatttacagcctttttttaagatataaattttaatattaatatacgtacagctttcttttcttctagattatgatgtggcttcttttactctatatattggtggatatatatttaaactaagttaatgtaacaatgtaacgtgcatgtttacttagttatatttttattttttttattttagttatgtatatttttagttgtataattattattttttttttattttttgttaaaaaaatatttaaagtttgttgttaattataattttagtataactgtaatattacttttaattttataattctttttattttttaaaaatatcatactttttttctattttttataatagtattgaaaagatatttttttgactaatgaaatgatattcttttttatgttcaagataatttgttgtctggtttgattgaataaattgtttttaaagaaaaaagaaaaaaaaatggaaatgcatttttggcaacgtcgagaaagtatatgactattggattgttgacgacttatcgcatgcaatggaaatagagattgtttctaattgagatatcttggttgccatttatattttcaaattttccttttgacttttgctaaattttttttttttttttttattttattttacaatcatgccattaagccaactacttaaaataagaagaagagtaataatttgtaatcatataatagattgagaatttatagaaaaacatctttaactcctaaattgtacattctggttattcattctcaaaggacctaagtatttggtcataaatatagtatatgataaatgcagtgtcttgtttaataatatatagtgtttgagaaaatgtaaaaatataaaagccaagagtaggtataaaagattcttgcttcgactctaataataatcagtatggtgttaatcgcaataaaacttattctctttttttttctttgaaagggagcaataattaaaacttcacttatatgaaaatgtacctactataaataaataaattaacaccgtttatgtctcaaactatttttgaattgtaaataactaagtataaattattgtcatatgcaataatataaagacaaatattaacgtacaggtatagaatcttgtacttttctatcaaacccacaacattaattaaaatataatagatatgagctttcaataataataataatataaaaaacaaaaatcacgttataaatcaaattttttacatatatttatattgggcacaggattaaatatatttttattttattttcaatcaattttacaatacaaaaacatatttaattgattttttctctctcaatgagagctaattctatggcggagagaaaaaaactcagagaagggttacacacagggccaagcttgattttggagaagaaaactagaataataagcaattgatgaagcagtctttctcttctctcctcattttgagtttttctttcaaaaacgcagtttaattgtactataaaaaagaaccccactgcaaaatccttttgatttaaattaaaaacaaaatttcaaatttcaaaaatcacgctctcactgcaaaaaaaaggtttatgctcgttgcgggagagtgccttgagcaaaaacccaaaattccaatcacacactcattgtagcgaataaatatctcgttgcaaccatgactcgctcgctgagg

SEQ ID NO: 80160 - DNA, 2616 bp, Cannabis sativa
  modified_base (2493)..(2521): a, c, t, g, unknown or other
ttttttttttttttttatgttatactcctgttaatttgttgattttttattatttgcatgttattttttgatgttattttcatgttacttttatacgttttttttgttatttttgtgttatttttatggaaaaccgtaaaaatgtaaaaaaaaaaattaaacgtaaaattataattttcttacaaaaaattgtgcattatgtaattatccctaatataattatgtaaatatatatatatatatatttagtgattcaatgttaagttaaaaaatttaaatttaattttctttaaaaaattaaaaatattttagaaaatttaatttttattatatatatataaataataaatatgtatacataaatatatataagttttctaatagaagttaaatctatcattttctctacaattccagcagtaatagtaaaacgagtcaaagtgagtcaacacgacataattttttacaggtcagattaaggttgagaaaattagacacgagtcaaacaacaggttgacacgactgacacgaaatataaaagcgggtcatataaaatataacacgaacacaatatgataatatattttgctacccctactcgtacatgaactatgtggggtattaaataatatgttgagttgtaatatagtgctcattttttttatcaaacgagtgctataatattaaatatatatgatcctataggaccttctcattttaaaattggacttgaaagttttctgccaagtagctacattaaataaagctaaaaagagaatttacactttcaaaatctatataaccttcaattttctctttactcaagttcctaaagaagtgttaagcaaaaaaattcacatttaaaatatcaaaataaatacaaaacacaatttcatctatgctaaattcacaacataagagtttattgattttagcctgacccatctaagcttataagaatattctcttaattacactcttttttatttaaaggaattaccttttgattctaattatgatgatattaaatgatttgaaataatttaaggagaatttgggtgaatttagagtgaatttagaattgtagttgaattcggtaaatttaattaactgagctgtctacatacctcctttatgaaagatcaagccacttgtagtttggaatatagtattttaggatttaaatagaataattctggtatatgaccctttccagaaattatttgctatttgaaaatttagaaaaatttcgaggtgaatgacattttatagaattttaagatttattgattcatagcattttgtggtattgatgactagtgctgtaaataagagtcggactttttgacacgatacaaaatcggcacgagcacgactaggcacaaaaagatacgagcttgggtatgacatgatatgatgctacaaatcggcacaacacgacacaaaagatatgttcttaagcacgaaaggcacgacacgtaagtacgaatagactagctcgaaaaggacgacacacgacaagctcaaaaagtacgacatgacatatttaaaatttttataatttattaataataataagatataaatttatcaattataaataagttaaaataatattaaaacataaatataatactaaatatcatagttctataatataaacatgaaaaaaaaaataagattatatattaatttatttatagggtgatataaaaatttgagtatttataagtaaatattcaaattctcataatttacttgtaacacccaactagtatgtgcgtgttatcgtgattttatattaattgtacaatttgttgctaatcagcggatttatagaaaatcgtgatttattaaaacttttactcaattactctttaaatgaaaataaatatcttttacataatcggaatcccgtatttaaattatttacaatcataatacaaaatacttgatacaaaagttatcgcttagcagccatttaaaatacagcctgctgtcccaaagatcgtacgctacaagtctaaccgccttgacatgtataatcttcactcgctcgctctcacatctgcttagctttagcttttcttttacctacacatgcaaacaatatttgtgagttgaaagactcagtaagaaatgcataatcataacacagatataaacaggattacgattaggcacccatacccccaaccataacccttccccgcatcttaggcggtactgagtaaagaacgttcaaacgattgtactattgaccataatatcaacctatactcggtactcttgtcatactctagtcataccgatgtgatagcgtcaatcggcacttatgccaaacatatattcatcggtatccaatacaattctaaatgtactaataccgctattctaatgtaatctaacaagcaattaaaaacatgtacgctaaacatgtaatcacatatgcatattatgttggaattaatttttttaccaggatcttagatnnnnnnnnnnnnnnnnnnnnnnnnnnnnntaaatatgaacttctaaaacgacaaataaaaacacataaaagttaagaaaccttacagtgatggcagcggaattaagtgtctccttccactcaga

SEQ ID NO: 80161 - DNA, 642 bp, Cannabis sativa
tcgtttatggagattttaatatgtctttccccatacggcattaaatgcgaggtgacagttcaagagatctctgcacctccccgaaattgccttagcatacctcagtagaaatacttgtgctctggcctccgggagatacctccctgagatacttcccttccgcctaggacttagtcgattttttatgagttgattctcacagatccacgtgtcggccttatccaggtccacgtattttgggagaaagtaagggcaacaatatacaaatacgagtgttaaataactgtttgtaggtggtattaaaaaactataccgtgtacacggtcatggaaaaaagaattaaactaaaaacttgtcttaaatgttaaagcagataaaaaatctaccgaaatattactttataggaattgaactagatatttttcctacatcatattaatataagtatatatatcctatttttaattttgtgtggtgttttctgaatttgaattttctttgatgttaacatcaaactcaggcgcatctatgtgtatttactgcttttacattgttgcttcttcatgggagccaaatatgacactattataagaacaataatagtccttcaaaacatttttttcctttatatataattatggt

SEQ ID NO: 80162 - DNA, 1135 bp, Cannabis sativa
gacaaggatcttttaggtagaagtgtgcctgacaggttctatatggagctgacatccataaactatagatgtttcatgaagcatttggttgcgtcatctacctatcagctagagaagataggagtaacacctttcaagggtgattccacacgtaaactgacaacgaatataattctcgaggaaggcctagctaggaaatcaacctaccgaccagtggaaataccaccagaaatactagaaaaggccacatgagccttgatttcttctttaacaagcctctataaatatctcaaattgaatcctaccaacttggactcatctaatctatccgagaataaaggagcttaaacagatcgtaactgcaccctagaaaatagggatatttaccctttagtcacaccttttacagagccaattgtatcaatcttccccgtataaatagtgaatgaattcacaaggggaaaggacctagaactgaaatctcatactcacgcatctaagaccacttttctgggagaaattctatttaaacactttgagagtcatagctaaagtttgatttttcttccttagtgatctatacggtattatctcactagaaataaaacaaaagaggggagtatgtcattacccacatacaagggcgcctaacctctataaattatgtgtgttctttttatttacttactattcttaactccttattcgtgattaatcaggatctatttgactctgagttagttggcgatttttctagtcaacacacataaaaggaaccaaacaatcaatctgttaggaaagttaggatttcataattgtagatcatgttcccaggcatccatattatttgattccaaaaatagaagttgtaagaatcatcttctttgagaaactttaatgaatgaatcaaagaacctaataacatgaacaagagttcatgattactcaatgttaagaccgatctactattgatcatctttatattatgaattaggtctttatagtaaatgacatgtttgataaagatatcttaattacatattggtccttgtcatatataatctctattatatatgttgaccgaggtttttgggaaccaatataataataatatttaggaaagctgtaagaagtt

SEQ ID NO: 80163 - DNA, 1399 bp, Cannabis sativa
  modified_base (53)..(87): a, c, t, g, unknown or other
cttaaactttatatgtgtttatgtacattgttttagagattcatatttaggannnnnnnnnnnnnnnnnnnnnnnnnnnnnnnnnnntggtaaaacatattccaacagtagctcttctagtgatctttttgtactgacttctttatcatatggacatattctgttcttacaacttgctcctagtgttcttcccactggagggttgggcagagttgctggtacctagcaagtcatggggctacaggatgccttgtgactgcttgttattgacttgccctatttgggcttgtcagacagcttctttgagttttataaagtcatcagctctatccagaaactccttcatgttgttagttgagatccttcggatgtctttccagaagccgctcgatgggaggatgccccccaatatgttcgtatactggctttcttccgtaaggcttttgaccttggtggcctttgccatgaaccactggatgtaatccttcagaggttctccttgtcattgttttactttgacaaggtcttctagctatgatggtataagctttcaggatgagaattgtgtgtagaattctcggaaaaactcattccagaaattgaatcctcctggggcaagcttcaaataccattgttgagctgttcttaacaaggttgccgggaatatgcaacatcgcacgtaaccagtaatcttctagagatcaatctacatctcgaagtatttaatgtgaagtgggtcttctcgcctcgtatacatcttccataccgacatcttaaacttgggcaagggcaagagatttatgtatgtcgtgaatggtgattcccttggcctgtatagctcaaggtctgaaggttttggaccagccatgcccttaaccatgtcacttatttggtccaactgtgctcgcaccgaaggatccattgttgcagagacttgactaaccggtcctccttggaggggctgtagggtcgagtttgctagggtccatatggccatacttttggagggtgtatggtggaggtcggccagccctttattgtgttgttagccttggccggctactcctatgaagggatgctggctctagttgaccaggcttatgctagacaattgtccatggccggccagccctatacttggcaaggtttggccgctcgtgatttcccaattggacgatgttgctggtgtgttgagaagaggtacatcacaccagttactggaagtaggtggatatagatatttgaagtgatcaatttcacttctcaagttgtcactttgggtgttttcacccgctcctggtcccaatcttttgaagattggcgtttgagtggctcgctcccctctgggagggagtgtactcttctggccggccagaggtactcctgtaggtggctggcc

SEQ ID NO: 80164 - DNA, 1148 bp, Cannabis sativa
ttttttttttttaaatagaaaaattcaataatgtaagattattatatatgattatattattacttattttatagtgaaaataacatatgtctcaactaatttaggggtgaccacttattttataggtggatgtgtgtttcttgaaggtcttgggttagagtccaagtaaaacatggttgtaatatataaacgcttaaataaaaaaaaaaacaaataatttaggggtaaacttggccacaaagaaatgcaaaagacaattttatttttttttgtgtgatgattaattttgtgctaatcatataagagagatttattatatagtattcatattatttattaatttaataataaaataatattcgatttaaaattttattcataataaaacaaaatattaactttgttatatatataattttgaaaagttattaaaaccgcgcgaagcgcggtactattctctagtttaaaataaagagatatcgagattgtattatcaatttctttccctttataaatgattatattatttactaatttattattttttatataattttttttagtaagaatttttttaatataatttatatttgtatgaatttctcataatttttaaataattctataagatattaacgtagtgctgttagatgaatggtgccaaatccatttttttataaatgtcttgtttattcgctgttggactctttcataacttttgagctaacgtagtagttttatattaagcatgtgtgtcttcttttaataataataataaaaaccctactttattttatacaaaggagatgtcttgttggtgtatgaggttttgagctgtcccactagtgtactagtgtagtgtaaggattatataaactggattttaagtcggcaagggcctctctttatagtattttattttattatatatgataacaccactgaaataataactacgtaaacattatttgttttttttttttaattttttttctacttattacgtatgttataattgttattttagggctcgtttggtacgctgtattgagatttgtattaaataataagatgagtgctagtgaaactcttttttgcactctcttttacactctcttcctaattgagtgacatgtgtaactttttaa

SEQ ID NO: 80165 - DNA, 711 bp, Cannabis sativa
gtaaaaatataaaaaaaaatattatttgaacgtaaaaatataaatattttataaaaaatagtgtcttatctaattattccataaaataaagtaaagtgaatatatatactatgtaattttctcataagtttagggcgtattctagtagataaaaatagcatatgttttgtaatgatgaactatattttttgacatatctaatagataatgattttttttttctttttttattatagctcaattcaattcaattttttttttttcaaaaaataaattaaatatttagttatttatgggggccatggccacctccagctcacttgtctcccttattagttgtcttaatttttaaaggcatcacattcaaattttagtagtgattttaatattgggacttatgagttggctaaacatactactttttagttaaataatgagctttgttggttagaataaactccaacttccatttagtaatcgtctctaagatatgtttacaaatacaatatcttattcttgagaaaatataaatatataggcaatcgattttgtgcccatcttataaaattacggattgtattccgttgtactgtatagtgggtcctatctactttattattttttaatattttttgtaaccggttgttctaagtttataagaccggctaataaataaatttctttttgatttattttattatatttttgtaa

SEQ ID NO: 80166 - DNA, 1234 bp, Cannabis sativa
ttgcctcctagagtgttgccaaaagtattggtctaagacaacacttaaaaaagtgttaccttatgtcattactttaaaaacacatgttgcaacatttccattaaaagtgttgccatatttttgtatttataattttttaattttaaaaaaataattaattattatttcttattaatttctttttataattattatttcaatttcagtttatttttgtcaaaattagaaagggaatcgaaagcgtttattttcattaaaattcaagtttacaaccattttacaatacaaaaaaaattcttcataaaaaaaattgtacacaaaaatttcaacgatattcttagtctagttaatacatagcaccagtacaaaaattattttgccacaactttaattttcgaaagtcttctattccatgttcaaggcgctagaagcgattcaacttattccctgcgctaaaacaccaaagttctctgtttatggaagaaaaactacaagaaaaaaaaattagtataaggtatcaaatgataatttctttataggtaactaattcaaatatatgcatatattaatttagtatctatataccatactaatctaatataatttattacctcattatagtcgttgttcaaaaacatcaaagtatgaatgaagagaacacattgaattttttttttttttttgaaagtaattgatcaaaattatcatcatgcttaaaaaaaaattaaataaatattcaaaattaagaataaataaataaaatccaaacttgtcaatatataagagaagagaaatctactcatacattcgctaaacaattaaaccccaagcgattgctcaaaatctgatgaattcttcaaataatctaagaattattactcatatccagtattttagaagattctatatatatatatagtagttttgcatttttgttgcagctcatgtcaaaggagacagatgtaggttaaaagaggttataatccactaattaaatcagtttaagttcaaaattaaatacatggcatgtacgtgggcaatactatacttttttatatactaattgcaacacttatttagaagtgttactacagtttattattaattattttttaaatacaatttctaaaatgtgtgaattatttagcaacactttctttttaagtgtgttgaattagaaaagtaaataaattaacaacacttttttattaagtgtttttgattaagtgttgcc

SEQ ID NO: 80167 - DNA, 1135 bp, Cannabis sativa
aggaactaatgtccaggtatgattagcaattaaggcatgaaattcatgactcatagcagcattccaagtaggatccttaagagcagcgatggtggatttaggctcagttggcaatagagatttaggcagtttgtgtttcgtggcaagatacgtttttggtttatgaatctcattttgagctctagtgcgcatatgatgtattctttgaggtgcgcatattcagaggaggcaaatgaagctgacttagatgcagtagaagaagacacattttgaccaccaatagctgctgactcatgaaccgatgttgctggtgaacttggtgaagtgtcctgactagaatgcaaggcaggagcttcaagagaactgcctcaaattcaaaaactgacttagaggaagaggcatcagcaatattcatgtcaacaacaacaacattcgagtgaacaacaatattcatgtcaataacagcaacattcaagtgaataacaatattcatgtcaacaacaacaacatttgagtgaacaacaacatcaacattagagtgagactcagggataccatcattaggagaaagatacagaaggtatattagtatgaaatgtagcagtgggacaaggagcaaaaaaagaaggtacttgagaggcaaatattgatgaagagacaaaatcgggataatgtgactcatgaaaatcacattgtgagctgtaaaaactcgataaatgcatattttattattataaaaattattattaataaattaaaagatttttaatatgtcttgccgtgcttttttgtcttgttgcgtactgtgcttttcaggcttgtttattcgtgcttatgtatcatgtccttcgtgtttctcgtgtcatgtcgtgcttaaggacatatttttcatgttgtgtcgtgccaatttgtagcatcgtgttgtgtcatgcccgagcctgtattttttcgtgcctaatcgtgctcgtatttttcgggctcgtttcaatttcgtaccatgtcaaaaagtcctatctgtatttatagcactattcatacacgtgataaaacaaaaaacatacttttcacaaataaaaatttgtaaaacaccttctccaaactgtaaatcaataattttctcattctcttaaattaa

SEQ ID NO: 80168 - DNA, 2275 bp, Cannabis sativa
  modified_base (33)..(33): a, c, t, g, unknown or other
  modified_base (67)..(72): a, c, t, g, unknown or other
accatgcaatataaaatgttatttctgatcttnattaataagtaaatttgattatatgaaatgagtnnnnnntagggcataaaacccaacatctcccactttcactaaaagtaaaagcttcatattctataactcttatagacattgtatctcatttgactattcaggctaagtcatgtgaacgagaccttctacagaatgtagttatagatcccgaagaccatcacatcatcattggataaatatacagaatttgattctcgtatatttagcttatttattcttttattcgtttcaggttcatggtgttttattaatcatttaatagtctcaatattaaatatttgtttattcaaaattgatgttttgaaattaattaatctagaacccaccattagtcacatctaatatattctattaattacgataattaatgaattcaattaatctcacaactaagcaagtcaaacgttggaatgaacaattctatttcacatctttccttattttagatcattgacacgctcagatgattctattatttaagattacataattaataagaatatttatttctcatttctcaaacgataatatgtattcttaaattaatttactccttaatcttatattccaataacttgtagtaaatggatttacctcttgaatagtcttttaaatatactcctagtacatttaatactctcactcagttagcctgttcctaatttgtccactctctttgatcacttaataaagaatttttcttaatttatgttctaaaatttattacttatttaatctcattataccatgtattcctgaatttcaatagttaaataattattatattaggtacatgtatctcatactttgaataccttttaaattgtttatccaatactttgataacatctccaatttttatatgatgcattattaaatccatatataataatattatttataagtaattatacatcatagatatcaatccctttattctctaaagaatatttgatatctaataattactacttcatcaagaacctattatattttttgaatttaatcatattgaaattcaaatccaaatataataattcaaatgtccatctaatgaatttaataaccaagtcatccttctcttaatgaatatgtttctgaactatcacatatacatgtattcattaccataatcaatataatttttaatatggttagagtttctcacttattaaaaatttcatattcaatatcatcttgatgtattgagtaactattaaggctattactgtatgattattgaataatcacagtgctttgcagtttgatttcactgcaacaaacaacgaaccagagtatgaggcactcctagcaagactatggttagcactagcaatcaaagctgagtcgctcaaattctatagcgactcacaactagttgttaatcagttctctacaagtatcaagcccgaggatcaaacatggtagcacacttagcaaagctagagatctattagccaagctcaaacactactctatcgaacaagtaccacatgaactaaatgcaaatgtagattccctagccaaactagttagtatattggattccaatacactcagtgtagttcctactgaatacaaagccaaacgaagcatcaataaagactcagatcccatcctcatgattgacaacagtccttcatagatgaccttgatcgcataatacttagaataaggtatttttccaactcacttgaaagaagctaaaaagttgatgagaaaaatagcatgcttcatcatcatagatggagtaatttatagaagcgttattctatgccacttttgaggtgtgtcatgaaagaagaatccaagctcctcatagttgaggtgcatgtgaacatttgtggaaaccatggtaaggggtatagcctctcaaagaagatattaaggcaagggtatttttgacaaacaatgactgaagactcaatggactatgtcaaaaagtgtgacaggtgctgaagattgtcaaaaatacctaaagctaccccaaattgacaaaagtgtatgtaatctccctagccatttgttgtctaggaaattggcctcataggttcgctaccgaaggggaaagtgagagttcaatatgcagtagtggcagtggattacttcaccaaatgggccgaagcggaacccttagccactattacatcaaataggattcttaattttagggtcaagaacattttttgtcacttcaaactcccacaaa

SEQ ID NO: 80169 - DNA, 550 bp, Cannabis sativa
atattttgttgtgaactaaagtcacatttaatcataaaaaaattatgttgtgactaaaaagttgtcactaaaaataactattttttgtagcgaatataaaaataaaaaaacgcttaataaaaataataatgtatcatttgtttaaggaaattctttgacaataattaatttctgttgttgattatacatatgttgtcaaagtgtccaataataaaagagaaaaggaagaaaactttagcttagacgaaacaaattaattatatattcttaaaaataaaaataaaaaaaaatcataaactttttgtctctcaaaatttaggcaattaataattattaagaacctatttaattagctatagtacttacatggagagatttagttataacatgccatcatactctatttatttgtccccatctcttttagcaaatagtataagattcttgactatgattgttaataataactataattattatatataaatattggatggcagctgcatagcatatataagaaaccttcctataatttttttttttttaaaaa

SEQ ID NO: 80170 - DNA, 752 bp, Cannabis sativa
  modified_base (45)..(57): a, c, t, g, unknown or other
tttaaatagctataaataatttcgtaattaaacataaacaactgnnnnnnnnnnnnntaactaagcgggctttacattctccaactttttcatgaggaccaacctagactttaagcagacgaatcatcttcatctcagagtgatttttccactaattcaagtttctctgagtgggaagtcagtagtgattcctgagatgttgaaactcaatactaccactactacgaccagatcgatggaaaagtgtacgggcattttgtgtgggagttgaaaagaggttaaaggcaatttcatccaccctcttggatgtacaaagtctagacagacgtgcagaacacactgcctgttggtcaaccgagacctttgaagagaatctctgtgaaggctaaaatagacgtcactgttgctcgtcatagtcaaagaaagattttagaggtcaaactaatactggcccgtgcaaagcaaattgtccatgcagtattagtcgacgatccttacattgctagatacatggttgttgttaggcaagccgcagtatctgtggagcctgagaagcatgaggagcaggaggaacatgaacacccaaaggttcttgaggaagaggtggagtttgaagccgatgaataatttccctacgagggagtcgacaaggagggtcgacccactttttcatccagccaactactcatccttggtgaggattacatctacgaggagttggtggaggcagaaccgatgcctcccaagtcgaa

SEQ ID NO: 80171 - DNA, 1245 bp, Cannabis sativa
  modified_base (1218)..(1219): a, c, t, g, unknown or other
agttatattggaattgtactgggctagtttagaatgttgagttatcagtttagttaggatagctagtagtgaccgaaataccattggattatgaattagcttatatgtttaaaggagggtaaaatcatcttttgctaagactatatcttttttttttattagaaaacctagaatttattgggctgaatttaatttgttttatttgataaattagatgataaggttagataattgatgaagtaaatcaaaaattaagaaaaagtcacaaaaccttctttttccttcttcttcccttcgacagccctagaatccaattgaaaccaaataaatttcttcacaaatcaatccatttatagctgaattagctaaccctagcagctgtgcaagcttggaggtaagttcttcatcttttctctttgatttctaaagttataggctaagttcgtttgggtttttgtatgaaatcggggctataggtttaattgaatttagtgcatgatttctaaatttaattcaaggttgtttaagtttgaaattgatattttcatggctgttaggtttaatttgagtgaattgagttcaataactcagaaattcacttaattatggtgaatttgtaattttgaggtatttctaagttttgagtgttgagatacattgtatttgtggtattaagttgttatggatagtttcattaggttcggaggagatttggctggattttggttcgaaactagagttttccatttttgctgcaagaactggttaacctgttagccaacaagggaaactctaatttttttcaaaattggttatttgtttggggttttttttttcagaacttagtttagggtgttttatcgatgtttaggttatttctaaacccgtatcgattagagtttatccgattttaattttaggtcctatttcaggatttggttaagttgtttaccgagttttattgtcgtgacataggactcgggatcatcaagtattatcccgctcaggacccgggatctatttgattttcctatcttttcatattgggtaggaactgtttcatatttgctctgcagtatagctgaggacctgacacttgtatcctctttattatatgggtttccgtaaaaaaaaaaaaaatctatttttgcactttcagttcttggtcaggtcattctcatctatttacaaagagtttaggtggcgtttggttggagnnaataaaatggaatggaaaggaaacaa

SEQ ID NO: 80172 - DNA, 2081 bp, Cannabis sativa
aaccaaaaagcaaatggaaaataaccttttgcggaagagacttcatccacccaagtcccatatatgttatcaagcaatgctgttagcatctcacagttttccttggacatggttttgcgaataagttgatcaccagcactcttgtatttaccaatcctttccacttgtggctcaattcccactttgtctagcacacctacaaataatttttcatttacaaaaattaataaactgaaataaagaataatttcgatcagcaatgaacaacgctaaactaccaaataaataaaatagaatgcaagacccagcatggtcaacatacctctaataaacgatgcttgcactgtaaaaccaaacaaagaaaaataagcgcttggaggggcatatatctcttcacaagcacaggcaagataatactccttctctcgacaaacaggaacatatgccacaatgaacttacctatcagaaccattatgagtcataaactgaaaatgctttcagattaataaagtttcctcagacttcataagaaagattaaagctattaaatgcatgttcatagttcaaagctataaaaggcatgatcatgtcatatacatcactggctattctgtatttgtggcagtcctaaaattgtgattgactttaaaccataaaatacaaaaaattaccaagaaaccaaggaacatccagtatttagatcatcatgtactgtgtatattaaagtactaattcaagcactatgggaaacacctgatttcctaaaatccaatatgtgtcttcgaatttcttctatttttgcccaaccacagtttaaggaatcaatgtggagatagacaccagaaatacgaggatcataagctgctttaacaaaattttcacaaatttgaggaagagaaagtccagaagagaaacgactcttcagctgatctgatatctgaaagcaaactcccacacaacacatttatcaatactcaagtctcaaaaaatttaaaagataaggtatgtaaataactcgagctcaagatctttcaaacacatagcgaaagtttcttttcacctacactgtttctgcactagaataagattatctcaaattccaattctctaaatttgttttcagctaactcctttcaatctaactttctgacaaatgcatacatacgtacatgtatcgaaactgaaagaggagaaaagataagaacacctggccgcgcaatttcatagtgagaacactgcctttgcggacacgttcccagggtaaagcaacaagcatgcgaagcttgacgacaaaggtcttccataatccaggcttctcgaactgaaactcaccgcttggatacacctcatcagaaattttcactgcctcactattaaccttaacctcagagtcattttctttaccgtccttctccagtcgctgctctttttcatctccggtctttgcttccgaggaggaggaatcgaaagcttgagccgaaaagtttctagaaggttcgcgaagcgaggaggaagaggaaagcgctagggggccgcgaagactatggcgtcgaaaaggaaggcgagagagcggcgaaggaattggaaaaggcttggggacggagaggattgcggtgacggcagagcggtgtaatggagaggtgaggtgagaagtctgtagaagaagaagtttggccatagttgagttgagctgtctaagagtgagaacgatcctctctgactgtctccgccgaaggaggaggaatccggaaggaatgggccaatcatgctgccgggaaacggtaagaaaagaaggatgacaaggttaagtttttcccacgtcaccctattacatgggtcgctttctctctctctctctctcttttcaattttttttttttttttgacaatttttcatatgggtttcttaaatatctttaagtaccacttttttttattattaactgttaatcagaatatttatttcagtaaactggacaatgatatttgatatgtgacaagaaagaaaacatcacgaagttgagtagtcccgagtcatagtagtgagggtctctaaccctgtacccaggttaacttcacg

SEQ ID NO: 80173 - DNA, 627 bp, Cannabis sativa
caagttgggctaatttcaacatatacatcactctttcactatatatctctcttttttctgtaagtaaattttatttctatcaaacaaacactacaaccgaattccaaacaaagaatctgtacaaaaaaaggcaaaagccaacacccaactatacatgtaactcctcaacgcaatgtctatctacaatagtgatttaatcagtcaaaaatttataacatctttcttaattctcaaaatcttacaatgaattactctagtaactttatgatcccataaagcctcatttcgattaaaagaatgagcctttgaagattaaaagaaagaaccatccatcccattgtaaccaacaagccttctcataagccttccataatcaagaatcttaaaatgaagagcccatgtgagataatctcatatatatctttccatattctcctacagaagccatcgacaactcaaattttgcacggacaactgtcggtgcaatcctgaacttgaaaatggttgtcaaaactgccctgataggaaacaaaactacatatttgcggtaaactctttaattatatattttttttaaaaaaatttaatacgttttatatttatatattgtttaataatttaagtaaa

SEQ ID NO: 80174 - DNA, 3329 bp, Cannabis sativa
gtcggtttatgctgaaacgacaatctttttccattttattcattgtgtgtgtgaaaaaagaaaaccctgaatttattttggaattttgtgcaataaatgtgtaaataaatgaaaaaagaaacatttttttataatgaaaaaagaaacatttgatattgaagatttcgattgtttgtcatttaaaacaccaaataactttcaataaacatgagcatcatatatcaactactcaattttttaaattttagcagatgtactatttaatgagctaaagtttttaagatattataactcattttcatttattttttaaaaaatcattttaagagttttaagaaaagtgtctgtaaattgatggcggatggtatggatactagtatttgtggaactttggatccctcatattaaagatttttttccgaaatcaaatgaatcttttgctactggtctaagcaaagttactgattttttatctatcaatggtggttgggatatccacaagttgaataacctctttgatagagagacttattatacgatcttaaaaggtgatatcccctctagtcaagacaaagataagtgggtttggactcttgaaagtaatagtcgtttctcgtgcaaatctatctaccttacgcaggccataaatagggctcctatctgtgaggttgctccgtcgctctagaataaactttggaatagcataattttggagcgccataaggttctttggtggtgtatcttgtctagtgctctcccaattcggtctgtgatcagaaaaagatttcatattgaggatgtgagctaccttttgtgtgggatgggggaagaatctttagaacacttatgtctatcctgcgatgtggcttttcatgcttggcggtcctctccttgggggtatttatcatgtttgtgacactagtattcgcatgtgagactgggtcaaattcatttgggaccttaaacacagggaaattgttgctgaggaggttttcctttatgcatcgattattgttgacaccatcaggcgaattcgcaatgacaaggtacataataattacagtagatgtgaagaactgtattgactctatttgcacttcttttgcaaatttacatgcttctttttcccttcccctgctacgtgcttgaaggaggtttggactcctccccttcaggagtggattaagttgaattatgatgttaaagtggggttagaaagtatgtgtactgcagttatagtcaggaaccatcttgtagggtggtttaggttcaaacgtctcggttggactttactaatgcattatgcagagaagcagcgacttgctgtttggctttatcggttgcaaaggatattggttccaagtttgttattgtggagagcgactcgaggatagttattaatgctctcaatgagaaggagtctcactaggcaattaaaaactatgtctcattttataatagttattatccattgtttactagttgttttttctctaatattagtaggacttgtaattttaatgcctataatgtggtaaagttggcgtttactcactataggtttggttttattctgatatcaactattcttataaacatattatgtaatgaccgtgaggtttaattgtgtttatttattcaagtacacttttcttcaaaaaaaaaaaaatagagatataattcaactttgtagctattataccttatttattaagagtgctcttaaatagttatttactactctatctaaacgaaacataaacaaacgacaacatacgtattgtcgttttatattaaaccacagatacacaccttagaattttcaactagataagcaaactttacaatataaacttagcaagagaaaagtaattcattacacaaaaaaaaaaagataaatcacaattcacaaattgcatatactgtgtaacccatttattctttttatttttctctttcacaacaacaaaataatatatacacaaaacccaaccaaattatctaaatgaaaatatatgatatttaattaaaactacaaatctcttctgcaaatccaagtttagagcctttagtatcataaataaccctttgattcttctgttgataatttccaataataccaatttcttcttcataagccaaacttgccaaagccaaacaaatctgagaagcatcagttttaaccatatacaaaacaccagtcacatcaatactcaactcagcagcatttccatcaaactgcattttcaatgttggaaggttgatttgatcatacccactcagattgaaacacgtgtccaatattgaaaatccaggtgctgaaggaaacccagaaaattgtttcacaaactcttctttcacaaccttgtaaactgatggagctagtcttgttatgactgtaccagaatcaatcaaaatcccacctttaccaaaagaattattagaagaagaatttgaaagtgataatgccactccaccaacactaattccagtcatgttgagaaaatagaaagtgggcagttgtggattttgtaccattttggtaaataaaattggtgttgaatttttgtaagtagatgagtcaaatcccataactaatgagcctgaagcattaggctctgtacttgaaggtaaacaataagagaaaactcctttaaacaatgaatcagtttgagaaattaatgagagatcacttcttcctaaccccattagtcctgaggctccaccaaacaagcccttgttgtttctaccacacccgaaaacaaagccatttacaggagttgttccgagtttgagatgttcactaccaatttcgccacttgtgtatgatccatcgccatagctaaccatgtagttgcagctagtgctaggcggtttcgagtatccacattcacctacaaaaggaggccaaagtagaaatttaagtaaaataattgaagtatgatattcgtacttgtttagtattgaactgggatcgagacaacaaaagtttttttcgaaaaaaagttcacatttactttgttgaagcttcggaatttcctaagaattaacttagcgaaatcgttcaacaatcgttagatcaataactaaattgatcaatattgaactgggatcgagacaacaaaaattcttctattaaaaaattgaagtacaactggtctgcttcgagattttctaagaataaacttagtaaaattttatgataaagttgattgaacgatttttaataattaaaaaaggaaaatacatcaaatcaagcctaaagtacattaaaatttgatcaaaatttgtttcatttctaaaaacaaaatctattacttatgtattat

SEQ ID NO: 80175 - DNA, 3814 bp, Cannabis sativa
ttgttacataacaacttcctaactgaaaataacagctcactacccaactccaactaacaaacactacaccttaacaatcttaataatgtctaaacaaattaatataattttatttactaacagataaataagatcttgatgattgatatttttttatctgccagtcaaagtttaattatttgatatacaacagtataatgaaacaattagatagatatctgcttctcgtgcaattaaagtatccttgaaactatactgtgctcgaccaaacgtgaaaaataaaaagaatgaaagtaaagcaataaagattaaactagtggtcaagaaaggaatgatgataaccaaaaaactctggctaagcttcgctttgctaaaacacagttgggagttgcgacttttaaaaatagatggtaaaaaaaaaaacaagaactattcttaaataaagccaatttacactctctttttttttttttgaattgtaggttaaagagtctcacgttgctaatatgtaaaaagataatacaatatataagaggaataggctattcctttcattgccaattggttttgagatgtaaccccattatattatcccaaaccctaacattgtatgccaacataggtaagtaaaatatcaatctaaatttaggaaattacatcatatactattttttttttaaaaaaaattacggtttaggttgctccggtagtttctcggttagtttctatgtggattgctatgtgcattttgattacgctttaggttgctctgttagttgctatgagaatttctatataaaattatatatatatatattcatataaaaactattttaaagttaaaaaataaaaaaaacctctataaaatttaccattaaggaatattttaaaatatctaaattaaattaacgaaatatataaccattggtgtaagttatatagtattatgtgttagatttttttttggatttacattcatttttagtgattaatagtcaatggatttagtatctatgtgtgtaaagtctagttaaagtaaaagtataattttttctagttaactgaagtctttgatgagcagacctagtccaattaaggttatgtagctaagtatcctccctagctctataaatacataatgtctcatcataattctacactttagataatcagataaataaaattgcttctgatttagaaatataaagagaaagacttagttgatagtattgcactatcgaattgcaccaattgttatgaatcaatcaagtatgtatatttaaatgtatatatatacattatagtattctatattatatataaattcatatcttgggattattaatttttctaacatgttgtatcagattacatattgtatatgatttaggacctataatttattcaacaattaattaatatatgttaattttctcaaatcatattgatttcgctattattatatgttaaattttttatgtattgatcttaaatctttaagagttttgttcctcattaaattttctttttgatgatatattatattcataaaattatttagtaaattgcgagaattttcaaattaaaattttaaagattttatgattgtattatgaaattaattttgggtttttttgattctattgaatattgattaaaattcattgtgcgaatctcattcttgactaatttacaatatttctacgtgatttattttttaaattggttcagaaacatatcacaatcgagttattttttgttcttaaaattttgaatgggtttcaatctgatttacaattctttagatgctaatactcaaaattaacaccaccgatctcttaaaaacttaatactgagtaaaactcatcaaaaatcgtgtgttttcatcatgtgtttgtgatttttttcttcagagttattagaatttaatttctaatttttgagtgatttttatttaattttttgactccttttaataattattattattttaatgataattatgcagctaaaagattattaaaataattttttatgattgtaaaagttttatttaatcatatttttcaatacatcctttggttagcaaaggttggcatagctattaagaacaatattgtagtgcacctaaacttatagggcgttacaactaacttgttactaattttactaactaattactcactagtaattagtttgtaataaattaacttgttggtaattagttattcataaaaattatataactagtaagtagttaaataattaaatgtttaatcttgtagtatttctctattttgtaagttttgagatcaatttgtaaggatctgaattatttggtattgatcggtttagctagctagaggtatacattcactaactttttttattaattaattatgaatgttttgaagagtttgaatatctcaaatattcatcgtagtgaaatatgttctgcgatctattgtactgcggtcggatgggtcgaataatttgcatgttagatgagtttgaatatcttaaatattcatctatactgaagtaagttctacgaatatatgtattgcaatcgaatgaatagtaaatttttgtattgctaaatattgatgtgatggttttatcatgtttatgattgttttttgttgttattaatagcttttaatttttttgaaatatttaattgtagtcgttatgctactggaattttagtaaaattaagtctggttactacttaattatttattatactataattagttattagttagtaatttaaggtaaaattagttactagttagttacaaattatataaataataactagttgtaagaaactagttagtaatatgaaaacaatatttattttaaactattcttactctaatttagaaagtaaaactttattccaaatataaaagaaatgcctgtataaatgcaagctaagccaagaatcgaaagaacaaacttgacacatgagaaatctagagatataattaggaggttaataatgacatagagagagagactaagaataaaagttgtattggattcttgttcttctgcaaaagttatcacaccaaaaaaaatatagctggtttagcttttaggttcgttttttaaatttaccattgtcttggtttctcatgttgtctatataggttccttcatattatgtcataaaagttaaaaagtcatttttcaatatttgaaagaaaccttctctcaattgctaccattttttaaaatcgttattggaagttaactagcttagtttagttcaaataactcataacttcagatcaccaaattccacgttataactcaagtcatatgacaaatcctaaaaacgtcactcacacattgccaattatatttgggtagaaaacataaaatatcattaatatatttttgaatatcattaatatatgctatcttataatctgtagcgcaacactcttaattttcatatagatgttacacaatttctcatttaagcaattattttggtttttctctgaaaatatatcttcagaagcattaatcagtgtggtagtcatgttttatttatgttttttttttaattaattcgaatgtaactctaataatatttgtttaccgaaatttcagtataatgtttatttatggcatctcatacacacatagtcataattggaaaagatgtacaataagtgacgttatgtgattttattagaagtcaatgcatgctttttcgtatgaatgctttcttataagttataatttacttttataagaatttttttttttcatatttagataactcttaaatacttag

SEQ ID NO: 80176 - DNA, 2872 bp, Cannabis sativa
ttttttttttcttataataaaattatatcattaaatatatcatcattaaatgtcttaaattgttttagataattaaatacaaattttagtaaatataaactaataaactatctccctagtaattatataagccttagctgtaaaaattcctaaatattaataaatctcagtatatatataataatatgacttttttgtgtgtaatatttttgtaagtaacaacatcaaacttaaaagaaaatgtatgattatttattaaaattataaataaaaaaaaaggattaaaattacttgcaattattattcattaaaaaaaaaatagttcttttatcaaaaaatataaattttattaaaataaaatttattattatttgaagatacctttctctcattgctcccgggctccatcctcaccaccaagtaaccggggctaatcaagtccggcaacaaagtcaagaactccgtctccgtcacaatagggtgcgccgaatggatcaaaccacccaaagagtcgctatactcaaacttcccaacagtctcaagtgtttcagggtcgataattatcgaacccttctgagtttctgtcaaacagacaactctgccgtcgcccaacttgacaacgccagtattagcgttgtcagtgagcgatgagcctgacaagagattcgcgagttctcctatatacgccaaaaaattatcagttttgggtgtttcagagaactcgcgataacaaagcttgttattcttcttagctgccttgtaggcatccgattctacttggcggtggcccgcgataaggtggccgtctcgaaagttgagcttgacgagagtggcgtagccgtcgaataagtggcggaaatcgtaatttcctatgtgccacaagccaggaccattccttaggtacgtcccattctgcatgaaagatctgcatgaaagaataaaaaaaaataattaataaaataaaataaataataattattttttgaataacttttgtgggatttataaaaatatttagtggaaaaaaatatataataatttgaagtagtgtagtagtgttgggacaaaacataagtattggtttagaaggtaataattatttaaaatataatttagacaaaatgtagtgcaagacataataaagcatatatagtttgagattaatattgagcaatatttaaatatatgtatatatttatttttaattattaaaccaaagaatatgctttgttagtatctttgatttggacacatatgacgatactatagtattcaggtgattaatcaaatgtattttaatataacatgacatattaatagttgttagtcactaacacactctcttaattaattatacttatatatatatatatattcatatatacatgtagggacaaaaccgacaacccttatgaattttaattaagctaaatatgctatgaaaaactcgaatattgcatgccttacttcatataactaaaatataaaaaaaaattatacaaatatatatatatatatttatatatataggaactctattttcttttttaaaatgtcaaaattggaatatttacataattaatatttaaagaatttttaactgagtggtgtatttaattttttgcatataatttatgatattaaaatcaaagtacaaatatatttatataaattattcaatttttttttttttaaaattaataactataatatataaataatatatagtagtgaatattatatatgtaccagccatagtggtatatctccatcaacaagaagctctccttcccatctttcttggcgaacactggtccacgcaacatgatgatcggagccgctccattcacggcgaaggctcttcttctccggcggctgtagaggtggtgggaccggcgaagtttttggcataattggaggagttgccacgttcattattttactattattaatagtaataatagccttctttgaaatcttatgatgatgaagtttatgatggtctcttattgttatattattattataataataataattagagtttatcatagctgctgaagatgagattaaggaagtcattagagactaattaatatatatatttatatatatatatattgagaagtgtagaggaggagtttgaagctaattatattatttcctttttaattgagagaaaatatatagtgaagatataattaatcgagatatgaatgaatgaatgaaagatgtgtgtgtatttataagggcggtttttggagcatgtattgtttatatatataaatttattattatatataaaaaatattatgatggaatctagattggtggaaattccttttcactacaagacacaatggttacacattattgttattaggtgttatggtgctcgatattgagaatggttagtgattttttataataattatgtgggatttaatgcttaaatatattaataacccgcgttatggtatttcgtagtggataaaaattaggggaattatctcatgtattattttttttaattttttttaatttacggtttgagttacttcagtggtttctatgtggattgctatatgaattttggttgcggtttagattgattcgttaattgctatagaattttgtaaaaatacaaaaaaaaatatatatatatattttgaagtgtaaaaataaaaaaatctctaaaatttaatgatattctgactaaagaatatttatatatatacagaagcaattaccaaaaaagaaaaaaatactatatatacataaatgggaaataatctaattaaatatttctaatatatatattttgtcatatagcatttttattttcaatttttgagaaattttgaacaattta

SEQ ID NO: 80177 - DNA, 3664 bp, Cannabis sativa
agagtaggaaaagtacttaagatatctcttgacaaatgcaattgttcgggttgtaggggaagaggattgttcttttcaccttcaagcctgggattttactatttagttaaataattaatgattaatgacataagtgaaacaataagactaagtaattcatctaatctaagatacacactaaaccactcaagctaacctcaaacggtggtaacaaataaacaataattgaatatcattttcatggtttttaatttataacacatacacacactttatacctatatgttaagatcaagaaaacatccttcataacattcattcagatgggacaatataatgtatatgtatatatactcaaaatcaaaatacttaggcacatttggataattgagtaagtgtactttgtagaaattttttgaagatgagaacatatcgtactattttttctataaattttgtcaaagttttcttctctattatttttccctcgtttgatttgcttctccctttttataaactcatttttatgatatgtatttagaaagtggagaggtgaatggtaagtagttattatttatatatatatatatataataaatgaagaaaaaaaaacgattcaacacacatgataatatagccaactatgacccgaatttaagagcaacaacaacagaagttaagtaacactcactaacctcgaagaaatactacttggatgggcatcagttccatcccagaggaagcccatccattcgcctttaaactcttggacgtgaattacctttgagagagaatatgaagggtgaaagttgatcaaaaacttagttacatacaaatttgacaataataagttaaagcaaagagtattaagtaaagtatagttttaaacatagtaaaacaaattaccttgcaagccaaatcagcaaatttaccttcctttagttccctcatcaatgagaagttatttgaatctatcatgtatacgacacatttatgaatatcgcagttttatatatctattatataattagtaaaatcacataataggtacaaaaatttagaatacatagttttagatacctacattatttttcttttaatctattttcatatcattccataatttttgttatacttttgttagcaaaactaagcttgaacatctacaaataaaaaaggtagctaatatgaaggttctttgatcccgtataagaactttactttatatgtaaacatattcagatacctcttgcacacccccaggaatctagtagactactagacttatgtatgagcatgtgtggtttgtttaagagattcaaccacacatttgccccttctacataactaaaagaaaaatgccaagttaacaagtttaccttgaatccatgtttctccttaatgcaaaatttaaagaaagctcctaaggaagccaactccctcaagttcttattctactaacttctataatattacaagttcagaattcaatttcaattgttaatgtgcctctatcatgaatttttcataagaaagttaaataatttagatacttataaataaagatggctaattttatagttgtgtaccacaaaattgagctaccttcatcaaactgaagatcaataaaccattttcgcatgcgtgttatgagcttcttgtctacatctctctggataaatattgggtaagtttgataaggaagaaacccttcactgtcatttctatcgtatatagcaaaggtagaggacttcttattaaagacagcatatacttctccaccatgagttttcatctgtaagaatataacttcatgttcaaatacaccacactttaaacaaaaccatctattcatatcggtaaagtttttatcctatggatgaatgtcttccctcaagttttgttacttttgttccactaagtcaaataaaaatgcaggtaaatgtatcattaattactcttatgaaaatttaattatttaaaatataagaatccttttgaaatggtgttacaccttaatatcagtctcatcagtatagttttttttttgctgaaaataaaggggaacacatggtgcagatcccttccccaccctttcgatagctttaacaattatggggaccacatgccaactataaaggtcttatacctcatccttccttagttggatcatcggtatgcatctcaagggttcccattccattcagtatggcgccgccacaacaagttagcctcccaaaaggccaagcattatccctcccaatgaagggttgagtgagattcaaacccttaacccaagcaatgaatgatgccagtaaagttgattagtctcattagtatagttgactatgattttagaggctaagttgttaaattctaagttcctttaagtgagctatcctatagtcctaaggtgttaaaacagttaaacgagtataaataaagggttgatcaattgtaagggtggaggaagtgttttgttacaaagtgagtaaaacatttacttggggagacaccaaactgtctcgaaaagtttggaactttgtaatttctctttgatatcaataaaatacctattttctaactgtttcaagtattggattagatcaatagtgtatcaaatagtacaacaaatgcatattttaaactagtctgttgaaaaacacattctaatatctataaaatatgttcttcactcttctttttcgcctttttttatcagcaattcaaatactttagtggttataagctacgcacatttatgataataaacaaaacaaaaaataattactactacaaacaaagtaataccataacattggaaagctgaattatatctccaaatgaggctacatgaggaagcattccgaaatgctcagcaaacatattaacaggaagcccgggtttctcatacgatccatcaactatctttattgtgcagaaacaatctgcaaaatcatcacacaacacaaatccaacaaacatacatacattaaagaagaaattcacaaatcattatcacatatttaaatactgccagacccaacaaaagcaaaacaaaagagcaacccacatattaaaatgaataaataggaatcttctcccttgaattttgtcacttaataaaatcatactcctcaaattattagcaatattaactactctctctcaactataaaagttagtaagttaagagtcttttgttagacttagttaaatgattagcaattttatcccggaagtatgaccactatcctcgaattattagcaatgttaaatattctctctcaactataaaacttagtaggttatgagatttttgttagactttgttaaacaattagcaattttaccttgaaagtatgaccaatatcatattttgtccccaaacttttaccacttttacatctaagaacttctattaaataaaaggagcacaatttggtagttgtcaaaatataatagtggctataatttggggttttcggacaaagttcatggagcaaaaatatctatttattctattaaaattgcaccaagtacaagcaatgttcataacaaaaacaaaaggaagattttttttgaaagattgagtggctcagataaaaaaaacctttgctgcaaagtcattcatcattctactaccgaccgacaatggcggcgg

SEQ ID NO: 80178 - DNA, 1248 bp, Cannabis sativa
cttctttctttagtgtgcctttactggttccaagggacgcctcttttgctgtaccacaggcatgtctttgttcacatttaacacgtgacaaatttcctttgggtctatcccgatcatatccttgtgatacgacacaaagacatcagccgactctttgatggtgcttatgatttcttttttgacgttgggataaaggcctttctcgatgcaaataattttagtcaaatcttggtcactaatttaaatttcttctgtttcttccattggttgtagtgctttttctaccctacttgaaggtctaacttctcttctttacactggttgatccctatttctatcttggttgactactaggatcgactgtttgatggctacattgtaacacattctggcctcttttttgtctcctcgaactgtccccaccccacggagtgagtagggaacttgaggcataggtgttggatcaaatttatagctccaaaatctaccaacgtcggtcgtcctaagatgtagggaagtctacaacaataaatgtataatatttgaatgtgcttttgggagtatcaagacacaatgtggtaggaagccacacttttctcatggggatgagggagtccccattgaagtcggtgagttatgagtcactaggggctaagtcttggtccgtgaggtcgatggaaaggaatgtattttggaacaaagtgttcaccgagctcccgttttcaactaggatatgggccactaccttattagctatgggtgtcttgatgaccaatggatcatggtgggggaaaattacacggttttagcatcttcttcagtgaatattatgggttaatccatgagtcgggttctctgagcaagcaactggcttacttccaatacttcatcaacacgatctagcgcttgagcataatgtttcaactcattgcaggtcgttcttctgatgtgggccaatgctcgggttcgaggttccaagtctggggtctgggtctgggtccaattccaccgccgagtccagggttggggacaggttcgagtcgaggttgggtccgagtccaagtctgacttcgtggtccgatgcctggtctggggttcgtgtctgggttggggcccaggcctgaaactggagtccgaattcaggtctaggtgtgggtcctggtcgggtcttgttcatatcggggtctcaaagtattgaagtttgtttttaaaaaataaaataaaaataaaaattatttttaaaaaata

SEQ ID NO: 80179 - DNA, 1055 bp, Cannabis sativa
tctctctctctctctctaccacacgacactttatctctgtagagaaaggtgtcaagactacgtttctacatggtgggtgatcttgaagagtagatactcattcatgaggcaatcgccatgttatgtagagaaagggaaagaggatcgtgtttgtctattaaagcggtcactctatggtttaaaacagctacctaggcaacggtataaaagatttgatgattatgtaatcaaatatagtttcaagaggagtgcctttgacaattttgtgtatgtcaaaaatgagaagttccctatttttctaattctatatgttgatgacatgctcattgcaagcaagaacatgagtgaaatatacaaagtaaagaagttgttgaacaaggagtttaagatgaaagaccttagttcactaagatgaattttgggaattaaaattgagaaagacaaaaagaaaagaaccttcaaactctctcaaagtggatacactaccaaaattcttgagaagtttgggtttgctgatttgaaaccagtcagcacaccactttcacaaaattttagacggtcatgctcacagacaccaagtacagatgaagaatgcagctacatggagtcatttcgctacaccagtggagttggcagtatcatgtacatcatggtctgcacaagaccaaacatttgtcatagagttagtgttgtgagtagacttatgagcaaaccagggcaagaacattggaatgtagttaagtggattatgagatatctaaaaaggcctataaatactagactgctatatggcttgaacacaatgaatgagggtgttgaaggctatgtagattttgactatgttggggatctagacatcaagagatcacagtcaggctatgtattcatgcttcatgaatgtacaattaactgaaaagctaacctccaaacaatgatagctctttccactattgaagctgaatacataatttgtgtagaagctgtcaaagaaggaatttggttgaagggaatcacaagagaactccaaacaatggtagctctttccactattgaag

SEQ ID NO: 80180 - DNA, 1442 bp, Cannabis sativa
ttttgttttagggtgtgggaaatggagaataaatagatggacatgtgggaaatagaaaagaagtaggtgggcatgtggaaaatatggcgtgaagtaggtaacgattttttattgggctattatacccgactgtttaaaaccgtcgcctataagagactaataaattttacgaattcaactttaaaccgtcgcctattcctgtaattactgtcataaaccgtcgggaatactaatttttcctgacggttttaaacggttacttaatttttttagtgacagtcccccaaaaaatacatttttaggaccgtcgcgaattgtgacttttgtagtagtgttgtgatgtcgattgggctagtgatccagaagacagaatgtctacttcaggattcaccatcttctttggcaacaatttaataagttggcaatgtgagaaaaacatagtgtgtctcggtctagcatagaagcagaatatcgaaatttagctcaagttgtttctaaaataacttggttgcactctcttttctctaaactccatgtgcacctacctagacctcccattatctagtgtgataacatgagcacaattctcctaactgctaatccagtcttgcatgcccaaaccaaatatattgaacttgatttatattttgtttgagaaaaattatctcaagaaatggttcgtattcaacttttcctagttgttgctcaaatagctgatggtcttacaaaggctattactagctcaagattgaatcaattcaaagacaaacttgaaattactgacaacaccaattctaaagtttgtgggggtgtgtcaagacagttagaaaactaactgttattatgttagttagctcttgattgtttggtttcggttaaggttttgttattgctttgtattttatataaagtgtattttctaatcaatgtaagagattcttctttttgtttcaatctctctctctttccttctctttctttcctttctttttcttcttctctctttactatgttcttgtgtttatgtaacaataatgacgaataaccatagttctaataatgttgatgttggagagttgaagtgcttaattagttactttgtttttcctttattgaactttaattattcccacactagtaaattaaagtaaagatttaacttttaaagtttttacatagttactgaaattttttcatcgtcaatgaaccaaatatcaaattttgacaatgaatgattattactattttttctgaagaaataaataagtattaaggcatgtgtagtttcctagataaaattaaattctttccacttaaagaaacacatccgtacattttctgtaatgaccgctctagtatttggattagtaaaggcaattagcactaatttttattatcttattattatttgtgaattaaatttaaatgtggaccccaatatt

SEQ ID NO: 80181 - DNA, 1226 bp, Cannabis sativa
ttattccgcatttaattaatcaattaattaaataatcaaactgggaatattaaaatacggaattttaaacaacaaataaaatagacaaagaagactactcttaagtcttacccaagccccaagcagagacagagagaggatgagaagatgagatgagcaccgtgcagtggttctaaatctacaaatttttaattttttaatttttattttctttttttctttttgtttcttcttcttccttctttttcatcaacttaatttgttttctagtcttctttattttggtttaattcatttttgggttcatattttcagaaatgaaagacctcaccagtcgtatatgctcgaaacttgtaaagaaggaaggatatattgctatatggcagtaggtctgccagccttctttaggtataggtgcaacttggtcaaagttgtgttttgccattgcgattcgatttttgctactacgattagtcttgtctctatgacatggtttcgagtgttttaatcttgacatggttttgggtattttaatcttgacatgattttgagtgtttcagtattgtctgtgtgacatcattttattttgttttattttgtttcgtcgttggtttctctttattcttcaatgactcgacatcaaatcattgttagtggttgggaataacaagttctctgcgagtgaaggggttgttaatagtgtagctacttaccttgcataatagtcaacaatttctattgttgtgtcttcttagcggtaaatgaaactaaatatgtgttatttgaatgactacaaagtccagtatgccttgaaatttgaagtaacttacaagtacatgaaagacttaatgtatcgccctggagttattagaaatgataagcgtgcaaggttctttttgtctacacttgcgaagaagccaaatgaatttactcccttgtttgtgactttattaaagaagaatgtttgtgttgatcctagtcccacaccaaattctgttaagcacactcatagcgaggttaggagttttgttccaaaaataaatctagaggtgttggttgccgatgtgttacctgaattaaacactatgatgtcgagtgctgatgttatagcacaaatgcccttcattgatggtttttttgatggtccagaccctgaatgttatgttgagggtaatgatgatgtaagagatgaccaagatacagaggtctgttggaaattattttac

SEQ ID NO: 80182 - DNA, 1902 bp, Cannabis sativa
  modified_base (847)..(852): a, c, t, g, unknown or other
atcaccgctagcccagccacccaccttccacggctacgcgccagccccgcccacttttggatctccttcgcctaccatcagtggcatcccgccttcctctgacatctctacgccaccttcgggaggcaaccacacaactgttatagcagtatgcgtgtcccttggtggtgctttcttcttggcattcatcttggttggcctgatttgtcttgctaagaagaagaagaagccggttttgattccggctgcagctgcctgtgcatcatcatcatcatcagactctgatgaagaaagtggccatggaagtggaactgctcgtcatggagccgccgaaggcgctgcagtcgttggtggaggaggatctccaaaccgatcatctggccatggttcagggcatcaacgaagtagttactaaagggaatattattaattacttcgtgaaatgcatgcatgcatattgatttgtttcataatttattaaattttatcattctaaatatctggttgaattttgattgcttggatttgttgatattgtaattttgtggttttcaattatattctgattctttcagttcccatagtaaaaactgttgagcgtacatcatgtgagactgtcatgttaattttgtctatagtatttgtaagtagttatcactattttttagtggcatctaataattttaatttttggcagctatacatgataattgaaatatttacaaaagaaaagaaaaatgttacttttatcagaacattttgcaattgcgcggaaaaaaaaatcaaaattttaccagtgcacatttgcagtggctaaaatctaacttttaccagcgcatttacatgnnnnnnaaagtcatttttgccagcgcttttcattttgtgctgacaaaagttctaataccaacgttgatttgccaatcctttctgccgacacattaaaagtaatttttattatattagcgcaatactaaatttttaccagcacaaaaatatgttggcaaaagtgacatttcttgtgatattataaaatcataccacttaaaaattattatttagcataaaaaattattttataataatgcataattataaacttaatttaaaatttaataatataataaataattttattaaaaatataagaaaataaatgaaaaaaatatataattcaatatattataactaaatataataattaaataataaataacataaatatataaagaaaataatttatttatatggtgatgcaaattttattgtattataaaaagattgtgtcaaatttatattaatttttgacaattagagctcatatttctttttctaagtgaattgtatatttcaattttatattatttatttgtatcttactctcacacattctttatactatacattaatgtttattttctttctaatcaaactaattcgacattcatacattctatacaaatactatacattgaggttttatcttctaaccgaacttaattattttttgtttaaatatatgcacaactaaatcaaacataacaaatataaattaggagcattattataaaattcgagaataaaaatttgtaagagaatgaacagaatttgtttctatgatctttatactattttattcctgtattgtttactcgtttttgggttgattttcgttcatttttttttaagtctcgcattttcaatactcaaaaatgtgttgtcgacatttgattgaatttatttttgtattttagtgtaaaaatgagcttttcaagtgactattttgtttatgttaaaaaaaaaaagtgattattttgttagattttgtgccctaaataaaactaatttcaatataatcagatatactaattaataaaaattagaaatcattctattttgcatagt

SEQ ID NO: 80183 - DNA, 601 bp, Cannabis sativa
ggaaatgaaatataaaggaataagggaaacaaaaaggcaaaacgcggtttgtggtttggattggagaagagttttgagttgtggaatcaggactgactcagtcatttgtttgaaatggttttatatgtcatgttttaacaatagcattgctagtagccaccagtagtgtcttgcactttcttgacatgtcacattgcgattggctaccgataatttttaaaaattattatattaaattatatgagacccaacacttagttgaaccaatagcgatattaacataagaaagtacttgagaccacatatgcgcctttagtatttctctttaagaaatagtgtacacacacgtacaacagaactagccgtgtgagaggtcaggtcagtccagctgagctgagtagtaagtactacatttttttaaaaaaaaaaaaaaaagaaaatgtgaaacccaacttatacgtatgcacactcacttccaaatctcccaacgtgtctgaatattctctttcttcttaattttcctttttattatgtaataaatatgagagaataatgttgtaaaattagttgctgcaaggaaaaaatgctgtaaaattaactg

SEQ ID NO: 80184 - DNA, 1266 bp, Cannabis sativa
gcaacaacagatggataaatagtcttttttattactattattttgatgacaaggctatttaagcttattataatggtgttttgctgctacttagttctaatattacagatggggagtatacatacagtgaatttaactccacattgtgcactttagtaagtttagttagtttttatcgccaatataaaaaatgtaaatatttatttatttaattattatatgaatttatgtaattttgcctccaataacaaataataggacatttgtttgtcatacctataatttaggtggtaaatattggctgcaaatattccatttccatctaaccaaattaagtaaggccagctttaagagggagggaggccgaggtaggcggtgcagccgtggcaatgacatgaaaaatgagtaaagtccaataacaaataataaaaaggtgttggcttggcttaattttgaccacaataactttatcctttaccatcaccaaagacccatcattatcctcaatgagtctgacaaaagtggagagaagcagagagatcctcaatcatgaagaatagatgtgtcattattaattggaaactagaatctaggttagagacgtggacatacccccaaaactctggagacaaaacaccacccaaattgaaccatgtgccacattcatatttgttaacaaccattttatatatttatatatatattcactgttttttactccttcacgtttggatttcgaatacggtaaagggataagcttagactgagcttgggcttagattaggtcctttctctctcttccttacaaaagcttccttctttccttcttttgtttgtatgtttgtaggattaataacactttttcagtcaaaaaagcattaattagctgagaatcttttcaagtcttatttttttcttatctttcttctgtctgggttcttgagtttagagttcaaggatatataggaataggataatataataaacacttgaaaaaatccctaactgggtctgcaaggaagaaagaggaaagtgaagatgttggaaggaaaagccttgatcgaggacactgacatgcctgttaagatgcagatgcaagccatggccgctgcttctcaagctctagatatctttgatgtttttgactgcagatctattgctgcccacataaaacaggtctctctctctcccactctctctgtctatacgcacacatatatatatatatacatatatcttaaactgagctgttaggtttgatttatg

SEQ ID NO: 80185 - DNA, 2961 bp, Cannabis sativa
cctaatatatataaatatatatttatatttatcttactcgcgcatgcatagtgagagctgtcattcatacacgtcatcttaacttatacacattaatttatggatactaatcctaggtatcaaattaattaataattttgttttaagtattaatattatgtgtcaggctataatcaattattgagattcttgtgttaagttaagttgcttcttaattaatagaaaaaaaaaaatagattcttctgtcaaacactaatgtctcattaaattctaattaaaaagacttgctcactgatagtgaatttgtgattaggcaaaatggcctaattttatattacttcagaaatagattttgtgtttcatatagagctgttaaggaaaagtgaattttatggtttaaaagattcttaaaaaacatgcacaaattattttcattgaaatataagagacacaaatacataaatttatacataagttcaaaagtatttatttataatgtttgagtttagactatctttaatagttatactaatttagtatagaatctacactaatttggcatagaattttttattaattttagtacaacaacgtccaataattcacactaaatatcacacaaaatatcgaatattttacttaaaaaatctcgcattttacattatttacattaataacttaaaataattaattaattatataattatatcaaatttattagtaaaaatttaaaatcttaaaataatttagtaaaataaaatatttatgaatttaaacattataatttatatatatagaaaaactcattaaaattctatagttgctcctaatatacacgactatgttaaaaataagcaaaccatgattattcattgcacccgagtaccataaaaatgtaccaagatctgaaactctattattggtagtgcaaaatgaagaaagatgtggtagattatgtgtcaaaatgtttaactttttaacagatcaaagcagaacatgaaaaactggcagggttactgcaacctttaacgcttcctgaggggaagtgggagaaaattataatggactttgtggttgatttacctagaaccacgtgaacgtatgattcggtatgagtcatagtggatcatttcacaaagtcactgcacgttttaccggtaaagataacttataatacagtggctagtatgcaaaattctacgtaaaagagatagttcatcttcatggagctccgaaatccatcattttggacagagatctgaaatttacatcgaaattttggataagtctttagagatctatgggtacaaagctaaaatttagcacaacttttcacccacagatagatgggcagtttgaaaggataattcagatacttgatgagttgttgtgagcctttgttatggaatttgaaggttcttggagtaagtatttgcctctaatagaattttccaaaacagttatcagagtacaataggaatggctccctatgaaatgttgtatggtaggaaatgtctttctccaattcattgggatgagataagagaaagcaaatgtttaggtcctgagttaatagagaaaatcaatgctcgatgcttgcttttcaaagcaggcaaaaaagttattctgatcctaagcgcatagacatagagttttaggtgggagaacatgttttcctacgagtctcaccaatgaagggtgtaaagtggtttgggaagagatgtaagttaagccctaggttcataggaccattcgagatactcgagaaggtcgagcaggtaggttattccctagccttaccaccagcattatcagctgtgtataatgtagttcatatttctctgttaaggaaatacgtgtcagaaccgacccatgccttgagatacgaagccctagaactacagtataatttttcctatgaggattcaaatcctcgataggaaggaaaatgttctctggaacaagaccatactttggtcaaaatactctggagtaacagtaaggtggaggaagccacctaggaattagagtttggcatgagggctaattatccagagttattcaggttagattttgaggacgaaatctttttaacagggggataattgtaatgaccgtatgattagaatatggtttagtaaggttattagcattaattataaatattttatgactatgcatgattttatttgttgtgggtctcatttttaggaaatgggcactagagttataatttctcaattttgaagattttattaatgtaataactaaaatattttgctattgttttctattacattagtctatatatctcaatgtggaaatagtaattatgtagaatttgtcttaattttctaaaaatgttacaagtgatgtaattctttattaaaataaagtgacaagtattttttttattgggccttgtaagttacgttgtgatagtataaagtgattagattaattattaaaattttatgcaagtgtgccattaattagagtaagtacatttgaatgatatatgttgatatatatatatataatataaataatatatagtatttataaattatggtttaatcaagtggatgtgtaccctaacagttataagaccaggtggcactttgcatggaaacatgttttgatttaaggcttaatcgtataaggcatacatgtggattaatccactaagactcttaagtacatcaagttatcaagtccaagccttgatcatccatatatacatggcttgttgagatttaaaagaatttgaattttgaatatcttgcacgtgggctactagtgtgggagtcataaattgatgtacttaagagtcgtagtggattaattaaagtaaatataatctgataaggtaattaagattaagaatatattatttgaaatttaaatttaaattctagctatgatttatatgactagcttaagaatcggtaacttccttac

SEQ ID NO: 80186 - DNA, 1536 bp, Cannabis sativa
gagagagagagagaaagagagattcctttggtgggtcaagaggaaagaaagaagagaagagaagagaatagttgcttgtgagagtttgcttgggaatgataatgatagggtaaaagtttgttaaacaaagaaaaatatgaaagtgaaaggttctatacaactgtccaagagctagtatctttattaagattttatttatattatattaataaaaattatatatttttattttcccataaaatgaatattccttgtatcttgtggttttcatagtatgctactacacaactattattctaatttgatatgagtgaagttactagctagttccaagtcattttcttctattattacaaaaaagatattataaatagcaaaatgctaaaagagttggaggttatttgaaaaaccatcaagcattcaaaactcgtttttttatggggaagaaaattttcattaaaagccttcttctttggttgccaaaagagaaatttatttgtattcttttctatttcatgtttcaatagtgacaaaatcacaaggcttataagagtatctccaatgataaaattttaaagaatacggtaagatggacatattatgtgataaaatattgagatgttatactattagagaaaaaaaaatgtcattctaaaaatttgcattaatgatatgttgtagcattgatgctattcatttttttaataaaaaattgaagttaaaaaattattgtagctaaaaattaggatatatattaaataataatgtgtgagatcataattatagtatttttaaagaatgttatacattgaagtgtttttagaagtaagagtaccaaaaatgatgtgaaaaaaagataaaataaaatattatatttttaagcaaagtaaaaaataaaaatgaaggtttcaatttttgaaaagattttttttatgtaaatttagtttttcttattaatatttactaattaatacaaattaccttcataaatttaaagggatgaaggtttaaaaaaataaggaaaaggggaaaaaaaaatggtattattgactttaaaaataacttgactaaatttgaaggttaaaagttatgttgcaatgaatccaaccgacaaaataaatttaatgtattttaattttatttttttgtttgacgaaaattgtttaatgtattttgatataatcaaaacgacaaatatatttatatgtactataacttgttaatatgtgattgagtgagtacatgaaacaatttgttaagtacataatctgaatcatgccattcaaatattaatttaaataagtcaaagctttgaaaacgattttaataaaatgagattgttttgtactcttcatattaaaaccatgagcattgttattagatatcagtagtgcttagtactttcttgatatgtcgcgttacgattagccaacgatactccttaaaatatattatattaaattatatgaaacacgatacttaattgtaatattgatataggatcatgttaggcactactgatgtcttttagcattt

SEQ ID NO: 80187 - DNA, 1490 bp, Cannabis sativa
atcaaggagacttaatcaaagatagatcaacactcacaatattatgatcttgcaggtctgttaaaaagttatcagaggaactttatctctcgcttgttaaaaatttatttaagtaaaacctataatactataaactgagaatttcttgagaggcttcttaaagcgtaccacttccctactcggtttattcaatggattatggtatgtttgcagaatactccttatgccttagtactgcatagtaaaatacaaggacaattcaaggtgttaaaggcctcacacaaatatcccatctctcctttctatttgttctaatcatggagtttctaactcgtctgcttaagcaacactctataaagacacaattcagataccattcaatgtttaagagtctttagttagtgagtctttgttttgcagatgacttaattgtcttttgcaaaggaaatgtgccttccaggaatttagtaactattcaggtcttgtagcaaacaagagcaagtcaacattctacttcgttggggtgcaaaatgaagtgaaacaagccatgttagagttgctgccttttcaagagaggttgttccctatgaaatacttgggaatgaaccttaagctaatgaaatagagattctcagattgcaaggtgatctttaataaagcttcaggtgaagcttcatacgtgggcaagtcaatatttatcattttccgggcattctttttttatttatttagtcctaatgggtataatttcttcttactttctcaaaagattaaacatttatgtttaaaatcgaacatgttttttaactaattaaatatttatgtttttttaatacatttataacaaacaaattgataattctaacaaaaaaaaaaatacttatttcaacaattagaagattcccaaaatgagttcataaattttagctataatatattaaataaaaaaaatcaaattaaaatatcaaaacatattaatatattataaaacgtagtattgacattgaatgaaattaatattttgtgttttagtgtaaatcttatcaaaaaattgttctattttattagaaaaaatataaagttgcattaaaagaaattcaagtcctcatcctatataaaacgatgtaaacaaatactaaacagattatatttaactctatggaccaacactcactccctatacacctgtatacaaacataatattttgaatctaagaaacaatacttacccttgcaaaaaaaaaaaaaaaaatacacaatgcttacatttgcttagaaaatgctaattagtgataaacagaatactaatgaagtagagtagttttgcaagaaataatgcttgcccatctcaactttttatcatttgcattagaaagctcctaacctgatgtttctgcaaccattttagttgaccttcagcttctatatcaaaagaaattccagattaagcactttcagattctgatgtctggccttctgcattcaatttt

SEQ ID NO: 80188 - DNA, 789 bp, Cannabis sativa
cctatatggtctcagtttataaccaagacttaaaaggttaaataacctcttaagtcttggttataaaccaaggccaaagagaatcaaaacttaaaaagaaaaatcaccccaaacccaaaccctttaccttatttcatttctcttcttccccaaaccaaaatccctttagctctactcgtctcttcttagcgtcactctcatctcatctctctcgccaccagccccaacccctgtcgtcgaacccccaacaccaacaacgaccgtcgaaaccctaccctcactgtcggacccccttgcaccagcaaatggagcaccaatgacgaaccccctcgtggattacatattttaataaactgtacacactcgacgaaatagtttaggatgattgggtgaaattcattgagtaggatgtacttttcttatcctaattagttctaggataaatatagtactttggtatactatttattgaatttagtataagtaagatgtgatgttctagctatttaatttttattgatattttatgttaattttgaaatcttatattgttgttgaggaaattgacatataattacaattctcactgctaataatattgtgttgttttaaaattgacactaaaaaaaactgtatcggttataaagcaacgtaaaaggaaaaaaaaaaaaaatcataaaatagtctttttggtgtcgttttataaatgacactaaagaatctttaagtatcggttataaaatgatactaaaactcaatagtgttagttttaaactgacactaaaagaa

SEQ ID NO: 80189 - DNA, 2174 bp, Cannabis sativa
  modified_base (2085)..(2104): a, c, t, g, unknown or other
tctctctctctctctatctctccatctctctactctgatcatggttcttgaaatgataagtgttggtggtatttataggcttaggattaagatcctaaagttggtggttgcaagaggttaggttgttaagttagttaggcaataaccagctaaaccaactctcctttgagagcgagatctccacgtcagcataagtaagagtgcatccgagagcatatatgagggattccgaaaacacggaccaaagcactcgctaaaggagcttcccagataaaaaagagctagttgtagtcgattattagggactcccttctaggaggaacaactagccatccagaatttctttccgaaggagggctagctttcctcaggactacacccagagtggacatgatgatcatccaggaactctcttccagatggcaaccatcattctacgagacttcttttagattgacatgatagttatccgggaatgtactttcgaaagacaaataactttttaggaataacttttggagatcttttcatttggagaaactatacaacaaatttgacctagttaattcaaatcaaaagtatgacgatgatgaagaaagaatgcaatcatggtgtaatatgactgcatagttttatttgagaattaacagataattagagtttaatttaagaatacacttttaattatttttttcacaattatagagatatatttaaattctaggtgtataatttatgatataggtgaaattttataattttcatattttatgcacaataataatggaatgcgacatatggcctgtatagtcactcagatttagtttggtaccttagaaatagaggagcaatatagttagacattgaatatgtcagattattttagggttatagttttagatcgtattacccctaatttttaagtttacttcatgttgaagaaagaaagtaaattagtaataattttaccataattaatttgcttttaatggagttatatgggattatctttagataattagattttatttttaatgatattagtaaatattttaggtttattttccttaagttcaaaaatagaaaattaagaaaaaaaatcaatctccttctcctctctcttatttgaccaccttctagagccaaggggatcaaatttttctttagcaatttctagctgatctcaaggggttttagttaagaaattcataggcatgtcataatccagttgatgaatctagcaggaaaacaaagctgtctcagcagatcttcaacaaatagcaagtcaacagtatcatatactttgctcagatctatcttcatgatgcatctcgctgatatgttctttcttgtataccccttcaggagatcctgaaagatcgtgatattatgagctagaagtctattcttgacgaaagcaccttggttaccttggacaagaatatgaagaacttctgagagcctagaacaaatcaatttggagatacacttatatatggtgttgcatgcaacaggctatgggtctatagtcttttgccgtgcttggatcaataacttttgggattaaggaaatgatagtttcattcagatccttaggcatgtatccattggcatagaaatcaagaacagctctagaaatttcattacctatctaactccacatgtctttaaagaatccagagccaaagccatccaacccaggactttagcagaggggatactgaacattgctttcttaacattctctgttgtgaagggtctgataagtctaacttgctgctccacacttaggcaattcccttgggcaatacagttttgatcaatgctagaaattgcagagcttttatttcccataaatttctcaaaatgacccacaaagtgtttaacaacttcctcaaagtcatctataatagaatcatccttggagtaggttgttatcctgttatccaacttccttttcctcatggcagcatgaaagtagttagagttctcataattaaactttaaccacttcatcttactttgctgagaaataaaaagggataacctgttttgggcagtaagaaactgttggaaattattttnnnnnnnnnnnnnnnnnnnnacaagtatgttggattaacaaccttatgaattctaaaacaatgaaaataaacacatataaagttagaaaa

SEQ ID NO: 80190 - DNA, 1835 bp, Cannabis sativa
gagaggctcacgggtgtattagacttcaccttagtattgtctgtatcagatgcaatttgctgggagggagaggcagtatcattgccagccctctgctgggagagacaatgtattgaattagatgaacttggtgatgagttgggctttgtattggggcgaaataacagtccatctgaagccttcctttttcttggcccatgtaaatgctcttgcactttaaagtcttctatgtcaataatagggttaaaaagggtaggctctctatgaaacttatccacagttaaggcccccataagtaactctcgggctttgggctgggcccaacacgcgtttgaaggccagtcaatacattgggcctggcttcccaggatcgagtgattaggatccatcaactcatgacgaggtatactatgattggtgaagttttttgctctgttatatcagttgtcgtcttccccaggggcttctcaaaagagatatcggtttggccaccttttgcattgcaagtatttgtttccaccaaagaggaattatccccatttgtccccatcacaagtgctggcccatgcatgcttgatgatccctggtcaccatcgctggctagtttctttttggtctgagcggctgtatattgttcagccgcctcctgcaattcttgaatggagaccaattttgaattattaccaaatggggcaatttcaccaatacccgggaggtaaactaatgggagttgggtaatgaccagttccgattgtgagtcaccgccggcctcctcttcatctgtaacgatcctcttcttccccggatattgtcttcggcattcccttatttctgcagcttcaccattttgaatggctttgtgtaccttcatctggttccgaaggataggatcatgacataatcgcttttgcaaaacccagtcttggaaccatttagcaagagggttgagaaggttgatttctctgaagcatcattttaagccataccccaaacattggataggaattaccattcgcatccttaatgattgttggagatttgaagcatacactctggtcatgagttagaacaccacatttaaaacaaagcttgggtaggcgttcatatttatactggaggcacaagtctttaagtctctgtcgccttaggaagaaacccgaaaaaagtggtttattaatgtcgattgtggctcggaatcgaagggtactcataccaattgcgtctttaactccgggagggagttcatacacaggggatgccttggaagccagttctttaagattagaaaggttccagtagaaggggggatgctttcaatgtgaacccacattggggttttatcaaaccagacttcagaaggggagagccatgcaggccagggcgtgatcactattaaggctccacagatgaaccagggtctcctagcaagaacatttaatgcgtcctctctgcgtgcaaatgtgaattggataatgccatctccaatttctttccatttccagcctttaatggcattccatgagagtttcagagagccttggatggctgcttttccaaacttgtggcggctaataatcttacccagtaagacttggttagcttcttagggttcatcaacttcccctgggttgagggcaaacgtaatgtcatcatgggatgtctgcacagagtcttcgaacaggtcacagaccttcaacggatccattccaaatggtgtcaacagtgtgaacttcagaatgggagagagcaaatctctattacttcaatgaagtgagctcttggagagcatttattacaactattactcaatatctattacttcaatgaagtgagct

SEQ ID NO: 80191 - DNA, 2089 bp, Cannabis sativa
  modified_base (217)..(233): a, c, t, g, unknown or other
aaaaagttttgactaattataaaaaacaacattcttatgttgtgactaaaaagtccgtggttaaaagtattaatcacaaaaattacaatctgttgtgactaaatatgtttgggacccatatatttttagtcacaatacttgttatgactaaaactaaattagtgacaacttgtagctaaatgctatattttagtcacaagtaatattttgttgtgannnnnnnnnnnnnnnnntcacaaaaaatttatgttgtaactaaaaagttgtcactaaaattaactattttttgtagttatagaattcattttctaaattctacaatataaaaaataatagcaatgatttcatatgtagaaccctgtaaaataacacacttcaaaccttttgtacaagataagtagtataattataattttcattgatgtatgcggttgctacaaaataatataatttatgggtcaaatagattcatattgttactaaaattaacacaaatttaaaatctaactgaaccaatggctggtcgaacttaatgataaatctattgtgaaccattaattgtgatataaattacaaaatataaatttaatataatattaattaatgataataagaatattaacaacttcagaatgtcctaaataatatttaacaaccttttaattatgttattaatacttgacattaattttttaagtgttattaataatgtctaatgtcattttttcaaatgtcatctaacctaattttttacaacattaaaatgaaaatgtcataaatattgtgtcgtaaaaaatattttttgatgtagtgaaataattatgctatagggaagaaaaaaaaatacagtaataattttaaaccaacttacatttatttataaacttatataacagtagtactaagcaaacataaatctacaattaggacacttcttaagcctacagtttaatatattttgcatacactctgggtgaaacacatgaccgcaagggaattttcttacggtatctccctcttcgtattcacctaggcatattggacattcttctacttcagtttctgcattttctccatacgaatacttgtcttcaggaaatgcatctattgtaagcacgggtgcaatttgttcgggtgcattttgtgaaggtaaatccactgccggtgcattatcttcaggtgcattttgcactgataattgcacagatggattttcttcgtcattgtgaaaatcagcgcgatgtacagtatgaatgcatttaattattaaaattaaaaaaaatactccaattaaaaaaagcatgagcaaaatttccccattttgattgtcatagtcatcatggctaagatcacgtttgagactctgtggtacaacggtaggaagtagtaccattaccatacagatggtgaagaaataaatactaagagccattgctgcaaaaataatttaaaatattaataataataataataatagttaatacataatatgcataaaaaagtatatatattgatcatatatatcacacactcatatttattaatgtcttttttaaactatccttgatattaattttattagagtctttataagtaagagcctaatcatcttattaacatgtactagcagatatgagattttttaattttttgctttcacaaatttatgaaagattgcaaatcacaaaatatatctatattcaaatgtggaatatcccaacaattataacttgatcgagataatagtaatacatataacagtaattatataatagtaaataacaattataaattgatcgagataatagtaattatattgctagcaatatatatatgatagtaattattaattcttatatttagaacataattctagtaaataacaagagtagtatatatatataatattataactaggtttgatcatatatatgttaaaaaaaaaagatgtatagctatagggatcgatcatataatataaaaaaggttttaaaaaaaaataataacaaacaatttaaagaaaaaactatgtactcattgaacaattaaatttttccaaaaatgataatataatatatttatatatata

SEQ ID NO: 80192 - DNA, 3568 bp, Cannabis sativa
ttgcaataggggtatctatgtagaatttcgtaaaaatgaaaaaaaaataaataaaaaactgttttcaagtgtaaaaatgaaaaagcccttaaatttatatagctaaatgatattacttttccttacaaatatgagacctttaattccaatttagtcctggcctaatatcaaaaataataaaaaattatcatttaacattagagttagtggatcaataaatattacaaaatatagggtctaaaataatatatacttttatgataataaaaataatataaatttaactttgtatttatttggttaaggaaaattgcagcataagtccctaaaaagttcagtttgatacagataagtttttaatcttgaaaattggtggtaataatccccaagctcccaattctcgttagtccattagtacatgtttaccgagattttcagcaactgaatatttttagaccttaagaaagaaataacataataaataacaaatacgagatttttacgtagttcaggtgttaactatcattagtccacaagtctatttcattaggctcattgaccggtaaatgttcatacagattggtacacaatggacaaaaactctattagttgatcaaaagtgtaatatcttgatagtaattctccacttgattcgtaatcagtatagtgttgtcattccaatggtcattactctgtaccaaaatttgtagaggttccatgtcctgaaatttgtgtattcgttataattttttagtatcaatagttgcaaacaacaattttaatctaataaaaaaacttataaacaactattttgttctcaataaacattaaataatttctaatttaactgtatttgtatttattttttcttaaaaaaaaaaaaaaaactaattcttatatttttttttcaaattgtgttcatagttctaaacaactattttcatcgatcaaaacaattgttaaacaactactttttaacaatcaacaataaatgagatttaattcaacagtagttgttcacttgtacacaaacaatcattataatcctcgaaacaacatatatatatatatatgaaatacttctcaataaaatatagttgattatatttgtatatttttagttataatctaatctcatttatttattaaaatcaatcaattttttatatcattaattatttatctgattttttaaaatttaaaaaatatttacaaccatgaagaaaatttttcaaaataatttaattaggaagaaaatcattaaaaaaaaatttgtaccttgtatttgttctctgattcatttctgggtaagcattgaagtttatctgatcttcttgtattcaaattctctgaccaatgtgatttgaatttttgattttaggttatttttgtatgtttttttcttatcaatagaggtagaaattcctgtgttctttttttttttttttttttgcctattttaccttttgtatttggatttgtcgggagtagattatttttttatagttaagatctacattttgttgcagctaaatttcgtgggtgttgaatgaaaatcgtggagatttaagataggtgtcgttcggctaggtcacgaagaaggaagagctgctctcgtgatttttgttgacaccgtattttttaaaatttaaagttttctttcctatttttgtttattttccctttctagggtaaaattgtaaattggtgcctttaattgcttattatagaaaaaatcctttaaaataatattctaactataaaatattcttcaaaataataaaataatacatacaaatatttaaaaggaaagttctaataataaacttataaatttttttcttctcatatatacatatataatactatttttataatatatatacgtatgttttatcttacaaatattatttcttttgctacatattttattatgccaatatctctcttcttagtccttctctcctcataaatatataaaatgttattagtcttcatagatattttaatccatcattaagatacaactttgttttttcttttagaggagagatgcccttaagaaaagagaagaacaactagattacatgggtaatctccaatcctaattgcagcttgatctaaccttagagctaattttgcgattttgtgggaaaagtattagcagtgcgcttaacatgagtgatcgaggcattagggacgtgagataaagccgatttaattaagttgatgaggtctccaaatagagagatgtcttattttgccgctgctattgtgtttgtgactgctttgcagtcagtttcaatctgatgaagagggaagcactcttctatgcactagtgaagagatttgagaatagactttgcttcaaggattgcagcgtctcctccccctatatgaggaaaagctatcgctgcaacgacacctccctcactattgcgaattactccaccaagacttgctttgatgtggtcatgcaaggaagccacattcgtattaagcttgagaaggccacgaaggtgagggggggaatccatgtgctgtggcagcagaattggctttggggtctggtgtgctatgggtagtagttgtagctttgtgttctgccaggtagtttttcagcgagatgggggatggcatgaggctgatccgtcgtttaatgcttgatctccttattcttgttatgccagataaactaagaaatacaaaggaaaaactccacttcttctttgttcatgttagagaaaatattaaaaaaaaaatcatgaaaataaacagtagttgaaagagataagtagggatagaaaatagtacatttccaaactcttctaactctcttgtaaaagaacaagacatgaggaattgattcaatctctctattacaacggccacaaagtggggattgggtaatctttcttagttggaagggtggatgtggaagctctatacgtaaagtgtttcaacttagatgggagattgagatgccaaagagctttccaccaaggagatcgagaagacgaggatgggatatcaggaggggaactatttgaatagcttaagtggtagcctatttttgccgagtaagtttccgattttgtgaatttccaaatgagcttgtcttccatgggtagaagagggaagggatagaaagaatgtgttcgacaatatgagggtgataacactggttgagacaagtgatatcccaggtcacgttgtcctttatgaaagaagcaacactgttagggataaggggtttggtgggaatcaattgaaagaggatatccaacaatcatgaattagagatgtgttcttaccattactgatttttgtgataaggcctttctgtagcaattcttttctctattgaatgctttgccaaacaaaagaggaggagtggccaagggtacaattgatatggtttagataatgcagcaatgatttggccatcatggtttctaacaattgctccaattcctagaacttttgctgatatattcactgttgcatctgttggaaattattttaccaggatcttagagctactcgcaagtatgttgattaacaccct

SEQ ID NO: 80193 - DNA, 2414 bp, Cannabis sativa
  modified_base (2355)..(2355): a, c, t, g, unknown or other
ttttttgctttagttattaaccctaatcagaacccacactattatttggctaggaaattttagcgtcaatttttaattggtgctatggagaaagtaataacgtcgattactaattaattaacctacacaaagcaacatcgttaatatttaaattataaaaagtgtcttaattgcatcggttattaactgacactaaacccaataagtcagttataataaagtgaagtacaaagcctaactttttttcgaaaagaaaaacccaaaattaaagaaaaatactccatttgataaaataaccctaatatataacatatttttttttcttcgggtttcatcattaacgatccctccccagatttttgctctcgatcagctccctagcccacgtcgtaacgaccccaatcgtctcttctctctagtcacacatctcttttatgtgtgatcccaccaaagtcacatcgtcgactcatgattaccattgagaggggaaatagctaggtcgtgagtcgacgatatggctttgatgatgcttatgtttactccatttgcgtcactcaaataggcgtcggttataccaactaatattagttacttttttatatccaccccaaaaggcatttgtattatagtctattaacacatattataatgatctcattatttacatctatgtatataaaatattacattaacaatgttaataattattattattattcaataaaaaattaattcttattatttatatataataataagtggagtggtgtgtaaagaatgagatgtgtatagtagtggtctattgataattgggtggtagacttgtctgtttcaatgtatgaatctctctcattattcatatatcttttatataaattatatgttcaattcgaactcgaacatatatataaatatatcacttatatatattattcaaagcatatatataaatattcagttcatcaatattggctcaagaataatattacaaaagacataaaacgtacgacaatttcattttattattatatatatatgctatttgtgacatgtcgaaaaactctggatagtatatttaattatttgatcgatatatatatatatataattattatgttgatcaataatttttctgagcaaagctacaaacttttttctaattacagaagaacaaaccaacattattttctctttttgatatttatatagatcctcttgtctagtcttatttgtgtttggtttaatataaatatataatagagcaaacacaaagaacattgaataaacaaaacccaagttgaattttttattttttatttttttaaaaaattcaatctgttatgtttttggagatttttattgcaagtacttgtactaatatttattgtcaattatataatgggcttttgaagctctaaaaaataaaaatattgaggaaattatattgtatattcagtttactttatttgttttaatttttatctttatttttgtatttttttaattaagatatacatacttttatagataatgtccttattatatctcttaaattaatataaattatgtgctaaatttaaatgaggagtgatgatatattggataacctactcataaaagtgaatatatgttaataaaatataatagatgatatttttgattaatggataaaaaaaaattctaatcaacttaccccagaaatatttttgttatttgagtttgataacgagtgaattttaatttttagctttaaaaaattcttctaagagaagccaatactttcagtaattttactaggaagagtttcaaaaaacctaaaagcaaaaaataatagaacctcagccaaataaagatgaatgatttgtaagaaaaatctataatcttgtatattaaaaaaacaatcattgttaattagcatgtcatgaaaaaatatatatattattacatatgaaatatgaaacactttatttatatataggaaattaatatggtcctagcttgcaaattggtatacctaggacagtatatatgtgttgcatggcatgcatatatatttatgtatatataacaaataaattaaacatataaatataaatatataaataaagtaatttgatatataaatgaaacatgcatattatccaaaaacaaaaaacaaaaaaaaacatgcatatgcatgcatacacaatatgtatatatacatatagtacttcctacaaaaatagtttttcctcactctctctgtatgtactatatacttcaaatgattatttgatcattattaatataagcactttgatttatacataatatttatttggcatatatatttatatatatatatatgggtatgcncttaatgggtattacccatatatgggtactttattcttgaccattggatcaaatatcta

SEQ ID NO: 80194 - DNA, 1083 bp, Cannabis sativa
ccaacattagaggaaagcttaatgttgggttccatgagtgtagaagcagtagaagttcccaaaaaaactgtgatagttaaaagttttaataagttaaatggtctttgggagatcgagatgtcacttgaggagcgaccaatctccaaacctaaaaaaaaatgtaaacgaccaagatccttaagcttaaaaatagagttaagttgttgtttaaaaacacaaataacaacatcattggaagcaaccaaatatcatcaacatatattgaaagtacaatgaaaatacctttatgacttttaattataaagtgtgatggaaggggattgagtgaaatcattaaacaaaagatagttgctgagttttgtgaattattgtctagaagcttattttaagctataaagatagtttctagaagtaagagtgaaggtcagttgctgacagcaacggtagaagtggaagtggagtgtctggtatggggtgccatatagagaaagagtgtttagggttagagttatgttctccgatactatattagagatgttattctcatttaattgaaatgggcaataacaataccatgtgtattacaaaacaaagaaaatgaccctaatataatggaactgaaaatacacaaagttggaggcccaaaaaataaataaaagaccctaattacaaattctaataaaaatatatgaggtttaatattaaataatgataatatggtactccaaagtagtgttaggcactaaataatgtaaaacactaattgtttatacaattataagtgtcatatttattgcgattaaccttaacaaatcgtgtacttatcataaaatttcacttcttaaattttcataacaatagtaaaacacaaaagacagaaattaaacttcaagttttccaagcctatgttaccaactggatttaagaatgcctaagctgcacttaagaatttgataagagcaccacatgttctatagtgtagtgataaggatatctttattggtatattttattacttgtgttaagagtttgagtgatcgtgattggctttttgggaggctatcttgatgcaactatctgtcc

SEQ ID NO: 80195 - DNA, 703 bp, Cannabis sativa
aagaatcatcgtggaagcaacagtcgagaacggcaccgccgtgcatgaactcacctcgaagcacattggcgctggcgtcatacaatcggacactctggtgaataagaagaggaaaagaataaggaacagaggagaaaattgagagagagagggggaagaaagaggtgaaggcgtaccttatcccatgaggagacgagtaggtgatcgctatgattggagaagcgaaggtttgagattccgtcggacggtggattgatgagctctcggccggggagcggcgaggggacagctgtcatgacgcgattggagtttggccgtagtgaggaattttgttagggtttttgtttggattgagaaagagagagtgtagcagaagagggttgtgggtttgagtagagagagagagaaagagagggagagggaatttggatttgaaaatgaaaatagaaagatttaaaaataaataaaaattaataataatgaaaatgcaagatagagaggaatatgggatttgatttgaattcgccaaatgctctcaacggatggaaatggagtattcaaatagttgtgtcatttcaaaaaaaaaaaaaaaaaaccaaattcaaatagttgctttgaatattcaaattctcggataataacaagaaaaaaaaatcaaaaacataaataattgtaacaacaagagaaaaaaaaaattatatca

SEQ ID NO: 80196 - DNA, 1898 bp, Cannabis sativa
  modified_base (1870)..(1871): a, c, t, g, unknown or other
ttaaacgactgtttaaaaatatcaagaaaaattatttttgtagtagtgtattttgattacctcggagataccaaagaggcatatcttaattactgtgcgagtcaagcagccaaagaaagccttgaggcaaccgattccacagccctgaccgaccagagcaatgagacctcagccccttctgtctagaatatcgaacctctggccccttctaaccaagctaatccatacaaggagcccgggacccctgcagtatgaaacatttttctttttcttttttaaatctgtttagcccatgggcctttattagagacaaaataatcaaccaagcggtttttaaactgggtaatatttcattttatttcactacaagaaaaggtacttttacaagcgcaaaaagtcaccggcaaatgctccccagtatggcggccaaccttccttcctcggttaaccccttaacttttgtaacctctgtcatgaatcttcttatgtaagctctaaggggttctttatgcatctgttttacctcgaccaggtcttcaagatgcgaggggagttaacgagaggaggaaaactgctcattgaattctgaagagaaagcattccacgaattaaaccttcttggagacagcttgaagtaccattgttgtgcgacctctgcaagtgtagccgggaatattctacatcttacatcacctcgtacccttgcagatccatctgcatctcaaagtatttaagatgtgataagggatcatctttccccgtatgcatcttctaggtcggcatcttgaattttgggggtaattcaaggacttcaattttttgggagaagggtgatccgcttgctcggtccagctcgagaccagtgagttttgggttggacaggcattgtaccatgtttttcaattgatcgaattgcgcttgcacaaatggatgaactggttcagcttgttgactgacctgtgtcacgttgggatctcttggagttggatcctggatacgaatgctttgttggacagctggtgggacgtattgttcgtccaagccccttcttctatttaggtcagtcttggggtcgtgtgcaacacccaacctattaaataccaaggtatcggacggttttggtgtctgacttgtttggccggtaggttggccagagatttcagtctggatgaagttattaggtgtaactccacccagggggcgatcaggaaggatttggccatctaccgtttggcccacaggttagacctgtggccgtggattggacggctgaccattgtgagtttgggtggtatgcccgagaacatactcttctgtaccgcttagagagatactagacgcggtagctggttgttgattagcaacttggaaggccctccttatcagtgcagtgacctgcctcgtgcgatcatcaatggctacttgttgagccttaaaagtttccttctccatgtccctccattttataaactagcatctttgctcgtcgaacgcaaggtttatggcagcacagggatcctcctgatcatgctgcaaagtgttattatggccttgcatgagtccaagggctgtacggaagttttggatctcaatttcatccccaacagtcctctgtgcattagtggtggacaggactttagtgttgggagtggattgatcggctacaaaactagtgttcccagtctcttgcacaccaggtgtgatcccagccaaaggggaagtcacaccatggcccacagtaggtggttgtgtattggcatgttcggggtttgtcgctagtggtcctctcgtgttcccagaggtatgtacattaggatccgtcaccattgggtcgccctgatcaactagtacatcccctcttgccacatannctctgataatatgatactttctttcta

SEQ ID NO: 80197 - DNA, 2928 bp, Cannabis sativa
  modified_base (41)..(62): a, c, t, g, unknown or other
atgacaaaactggttgcattttctgtatctgttcgtgttannnnnnnnnnnnnnnnnnnnnntattaaaaaaataaaattattaaaaattgagctcattgtcttatttttattattttagaacattcaaccttgcaaatttgtctttacaaaaagtgccacaacccttataaaaataagatatatatttttttaaaagaaaaaaaattatagaaatttttttagaaaaaaaaaaagttaaaagaatatagaaaaatagaagttatatttgcacccaaactacccaagactaaaagataggtatgactgtatgagtacacctcaaatttaatttttttttgtcagaaaaaaagttaaaatatatttttattgtttagtgaaattattaaaatagacaagtttaatttttatatattcccccaaattaatgaaactaaaattgtttttttagtgccgaaaactgttctaaaagaataaatttacatttattagtgttggttaataattagagagtctaataattatactatattttagaatataatgtgatatgtactgttaatgaaatatgaattcttaatattttgtttgacaaaataattagtaattatacaaaaaaaataatattttttaataattaatatttaaaataaaaaagttttaataattacatggtataattacactcaattcttacgagactatgagattcgtaaagtgtaattgaaatctctcaattactcttaattacacaattacagtgtaattacatacatgattagacaagcgtgctaaattgtacaacctctaactacactcaaatctatttacaccatgacaaaataacaagtggaataataaaattcaagaaacacccttggtaagcttagaaattctaactagatttttagtgatacttatttgatattaaagatgatctgataaaaacaatatgtgattggtaaagaatttttttttaattgagaaagtttattatacatttaaaggcatatttcaatcaatccatacaattacaagagtttattgttgagtcatactactttcactttgtctaaatatggtaactttaacctcaagtttattcttgaggatcagctcaaagatgcatacatcatttggctgaagagagttgtgtcttgcaaatgcacgccacccactagaaaacctatgctctaatccagaagatgatgatcccttattaacagttaaattcacatgccaatatttctcaccaacccaaagacagacaatttgtgtctttttctcaaaccaagagtttgcaatagccactggaatatactgcacaaacaaaaattaatatagtgaattatctacaaagaaagacaattttgatacagagatatctatgaatgagagcaacaacttgtacataccaattttccatttccacgcaattgatgtgctcccaattttacttggaagtaagaattgtctgagaagaatttgctggctgcttcagatgaagagctcttattattattattattagtgcctttgccttgattgtcatgatcagtatttgcttcagatactggttttgtcttatttgcagctgaaaacaacaatagtgtataattaagttaactctgtagctatatttgcattcaattataattctcacctagattgttataatgatgatgatgaatatataccttcagaattaccataaaaactaatcttccttatcttgttgggccgagagtttgaatcttcattagaatcatcaatatcaacaacattatgctcctgaaaataatgagtaagagaataatcaaataccataacattgaactcagagtttacttaaagaataatagcattaattatttgtgttgtgcaaatttactccaactcttttctattaattcataccttttcatcaccacttttggtcaactctgcctcctctgttgatccacatggaagcttacgaaatacatgattcgataaggagtcacaatatttcatccaaaatgcctttgaaatttgctgcacaaggcaacaccataaaaataaattaattaatggaagataattgatgttaataatataataatgtatggttacttaccaacttggtgttgggaggagtttgttcaataataatattgaaaatatggtgagcagtaagaggaaattgtgtctcaatctgagcaatatggctattagaaaaggccataattgaagattttccatgctttaaaaacactaaataataaaggggaaatatgtatggaaataattaaggtgaaaacgtagagaaaaactatttgttgtttctcgtctctatgatcaagtttactctttcacaccccaaactttcctttttatagatatccaaatcttataattacaacattcccatttttaatggcaaactttcctttttatagatatccaaatcttataattacaacattcccatttttaatggcaaactttcctttttatagttttaaaaggtataggtttctcttttttaaaaaaataagatatttatatatttttttttttaaaaaaaaacgagatcattttatggaaatatcttttttttttaaaaaaaaagttaaaacaatatagaaaaaaaggatactttacctttattttttttaaaaaaaatgaaaagttaaatatatttttattctttcgtgaaattattaaaatagacaatactaaaataaattttattttttatcttttaataagaatattcccttaaaatactgaaactaaccgtttttttgtttctgttaagcaaaaatttttacatttaaaatattaaaataaatgcaaaacacaatttcacctatgccaaaagtataacataagagtttattaatttaagttcgacccatccaagattataaaaataatctcttaatta

SEQ ID NO: 80198 - DNA, 956 bp, Cannabis sativa
aaatgatttttgtcttttttttttgttttttttttttaatttcattttcaagttttttttactcaagcttttgagtattttttgtaatttttagaaattggttgattcgtttattctttttaggaaaataagatttgaataatgtaaatcttaatgtaaatgtagtagtactactacttcaaattaaactcatgtgaagaaagattttgccaatatttaattatatctttttttttttttgcaattatgtataattgtttgacttcaacttgtgattttgagaatagagacaaaaaagaaaatagaattgtaataagattaaattcgtaagagcaaaataatttacaaatatcacactaagaaggcacttttataataagataagattataaattattgaaaaaaaaaatcaaaaatcaaaattaggatttatgctataagtataactacaataaatataattatgtatatatatatatataaaaattaagttataatttcttaaatgaaaacgtttgtactgagaaatttgccaaaattttccaaattacataataatatgattgatgtttttatttatatataaaaaaaagtaatgagaggagtgaattgggatcttaagtggttgctccaccataaaaaacattataagaaatggaccattttttaatatatttttcattccaatgatatgggggacagcatctttgcaagtttatcttataaaaatgcaatatgaaaaagtaaataaataataaattattccatccataataaaagttgaaaattgttcactttttatttttttatttattaatttattaatttagataataagaaaatgtaaagatagaaacaactcattgaacttatatatatgggaaatacaaatttaccttattcatttgggttgtttagatatacatatattgtttttgtttttgacaattaataat

SEQ ID NO: 80199 - DNA, 1169 bp, Cannabis sativa
ctctgcccagttgccatagggatgtcatcatatgttgcattacgtcaaaatcgatagccctggcagtaaggaatcgcccgcgaatatcagcgacttgtgcatcagtatcctcaaagtccaacgtggaaacaatatcatattccctttctatttctatattagcacataattcctccaaatccttgatagtaaacgccgtaatcaacaaatacaaaatactaagaacagagaaaattaaaatctctcaccatgtcaaaagacaaatttattctacattaatatatttattttgcaaacttggtttttagttctatacttttataataattataattttagattaaaaactaaaaagataaggacatcgaatctttggcctacttttatttatgcatttcttcttcagaagggtccaattattttgttcttttgtgtaaacatgtcgactccacaaaaaagaaaaattagttgaccgacatattgaattctagtataaaaggaaaccacagtttcttacttctggtccctttctcacgctcactctatgccacttaaaactccttttggcttcgaggtatatactctatataccatcatgtatttgttgtttgaaaagtcatttggcttcaaactgaactgtcttttttaaggcaaaaatcagaaagagaagaaaaaaaaaccactatgcgacccgcaatcaactcgttggctgcctcgcagtagtgtagtgcataggctcagttcactgctagaatgtgatttaggctaaaaattaattatgtctatcatcacgcactaccgtcactctttttccccattgctgatgccaaaactagcaaccccagaacacaataaaaacactttccatgccatgattcttgaaccccactactactcacctagtgttaaatttcccaaactgattatacaatctgctcttctggtgcaaatcaagttctgggtttttcaattggcacaaaataagggataacagtgactcttcaacttcaagaagtggacagattaaattagtctcaggtgacaggtacaacaatattaagggtaaaaactaccaacggcttaaaacagaaaagactagctatactttatcactttggacttgagcagaacttgatgatttctttcctgatatcacttttaaaaacacg

SEQ ID NO: 80200 - DNA, 808 bp, Cannabis sativa
ttttttttttctctttttggtggaaaccctactctactctttagttttagatccaaggtagagaaccccaaatttgttatccacaactataactacattaggaaacttctggaaagctcctctgaagaagaaagcaacctagggctcgaagtgtagtgccgtcgaagctgctctcgtcgttgtcgccgttcatcggcgttaatgtccgtccttcgcccctccagtcaagtgacggttcaacccatcctacccagctgccgttagctgccatcagacagaacccaccattaatttcccttgtcatctccttcacaggtaactttctaatccaccataactcttctgctgctgtcccatctgtgataaattctggtctgcatcccatttcaatttcttcaaaactttcttataaaggaaacccctattttgattttgcatttatggaaaccatacctcccgaaccaccctcagcaatgattaaacctattgttgtagaggacactacccaaattctaagagccactgtcatctatgcaggtataatcgattattctcctgacatggagaagttaattcccactgagatcctttggccagagcatatactcgaccatttcagattatatataccagtttcttccttgattcacgctgcactatgtccttttctgcataatttcattgttcacttctgtacaaacactagcctttctgtttttgttcatagacaaattcccacccttgttctcacaatggacgacttgtccaacacattcactgccaatcttaacctcacggcccttgaaac

SEQ ID NO: 80201 - DNA, 577 bp, Cannabis sativa
aaaaagaatgtgagttagcaaatattaaattatataaagtagtttacaccataaatatttaagtttaattctcaattattatttgtggatggcagcctcattctctgcaaagctaaaaaaatttcaggtatttcacttaaatgttcccttgatctctgttgcaaagcttttggacaactaatcaatcaagcaaaattaagtctatttttctctccaaacactaatatagatggcaaagcaagattccgtcagatattccaaatgctaatttaacctctccatgaaaaaaatacttgggcttaccatcgtattctggaaaagataagaagatattatcccaaaacatcactgacagaatttggaagctacttaaatcttggcaagaaaagctattctcggctggtgggaaggaaattcttctgaaaacagttgtgcaatctattcttacctatgctatgagttatttctaactaccaaaaaaattgattgatcaaattgaaaaaatgatgaatagattttggtggggatcgaatgctacaagaacggatatctattggaaaaattagaaatctttatg

SEQ ID NO: 80202 - DNA, 1935 bp, Cannabis sativa
  modified_base (37)..(62): a, c, t, g, unknown or other
ctataaaactgtttttactttttcaattttttaattnnnnnnnnnnnnnnnnnnnnnnnnnnaaaaatcactttcaaaatttttttaaacagttttttttttaatcaatattttgtactccaaccctaacttagactttcgaaaccgagcccggacccgaccccaaacttgaaccggcgcccgattccgccctcggacccggcccccaaatgaaaatgaaaatgaaatttacagattacacttttgttttttgtttttaaaattgaaaaacaaatagaatatatttttattttttaaaaacaaaagttttatttttacttttgcgattaaaaaattaaaaaataaaagtattatcaaacgacatttaagttatttatttagttgaattcaatagtaatcagattcacccttaatcgtatttgttactgaatcaaaatgagaataaattatttattttactatgaggaatcggaataggattgccatttcttgctcccaaatttatataagaataattgatattgtgttgttttctcattatgtttgggctaattgtgttttgcagattcatcctggggatattgttgaagacaaataatgacaaatttataagtatggactgtttggtcaacttatgttccatacgattggtacttgaattttcatgagagaacatatataacatgattaaagaaaaattatgtatattagaaggctaatatgccaaaaaggtgtagtaagtgtaggttagtgaatgttggaatattcaagttttgttgtgataaaaatctctctctcatagtattttattataccatgtagacattattcaattatttttatgttctgaaaatatcttttatatgtataaaaaaaaatttaaaaaatttattctcattaacgagaattaaacatcctcgtcaattttgattacatacaagcttaaaagaaaaataaaataatgttgtttatccaatctaatttatattattttatttatattatattgtatatgatatgcactaattgcagatttcagtgcactaattgcagatttcagtgctctaattgcaaatttcatatattagattaagttggttactatttaatattaatttatattatattcattaaaaaattattttttttcacataattaaaaacaaaataaaatatgtctccaacaacaaattaaaataaataaaataataaatgataaattcaaaaaaaagagaaaaaaaactttgtgtagaaaaaaaacatttaattttcttttaaattatatgtagggaaaaaataaattatatataagaatgaaatatattagtattatctgtattaaatttttaaattattatttttttttacattaaaatattaattgtatatttaatttataaaaatttatataaatatgtgtagattgaattgaatcggttacatgttaatagattggattggattgtgtattgattagattgaattgattattttataaacactctaacttaagataaatttcatttttttaattattatttcataaaatttatttttgtattgaatttatattattttatttcatacttatatagttttatttctttactgttctcatgctattcatactatttttcatatattcattgttctattttatattttaaagtggcaaatattagacagaaaacaaaatctaattgtttagtgacactcaattttccttgtattgaacccaaagactaatgttatttgatccactcaaagtcaaaggaattaaacaacttatccatgaaagaataattaaaaaataataatttgttatatgttaaagaattctttgacagctattaatttttaaaattttaaattaatattatgttttagaaagcaaataaaaaaaattcaagggacttataatagttatatatactg

SEQ ID NO: 80203 - DNA, 2025 bp, Cannabis sativa
attagaagtggaaaatttggcaacgaaaattaccgaactctatcccaaatggagaataacgaagatggagagaccgagtcaggacccggccaagattgggccgagttaactcacgagtgcctgatcaacatcctctctcggctcaccctggagcaccgatggcttgggcccatgttcgtctgcaagtcctggatgcacgcgtgcaaggacccctctcttcactcggcgttcgatctccagtctcgcttcgactcggtgctcgagtcgcctcgatggtggttgcccgagttcgagaggaagatcgattccatgctccgatctgtcgtcgactggagcgatgggtcgctcacgcagattcgcaccaggcactgctctgatcgatcgctctcatacgctgccgaaaggtataaacaatttactatttttttttttaatttattattttaatgggtatttctttatgatgattggctgtgaaattaggtattgacccttaacaaaaaatggatttgattggttgtgtgtgattagtaaatatccccaagtttctaaaaatgaaacctttaaattttaatctcaatttagctagaagctcatgattcatcgtcttttattgtatctgtggtttaagatttgagcttttatctgggttttactaatggtttgcaatgaatttcatttacaagtgtttgtagtagttgatcacatgtagacttgttttgtgttttgaagtattttgctttcgaaacttttgatttaattattaggtgtttgaatcttgagattctctcaataagaagctgcgccaatgttactgatgcttccatggctataatagcttttcggtgttccttacttagagagattgacataagttattgctatgaaatatctcatgaatctttagccttgattggaaggaattgtccaaaccttaaaatcatgaaaaggaacttaatgaattggttagatccttcccaacatgttggaattgtcccagatgagtacctaaatgcttgccctcaagatggggatgctgaggctgctgcagttgggaaatacatgcctcatttagagcatcttgaacttaggttctccaagttaacggctaaagggtttgtttcgatatccgaagggtgtgtgaatctagagtacttggatttgttcgggtgtgcaaacttgacaagtagagatattggaaatggaataaccaatctgaagaacttgaaggaagtgaaaaggcctaacttttacatacccaggtctgtttttcacactgagaggtatggtcactggaggttatatgatgagagattccaaactgatgtgtttagaatctaatcaggtttaataaacttgggagacaagcatacttgtgttgtgatataccaagttggtttgatttgattttcagcaacaaaaaaccattcttaatttgataagttgcaggatttcattgtgtgtatgtatataagtggaaatgtgatactaattaccaatgttatgattctgtattatattaaaaccaatgatcatgatcatataatgtgaatttgtgatacattgtttaacgcaaatgttaatttggtgtgtttggagtaatgatctttagtgatgtatgagtctatgatatggttctagattgtcaagtggaacaatgtgcgttgggctcttcaagttttgtgttaaggcttaaaacagtttttctggaaattgatgagtgtctattttaatatgcaaaggaaaagaatagttatataaatatgtacattagtataaatatatatatagatatagaataattctattgtaggcactttgttttagttctgttcctatagtacaatgacattttttttagctattcatacatatatatatgacttttggatggacatattaacaaacatgtatttgtgtgtatcaaattaaataatttaaaaattaatgtttaaaagataaaagttaagaacttaatataattcctcacaagaaaaagaactttaatataaaatattaaagaaa

SEQ ID NO: 80204 - DNA, 2463 bp, Cannabis sativa
ataattttaaaagaggaaaaaaaattttgggcccctggactgggtgggccctaggcacaggcctagcctgcctatgcgcagggccgggcctggttgaatttgtagttatttatactttgttgagaacgttcctgacccagttatcagcgtgagtaggtgtatgggcgcttgattataatcttgatatatatttatatatgtttatgattatgcttttcttattaagtttgtcgactcatagttattacgtgtatatgtaggtaagagttagaaccgaaccatgatgagtctaaagcttaggatgaagattgtacacatcaagacggttagacctggagtgtctagggtcttcaagacagttttaggctcacttttaatagtcgctagactacgacttttgtaatacaaatattttacgaacgaatgtaacttttaataaacgagataatttattatatatttaagattaaagtttaattatgaaaattttaattatttacgtttttcaataaatcttttaattagcaagtgaattacattattcaaaacatacgataacgtgcctaatttagtaaggtgttacagtcccaaatgccttctgccccgaatgtcgtatgccctttcctatttttgagaaaaaaaattgtagcaagaagcttgtaagtgtttcttttattttttttttaataattagtagtttatccatttaataaagttagtaaaaagtaaaaatctgagtttatattgaatattatacactcaaaattgtttgagtgatctttctaaagcttgaaaattgttggagcttctttcggtaatttttttttttgcacttttggtcaaaaatatttgttaattaatcaaataatctttatgttaattaatttttgggtgaatagttatttagaaaactaaatgtgttgttttgatgtattttgaattgaaaattttagttttaggctgtgtaaagataagaaaaggtatgtctatttttttttttaattatgtacgttgttttattattgtaaaatatgttaaagggatatatatttaatacgtttatagttgtttgtagtagtaagtaatattagtaatataccatgctatgttatggtatgcttgttttagttgatgtgtttggttggtggtggttgtggaaataagaataagaatactatactaaacatgtaaatgaatgtgtactacatatatgataatctctacgtatacatatatacataaataattacgcaataaattaaatgatatatagaaagtgatgtttgtattgtagtactacaaattaagtagaaagtagtactaaggtatagaaagtgcctactaatatattattttgtgatatgaataaagtaaagtggtttgtcttggaatatgagacacaacaacacaacccatttcaattgaagaccataagatagttaggattacattttttagttgtaattaatatatataataagtttattgttttgtataattttgaattaaaaatttgtttttgaatatgaaaattaattattagagtgtctgagaagtttgtttttaaaaaattagaatgtatatattgagtgtttttaaacttttagtttgtaatcttaatttattgtattgtttaattttgaattgaaaattaagtttggttagggatatgtaaaataatggttagaacgtatatattaattttattattttgcttaaatttttttatgatatttttagtattgtataggtctacttgataattagcatgcctcattttttcaaagaaaattaaaatttgcttaattgttcattgcaagacgtaggtacaacaatggtttatttcttttatttgataatattatgcatgtgctagaagagtttgaatcttttaaatatttatctatagcgaataagatctgagataaaatatgtattagggtgataacagaagtttgataacttgtagtgaaataagttttgggcttatttgtttgtgtgcttgggagatataggaaaaatttattgtttgttatttattaattgataggtgcttattaaattagaaaatattgtagaaatagagagaattctatccaaatttttagaaatttatatgtttttaactacttagtactaaaattaaagaattagtttgtaaactcaatacattgaccgtttaactaatctataatatcttttttttttttgtcaagcagttagactcatcttttataatcaatttttatagctactttttccttcataagtaagattgtttgatcattatgctaaactcctatcgtatatattacctaattattatgaagttgtataaatatgtttggttggagtttcatggtaataaaactttattattctctctcctttcatttaataatttttttctagtatgtgctactaaatatgtgatgtaccttatacaattatctatgatcttaa

SEQ ID NO: 80205 - DNA, 7451 bp, Cannabis sativa
tagaggatttgatatatccttcttcttgacccacatctgaatatcaccaccaactttatcagcagcctttcaattccaatgtaatattttttcatgcaacaggaacctgatcatttaaaaaagcatattttaacatatcttctcactattacacatcccttattttaacatgacatatataaatttttatttatataaagttttttatttttatatttaaaaacagtttttctaacatttaaacagaaattcacgtaagtaacccaaaccgtaaaatatgttttcagtgcaaattcttttaatgacgagcggacctcaaatcatgaaacaagacatgtaaatccaacatggatgatcctccttctttgatagcattcctcccaatttcaccaacactcttcactctgcttctcatttcctctgcttcttctccttccataattttactcactgcatttctaatggcttcactcttaacgaaatccccaacattcatcttccatttcatagttccaacttcaaatccaatcctcagtatttgacataccaacttctcattataaaattgttcggccgcaattggccaagtaaccattggcaccccagcgcagacactttccagtgttgaattccagccacaatgtgttacaaatcctccaactgcttcgtgttccagaatcggaacttgtggtgcccatcctcttattatcaatcctctttctttcattctttcttcaaatccttctggaagccactcttcttcaaccccttttaccttttctttcttcacaacccaaatgaattgatgcccagaagcctcaagccctgttgcaatctccataagttgttcatcgttgaaacttgccaagcttccaaaactcacataaataattgagttgggtttctttgagtttagccatttcaagcactcgtgctgattattagaatcaaccattttattattaggttcggttaagaaaagtgggccaatctgccaagctttccttcctaaaacctttctgtaatgatctgcatagccttgttcgagctcgtaaaaactgttgattagaaccccataacacctactctccacctctctcattgctttaaacacctttgtaagttcgttcccatcatcgtatctcacaaactcaggaagtttacttcttgttatctcgattttgtcaggaaaatcgggaataaagaagtgttccgaatcagacgacaccttcttatgaggctcatgcaaaaacacacttgtagaagcgcacaaagcgaaacaacaagttccatggaagaggagcgtgggaactccaaacttggcagcaacatcgttggcccaagggaagaacatatcagccacgagacaatctggacgaatttggtctaatatttgctcgagttgagggccgagttgtcgacaaccccggaagtacttctgtaacatatcgccactggggttggctaccgcatgagggttatcgaccccttcgggcaatccaacctcggcagctgggaatttgatgttgataatgtcaatcatggaggtatagttttcaatagatttggacaataagggtatgaagtaagaagtagagagaataatggtgactttggagccattggaagcaaaaagtttggccatgtgaatggttggtatgacatggccttgagccataaaggggaagaaaattgcatggagctgatgatgatcgttggtttggcttcccatggctgaccagaatatatctatatctatatctatatatgtactgggaaagtaatagctgtggcaatggagttgagggttgtagtatatataggagtcttttactgtttgacaaatgaatggttgggatcattttcttctcctacttttgcaccaaggcaagatacatacaaaagttaaaagacctattctattttctgtgattttattataaacaacatgtctagtcaagagtgcatatatatttttaagaacaatataggacagagtcgttgaaagatactatattatttgtttttgtctttctggagaggaaagatacttggttctttctgatattacagagtttaacgtaagctcatatgtcatattgttactccatctaatttgattggtgttcttggcgacagtggtttgctcaactatataactagtgatttttttttttttaattcccatttacattccttctggccaaagtaaatatatattacttgaccaactattattttaattcaaactttgctttttttatttattgtttattaaaaaaatttggccttaaacatagtggaagaaacttcaaaatagaaaagagtctcaagacaataacattgatcaataagagagacactgatataactgctaagcaactgaacaaaataataatccagagaaagaactagttttgccaatatatgagtaacactattagcaattttagaacattaaacaaaaaaaaaaaatcattagagtggttataataagctaaagtatttctaataatacaacctaaaaataagaaagatccaacgaatgatttttgagacattgatgacaaagagacgcaatctgattccaccataacatgagcatagccaagccgaacgcaaagcccaataccatgtaaaatggctatagtttcgaccatctcaggagtcaacacaccaccaaaaatccaaatggctgttgctaaaacaataccagaagaatcctgcaacaccacaccaaaactagctctagcatttggaatatccaaaccaacgccataattcatttcaatacctgtgggtaataactgacctaaagccatcagtagctatatgagaatgcaaactattggcattgtgatacagttcaatgcactgaagactccgctcaaaaacaagcttattgtggatcactttcttctcattaataaggatatttagcctaaaccaaattcttcataggcaaacaaaaaatttctcaagagttaaacatgaaaattattccaaagagacaggaaaaactcataagagtccaaacttgggaagaaagtgttgcagaaataatgctacacaagtgcacatatattgctttaagtaatcaaatattggtaagaccaagtattgtcccacaaaactgattatcaattaccaatcaatcaatcttttgattctatttgatcatataatttatttttttaggattttgaacaagaaaaataataacaaataacaataaaaatataagaaaataacaataaaaatttaattaggtcaattatgatcatcaactattctctcttttacttcctaatgtagtttacccaattcctcctcttcctattaaattaacaagttgactaaggttgtttataatctggttaagactgataaactcaatctaaataatattgacttatataccaccaatagatctatattttttatcaatactattctcaccatattacattctctacgagctaccaaagggttctccgcaagctcatccttcgatatcttatgttgttggttcaaacatggtataaactcatatcatgtcaatcttgtgagcattcacaatgaaaactttgaagtggtcatgcatgatgtttattatgggcgtcaaccgctcattgatgtagcatgtatttgagataagttttctctctttgtttttatgtcacattggggacaatgtgaatctttaatttaagggagggacgtatagtttttagtcagttatatttgtgttgcttattcgtttggtgttagtatttatttttaattagtagttgttaagccattatttttgtctatgattgcattgctttacttgtaaaaaagaaaattgttaataaccatgtacttggtttaattgttttagagtttaattgaaaagttttgtgagaaacttttaatattgcaaatgctatatcttgaattttattatatatgtttgactagggtttgtggtataagagtttgaatttgataaaaattgcattgtttgactttcaaggcaaaatccttgatgatctatgctttggaaaaaatattgataccacaaatattatttttgtgtgacgaacttgttactgcgagtttttagtgtaaaatttcaaaaattctttgaatgtttagttggttcctagtctaatcaaaaatttaatgtagtattggtatatatatgtacatttaaacactttttcatttataataacaaaaatccacctaaagaggaaatttccatggaagaaattcaacgtacaactataacaatgaacatgcaaagtgttaagaactttccaaatcgaacaatattcttatagtaaattctgctgatgatgagttgaatcgggggcaatacgagcagacctcaaatcatgaaacaaggcattcaaatctaacatagatgatcctccttctttgatagcattcctccccatttcagcaagactcttcactcttcttctcatttcctctgcatcttctccttccataattttactcactgcctttgtaatagcttccctcttcacaaaatcacccacctgtctcttccatttcttagctccaacttccactccaatcctcagtatttgacataccaatttctcattataaaattgttcggcggcaactggccaagtaaccattggcaccccgacacagatgctttccagcgttgagttccaaccacaatgcgtcacgaatcctccaactgcttcgtgttggagaatcgaaacttgtggtgcccatcctcttattatcaatcctttttctttcattctttcttcaaatccttccggaagccactcatctttaatcccttctttcttttctttcttcaccacccaaatgaattgttgcccggaagcctcaagccctgttgcaatctccatgagttgttcatcgttgaaacttgccatgcttccaaaactcacataaataactgagttgggattctttgagtcgagccatttcaagcactcgtgctgattatcataattagatgttttacgttcggttaagaaaagtgggccaatttgccaagctttccttccgacaacatttctgtaatgctctgcataacatggttcgagctcgtaaaagctgttgactataaccccatagcacctactctccacctttcttgcagtgacaaacagctttgtaatttcactctcatcatcgtaatttagagggtcaggaatttgactcgctgttaactcaatcttgtctgggaaatcaggaataaagaagtgctccgaatcagatgatattttcttatgaggctcatgcaaaaacacacttgcaagagcgcacaaagcaaaataacaagttccgtggaagaggagcataggaattccaaacttggtagcaacatcattagcccaagggaagaacatatcagccactagacaattcggacgatgtttttccaatatttggtcgagttgaggggcgagttttccacaaccttggaagaacttttgtaccatttcgggatctattgtgtgaaggctattgacattttctggcaatccaacctcagcagctggaaatttgatgttgattatgtcgatttgggaagtgttgttttcgattgatttggatatgaaaggtatgaagtgagaagtagagagaatggtcactttggtacctttggaagcaaaaagtttggccatgtgaatggtgggtatgacatggccttgcgccataaaagggaagaagactacatgaagctgatgatcatggtttttgcttcccatattaattggttttctctacaagttagctgaatacataggatgaagcagcaaaattctcatttgcaacgaggaaggaatagacttgaaatgacttggccaatttaattgatggttgtgatacttaaatgacgttgttcagtgtgttaacagtatcgacatagacatagtcaagttgggcaagaaaaaaacacctaatgagttgtcatggtttaaaggacatatatatatatataattgaagttaagcgttcaaaataaattgaaaaaaattagacggaattgctgaaagcaatactcaaattaaacgtaatctcttacgtcattcactatgtttagtaggagaaatagaaggatggaaattagaggtgggagcagatgagaaattcctttgtttgaggaattgaaggagagagaagagaattcactcaaacctccaattttgaagggaaatttgaagttatatatatacattttctacatattaaatttgagtacaaatttactataattaaaaaaaaaggcacactttatattaatacccataatacccataatgtcttttcttttctcttttcttttaactttattatccatacttctcattcatatccacactgatagtggtctaatggaagtccgatggtagctcggtgctacttattttttatatttttgtacataaaaaaatagtaactttaggccaccattagaccaccatcaagccatattctacaattatatatgttaagctctattcattaagcttgtgagaaaagcatcgtgccaccatcaaactatcatcggactaccatcaaatcatatcctacatttataggtagcatcgagccaccattagaccaccatcggactaccactagaccttcttcttcttcaacctttaccctttttaacaataggaagacatcggaccaccatcgggcctagcaaaaaaactagttttctgctcaaaactcatatttgacaatttttcgactctaaatttaacatcaactcacatataacaaacattaatcatacaaattattcctaaaccaataaacctataaatcaaatcatacattccatcaaccctaaatcacacaaaaacacaataaaatgaaatgaaaaacttacattcattttgcggtggtcgtgattcagagatcttaggtctttggttggtagtcatcggtgggttggtggtcttcggtttgaggcacggtggttggtagtcgtgggttgctagggtcttcgtgtgggtgagaagaatagggggagagagacaaagagaatagaggactagagagagagagaagaggtgagttatgagaggggtatttttggattcaatgaaaaagttgcctatctaactaattttaatatacttaggtttagtgtaccaattttgctcaaatgcataaaattaattcaaattttgcccaaatgaaaaagctctgtgtcaaacatacccttgctcatcatgaaattactaatattcttactaaggctctcttaaactagattcgccttattacgagacaaactgaacataacagtttgagaggggtgttaggctttgtttgtatatctgttagttcagataagttagttatatattttcggttcataacactattgtgtactgttcacctataactaattctgctagcttcttgtccta

SEQ ID NO: 80206 - DNA, 4110 bp, Cannabis sativa
ccagatccctaaccccgaacctaagaaccagacctaaactttgaaccgcgacccaaacctgacctgacctggagtcgatgttggggtcaaggttattgaaaatatattataactttacacaatcttttaatacaagttaatactaaacataggatagcctaactcgacggttatgaaccgccgagatagggtactctatctcggcggttaaaaaccaccgagatagatcaacacatctatgttgacggtcagattctcggcagttgtgaaccgccgagataggtctatgtcatgggtttttaaccgccgacatagggtaattttttgtagtaacagtataatacaatccaacacaatacaatacgacgtaccaaacgagccctaaaaatctagattttttcagcttcaagccccaagatacacaataccaatggccatggctttatgatagagccactattaagagaatcctttgcgattctcaatttctctaacaataattagtattgtttaccttaatttttttatattatcaagttgtgccccttataatgtatggcttgttaataatacttttcaaaatatagtttttacactaatatagttccatcacattttattcaattttattatgaaatgagtgaagtggtggatgttagtttataaattgatgtaaattaattatctttgacctttttttggttaataaatcatagaatttctttttcttttatataattgtttatatttatattatagttttttaatcattaaagtaaaaagagtgaaaagtatttaatttgtatttatttatcaactactatctaccgcctcacgtgtaaattcagatctccccatttagcttaacatgcccattcattaagccaaggtggagtgaccgctctgtccatgagcagagttggacaaagagtccaaattccaccactctccacaatgactaagttgaacgtgtagatctataaggccaaaacttattctgtcaacaagtacccaaagggatgaagatggatgcctttaggggtcattagggaaggatacaaaatgaatgtttgggaaccatcctatgtggcacaactctaacaagaatctcaaaaaatctagcggcttatcccctgtgtcaagccttggaaagacgcacaacaaaaagcaaatcacatttttgggcaaacacccattactttgacattccctcaacatacttgctatcccaaagtttacacatctgacttgacacttacacgtggcataattcagccaactatttaacatgacaagaatcttccggacagaagtgtgcctagcaggtcccatatggagctaacattcataagctacagatgatccatgaagcatctggtcgggtcatcaacatactggcaaaagaagatataagtaacaccttgtaagagaagctccacaagtaatcccacaaggatgacaagtctcgaggaaggcctggctgggtgattaacctgctgactagaaacaaccttgctaggagtaccagacaaggctacacgagccttgatttcttcttcaacaagcttcaacaattatctcaaattaaatcctacaaactaagatccagccagtctatacgagattaaaggagattcaacagatcgtaactgcaccctaaaatataaggatattttccctttaatcactctttttacggagccacatgtaacaacatttcccctataaatagtaaatgaattcacaagcgcaagggaccgaaacctaaaatcgtactcacgcttctaagagaatttttctgaaagatattctctgtaaacactttgagagtcatagctagaattcactttatcttccttagtgatctgcacggtattatctcacaagtaatacaacaacaaaaaaaaaaagagtaagtcattacccatacaaggtggtcgagcctctttaagcactagttttctttctatttatttattactcctaactccttattaatgattaatcagtttatttaattagttggctatttttccagtcgacaatactgacaactcataccctagctgtcaccatcaatcgacctccatgtacggatgaaggttgtccccaaccttgagcctccttaaattggccaaaataaatatttaaaattaatttaccccatctttgagatttttcaacctacaaatcctaatgggtccaggtcagcccaacccattagacaaggagcctataaatattgaatttttccttcatgcaaaggttagaaattttggcaagaaatacttgtatgaaaaaatagtaaatactccataacttcaaagcttaatactgttgactcgtgaactaagatttattgacaccccaaccacataaaaaatctcttcttgtccattttaatctaattttctttaacttaatcttcttttaagttagttttcgaaaacttttagttctttcactgacagttggagaaagtttccactatttccgtagatgttggttggcagtattcattttggtcgtgttattacccttatttatgatttaaataatgagattattatttctcttagttataatttaagcaataggattgttatgtctcaatttttattagaagatcattggctgatagccattggtaggtgaactatattagatgttcatttgatttggaaacctagtatgcaacatatttattgatgcttgattgctggtagcttattagaactccagttggggttgttattagggttttattcctttttattgtaaatgacttggttagcctattattattgattttgctttgtaagctatactttcatctaatgaactttgtgtaatttatctattaatagatatgtgatgccctaactcgtaaggacgctacatgtgtgcttttataaattaatttataataataaaataatcgtttaaataaaattgtgatttaattaaaactttactaagtattttaaaatataaattcatggcatcataaacttgttagggttgggatcccctttaaaattatacaaaagataaccaatcagtattacatcaaaatatacataagtcgaaagtgtcataaaaagaatcatgacaactcgacactgctagtcggataagtcgatatgtaaatttaccagggaagacctctaactcgtggttgttttaacttgttctttctcttacatgcaccacaaaacacatgtaagtcacaaacaaaaagtaataacttaagcatttcatatcaatacacagataaatacaaatatacaaatttaatcataaccaaataatcacatgcttaatccataagcagaaaatcacactatccaaagaaaaataatcattaataacaaaatatttgtcaaataagataaactaatgttgttacttaataaagtaactattattcactgttgcctaacaaggcaaccttttcgatactattacctaatgagataatctttctaataatattgcctaatgagacaacctttctatcgttgcctgatgagacaaccaatgtcaatatcattacctaatgagataactgatatataagaaacctaacaatgatttcaaaataaagtaataacttaatcttgtagtgttgcctaatgagacaaccaatatatatataggactgaacatttcgagcgggttcgacccgaacccaagcaaccctcccgaacccaaacccaagcaactcgtctgaacccgaacggtgaacgcgcaattttttttaaaaaaaatgttcgggcgggtcgggttcaacccggtacccttcgggtcgcgggttgagtttttaggagtacgagtttcggggtgaatccgccaacccccaatttaaatatattatatatttttttattttttattacagtttatactttatatatatattaaattattaattaaaaaataaaaaaccctaaatttttttaaaatttaaactctcatattctttttttattttttataaatttaatttttgttaaataatataaattaaatatattttcatatataatttttttattaaaaatttatatatattatataaaataatttatattcagaaatatataataa

SEQ ID NO: 80207 - DNA, 1425 bp, Cannabis sativa
ttcttgtagtgatactatatatacattatcaaaataatatttattatattatacatataaagggatgataaaaaaaaaattaatccttttaatataagggactttgtgcaatgacccaaaactgtcatatgcttgggtcgaccctgataatagggtatggacattcctccaaacgtaaaacaggacgaaaacttttcatctctgaatgctaaaggaggcattgccactaatttttttatttaaaataaattataatttttgtaattaatatttttaactaaatgtagtgataacataataagagtaatgatgaacttttaattacaaatctttacatttttaattagtcacaaatttaacttgttgcaactaaaaaagttcagattatttgcatcaccattgataggatacctaatagatatcttattatgaataaattatgtacatattatatactgacaagaattataggatttcaatctcaaaattaacttacaatgagtggactaattcatgttgttatatataattcaatatttttacatttaattcatgtttacattaattttttttttacatatatacacttttttaagacaccattaaatttaaataaattaattatattttcctaaaagaaggaattatatacaattgtgacatataaaaattctatattttatagctatatccgtggagaaaatttttgccacaaaaataaattatataaaattataaatcatatgtatatatagtattggatatccaatattatgattcctttgattatatgatcgaatttcagaatttcaacttggtagataacttggcctaactatggaatatatatttatatgatgaatatatatatagaccaaatgaatagtaatgcatatatatagaataacgaaagtcaatatcaaattaattctaaaaagataaaaatatcactatataaatgtgtatatattcaaattctttaatttatggattcatattctctcaagattttggaataatacttgatatatatatatatatatgatatatatattcagttcaaattaatattttccatctgtatgaaaattatgattgaaaatggaaatatgtatattattttggtacttaattaggtgtaagtaagcatattcctaaacatgttggatattttctccctaaggtgcagtcatttcgatgaaaaccctatttgccctaacacttgtacatcaagatttgttatataatatatatatataaatatatatatatattatataatatacatatatatagggccgacttaaacagttttgagagctttgggtgaaaaattaaattaattgatattttattaaaaaaaaaaacttcataaattctaatatggataaaaaaaatttaaatcatatgtattgagaccaaaag

SEQ ID NO: 80208 - DNA, 2095 bp, Cannabis sativa
aaatagttggagctgaaaccagtcaaaaccagctttagcatccaacataaaaggcagccactctcctttaatcgagtaaggtttttgattccgttgtacattgtttcagacaataggcatagagagaactcaaagttttgagagagtttagagggatgttaaagtcaccctcatgtatttgattgaggggacttaagcgaggttaattgtaaatgttcttactctatttttctcttgcaaaatgtacatttggattcaagctatcctccatgtaaagtgatgatcatgaatgaataaaagggttgtaagttttgttttctttcatgtgttcattttaaattcatcttctagttcttgttcaacttcattttctggtttatggtttcttgtctttgctggttttgtttttgggatcaatcttgttactgctagatgattaacaatgtgaattaagggtgagtttttcaccacaaatgatatcagagcaaggtttcaagattctcattcaaacctccaagattgatcttcaaacatcaagaaactgttgaaactaaatggttgttgcaagattcgagatggacaagtttaatggaacaaataatttcaatttatggaggattaagatgaaagcattccttgtgcatcatggaattcatgaagctcttgataaagaggctatgaaactgattgaagacaagaagaagaagttggaaatcgaactaaaggcatatagtgccattcttcttagtcttggagatgaggtacttagagaagtgtttgatgaagaaaaggcacttgggctatggaacaaaatttcttcaatttacatgaagaaatcactagctaacaaactgtacctgaagaagagatatatactcttaagatatatgaaagcagagagttgaggaagcatcttaatgatttcaataagattatcttggattttaataatcttggtgtcaaaatagatgatgaagatcaggccacaatactccttagttctcttcccaaaatgtatgaacattttgttgataccatcttgtatggtaaggacactctcaccatgactaaagtgaaggcaccactcagctccaaagaaattcaatagaaaggtgatgagggtggggatagcaatggggagggactgttgattgtcaaaagaaaatttcccaagaactacaagggaaattaaaatcatcacaaggctaaccaatctagaacatgtgcaaaaggtccaattgggggatcaaattcaagaggtaacactgggaaacaatgcttctactgtaaaaaaggagggacatttcagagataaatgtctggctttgaaagaaaaattcaagagagacaatcatcaatcaagaaccaggaatcatgaggaagctgatcttacagatggatgtgagacagttgatgtcctggtggcatcaagttctaactcatgtggaggatgggtgcttgactcaggctactcatttcacatgacaccaaacagggaactactcagctctttctcagaagagcataatggaacaatgcttctaggcaataaataggcatgtgcaattcaaggaattggtgtagtaatgattaaaactcatgatggaaaacttcaaaccctgcaacaagtcaggtatgtccctgaacttaaaagaaacctactgtctattggaatgtttgacaagtctggttactcagtcaagattgaaggtggagttatgagaattgttcatggatctcaagatctaatcaaaggtcaattaaacaatggcctttatttttaagatggtaaaacagtcattgagagtgcaccacttgctgtacataaccctacaacaagccaaagtagactttgacatcttagacttggacatgtgagctaaaggggactggaagaattaaacaggcaagggttgttcaaggagaaactataagaaaggctagaattttgtgatgatgtgtgcttgggaaggcctgcaaggtaaatttcagtaaaggagaacacaaccacagagaaacttgcctatgtacattcagacctttggggaccatcaagaattccaaccatgggaggagcacactatttcatgagcat

SEQ ID NO: 80209 - DNA, 1424 bp, Cannabis sativa
tttttttatcttttggcccccttaatgttaacttctgcctccgcccctggccggaacaattggtattgtactagttgtacctatagaagaggaattatatggcaaagtgaaccaagagtgcagtgtagtcatagtcacaaattgctcgggttgatgagtattaagaaaaccagaacgacaagggaattcttactcattgaaggtaacatgtcttgagatatatatacgcccatgaggactgaggcatttatatcccttgtgaacctcactgtacctgaggttcacacacttaagagtatgatactgaaacttgtgactctgatagggatgaatgcatggaaaacatgacgcaccgaacacttttaagaacttgtaatcagggactcgagaaaacaaatttcataaggtgatttgccaagaaaaactggtgtaggaaggcgatttatcaagtaaacggccgtttggaaagcatcagaccagtaattaagtggcaactggcctaagctaacaatgtgagccctgtttcgacaatatgtctatacttatgcttggctcttccattttattccgaggtatgaggacagctatgatggaaaaatataccactatcattaactaattgggagaaagcctgaaactcacctccccaatcagttcttagttgtttaattttcctatcaaattggttttcaacaaggtttttaaagtgtgtaaaggcttgtaaagcatctgatttctgttttaaagggaagaaccaagtgtacctactataatcatcaagaaagtgtatgtaatatttgtaatttgtatgtgatgtaataggggaagcaccccataaatcagtataaattaaatcaagaacatgagtggcacgactgctggaatttttaaaggttaataaatgagatttaccaaactgacatgcatcacaaaaactatgtgtttcattactcttagttttgacattacaaaactttaaaacttgatttacaatagaaattgatggatgtcctaggcgtctatgccaggtatcctttagggaattagaagagagacaaacattcttagattgagatttggtggtagatgccaatggatgactttgagatgaaactgtggtgtgaaaacatgctagagtaggactaaaatagtacaagccatctctaattgttcctcgtagcacctccatccctgttgttagatccttcacacaataaaaatcagaaaagaactcaattgagacattattatctcatgttaactttgacacactaataagattcttagtaattgaagggacatgtaacatatcattcagctttaaatgagtggaatcagtgaggtttattctatcagtaccaacatgtttgatggcaagtctactgccatctccaataatgatgtgttccttaccattatactcc

SEQ ID NO: 80210 - DNA, 2670 bp, Cannabis sativa
atttgtgcctcatttcgcaaagcccctcctgacttattatgatttgacaaagtttcattaaagtctccaattactaaccatggtaggaaaggtgcaacatcttttaatctctctaaaagtgtccaagtgtggtgacgattatgagcagccaaagcaccataaaagcagtaaactgccaagttggaccatttccacaagccatgtagaaatcgaaaatatttatattaaaatttaagagggttacatctacatcatctttccaaagtaacgtcaaacctccactaagaccaacaggtgggacttcaagtccattattaaaatgtaaaacactacgaaagtgagaaatagaattaggattcaacttagtttccatgataaataacacacttggggattgctcttttacaagcaatttgagatgacggaaagcactcaagttccccaaaccacgagagttctaactaatgattttcatggctgattgcggagctggacctaagactccgcattgctgtcatttgcaccagtagaatccatttggtcaatagaaacatcaaggtggggttcattctcaactgacaaaggagaaatgaacaattgtgtttgattgcccatgcaccttttaagagttcgcctcaagctaattccctccgattgccttttgataagacaatttggtgacaaattttattttccaccttgcttttttgcaccaggagtaactattggctgcgacatattgtaagtattgcagggaattagagtgtcaagttggcatgtttttgtttgcttgaatggactgcttgttggagggtaggttgcataaacatttggggctctgttcattacaacaaatggggtaaaaaccccagacagatcagtaaatgcatcacttgttttaggctgtgatgttgagcggttcatagcagcagagtgttgcatagttttgttggtaagagcatgggatgcatccattggtagtaatattgctggtgtgaagtcaaccgaaggccttgatgcattgttggcttgtgtagtgagggattcagcaggaacagacttgtaattttcaagagcagtgtgtagatttgaacatctaagtgagatggtgtgtggattggatgcttctgcaagtattggtgtaatggttgttgtgacaaaagaggctatatcacttaattgagaggcttcgcctttaatcagttatcttggatgtggaggatcttgattttttcagatttggaattgccgagatgagggaatttttggccaaacgagtgagcaatggccaagcatcaccctttgagaagtcagttcgatagcggtcataactcgatatcggcagtggtgaacccttcatggtaggcctatattccaactctggttcttcaccattgtccatcttttcaagataaattaggcacttatcaaaaggatgccccaaacgccacactccatacaatattcgggtagtctttcatatctgaattctacccaaaacttttcctttgcttgctgtaaatttatcattctacctctcaacaatggttttgttgtatcaatattaactcggacacgtagaaaaggtcccaacccctcgttgagagaatcctcatagacatctacatattcaccaatgatgttaccaagagctttggcaagccctctagttttgttgagaaaaggaagcctgtatatctgaacccaaaaaggagtaaagatgagggaaccatagtgaacattctatccaggcataggcgagtaaaatacgatatgatggttttgaaagtggtatggctctttaagtaggacccttgccttgtctcctgcgtagccgaaacttagtgaaaacatttcaaaagactcagtaatcgtgacaggaaaccagccattccaatattgtgccatttggttcttgaaggtggaaagccatacttttttgggtagtgagaaccttggcatataacacatggtcagacgtagcatgattatcaacaaaagtcatatcagttaaatcgaaaacagattcctcatcctttgtttgtttcataggttctttcatcttattcgtgtaaggatccgagcaaccggagatccaatgcagaaaagataattcagttattgataggaagtttgtgaaaaaatgcagagagaaaactaggaaaaaacaagaaaaaactgccttaatcgtagaaaactgccacagagcaccaagaagtgggcaggcgctctaaatttctaaattttgtatttgtttttattattgtattttaccattgtatttattttgttgtattagagaagatttattaatttatgttctgttattattgattaacatatttaaaatttatatgataatataatattaaaattttaaattgttaatataacattcataaatgatatttttaaatatttaatattaatatatttttgaaattaagattatttttgaattgacatttatatatatatttgaaaataatttaatagattattaaaagaaaaataagaacaaaattatgtattattttttaattatgttattttaatattattgatgtttattttttgaattacagtaatttttaattgtgggtgatattttaattttttttcaacttatataaaattgattcattgataatatgcaagatataattaaca

SEQ ID NO: 80211 - DNA, 1426 bp, Cannabis sativa
tttgtaaaaaaatggcaaaagttagtacaccatgtaaatttccctaaaaaaataccaaaggtctttcaatccaatgatccttaacgagcacgcctacacataccctgaatggttttgatgacgtggcattttgggaaaataaaataattattacaaccatcttttcaaaaccctcgacaaaacaatcaaaggtcatcatcttgtgacaataacttccctgcctctctttaatagtgtccctatatgacacagttattaattacaaaactagggacatgtgttatagtgtaaattttttgcctagaaactcgagagcagtctcttataaaattaacacgtggatccaatctctgagaaaaagatgacctgttaattaatggctctcgaagctttagcctcgctttatttgaacttacaagatgatgcaaccttaacagggtctagtcgcacactataccttgcttagtcaaagacaagcaggaccaaaaagatttaatattagtcgcgtatatatcgaaatatgtgcgacgactaagtagaccttcctcacgactagtgaggattgcttctttacataaaaattggtctgaatgactgatcatgttcgatgactcgtcagagactcgcatgtcccatgacgtcaacatgtaagatgtttgtttatgcaatctaaggtgaatgcagacatctgaatgatatgcccatgagccatttaagcgaatacaaaaagcactaagagcctgcaaccttgtgcgagaatatgaacatgcaactcatgctcatcaagtcgcatacattgccacacttaatataagaatgagttaaattgttcttcatttattctttaacatttgttctgatttaatactgtcatttactgtaaaacggttctaaaacagaccagtaatgtaaaactaaaaggatacttgctttttatataaaggagtgatccaaatcaaataaactaagctgaaatctttgcaacagtggactaaacagaccaagatctgactgaaccattatactttttttgtgttcttgttatttctagttttcgttatgtttgttagtagctaattttttcaatactcgctactctaagtgagtactcacaaattttatttaggtattcttaatagcattaaatactcgcataaattttagtattgtccaaattcatcgacaataattaaaatgaaaaatttatttaaatcggccatgaacttatatatatatatatatgcatatacgtatataagctcaaatgaactaagacagagataaaaatttgccttgataccaactattagagattttatatgaaaacatgaagcatatatgattgtgtatgaaaagcggaattaatcgaacatatacacgatatagttaaaggatcgaaatatctccagccattgattctttgagc

SEQ ID NO: 80212 - DNA, 2065 bp, Cannabis sativa
  modified_base (26)..(40): a, c, t, g, unknown or other
ggtgttaaataacatacttgtgagtnnnnnnnnnnnnnnngtaaaataaatttccaacagttaccctcttcattttcatcatcttgttgaaggcatccaggtggtatttttgctctgtcaaaccttcattcgggagcatattaggctccttgaaatttacgggcaagggctctgcctggatctctcttgagaaaggggactcctcgtcaaagtcgtcctcttcccaattacagtcttcgaatgcggctgaggctattctccattgtaggtcttccatctctttgtctaactccttcctcctcctagtcagcttctcctgcaaatctgtggtggctggctttgccttcttctcctcccaaagagagtctactatcggcgagcgctttttagctatggccttctggtggagtttctcccttaagtctccctagaccaacttggactctgttttcttaggttgtgaggagggctcaagatttctccgagtagaaaccttatgcggggatgacttaagggtgttgcttgttgagtatcttgaagccctttcatcccctggcttgtctgtcttccttatctctgcctctgatgctcttcgtctgactagtggtatctcagggcggcctctaaggagttcctccaatgccatttgcatgtttgtgaccgtctcttccagtcccaggttcctcagccttagttcattcatttcctcatcgtgcagtcgggtccgtgaacccaaacttacagagtaggtcctcttctcttctcccagttgttagtgggaggttcccgggtctttcgaccctggcagctgtggtgccttattggggacaaagctttcgaccgttgagctctgttgcccacttctagcgtgagggaggcagtcatcccatcttgggtgcggttcactgggtcatcctcgggtcgcccattctcttcttccattgagggtctttgaccttttgtacctcctccattctatggtgcttcatcaccagtccctcttccttcggcaactgttactagtgggggaggtattgaagcgatcaactgatggtcatcaagtcgtacctctacttcttgacggcagcgagaacatctcgacattttcgtgtcacttgtattagggaagaaacatcgcttttagactgtcgcttcccacagacgacgcaaaaatgttacagtcagaactcgttaacgatatagataacttttttaactaataatattgacaaactttaatggaactttgactttaatgccaagaagaaagaacttcagaatctctaaagtgattgaaagtaatatctcataaactctctttcaatgatacaagtttttccctctggccaaaaaaaaaaactcccctacaatggatgggagagtctaatttatagccaaccccttctccttacaccttcagcttcccccatgcaccctatgaccagtcgctttcatctatcattacactttcccctaagcaacatgccatgtctagaatcctaaattacactaaaaaaaagctcctttcattttgtaactcggatagaccaaaatttgttcctgttatataagcagattgatccgctgttgtcccctctgacaccttctcagtaattctgctgatgttggggaggaaaggtagatggacggagtcctgaggctgtgtacacgggtggggggctggttgggtgtgcgggctagatgggcgcgcgggcaggctgggcgtgtgggcaggctgtccacgggcgcgggtcgtggcttgcagcactcttaaatgtggatgcatccaagagatgcatgacgcgatttgactaaaggatacttacaagcaaaggacgtgggggccgccttttgtccttttatgtttgtatggaatacccagtgtcattcatccgcctgcttgctatttatggaaacctttcacttctcctatttttggtggttaacagatattagttacattacaattgcataaacattttgctaacagttatttcttcacatattactattaaggtacaagtaattatcgatcaatgacaaaaaaaatactcacaaatagatt

SEQ ID NO: 80213 - DNA, 3043 bp, Cannabis sativa
ttaggctgagcttctcactatggggtactttagtgttatttgtaaagaagaaagatggattattacatatgtgtattgactatcaagaattaaataagctctttatcaagaacaaatatcctttacctagaattgatgacttattcaaccagttaaagggtaagacaatcttttctaagattgagtttcattttggttatcatcaattgaggattcaagaggaggatatcttgaagactgcattccatacaaggtatcgacattatgagttttttgtaatgacttttggactcactaattctccaataacttttatgggtttaatgaacaaagtgttcaaggattttctagataaacatgttgtggtttccataggtgatattctggtgtacttagaattagatgaagaacatgagcaataactcagattagcacttcaacacttgcaggatcacaagctgtatgccaagttcaaaaagtgtgaattttagttacctcttgtttctttccttggccatgtagtagacagaaagatgtgattatggtggattcgaccaagattgacttcgttcgggattggccaacacctaaatcagctactaaagttaaaagttttttgggcttagctggctattattgtcaatttgttgaaggatttttgaagattgcaacgcctttagcagagttgacaaggaagaatttaaagttcactcggattgatcgatgtgagaaaagcttacaggagttaaagcaatggttgattactactccaattttgactcttccttctgataaggaaaaattttgttgtatattgtgatgcctcaagactaggtttaggcggtgttttaatgcaagttggaaaagtaatagcatatgcttctcgacaattgaaagagttgtagaggaatcctactcatgatttggaacttgcaactatggtatttgcgctaaagatgtggcaacattacctatatggcgagaaatgtgaaatatgcaacgatcataaaagtttaaaatatttcttcacacagaaagacctgaacatgagacaaaggtgatggctcgagttagtgaaggattatgattgtgaaatcctttatcatcttggaaaagccaatgtagtggtcgtttcctgagtaggaggggtcaaggacaaatgagtaaattgagacaaatttcaaagcagttggcatataagatgacaaaggctaatattaagctagttgtgggtcaattagccaacattaccctttaatccacattactggaaagaatcaaagaaactcagcatggagatcaggatttggttaagattgagaataaagttttaactgttaaggctaaagactttaccatggatgaaagtagtatgttacggtttatgaactatgtttgtgatcctacggatgctgatatcaggaaggagattgtagatgaatcccataccactccttattcttttcacctcggtatggccaagatgtattaagacttgaagaccatgtattggtggcgtggttggaagaatgatatagtggaatatgtttcagagtgttcgacatgtcaacaagtaaaagaagaacattagaggcttgcgggactgttataatcattgaatttatcatatcagcagaatggaaatgggaagatattacaatagacttcgtggtcagactacctaataccacgggaaaatatgattctatgtgggtaatagccgataggtctacaaagttaactcactttatgcctgttagaaaaaatttctatattgatatgttagaaaaatagtttgtcttcatggtgctccaaagtctatagtgtctgacagagattcgaattttacatcaaaattttgggacagtctacatcgagctatgggtaaccaattaaagttcattacatcattttattctgttcttaaacagatggacagtctgaaaggactattcaaattttagaagacatattacaagcttgtgtattggattttgaaggatcttggataaagtcccttcccttgattaagatttcttataataactattaccagtcaactatcgagatggctccttatgaactactttatggcaaaaagtgtagatcacctattcactaggatgagttaggtgaaacaaagttcttggatctttaagctgttcagaaaatgagcgaggcaattgataaaattagggctcgaatgcttattgctcagagtagacagaagagttatgctgatccaaagcggtagaatgttgacttttaggttggagatatggtattccttcatacccatgaaagaagtaaaatgcttaggtaaaagaggaaaatacagcctgaggttcattagaccttttaaaatccttgagaggatagggcaagtggcgtacaggttggctatgtccccagcgctagcatctgtacataatgcgtttcatatctcaatgcttcggaagtatgtgtcaaactcatctcatattttgagttatgatgctatggatctttagctagatcttttgtatgatgaacaaccagtagaggtactcgaaagaagagagaaagttctgaggaacaagacactggtgttagtaaaagtgttatggagaaatagcaaggccaaagaggaaaccaaagatttagaatctgataagaggtagaaatatcttgagctgttcaggtaaatttcgagataaaatttctataaggatgggaattgtaatatcttaagattagtaaatggattagcaaccctaattaaattaattaagtataaatgagtaattatattattatataattaattatgtgaaattatttggaatatttgaatttaagaccccatttgtgagttaggggcattttcatgattacggcctgagaagggtaaaattaggattttgttatatattgtgctaatggactatattattatataatatgttctttttgtcttattgtatgtgatttttgaaagttttgcctaatatggtcacgatcaggtattttggctcgaacagggttcagagtccaaaatttatga

SEQ ID NO: 80214 - DNA, 1357 bp, Cannabis sativa
  modified_base (59)..(66): a, c, t, g, unknown or other
gcggattggattggatccaaaaataaaatccgcacttagtgcggatcggatgcattatnnnnnnnntagtgcggattgaattggatgaatactcctacttctacctcttgagaaattaaactttcattgagggggtccttgtgaagatcttcctgacaatgatataaaatcttgcaattttctcttatcagcaacattaacatctccacatactttattaaaatcttttaaaaacatcttgacactttttcagcttttgcataactaaaatataggagttccattagttcaaaaaaaaaatataggagttctataagtcttcgaccaccagagctcgtaaggcattttttttgtttttaatttaaaaatgatttttaaataaaaataataattaacttggactaatcaccaacttaacacttaactgtcaaatactcgcagaaatttgagaactctaacagaaattatgtacttactatcaaaaaatttagttagaaagttatttgcaatcagaaattatacatagacatttatgccacaattactccctttaaatattcgaaatatgaacttcccaatatccacctagtttaagtgacttactactatacataatgtgctatgtttttttttttttttgaacaaaatggatgatacttttattcaaatgacaaacaatttacaagcaaaaagcaagctgaaaccagccgccccaaccaaagaacagctaccagctgtgaattacattaataatgtacaaatccctccctttcaagtgttgaaaactacaactcataattctatatataacaacattttttatctctctgctcaccaaaccaagagcgcgacagcacctattaaaccagcagccatttctattcagccaaaggaaataaactgcagtagtcatgacagtgctcatcaccctgtctagcaagttcttcagcttcttcgaacaccaatccttccattgcttgaagtccctcggccagttagtcagcccaaaccaggtacctatatcagacgtcactaatttggcaaaataacactcaaagaaaacatggttgttggactccgggtgcatctcacaaacagggcagttcttattagcaatctccattactctactaaggtgatccctagtcaatagttgatcatttatagcttgccaacaaataaacctatgcttaggcacacacatcttatgccaaatagtaggcgcatactcagagatatcagcagtgatgagagaattatagaacagtctagtcttgaatttcccattcttacccgcccccaggagagcatctcggttaatggtctctctgagtctcaagattttcttgaaatacca

SEQ ID NO: 80215 - DNA, 1931 bp, Cannabis sativa
  modified_base (233)..(233): a, c, t, g, unknown or other
  modified_base (296)..(300): a, c, t, g, unknown or other
atacaaagagataaaatccttaaagtataataaaatccttaaagtatatttaagtttgcttaaggcagattataactgcaactacgaggcagaatggacaaccacttaaaaatcataaagtttggtagactattaaataataaaacaagaagattacgagcaatgggaaaacccaaaagtgatgtattttgaatcaaaatataattatttacattgtgaataataacacaagnaaatacaattgtattaagtttgaataaaaacagtacaaggcatttaagataagaaaaacctannnnngattacaaacttgtctttacaaaaatgccactaggggcaaaccattattttgttctcctaagcagaggatgagagaaaaagaccgtctacacatagcttggagaaataccagctacacatagacaagaaagaccgtcttcatgtagagagccttgatctctgcatagaccctattctcctcatcatctgatcccatttcctaaagccgagactgatttcccagcctcaagaaatcactcaacactaaagaaaggctaacacaaagatctcttggcacaggatagggtcttaagttggctggttactctcatagaaatcaggccaacttcctccccagatttacctaatactatgcagatcatcctttgaaattattcatcaacttgaggaggatctttgacattgctcacaagatcaataccctcttggatcacttatgagggtcggctatggcagatcatggggttcccctggtttggattggtcagaagctcctcagccttggagtccattgattgatacatctaggtattatgagtttgggaagataaacttctgaactcagaagagatatcatggccgaaagaaagtaatcgactctaaaaatggatttcaagcaagaagaatatgagtaggcgcttcataatgatcttcaaaatcatacaattgctagaatcaaaggagacatcctttccaagaaaggattttgatgaaaatgccctccgtaattattaaaaagattctttttactaaaaaaaaaactttttaaggggccattattataactaaaattcggttggaggacaagtgtcaagataaagataatatgaatcggtgtcgtatctttttatggaattactcattaattgagtatttactagagtatatttgcaacctggtgagtgtaaagtcttaggcgaggaatcaatgtacgaactggtacgtagagtattaacaagacaccatatgtggataaaggagaatagcgaggcacccgagaagagtaacgcataccctaacttgcaacacgaaaactaagcgtaaaagtcgaatcggaagagcaagaatgcgagatggtcatctcactacgaggaagctccctatagtccacttatctaacaggagcaaggctcataaccctggcaagtcaacatatttccttatatctgcaatcaacataaaacatatcttgttgatcttggttataagaatggttccagcttgccgttggggtcactacaatcatgtttctgtcgagacatcttcagaatcgacaattaaaagacgtgtttaattcacgatacttctgacccagtaaaagcaggaaagtcacagctgtatggctttaaaaattatgtaccgcatttacatttataatcaaatcccacgatttaagggataatgactgtaattacagttttgttaactttgtaattaattgccactatgcaattataaatagtggcaggtaagatcaaaaaaggagagaagaaaacggactcttacacgagaggccctaaaaaaacatactcagaaatctgaatatgattgactggtggactatggagaatgttaactgcaaaaaaacaacaaaaaattaaatgtttatatttttatagtttttctgtgtt

SEQ ID NO: 80216 - DNA, 1902 bp, Cannabis sativa
cactcctcatatcgcgacgttaatggaactatgtctattttgaatttttatttctcacgagaattacaagaaaattgactaagacaagaactctaatttctagagaaagaaagtaggtagagatgctctaacattatgaggacttagaaaattgtgaaaaatgaactagggatctctcattttatagggaatgatgtcctattaaaataataataaaatattacaaatatgaaaaaatcactttgggctgatctttgccattgatgataatttaatggctaaaattgactcttgatgaaaatcgccaattttcagaacttgaatcttacccgttggatcgttttcaagtaatttgaaaaaaaattgcacttttcttggacatagattttagactcaaaatcttcaaaattgttatgtggatgtgagacatgacttgaaagagctttgaaagagatttaaaacgaatcgctttaatcagatcaatatttaaggagttatggttatttcactaaaggttgttcagcacccagcgcccaggttgacatcctaatgtcaacctggatgttgagtaagtgaaaaaacgttttacacttgtacttttttatgcctatgtgatatgttgacatcactttgccaatttcttagttttggtgaagttgctcaccagttttcggagatctcactttttggtgaaatcgagtagactcgaaacttcctgattttactaatattccaccttgttaaaatggtaaaatatcaaagtgcaaattttactgatcacaagtcgtagctctcctttactataaaaaaaatagtcagatgcttgagacggaattggaatctgataagcagaacccaacgcatcaagccatacgtcaacttaggggttgggtgcttctcaggtagctatctggggctcgttttgatacttctaaggcattttaccaaaataagaagaatgctcagagcagaatttgtgtttgaggagcgaaaacatctaaaccaggttgcatgtcaacctgggcgcaagacccattgcccatgtcaacttgggcggatgtgtccctgttttgacctccaaaagatcttgtttgctctctgagatcacttgtatcttcattattttttaaaaacaaaaaaagatgcccagaacactttttggaaaaatgagtagaaatggcccaagttgacaaaaaatgtcaacctgggcgaccaaatggttctttttgattcccagaaacactcgtatctcatataatatgcccgtttgaaaactgaatatgcccaaaagacttctcgaaaaaattaattggaaatggcccatgttgaaaaaatgtcaacatggacgctaggcctagcgcttaggccaacctgggcgttgggtccaagttttggctctcatatgacttcgtttgtttcccaaaagcaccaaatttttattgttggtgaaaatggaggatatgccttgaagacttctacttaactattgttggaaatggcctaggttgacaaaatgtcaacctaggcgttgggtcccctgtttgccctctaggatgatctatttctttcctgatctaatctattttctaattttttaaaatgtttttacaaatttagccaaacgccccctataagtttttaaaggttatttcgtgtttttaaaaattgaaacaactttaagttataaagtcaaacaggcattaagaaaacaaagactttgagtaaagaaaaatgttgcttttcaaattccatattgtaagatttggtttttaatcttagggagttttaaaaattgtcctggctattattttattatttttttatggactaatattgatttgtttgattacaaatattagtctaaatcaatacaaaatgatcatacgaaagttttagtcaatt

SEQ ID NO: 80217 - DNA, 1250 bp, Cannabis sativa
attctcaaagatgcattaaaggtgctttctttcttatgctaatttattggggtttttcttgtatttattgcttttatgtttggttgaaattctaggtctcagcatgattggttattgttaattttctgtggaattgggaaaatttaatacccaattttgtataaggtgaattgattttgctggttgggtaagaaattgttgtggtgttttggattagtaatgaagaaattggttgaatcttgtggtgtgtggtttagaaacttgagaatttagttcacttctcagcctactatggctttttttagggattatttttaaaagtacacaaaattaaccaaaaaaaaaaaaaaattacaaaaatacagatgtagagaattttaaatatttttcggtttttaagattttatctacagaaaataagctcttttatgttttcgtgttattttgatgttatttttcggttattttcacgtagtttttttattgttttcgttttgtttttatagaatactgaaaaaatatacatttgaatatacaagtgtaaaatttttactaaaaatagtattttgtgtaaatttctcgttagctatataagtgagaggagtgtcttgggatagaaactaagtatcaagtacagagttttgttctatttttgttgttgggttctgctctgctgctattgtacttaacctttgatcgataaaagtgttcggcgttggctgttcttttggactgagggtcaagaagagctgaaacacaagatttctgtgtttgtgtttactttgttactgcattagttttgatccattcgtttgtgtaagatagattatttgttttaagtgttcatagacaccacaaatctgaatgtttttatggcaatgattgatgagaatagatatttatatgagtgacattttgattttgagttgtaatgttagaagctcatttaatgtggtgtttgcttatgtttatgtttacatttcaagcttttgtttttgcttatgcattatgccttaatcaagtattcctcctatagctggttcattctttcggtttgaccatctgtttggtgatggttagtagtagaaaacttctcgagtctgatcactgatgatttcaactgagctacatcagctgggcttgtatgaggctcaggaataaaaataccctactttgagaaccgatcaatcacaaccgaaattgatctcatcccatcaaacttaggaaaccccacaatgaaatccattgcc

SEQ ID NO: 80218 - DNA, 999 bp, Cannabis sativa
ttgtgctattaggaagtagcaagaaaggttggtgaagtcatagccaagaattgtttggagaaagggatcacaaaggtggcctttgatcgaggtggatatccataccatgggcgagtagaagccatcgccagtgcagctcgggaaaatggacttgatttttaaggttctctgttttgggtaggttttgccttttgtacaatttgtttctgtctcttgtaaaaccatgtgatagaagggcattaattgtaatctttttttctttcttttcaatgagctgcaagaacattcggttatatttttgaactatctgatcttggttattttctccgtcgtggagtgtggtcttgatgaaatcatgatgttcttcctcctagtgatagtcatatcatggttatttccttggctagttaaagtcggtgtctttagccttggtgatcaaggagaactggccaactgcagccattgtctgcttcacaattccacaaaatctgtccattttcatctactctatttttatggaatcatctttctaggattttcagtttttcttttattttctaatcttttctttgaagttaatagctcacttttttcttagctcatctacttctctatttttattttcagaataaggaaataataaaaaggaaacttgtcaaaagaaagtgtagatatattagattaaaatttgtctttataactgtaatagatccatagacatcttaaaatgcagtcaaaagtctattgacatctatataatcctaaaattttgattcattgcttagagtcgatttttggttgcccttccaatgattattttgttgttttaggttggtgaggattcagcttaaaatgaccgtaaatttagaaactaaattagtatatgccccttttcataatttacttaataaaaattaggggttttttcatttttacacttcaaaatattttttttttgcatttttacggaattaggcatagaaatccctattgcaacta

SEQ ID NO: 80219 - DNA, 1124 bp, Cannabis sativa
tgattcaaaaaccatatcaacaaaagagagatgaattttgggtcaaatcatcatagatgatagaatcaatcagcaagtaaatataagatacattgtctttctttcttttaaccaattgatagcgtaaatagaatgataaacataaatattaccttgattccagaaggggtttccatgaaactgagcttgtatgtattggtcctgaagctgtgaaaagagcaaccttgaccaggcaattgaggtaccccaaggtttcctctctccgcactacacccaaaacaaattccattaaccctatactgaaatcttaaaaaactcaaataaaactggtcaagatgaagagaaagacgaacatggtgggatccattttcgcagtcaatgacttgagggagaaaagcaaaccaaacatgagcttgtggtcttgctgagagtttaatgttctgagagggcgattccactcacggtagagtaagcagacgccattacgattgaagatgtacatcatatgagcattgttgccggaagctgtaggcaccggcggcgagggactgatctctgaacccccaaaaaattgcattcttcctttcctttatcgaagtggatctgatctgatctgaattgatcggtctggttggttcaaaagacgattttaaggattgtgattctttatggtaaagtgaattgcaaaagaaatggatttaactcgttcttcggagtttgaatcatggatcaatgaaacaaatttgcatattaaaacaatcatcgattgctctctcaaaaatagcccaaaaaagcaaaaatcaaatgaacccaaaacaacatttattgaaattgtacaaaataataatgaacctcgagaaaattagggcatagaaatatgaatgaagaagaacgaaccttaaacaatgattgagaagaaggaaatggaagagcaggaacagggagcaaaagagtacaaattcaaaccattctttttgatagctttaataaatgggattacaatttacccagttacataaacatctcttcactccttcccaaacatggaattacacaatatattatttacatggcaccataaaataataaatacacctcattattaaaaaaaaaatataaactta

SEQ ID NO: 80220 - DNA, 1211 bp, Cannabis sativa
gacttccatccatcaattctagccaggaatttcttcactaggaattgataattatgcaattcgtttttctttgagcgaaagagtggcagagctaggtatttagctttagatttcatcttgctcaagcctaagaactcagcaatctcactgctacttgccctgggaactcctttagagaagtacaccgtggacttctgaaagttcaccgcttggccagaccaagaacagtaggtgtggatacattgaaggaaggcctcagcttctttcaaagtcgcttggccgaaaagtaagatatcatctgcgaacatgaggtgcgtgataggtggagccattctagagatcttgaagcctctaagtttcccttgctggcaaaagtccgtaatcaaacgggatagtagatcagcagcaatgatgaagagggtaggggagagcgggtctccctgtctcaaaccacaagaaggagaaatgacaccatgcttagccccattaattaacaggttaaaccgcttgatttgaatgcaacttctgatccacttgacaagtggttcattgacaccatgaaactgaagtgcctcgccaacaaaatcccaatccattttatcaaattccttttccaaatccaatttgatgatcatgtaccccttagtacctttccttttggacatagagtgcacaatctccttagccactgctatattttcagagatgaaccgtcctttgataaaggatgtttgggcgggggagataataaagggcagaatcggtctcagacggagcgcaaggattttggagatacatttatacaccacgttgcagagagcaatggggcgatagtcaaagactaaggccaaattttcctttttcgggatgagtactaaattggtgtcgttaatgaagaaaggaagttctgaagtggtgaagaagtgagacaccatttccagaaagtctaattttattgtctcccaatgagagcggaagaaggctactgggaggccatcgggaccaggggccttgtccaaccccatagaagatagggcgttagtaatttcattcacgtccgggacggcgtataactcatcactaagaggagtcccagacacttcatgagaccattcataatgtagcaaactattacggccctgaaacttagaaaatatgtttgagaattttccaacaaaggcccatgtaatatccttcatatcttcaagctt

SEQ ID NO: 80221 - DNA, 1504 bp, Cannabis sativa
tatcatttgaggttcttgcagcatgtttggtttcatagtcagaaccggtccatagtttccgagaagaaaatatcggaacagaaatcaccccctaatccagcttgagctcaatcattgtcgacaccttctaagagcaaaacacaaggaaactgacaagggcttgatgaaataagagggcattcataattacacttgaagacactcacattgccccaaccccaagaaaccatatatgggctgtccctgtccagaccttcggctcgaaaaaaattggatggtgatacatagttcgtaaatgcaaggacctggtttgtgtgtcatcacaggtattgtcgaaggctttcaccactaatggattccatttccttgagaatctcctgcgcaagggacttgacagagggctccatatcctcgagtagttccccgaggaaggggatggtttcagccaggaaaactagatattcttctctgagatgctcaaccaaatacttaactactcttaggcctagaattcgagcccgcaccttttcacttcgagtctgcattagtacctacacatagtgtacagaaatgcaaaatatgagtcagaaactattcagctggtcaaatgcagtaaatagttgaaagaggcaagaataggtgagcggaaccattgataacttttgaaaagatccaattaacaaaaacaagaaaagaaaaagttataaaatcaaggagaaagtgctcaggattagtaattggtcacaacatagcaatataaatataaagaatcaatcctctaaaagcatgactaataatggaagtatataagattccaaaagtacctcatggtttaaaggtttccataagacgtcagttgctgcagtcactgccatttgaccgatacaaacaaccaacaagtcgtcaacttccttcactgatggcaagtttgaatgttcttcgagggaacttggtggttcaatagtgagctgagaaacaatgggcttcaaaagaacctacaaacagaaatgccaagttcaatcaaccaaggaaacaggtaattactctagtaagctgcaaaacatgtttttgacaaacctacaaaccaaaaaggccatttatttctaattattattctagaagagacagatatcacatgcctatgactgacctcctcccaaataaattgagagccttcactcatggaggaggaagaccgttgttacataaaatagacatcattataaccccacaagtgacgccgagaactactcattattactcgtaaccataacccaatatctagtcaaacttgttaccaaaaaggccatattcaatcagaaagggaattgaaagaaggaaagtaacgtgtaaacaaccaaacacaattctttctaattactttaatttttaaagggaaacaagaatttaaaataataataataaattattaaataaaaatatttttaaaaataataatagtaaattattattaaattatgtaataataaattatttttttaaa

SEQ ID NO: 80222 - DNA, 1662 bp, Cannabis sativa
catctaatgtaccacggaatatattccgtgaaagtacatcacaggacaaaatcatatccctataaatatattaatgactaaatatactattatttttgaaattaagttatttataattaccaacttaattatataatcaattcaataaatttgaaattgtaagtaagttgattgatcataacacaaacttgatgaatcaaacagtagtacagaaagtaaaattacacgcatagttatttaaaatattaatttacagggacacgtccaaagataagattaagattagtcggtaaagtaactctctcattgtttgattaataagaattcttatattaattctctattatatatatatatattttttatttaatgtattggtaattaattttttattactcaatcgttttaattataactttaaattacaataacataatcatgaagtttttatatataatcatataacttctaatggcatcaaagttattacacgattttttattcaaattttatggaaatttgcttgggattaatttggatattggaaaacacacttataatatataatttcaaattaagttttttatttaatataaatcgtacgtgctcataagattttttatttgatgtagcttttgtttggactgagaaaatgtatttaatttaatttacaatatataattctgtgatataacttggataactaaccttttgatagtgatgatttaatcatataaatatgtatatatattttgtaagctgggggatttaatcatatattaaatatatattagtgaatttgttttactattaaggaaaaatcatttagttacccatgcataaatttttcataatattttcgaaaatacatatcgaaatatttttttttaaaaaaaaaaaaaaaaaattcatggcgcggtattcgttatagttacaatatcatatttttgtaaatttttgaaaatattcgaataagttacaatgctaaaaataaatttaaagttttttgaacaaacgtggtaaactaaaatatcgaaaactctattatcggtacaattaattattatttaaaaattttcaaaaatttacaagaatcatgatattataattataacaaattttaatttttttttttttaaaaaaaaaaagaaaaactattacagcatgtgatttcattttcaagcatataaaattaattaagaaattttaataaaaaattacaattaacacttctaattaaataaacaaacttatatacaaaaagcattatgtaagtgtattttatgagacaaagtatatatatatatatatatgcttgtaatttaggagacaaattatatatgcaccccatagatatttctttttggattttatataaaaacacattgagaggaataataataatagcaataatttttgaaaaaaaaaaaaaaaaaaaaacagaagtatactttttcacttttcaaattaataattctaatatcatcacctcaaaataaattaaatttaagaattactgcttaaaacaattttaactactctaacttcttttacaaaaatttacaaaaatgctcctatatatacagtagaacctctatttaaaaatattctattcaagaataacctctaatttgttataaaaaaaaaaatcaagtctcaatt

SEQ ID NO: 80223 - DNA, 2134 bp, Cannabis sativa
  modified_base (895)..(898): a, c, t, g, unknown or other
aagaaacaaattgctaattattctattaaaaatcaattatcgattaaaaaaattacgtaaaactcaattaaaaaattaattgcatgtatggtgttgatgtggtaaatgacaattgtctaattatctatgtcattattctgtttgctatgtgtgataaaacttgacagaatgatcaatttacaacactgtgaataattcagagagcatttttaacaggctgaaaagtttacgggtataattatacataggtcatagtttgaaggataaaaatcttaaataacttttaatatatatatttggagtgtatttaaaagtttctgtgtaagacgagataaatataatatagtaattatatatgaaatgatgtagtaattatatatgaattgttaatgtttgagaaaataattagtaattatatagaaaaataatattatatttaataattactaaatataattatatttaattataatccccacaaacatatcaaattgtgtacttatatctaatttatatccaattctatttaaatcataactttccacacactccatacttaaaatctgcctatatgcttaatatagctccataattaaaaacaatctcacataataggacaatctaaaaagatacgttatgtttgaatattatttttaaaatagataatataaaaaggaggaagattagagtgtaaccttacctacttatttacaccaaaagtagccctgataatgtggacattgatatttgacatgcggtaagaaagatgatatctcggagttgagtagttttgaattataagaaatcagcctaggaggggtccctagccctgtgcccaggtggactttaggaactccgggatggaagttcagacttcaataacttgaatccaacnnnntatcttttagtattctgtactatgaatacatggggcaatcaaattcttaaacacttttatgttgttcaaattcttactaattttactttcttgaatgtaggctgagatacgaaagcaagttgaggaggggatagtgttagtagaaggctcaaaagacatactcactctagcattgggaacagaataacattgaggacgtgttagaggaatagggcgtggcatcacacaagcacagtttttcaaaactccacatccttaaagaaaaagagtcaatgacaatgatcacctgagtgaggtggagaagcgacttcaagagtcaaaagaacagggtcgtaggcaagacgaattattaaagcaactcctcgaaatagtccaaagtcaaagtggtgttgctgatacctcacatgcatctggtttaggtgttgggggagcatccaacgaaccagcttttcctgttgttacctcagttctaggagcaacaccagctgcaggggcctctgctccaccagctgccaaggcctctactccaccaactcccaaggcctctgctccactagttgccatgtgtgatcatactgcttctgttccaacaccaccacttgttgctccaccagccacaaccagtgcagctgctccaccagcaccatctctagttaattctgataatgtattatttacttgctttttaaaatgattttcataatgcatgcttaattttcatgtcataattatttaatttctttttcaaataaattttgtttgtctcttgttttgtttgcaaatgaagagattgaggtgtgatatgtacgtgattgatcccaaagaaaaagatctagtcttagttgcatcaggttatgtgaaacttgaaaaggcatataaagaaggcaatattataatacatggagtaaaaaagaagtttgctgattttaaacgtgtctttattgagaaggtggttgaagaaaatgccattctcccatgccctatagagcatgaaggcttcaatacagttggtttagctgtgaacaattttgtagcttggccaacgaacctaatcgacatgcatccagatgatttagcaaaggtattttgagttatttttatatcacttagctcaacaataattaatgggtttatgttcttaatcagttataatacattttgttttttttatttgtttaacgctttgaatttgtagtgtattgtttcaatgattaatgagtttgatttgtttagctt

SEQ ID NO: 80224 - DNA, 1319 bp, Cannabis sativa
tttaacgtaacaaacctcagcgaaattttagtgaggttattaaaaaaaaattaaataaacctcagaaaaacaaattgatgttacaaactactaacaaaccatctattttccaaccctaaaattgattaacatctctctcatttcatttcaaagcctcggcaaaacccccgtccagcctcttctcccaaaaaattcatacccatttcatctaaagaatcactcttcttcatcttctttcaccatgatttttgctttccttttcgaaaattttatatacaaaaataataatactcaatatgtattttgatacagtaatcggcaccatggaaaaaacatatgcataaacaataggtgtaattattattgcttaaattttattttaatttattattatgatttttgagtttattttgattttgacattagtaattttcttaatctctattttaacattggggttttattttaagaatcatgtggtaaagccttatttatttattttttgggagcttctagcaatttcagttggtgataaaatgttgaatttattggtgataggatgtggtccagcaggtcttgctttagtcgcggaatcggctatgttaggattaaacattggactcattgggccaaatctccctttcacaaacaattatggttttggggaagatgaatttaaaggtaccttgctttgtttttatttttgatttttttgatttctatgctctatactatttatgatgtaatatattatttgacattgttttagtttttaatgagttatttggttgtcgctttctctcagccaactattgtgagaaaatttgagataagctatttaaatactatatcatattactgactttttttcctttagaaaaagtctacttcttctatatattatagaatttaatatattgaaatatgcattgttttcatatctcggacttacaaggtgtattaagcatgtatggcaagagaccataatttatcttgacaagatgatactattctgattggctgtgcttatgaacaagttagtcatcatttgcttcaggaagagttgttaagaaggtaaggcttaaggcatgttcagcaaaaaaaacatcatatttatacatgctaaattgctaatagtaactttttagtgagaattatggaaatggtatccataaatatgtgatacgtattaatttttcctagatgtgtggagtcaggtgtttcatatcatgatttaagagtggaaagcattgttggagccgccaaaggtcatagtctcgtagtctgtgaacaaaatatcgtcatttcttacaggtttt

SEQ ID NO: 80225 - DNA, 3004 bp, Cannabis sativa
aattgtgaataagaaataaattttgaaataaggtgttttagtacaagatctaattccttttcttaatgcaataggaaggtgtagatctaattgactttttgagggaagagtacctggatcacttgagggaatcagttctatcaataaatcgagctcttgattgaggattcgtggcttgtttacttcttttggaatacactcgaatttccttcttcgtgttttgatcttgaggaggaagactttcatcaggagatggatgttgattgatttttgtgttagaagaggatgtagggttttctagttatgaagggactggaatgtcaaagggtaattctaaaccccacgaccattgagcttcttgctcgtgatggttgttcttcccctgaagcaagtggaagtgaagtacggagaattttcaaaaaaagtaacatcacttgaaatgtatgatttcatggtgagtggacaataacaacaatagcctttctgggttggagaataacctaagaaaattgttttggtggctcgaggatcaagtttactccgatgttgggagtgaacatgtacaagcacagtgcaaccaaaaacttttactagcaaagtgtttgtgaaaatgtgaggatagggagattgaataatagaatatagtgtcttgaactggagaggtcgactaggaagacggtttattagataagtagcagtaagaacaacatcgcctcaaagatattttggaacatgcattttgaacatgatagcataggtacttctaagaaatgatgattttttctctcaactaccctattttgttgtggagtatccacatacgagctttgataaacaattccattttggagaaagtaggtactaaggatggtattgaagtattcggtaccattgtcggtacagagtatttgaatagatgttcggaactgtgtttggatcattttgtggaaattttggaagacctaagaagcttcaaatttatgcttaagtagatagagccaagtgactcgtgtgtggtcgtcaatgaatgtaataaaccattgcttaccaacagatgtagtgatttttaaaggtccccatagatcactatgaataagagagaaaatgttagatggtgtatacattctttgagggtatgaaacacgagtatgcttagcaaattgacaaacatcacattgaaaattagaaacctttttattaataaacaaagaaggaaacagatgttttaaatataaaaaacttggatgcctaagtcgacaatgccataacataatagtttgaaaatttgaatcaaaaactaaaatagatttcgaagtcaaacaatgcaaggaaagttgcttcttctcttttattgggtgttgaaagaataaaggccatcacgaatcctagtactgccaaatattctccccaatgatagatcttgaaattgacacgaactggacacaaatttagtaagacatctattattagaagttaatttgtgaacaaagattagattgcattttaatgatggaacataaagtattgatttaatttaatttaatggtgctaactccaataataggtgagtgagagccatttgcaatcttgacactagatgtagtagaacatggacaataagaatcaaacaaatgaggtaaatctgtatgtgatcagttgcgccagaatctatgacccatggtgtttggcaaacataagagaaattaccaaggtgtataactgaggcactatgagactcgaaccatatttggatgtcatagaaaattgattgaggagtgtgtataaataagttgttccttactgaatgaaggggcattagtactgctttgatttgtgctacttttagtctgagtgtggtagacctttttgtgtaacgttggcggcgaggagtccagtttagtggttttccatgaatttcccaacaagtggatcgagtatgaccatgacgctagcaatgatcaccctcacgattaggccgcgagtcaggattggatttgtcagatggtaatggtctagactttgagacaagagaaaaactttcaatgggtgacacatcaggagttgtgagcataacacaacgacgttctttttcacgtctaacctgaaagaatgcttcttcagtatcgagaaatggagaatgaccaaccaaacgacctcttacttcatcaagattgttgtttaacccaataagaaactcaaagacctgctctttttccaattgttgtcattgaatggtggtatagtttgcagagagaggtgtagtatctagatacaaatccagctcctaccacagatcttgaaagttcgaaaaatattgagtaacaatttgattaccttgcttaatctctttaagcttgtgcgaatttcaaaaatctgagaagcgttaccaagattagagtacattttcttggcagcatcccagacttcctagacagtcttaaaaaataaatatatgggactaatttttggttccatcgaattaattaaccacacgagcaatagaatttttagcttgccataccttgtgtgtggtgtctgttggagatggtgtaaggagatcaccagtgatgtatccgaatttctcacgttcacaaataataagtttgactgattgtgcctattacagataattttttccatcgagtttatgagttgtaatatgaagagagttgttgtcatagctataaagggatccagaagactcaggactaagttgtagtttttatggtggtctgagaattaatttcttcactggttgacatttttggagaaaagaaagacagagattgatctgggctttgattaattgtgttttttttttttttttttgagaaagagagactagagaagaaataacaaattattcaaagcaagaaaaaaaattaaaatagaaaaaaaatgaccaagtatagaaaaggattgaggttgagggtggctggagttgagttgcctgaatgcacagaggtggctggactgaatagaggaaagaaaacctgctctgata

SEQ ID NO: 80226 - DNA, 1541 bp, Cannabis sativa
  modified_base (1401)..(1406): a, c, t, g, unknown or other
gtttcaaatactatgttcattttcttgatgattatagtaggtactgttggatttttccattaactcaaaaaaatcatgcttttgatgtttttataaagtttaaaagccttgtggaaaaacaatttaacctgcccattaaaagtgttcaagctgactgggggtgaatatagaccatttgctcggttcctctctgaccaaggacttcattttcaacatccttgtcctagaacaagtgaacaaaatggccgtgttgagcgtaaacacagacacatcactgaaactggcctcacattattagctcatgcaggtttgagtatggattattggtggtatgctatggcttgtgctgttttcaccattaacagacttcccacaccagttattggtaacatgagtctgtatgagtgtctttttggcactaaactagactacaatattttaaaaccttttgggtgtagctgctttccacatttgaggccatataatactcacaaactagagttgagatctcaggagtgtatatttttgggttattcttcacatcataaagggtatttgtgtgaacacccatctggcagggtctatatatctcgaaatgtcaccttcaatgaaggccatttccctgccttgtccatctcaccaactgatgcatcccaccaggtattgtccttatctcaacttccctcatttacttttcaaactaatacacctactttacatactaatcctgttgttgttcactctccaaccatacatactacaacggctaatgagggaaatgacaacacatcatcacaaggaccacctaataccactgtacaacctactttcccaccacttattaccccacggcctatacccaacattgcaccacaaaatgacaacatgacttccactacccatgctcttcctattcctagcatagacacacctaccaatgttgtccctttacccaacacaacccttaatacattaaataatactatatgcccagctttatcatccattcctgcagaaagcaattctaaccccacactacactccactgtaccaacggctacacaatgtactattccattgcaagacacactccatcatacacctattttacccattatacattctaatcttcccagtgacactcaacctacgggtaacactcctataaggactcataatatgcaaacaaggtctctaagtggcattagaaaacccaaagctttcactgcaaccaaataccctctacccgaatcccttattccctctgaaccaaagaacaccacagcagctgtcaacaacccaaggtggttccaagctatgaatcaagaatatgaagctctaaaaaaggcaggtacatggtctttggttccttattcaccacatatgacagtgattgggaannnnnngattcacaaggtgaaacttgatgcatttggcaatcttgatcgactgaagtcgagacttgtagctaaggggtacttacaaacaccgggaatagattatgaggatacattctctcctgttgttaaaccagccacagt

SEQ ID NO: 80227 - DNA, 2574 bp, Cannabis sativa
  modified_base (514)..(527): a, c, t, g, unknown or other
caccatataccaaatcacaaagttctcaaatctgattgcaccattgtgttcataaacccaaataaatggcgaataccaagccccgtgccgattcaaacaatatcaaagatatttacaaaaatatcaatgccgtacaaactaagcatcagcatgccaccagcatgcacactaacatatgccaccacttggtcaccttgtgggcatcacctagcttgtatcgtgctatgttggcttgcacgttacacgtagcaccctcttacgtgttaatatcgctattgatccaactacgtatcgaattccatatagtttgatgtaataacttttagggaatatcactagccagtcgtaaagcaacatgtctagaggtgctacacacaactggtgcccaataacaatgctctatggaatggggtgtggatgtgaaaaataatattcaataggatgaatttagtaatggagtgtaattataattttcgctaattaggattatttcccccgaactttgacatgtacnnnnnnnnnnnnnntgaacttttaaggtcgttaaaagtttcctctgaactattgagattattgaatttaaagatttatgtccaattttagtaaaaacagtctaacatgaatgaatgttcagggaacatgatttcgtacatgtcaaagttcgagggacatgatttggtagatatcaaaatctggagaacatgatttggtatataataaatcattaaaatagtaaaattgaatgaaattagacaaaagtgcttaaatctaacaatctcaataattcaggaaaacttttaacgaccagaaaaattcaaggtctattttaatacattacaaaattggagaaaaaaatcctaattagcttataaattttttccaagtgtaaatatattacccattattatttttaagagaaactaattaatttccaaatttcaacaagcatgggatgggagtgtatttaaaaacgggttatgtatggcatacccggttggattcatagcacagtaagcgccggagaagataaagagcttcactgctctcacttctttactcagctttcctcaatggataaaccactcgattccaagcccaagaccacaggccctcgtttgtgctgcgtctgtaaccacagaagacctgcccttaagagacccaaaaccctagaccaggtacacacaacaaaaccctttggcttctcaattttcttacgttcttctatgaggctcttgactatgtagttaactttgcaaaaacatatttaagttaccatgccgtgatttattatatttttgataaagaaacaagctttggcataactgaatttggaatcgcttggattgtgtttgttttcaattttggtgttttgtgaagatttgcagggagtgtttctacgaggcatttgaggaggagattcatcaagtaattgttgagaatcagttgtttaagcccggtgaacgcatcgccattggtgcttctggtggaaaaggtgagggctttcttgtttcctactatctgtttttgcagaggttatgtgaattgctattttttttttaattaaaacagatcgtgtagtactgtttatgagttaagtaaatttatgaaatttttggaatgttaatagatttcgaatcattgaatgcgaaatagaggcataggggtttgattcttttaatttcatgataggaggtttctggtgaatgatcatggttgtgttctgttgtagtagaaaaccaacacgaaaaatagaggaaagagtctgtggatggagtaagaattactatagctgtaggaagttggaaaatcagtgttaaactaatatgtatgcttcatttgggagttgatatagattatatatgtacacatatattgaattacatgtgagttgctaagatcacagagccatttgtcagcgtaattagaattacttattttcaattataagttttttttttttactcatttcactaattacgttatatgtgttttgtattcctaccacatcgtctgtagattccactgtcctcgcttatgtcttgtccaagttgaataagcagcaccaatacggcctagatctctttctcttgtccgtcgatgagggcattacaggatacagggatgattcacttgaaactgtcaaaagaaatgaaatacaggtttcttaaatttaacgagtgcagttttaatataaatattattctattgtgtttgttctgcttttttttttttcattgtaaggtttattcctgttgcatgagtcttcaaacaatctccatattgtttctcttacaatctcgccaaaaagttaactatattgatctgtatgtcttattacattatcctgaaagatttctttattctccaatttgttttttagtatggactgcctcttaaagttgtctcatacaaagatttatatggatggactatggatgaaatagtaaaggtgatcggtctgaaaaataattgcacattttgcggtgtttttcgtcggcaggtaaatagtgatttattaatttcatttaatttttctctcaagtatttttgggttagcttatggatctccccatt

SEQ ID NO: 80228 - DNA, 783 bp, Cannabis sativa
tacaaaagtctttaaagctaggtatttctcctctggtaactttcttactgctacattaggcagtaacccgagttacatttggcgtagcgtgttggaagctcaagacttggttcgtgctggtgcaaggcgtttggttggtgatgggtctcgggttagtattcttcatgaaccttggcttattgacgatgttaatacatatattgaaacatccagcccgagtcttcaagggaagatggtaaatgcgctgatgcaaattgataaacttgaatgggatcaggaagtcatttcagatgtgctaaatgatcgtgacaaagagctggtttggcgtattcctcttacagcagctggtagggaagatgtttggtattggttgaaagatagcaagggcatgtttttggtgaagagtgcctataggcatcaacaagagtctcatggccatatcaatcttaatgtccctactgatctgtggaagagattgtggaatcttaaagtgcctccgaaggtacttaattttctctggcgggtgagtgcgaactgccttccgacgagatttcttttggctattagacatgtggaagttgatagtttgtgtcccttttgttcggctgctcctgaaaccgctctccatgtgttggtgcggtgtaatttcgcacgttcctgctggcagcagtctaatgtgccgattgttgctcctgctgtaatgctctttaggagctggtttgaggaaggtctgtcgaaatggagtgaggttgagagtattgaagcggccatgactctttgggc

SEQ ID NO: 80229 - DNA, 836 bp, Cannabis sativa
tcagtaatacaaatctgtcgtgaggtaagctgttttgacttttcattgattcatgttgtcttctgtttaagattgtgacatgcttttagcagattttggaaaatctaaatgtttgatttgatgctggactctctgggaagataacatcaaaatgcaaaactcgctgttcatacttcctaataaagtttttcaaaggttacagcttaaacaggatctgacttatatttttcatcttgtcatagactactattgtcacaactagacgaattttggaaagaatggctgtccatcatgtttcccagcgaatggcatggaaactcttaaaaggtagtttcattcatatatattacaatagtaatctatagaattaatgtaagaacatcttgtgtgacactaatggatgtaatgtaacttctgacagatgttccaaaatcagccacacgcaaggccagcagaggaatgcctgcttatgttttctttttcagagttggcaaaacaactttcagaggttgactttaaattttatttttagtttttattttttagccttatgtctgaatttttgtgttctgaatggaaatatgttaagcagggcatcttctaggagttgcagcatcatggactgttcaagttgtcattgagttttaccgatttatcactcgcttgctgaatttgaaagaagagggtgatgaagtcgagccagcagaacaagttaaacttcttggaaagaagctttcttctactacaatcaaatgcggttcatcactagtttttgcttctattggagctggaattggtgcagttttatttcgcccttcagctggtcaatggatagg

SEQ ID NO: 80230 - DNA, 3046 bp, Cannabis sativa
agttcactacgctggcagagatattaatgaagaagattttctaaacttaaaacatacaaaatacagatttgagacaatatatatttataaaaatataaaatgatcatgaaaagccataaatcacaaaagattactgaaaaaaaaaaaaaaagaaacatcgtcatcttaaaatacaaaaacatgcacgatcttttaggaaattttgttaatgcagccatgcaatcaaatctacgatatccttgaagacaaatatttctactactataaacaaaaaaaaaacagacaaaatcatataaaacaacttaaatgagtatatgatttataaatatatatatgtaatgtaatatatatatagaaggatatttaccttaccgaatcaagttctgaaatataatcattgtttatggttttaacaacacaagagaaatagacaaaaaaagctttttcatatgtattgttgtcgaagccaaaacctctaccctatgcctttttagatagaactattttggttctctatagttgactttgcggggatgcagagtagctcaaaacacaccatgcttgagctgctgtcatttcaaaaaagttccttccctatcaaatatttggaggtgaaccttagaccaattgtgaaaaactccaagctaaactacatacttgggcaagttgacacctttcatttggagattgaactctcttaatcaactctgtcttaattggcattagaagctattgaaagaatatatttatgcttccacaaaagatatgtaaagagattgacgggatttgtaggaactttctttggggtggaaaggataataccagtaatatgcatctggcttcgtgggatttaggggtgtcatacattagtttggtccgaatttttaattttttcaaactaaattagcattatgatttcctaaaaatttaaaaccaaaccaaaccaattaaatgatcaaaccaaactaaaccaatctactcaaaaacagattagtttggttcaaaaccatagtttgtatttcgtagtcattttgaacttttttaacaataattttttattttttcagtaatttttctacttttagttagtttatagtacatgaataataataaattattattataacaatattaagtcaatattaatattttatctaaaattattctcaaatattaacatttctttcaaaaatatatatattaagcgtatataaaataattagacgaattaatttagtttgaactactactgagatttttaaaactgtgatcgaaccagaaaatttaaaacggtccagattaaccaagaaattcacaccgaattcatttagtccggtctcaaatagtttggtctggattgattggagtttagaactacagacggcagattatatgaacatctctagtgggattgtgtgtgtaagctaaaagtttttaagggtctgggacttccgtgatggatccaaatagaataaagcagctattacaaagtgcatttgagcagtagctttaaagcaagattatttatagattaaatgggtatatttcattgtatatacttaaatgattaggatttgtggtctcatgaacttaaccaagatgtgagctgatattagaaaaagctcatgagacttagggggagacattctccctgaatgagatccatgctgcgtgtgttgagaacatattcatagtaagtaaagtgtatgaaaacttcctacataatggtaatcgtgttgcttatgtgggtgtcgtgtggtgctctcttttcgccctaaagcatcgattcattgtttggcaagccttaaatggccacctttaatttgacgagggacaaactcattaggagacaaataagaattgattcccctctttgtcctgtttgtgaattagagcttgagagtacaagctcattatgagacaaataagaactgatttcccctctttgtcttgtttgtgaattagagcttgagagttactctcacctctttttctaatgcccattctcttggagagttatgcgcctcatcgaacaatgcctaggaagcatgttatggcctaatgtctatgaggaatgcgcctcatcgaacaatggctaggaagcatgttatggcctaatgtctatgaggaatggattgagtggttgaattacaagaagcccaagaaccttttgaacaatatcttctatgcaacaatggtgagttgctacatatagtatatggttgaataaaaatttatgtgtgtttgaaggtaaatttatgtcatctcactgttgatctacttgtcaaagagaactttaagacaaggattttatttgttaagatttctaaattatccaaaatggagaaataaattgtacaatgtgttaagaatttgtaaaaatggttgggtttgaaggagtgtgccttagatttgatgtaatttgttagcattgattaataaactctatatcttgataaaaaaaagaaaaaagaataaaaaacttaacttcaaaattatcattattgtttttgctaaattatcaatcgaaaaattcattgtttctcttatctcattcattgtttcaaaattatctaattttttttttcaaaattgacttcgcaacatgtaactcagatgattctgagtttattaatgatgatgaaacacgttaaaagaaatactaattttgaatgtatagttagtagggttgtacaaaaaattagtaaattgtccaaatcgaataatccgcccaaattaaattgaaaaaaccgataaaaattacaaaccgaaataacccgaaaaaattacaactcgtccaatctattatttgggcgggttgaaaataggtccaacccgcccaattaaaccgaatgacccaaccaacccgattttgaatttttttttttactttttagtttttatcatatataagataactaattaaatatataataatataaagttatatatttaattgttagttttaaagtcatatatattgtgttgtgctttggtggaatgtgatatttttaatttatctttttacttttattgactttgaaac

SEQ ID NO: 80231 - DNA, 1325 bp, Cannabis sativa
aagttgagttctcaaataaacctagacccattagggtttgcatgtgtaaataagctcactggcggggtaaaatatattataatattgactttgggtcgggtaggtgaggcctaaatttaagggattttctttgtccggtatagctttatggtgacatgtgtccatgcatcgccaataatgtacaataaatgttagagtagtgaacgttgggcaaaaggtatgttactttttcgtgttgtgcgcctttctcaggtctgacacaagcgacacccctaattctgtgggatttggtgtcaaaaaggtgccacgtaggattacacccggacgcctcctcgactactctttttggatttggttgcgtctcttcgatctttgtctctctggacgagagtcatccttccaagaccaagaaggcgtggcttagttaaggcagggtcatagatgaacctggactcgtgatccggcttcgcttatgggctgacccatttctctgtctaggcctgacaaatgggcccgtgagttgatttttggccttggaagtttacatgtcatgcatccataaatacgaataacatttacccccaagcctttagggcttgagatttgtggaggattgcagctaccatctgcacttgttgtgctacgtggggccaaagcagttcatgccctttgaaattttaaggcaacaaattatggacgtatgtggacctttcaaattttgtgagtggaatacacacatgtcattgattccttcgtccatgaacatcacgcgacttgagggagcgtgtaaggtctcgggtagtgaaacgaaaattagtcatgttagtaaagtttccaaggaaaatgtcatgccccagggctataccgtccaatcgatccatagagcaaagtcaaccaggagaataggcaccgtgctcaggtattggagcctaatgttttgggaaggaaaaattgccctagtatttcaattaacttgtgcatcaaagtggaaggctaagatcccgaagacagcatgtcaacaacggacctctaagactgtttaaatgcaatgagggaaaaagcaaagtgtgaaaaatccaggcctcattaagaagatctcatgaataatataaatgaccaaatttgagggtgtgacatcccatatgacaacaccagaaggctggaggattaaatcgatgccttaaccaagatcatggattgtttggtctgcaagcaaagtggtaagcgtctgagtcagaagacgaagacttggagccacgggtcaaaagaattttagaaacatcgttgccagcatgcttcttcatgccctaaatggacttgtacga

SEQ ID NO: 80232 - DNA, 1604 bp, Cannabis sativa
atggcattgttcccttttgtttattaacttttatttttcacttgtttttattattattactcaaggcaggttggcttttcagacatatgctgacattacccaccaaacaacttttttcctttcctttttatctctctcatctttttctctttttctctttctttctcaacacaaaaaactttcccaagaaaacaaaaatgaaagttccatgaaggtaaagagaaaacaaacaatgtgatacaaacaaacaaacaaatataaataaataaaattaatagtgtttcatctaattaaactgtgcgttttgatgatgatgggatttgttgtcacaaccaaattcacctatacttgctaagctagtgttttgttttggattctaataactttattcccatgttttttattttttggttttcagtgcccattttatttatttaatttatatttttaaaacaataatacaagtacagtaccaataaacaaataaaaatcatagtatattgttacttgctcttctcattcacatatatatttttattattatcatcttgaaaattaagaggatttctctttaattttcacattcaatgttactgttgtttcatcaatagtgtcccatatatacataaatttttattttaaaatttttctattatatttttaaatatattatcaaattaaataattaaaaaaatattattatatatgctaatattattttttagtcaattttcttaagttatcactaaatattaacctttattatttttagtaataagtaaattagttgtttaattttcagtttagtattgttacttatgaaatatatgtgatatattataattattaaattataagaatttttaatgtgtttgcttttggggttggccttacctctattaatcgtgcttaagtctttgaaatttttttgagctatgttatgtttaagcttattatttttgtatcttactatgttaataatttacagtatcattttgtgtcgtgttaaaattcataatttttcgtatcaagttatactcgtgctgatttcgtgacgtgtcgaaacaccaaccactacatgtatgtatggaattgcaattaactagatgatgaataatggtgggattttgggttttggattgtagcaaacttatgtagctatttgtttctcttgttatttttatatttttgttgttgttattgttgtttttggtttgatttgtaattaaagaattaatatataatatggtattagaatagagttgagtgataagaataagaacaagactaaaagagacaaaaagtctgaggcaaaatcagtgcagtggacagaaggccatgagagccttagcttgcttgcctctttggccatcatcaaattattgatcataaaaactcatgcacacgacactcactcctatatatatgtatatatatttatgtatatagccactgctatactctcttacataatctctttttttactgaattagctatcgattggtttgtggaatttttcagatcttgcatggtggtgcaattatgtatctatatatatatatatttacaccatatgtattgagtacattatattatatcactt

SEQ ID NO: 80233 - DNA, 1201 bp, Cannabis sativa
  modified_base (49)..(66): a, c, t, g, unknown or other
  modified_base (1158)..(1161): a, c, t, g, unknown or other
atccaatccaatccgcgcaagtgcggatatccgcattttgcggattggnnnnnnnnnnnnnnnnnngattggattggatcggatacttagtgaacacccctagttgagcccgcggttaattacaggtagtattggctttgccattagactagaaaaagtttatgatttattgtgatgtctttagacaagatttggagttgttttgatgtaagttgatagggtcatagcttacgcctctcactagttgaaggagtatgagtaacgttgctcagcacatgacctagaacttgctgcagtagtctttgctttgaagatatggtggcattatctctgtggagagaaatgcgagatctacattgaccacaagagtctcaaatacttttttactcaaaaagatttgaacatgaggtaaagacaatggttaaagctagtcaaggactatgattgtgaaattctttatcacgtcgggaaggccaatgtggtagcagataccttgagtaggaatggtcccgggcaggtttttagcaacaagatgatttctcctcaattggcaactgacattgttaaagcgggtaatgagtttgtggttgaaaaacttagtaatttgatgcttcaatctgatttgttagaaaggatcaaaagtgcccaaatggaagaccctgagttggttaagcctcaggaagaagttttagctggtcgagctaaagatatttgagtatcaaataatggaatgctattttataaggctcgggtttgtgtttcgagcaatggtgagctcagaaaagagatcttagatgaagctcacaccactgtttattcattacatctaggtaccacaaagatgtaccgggattcgaacccatactgttggttggaaaaaagatgtggtggattatgtatctagatgcttcacttgtcagtagattaaggctgaacatcagagatatgcaggtttgttgtaatatttgacttttcctgaatagaagtgagaagatgttactatggactatatggttggattacctaggaccacgggtttgtatgattcgatctgggtcatagttgatcgttttaccaagccaacacattttctacatgtaaagaaaactcacacagtggatcaatatccatggtcgtgttggaatttattttaccagnnnnttagatctactcacaggtatgttgtttaacaccctaaata

SEQ ID NO: 80234 - DNA, 1990 bp, Cannabis sativa
taaaaaggtaaggtccaacatctcaaaagatcacagaaagatgaaaatagtataaattgttaatggattacaatcttaatttacagcaaaaaatagatacttcaggaggaggagcatacatcagtgtaccacagactacacacaatgatatcaaactacagagatgcaaatattatttactaatcaaagttacaattagaggtagtagagccttacaccttccatgttatgtgatttttcatgaggtgatcctgaccctacacagacaacaaaatgtaaatttggtcagataaagaactaagttttatccaattaaaataaagacatgattaaatcataaaacaatccttgatttaattgaatgttgtgaagcatttagtgtttataaaatctcaaacgtatcatctccaattcatcctcctaaaagtgactacaaatacctgttttgctgacaaaaacctcataagcaacacccacagatacgttcagtcccaggctgctggctatttctacaactttctcctgagcaccacatggatccactgcccagaaaaagaaacaataataagaacatttatctaaactctatttcttttaagaaaaaaaaaagtttgttgattgcataaaattttatttagtaatcttacttgcacccatgtttgtgattatgcaaactcctctttccatagctataggtaaaagcacatgcatccactcggaaactacacattcattgcaacaaacaaccaagagatatctaggattaccagacaagtcaatctctgtttatacttgttgaaacatggaaatagaaaagaaaggagtttactaataaacaggttctccttcagtagttcgtaatgtctcttattttcacaatttacaagttattaagattccttgactattctaacatttaagaactcccaaataatacgtgtttatagcattgcaaggaaatacaagattcaaatttttctctcctatacacagctgactagttaaagttatgaataagagtatgaccatgtataataatagagcacaccagagtaaacattcaaaaagaccaacctacttttacacaatggaatgaagtcttcatttagatgttttctatgaaatataacaatttcagttttcaagaacagataaaacttacagaagaaaaacacatcataactgctaaaattagcatagacttactcctggaatcgtaaccatcacctcctgacaccataacctgataccgatcagcaagggtgcgctccgctaggcattcaagtacaagataattcagttcttcaactctttgaagcaacttaagagcgcccaaaatcctgtcacctccaaagccagctccgcagccaatgtacaccttgtcccttcgtttcaagggattttctctctgtagttcaatcccagacataaaaaacttacacttcattcaacatgagatccaattcatttaaaactgtactgagattaaaaaaaatcaccagcttaatcacacagttgtgaatctcatctttgacatgggtttccatatttactgatactccccctaaagaagctgattccattagctaactcaataaacttctattcaaaattgctatgcacaagcacaactgatgaaggttttagtacgactgtcctgacaaatacccactagcattaacagtaatattgtaaacgtgaatgatccacaaattcccagaatcgctacacaaaatgaaaagaagcgaaaaaaaaataatcaataagacggaagtgtcaaagtttttttagaactaatccaaagactcattaatttatgtttcgatcagaaaattagaaccatttattaatgatgagtttacaaaggaaacatacaagtattaacctttgcgataaacattaaaatagggaaaaatatacaaagcaaaagaaagcaatagatacctggaaattcagaggatggattatggatagttcccgcacataccaa

SEQ ID NO: 80235 - DNA, 6511 bp, Cannabis sativa
aaaaacagtaaaaaagttaactttgccgtgtcacagtatatttgaaagaaaaatggaaaagttagtaaatgatgtaaatttcccttgttacaatttctcactctcatacactattctaatctctatgtttgctctaatctttataatgaataaattagaactatatatgtagttacaatatgatctaactgactgaaaagagagacaacgtgtaaaattacctaaaatcaatttataattaacttaacagaaaattaattagtcaaagattttgggcagatttattgttatgtttgaaattatagtattggaatcttaaagttgtgctttcatgggtatgatttagttctgggtattttaggcagatttgatattcatacattaaaattataatgtgatgattaggtctgaaagttttattatgctctgatgacaatgatttggtttaggctataaatgagcaatttaggcagatttatttgctattcttctttttcgtttgtgggttttgttgattactaagaaatttgatatgttgaagggatacagcaagattggctctgtcctttagcttaaaatggtttatgggctactagagaaatgagatttaaccaagcattcttgtgacatgtctatattgtgatagtaatcacttcttatttcactattatcttatgttgatcggattgaagcataatgggagtttgcttaaaatgagattataatccggataaattagagagaacatgaaagagattataaaagataggataatataggaatgttaattatcgtttctattatgtccttttacttaaaaggcttagaaagaaatatgaatgcatatgatcacttagatttttcttgtagatagagagttaagttttaggagtttactaataaacaacaacaacaactattctcaaggctgcgatgatgcttgcaatttcccacccaatttttctttacatatagattggaactttattcagtatatactttgagttaattatatgtactaataattcaaattcattcacttgggcatttacttttttcatgaaatccaagattgctttccatataattacattagaactgctatatagagattcgtattcaatttctacattgcaaaatttgtccattttatttcaacaagttttaactacagtagcaggtgtgttagggttggagaatagttggtaattattaaggtctccttctctatcttaatgtctctctctatttatgtatcttgttaatttttctactttgtgatttgtattattacaaaatttacataaaaaagttatcttaattataaaagtaatttagttgcagtgagagctttgaactctatttatgttggttctttctatttttttgggttatggtggtatgtcggtagtgctttttgtatagattaataatgtacaactatgaatttgtgtatattttcgtataaatataattttttgtctaatattttgattactagtataaaaatggtgatggtggtggtggtacggtggctcagttttttttttattattattattatcattatttttacttcggttcggtgcattactatttgctttggttatgaactgaagcaaaaaccttctttatttgcttcaattcataaccgaagcaaaaaatcaattagcgtcatttcataaccgaagcaaaaaaattactatttgcgtctacggctataacgtcggttacaccaactgaagcaaattctttatatgtcacttaaaacctgaagtaaaaatccctttttgtagtagtgccagtccaatgttaagcaggttaaaacaatgttagaatcttcttatggagagagctttggtccctgcatcagtaggattcttctcattgggcactttttcaagctctatttctccttcttctatcttgtctctgacccaaagacatccttatgtcaatatgttttaatctttagttcatggtagacaaggtttttgctcaagtgtattacagattgttgggacaagactgttaggagttagttaggatggtagttattttcggttgctacctaccattctgttattcccacatgttgtatctctttctctagtgttttacacatgtatataaactttgtactgctcagatttatcaataagagatttctttctctcttctctcttttctcttttcctctgcctttctttgtctttcttgttcctctgttttcttgttcatgttttcatggctaagaggttgaatacctctcacatggtatcagagccatttccgccattaacggcgaacatggcttatgtcgatcctggtaactcaaatcatcaacctgcaactcaagggaatcaattcacagctgcaaatccgagaaatcgcaccagatctcaagatgaaaccagccctatctacttcaatcacacagtttcaatcaagcttaacgatcacaacttccttttatggaagcaacaaatcttagctgccattcgtggcaatcggctgcaaaagttcattcaagatataccccctccaccccaatatctcagtgacaccgatcgtattgctcaaagatttaatccagaattcttggattgggaagtccaagatcaacttctggtttcttggctcctctcctccatgacagagagcctcctaacccgaatggttggttacaattcagctaggcagatctggaaagctttggagcaacacttcacactgaaagtttcgtccaagattctcgaattccgaactaaactccagaaattaaagaagggcacaatgaatctcaacgattatctccttaaagtgaagcagcacgttgatcttctaacttctgttcgtgaagtcctctctgaccgtgaccatattgctgctatattcaaagggcttcctagtgactatgatactttcatcatctccaccaacacacgtgttgaaggctacactgtgggtgagatcgaagccttacttcttgcgtctgaatctcgaattgagaaggaggaccaagaaactgaatcgagcatcaatatggccatggttgatcaagattctgcccttgaagccttctatgctcaaacaaatcgaaacttcagacccgctgcctattctcgaggtcagttctctcccaaccatttcaatttttctaactcctcttccttccccaatttcagaggtcatgttagaaatcaagtacctcatcgagtacctaatggcactacacaaggcagaggcaggggtggacggtttccagctacacaaaatcgtgtccaatgccagctttgtcacaagcttggccacacagtcatagactgcttttaccgctttgacaagagcttcactggagtatttcctggcagtgatcaatctcagttacaggctaatgtggcccaaacaactcctaatgctgatgataactggtaccccgactcgggtgcaacaaatcattgcacaccaaatggacaaaatgtcatgacagcaatggattatgatggccctgagcagctgtatgttggtaatggagctggccttcccatttcacaaattggtaacacttatcttattcccaactcttgcactaaacctttgattctcaataaattgttacatgtccctgatctcaccaagaatctgctaagtgtttcgaaatttgcagctgacaacaatgtgtattttgtgttttatcctgatgtgtgttatgttaaggatcaagtgagcaaagctgtccttctgactgggaaacaccacaatggcctatatacttttgactccaaccaacttcagttgtctgcttcacccaaatcgactcctgcttctcaattttctcaccaactatgcactaatcttgccactgcctctccaagttcgagtcctcaatctagtgtatgtgtcaattgtaacatatgtacaagtgattttgatttgtggcacaatcgtcttggacatccctctgagaggattgtcaagactgtgctatccaactgtaacatttctccatccaataaaatgtctacttcagtttgcaatgcttgttgtttaggaaaaattcacaaattccctttcccaaaagcctctgaaacatgctacactaagccacttcagcttattgtctcagatttatggggcccctccttcacaacatctcacaatggatataaatattacatccatttcatggatgcctactctaggtttacatggttatatctcttaaaatccaaatctgatgctgtcaaaacttttcagatttttaaaactgaagttgaattacagttaggtaccaaaatccaatcctttcaatccgattggggaggagaatatagggccttcactgactgtctaagagaagcaggaattgtccatagaaaaccttgtcccaccactcatgaacaaaacggtttagccgaaagaaaacaccgccatattgttgagaatggtctcactcttctagctcaagctaatctaccattacgattttgggatgaagcttttaggaccactgtctatatccacaacagacttcccaccacggttctttctttaaaatctcctattgaagtgctttttaacatatcacccgattactctaaattcaaggtctttggttgtgtttgttaccccaacattagaccttacaacaagcataagcttgaatttcggtctacaccatgcactttcataggatatagcttgaaccacaaaggctacaaatgccttgactcttcgggcagattgtatatctctcgtgatgtcatatttgatgagtctcagttcccaaatcttcacacagatcctataccaattgagtcatctgaatctcacacacttagccaaattccaatagccaataacaactatactgctgagtatctcttcccacatgatctccctactgtctctgctcaaaataatgctacaatccccactcacacacataccaaccctgctactcttccctctgtaactcagcaagtgtacaaccctgtaccaactcccacttctgcaatctcaccagaccctcctacaccatgtacagcagctacatcacctccctgccccacccagtcagccccaataatccctgctccacttgtttccctccctaataataacacacatcagatgcaaactcgcagtaaaagtggtattagaaagccaaaagctttccttgcaactcaggttccaacatctctcaaacaagctcttcaacaactaaaatggaacaatgccatggcagaggaaatccttgcactcaaacgaaacaaaacatacactctagtcaagttacctcctggcagaacagcaattgggtgcaagtgggtctatagaatcaaagaggactcagagggcaatgttactaaactcaaagcaaggcttgtagctaaaggcttccatcaacaaccagggtttgatttcacagaaacctttagcccagtggtgaagcctgtcactattagagttgttctcactcttgctttgtacaaaggttgggatatcaagcaattggatgtgaataatgcctttttgaatggggatttgcaagaggaagtgtacatgctccaaccacctgggtttgaagatcctaatgctcctgatttggtctgtaaattacacaaggccttgtatggcctcaaacaagcccctagagcctggtttgggaagcttcaccactgcctattatctcttggttttacctcatctaagtctgaccacagtctctttattagatacactcctctctctgtgacaatcattttagtgtatgttgatgatataatcatcacgggtagtgatccatctctaatctcttactacaccactgctttgaatgagaaattctctcttaaagacttaggacagctccacttctttcttggtattgaggtacaaaccacaccaacatgccttcatttgtctcaagggaaatatgttcgtgatttacttcataaagctgatatgacagatgcaaaaccctgcaatacacccatggtaagtggccttaaactctcagcttttggcagtcctcctgttgacaatgctctacaatatcgatccatagttggtgctctccaataccttgtcatcactagacctgaaataagtttcagtgtcaacaaggtatgccaattcatggctaatcccttacaaacacactggctggcagtcaaatgcatcttgcgttatctcagtggcacaatcgactatggaatccatctcaccaaaccagaatctcttgagcttactgcgttttgtgatgccgatgggccacggatcctgatgatcgaagatccacctcgggttttgccatttttcttggtccaaatatcattgcttggcaatgcaaaaagcaacacacagtttctcgaagcagtattgaggcagagtttcgaagccttgcactcacagtaactgaactcacatggcttcactcactgctcactgaacttcacctcactctgcctcgaccaccaactgtatggtgcgataatctgagcac

SEQ ID NO: 80236 - DNA, 1050 bp, Cannabis sativa
ggtaaagatgagtgtgtcgatcgacttaattacgatgcactctcttttaacagaagacttaactccacttctcaagccctaaaacaaagactagatgacttaaatttagttgtcttagacttataccaacccctttatagcattattctcatcaatcctatacaaaatggtacgtacgatacatttaaccatataatatttaaataaatttatatgcatatatggcccatgcatatatattaggttaatatttacaattaatgaaatgtgtgtagggtttttggagacaagaaaggggtgttgtggaacaggtttatttgaatcggcaatgctatgcaatgcgttgtcaattggaacgtgttcaaatgcttcaaattacgtattttgggacgcctttcatccaacagaggcaaccaatgctattcttgctccccaaattgctcaagctggaacttctctcgtctttcgttaataatcacaataatatttatgtaaactttgatatttattaaattatgctctgaatcttagattttgtttagtacaattagacgacctaaatcttacaatctcaatagtttgtcaaaattaggggcaaaaatctaaattagtcttatgtaaaagagcattagttatttacttaatttcattttgtataaacactcattctatttgattattaaaataatacgtcaaaatagtaaattaatagagaaatgttacaaaataaattataatcaatatttataattatatatgttgttaaccaaaattatttaagaatgaatgtttactttatgagaaattattatccgaatcaaatgctttaaaataatcaaataccccctttttattaaaatataataggaaaaatttgtcttttaatgcttatttttttaaaagaaaaataaaacaagaataatgaaagctttatttatacccaaaagtttataaatctaccaaatgttatcaatagaaaaataataaaaaaaaatattaaaagtgaattttaaaaattaatttaagtttatttttaattaatattgagat

SEQ ID NO: 80237 - DNA, 1534 bp, Cannabis sativa
cctttaaaaagttttcaaaattttttaatgtttgaagtgatgggtttgcattgtactatgtatttccagattaattccagttgaacatacatatatggccctcaagtaattttaaagggtttatgctttacaattacatgttgaaagaaatatttattttattcacaaccgaagttcaaaatattacatcagcgaggtgatttacaatcattaatctcatcataacttcgccagttcaattgtttattttatcaatcttctagaagcatctggttttgatagaccgggttttgatgttcagggtcaatccctgacatactcccacaattgttcaaatatctagggtcaatccttgtcatatctcggggttccaagtaatctacccctagttttatcagtttgtctttaaatgcttctggttcacgaccatagcgagccagtatttacttactttacaatacttttatgtaattgctttaccgaattaactaccccttgtcttcttgtgagacattccctctcgatataaccgagttatctcttcctccttcaaaggaaggttatgatccctgatcacttgagttactaggcatatcgggctgatcatgggcattgttctgcccctttacatattgttggacgtgtcctcgcgctatgagaccttctatctcatctttcaacttacgacactcttctgtggtatgtccaatatctccatggtactcacaccattttgttgggtcccttttacttctcgcgtgtctcataagttttggctcactaaaagcaacttccgctatatgtgcgaggtagatattttctcgagtttcattaagcttggtatattcagcataaaggggtatatatatttgttgtgtttcttctgtttcttatccttgggcagcctttcagactcatctttcctctttgatcctgaggcttctgactccaattcttcaatagagtgataccctgtttgtcttccgggatccctgacttggtgccttctgaactcattctccaactcctccattcacaaacgcagtaaatccctttatttttgaccaattcgttaacgaagattaggttttctcaaattcaaatgttctcgtaggtcacaccagtcgtgacagctgtaggaccttgctcctcctatatgctgcattatgcctttttgatcattgatgcaatgagtgttctctcctccttgcattgatcgattatgagatactgtatgcctcgtaatattccttacctcttctcattctacgctttttcttaaggtttgattcacctcgttctccctataggggttagcgtgagctcctttcttatgaacttggagagacggctggcaatctcctactggcgttccacatgtcccaggtcgttccccgatacttttctcagtttcctcaggttgcttcacctcagagttctgggaatgtctttgggttgtctcctgccccttggtttcttagttgcgaggttttccttgtgaatctctgtttccaaggtcaggttgattttggaa

SEQ ID NO: 80238 - DNA, 1012 bp, Cannabis sativa
tttttattaatattatattataatttatattaatattattaatattatattcattattattgttattattattaaaaaatttatattaaaatttttcattcagataagtttaatatatacaaccagaagaataaaacagaacaaaaccttcatcctcctttgacgatttttttttttttctcttctctctctctctctatctattttttttttaattttcaacctaaaacctagccatctaagctgcggtagtagtgggatagaaggaaagcttaaggtttagtttaatttcattttaagataaaaacaattagtttttatataggggtttcatgaattagaatagttaaggaggttctgaccttattgaattattctcgagtagtcatgggactagttttgatgtttcttgttgaatctgaagtgatttcaagttagaaattgagtttggaactttttatagctgaagtttgaacattagtggcgtttaccaattaagagctcgatttagtttcgattacgtaagaatggttttttgtatcgtatttgtgtgccctatgatgtttagagtggtttggacaggtttcggttgcgttttgatgagtgtgtaaattgagaattgagagtttttacccctaccaaactagtcaagaggttgttaactggtaaatcgattcttgtggaggcaattaatcgttcctcaaccgatgtaccatttttaggtagtctcaaaaatttggggatcatatttttaccgtaacttttcattcgggtgtctgttttagactttctacatactgtttcgaagcttgcaacaagctctatgttatggtgtatattttagagccaaaatataagttttattttagtgtatttgtcctacaggattttgtaagaaaccctaagttgtcatttgcaattgttaagtagtattttaggataaacacttattggtttattattgttatgacatagggcccgatttcatctatcattctccatgcaggtcggc

SEQ ID NO: 80239 - DNA, 1288 bp, Cannabis sativa
tttattcttttcttagttgattatactatgaaaataataaatactttgactaaaaaaaatatggaagaaagtgaaaccatgacttttctttaggtcataaaccaagggcacaacaactcattgtttcaaatgcgccgttgacagattaaaaatgcttatttatgtctaaggaaacagctacgcttttctttgtttcttctccacatccacatgcctcaaaatcaaacacaacccactaacaaaacgacaccagcattaactattattcacttaatttttaataataaaataaaaataattataaataagaacatcattattgaaagtcagttgagaaagaaaattattatatcaaatataacataattaaatgaattggaatattgacgcctggttatggcaaaaaagtagttttttcaacgagtacgattatggctgtcgttttctaagacaaagacaatgaaacgacatcgtttagttaaactgtcatgagaagaggatcccaagtaaaacgacagcccacagtaaatttggtggggccagaacaaaaggcaccaacccaaatcaccctctcatttcatttctgtctcttccataaagcctcacacgcgcacgcgctcattgcgaaaaaagagtaagtaacctaataatcaaaccacgtgcgctgagattaaactactgaggttgaaaccttattggacatctaactatttccagtcacgtgcccatcagatgaatttttttttgtttttaaccacgcgtcgtatactcgcgtgagaatacgtgatctgcttctgtgcttctttccccttgcccacgaaacaaaattgatatttattcacgtcgaaaaaaaaattgatatttattgatttttttattagatatttattgattttttttttttgagaacatgtatccatctatttcataaaaccagagagtacaggatacagattacaaaagtaggttgtgagctttccaacaagtttcctgatctaagcctaatgcaaactttgcaaggcaatgagcatcctcattttcttttcttgggatgtgcctgaaagtagcattagggagagaagatagcaagcttttaatagattttgcaaacctgttcagaagtaaatgatacatatcgttcttacaaacataatccactaaatatttacaatccgaaagaataagatctggaacaatattgtgtttttgacaccaagataaagcataatatagcccatgcgcctccattaacaggggcggttgtgtcccattccatggtgaagccaca

SEQ ID NO: 80240 - DNA, 1014 bp, Cannabis sativa
ctcagtctctctgtgttataacagctctcgccctagctctgaaggttgcgatttcgaaccggccggccacctccgtaagtctctctatttccctctctttctctcttgcgttctctcactattctctcttttcttttttttttctttgtatacgcatattggatgaatgatgtttaaattactgtgttatctatctgcaatttcctatcaaggaattgaagacgattatagttgattgagatctagttttcttatgtttcttcttcatttttctattgcgttattttttattattttcttcatttttttgttacattatgttttcaagatcatctttcagttatatccaccctatgtgacattcgtttctcaggtttctgtggaaatatgaggaaagatgaactcaatctgtatttgtttgaatttttattgtgatggttcaatgttttatactttggtaaatgggatggttcaattcaatcttcatgttgtatgatggaaatttgtaataaataggatttcaattttttgcaagtataaccctgtttttaatatttctaaatttctatgtgtttattgcttaacattattaattgattgtctgaaatgaaactactttatttatacttttacagtctctttatgttcatatacctgctaaacatccttcctcttttcctgagctggagttaaggaactaaggccaattttagacttgagtgcatatgaaaagtcattatgatttcatcagagcattgtgcatcactggtacccagcactaaaattttattgctatctaaagtcataaaatttatactgtgagatctatttatgtgtgtagtgctgaccattggtaatgctctttagtgtttttcttatttaatgggcaacaaagtatcattaataaattatttcattagagatttaaaatctataattacagttctagtggtggaatgagtgtacgcaagatggttgggaactaattttttgttatgataaatggtaattaga

SEQ ID NO: 80241 - DNA, 961 bp, Cannabis sativa
tgtttttgctattgtacttacctgctgcaacttacatgaggctctattaactcatgttgttgatatgtagacatttaatatactttcttatgccttagaggctggtgagacatttaatggttttggcatgtagatttaccaatattgtaatacgatttaacgatatgtgcacctaaaatatgcccacaaatttaatagacagtaatatctgggtgcacatatcataaacttataatactgcttcatatatcggtgatagaactttcatatataatttcatttgtagctgagtgggtttatttatttattttttttaatggaacaagcgttcagctgagtggttttaatttgtatgttatttcttgtctttttcatattgtttatttttacacttacttttgtggaagcgtttgtaaatttaatagtatcaaaattccactaaatatattgttctatcatccttctatgttccgagcacaatttttttttgtaatattctctcaacattcatgatctatgtccatgaaacggtaaataagcatacttaattttggatttgatgacttggttttctttctgtaaatcaggtcttaaatgcaggcaagaataagcttaagtctatgaatgaggtccgatcaattacatctttacgagcaataattttgaatggtgagcttttaaaagtattaaactctgttttgtaaaggtttataggttttctgttcaagccacatttctcaccaataatttctcatttttttctttgcagataatgaaattagttcaatttgcaggcttgatcaaatgaaagaattgaacacgattggtattactatgcattatttgcttttctccctccttccctctctctctacttattcttgaaacgagagtagaacagtaaatagttactgtaatgattgcaaaatcaatctgtagtgaatgacaaaatttgaaccct

SEQ ID NO: 80242 - DNA, 1689 bp, Cannabis sativa
  modified_base (691)..(694): a, c, t, g, unknown or other
agggtccaatctgtaacttttgcaatacacagggtccaaaatggtatttaccctttatttaattaatgaattctcttagtcttggacccttctttagcattttgtttggaggtggtgtttttagtaggctattttttaaaaataataataataataaattaaataaaataaaaatatatcaacattgtgaaatgattatttttcaaatttaaaaactaacatgtcacaacgagcacatagagttttagttttagatgatatgaaaattgaaagcttagaagaaatgagacactaacacaacatggcttaatgggatgaagggacccaaggaattggcttttgtcttaacctttacccactgaaacaccctaacttttaaagtgccttggcacaaaattctttgatttgatttgaaaaacaataatataattctaggaccaccaccaactacatttaccaaatatagctaattgtcaagcctgtaaatactttttgagcttagaaaaaatttcaaggtattaaaaatcaaagcattgttattaggcattagtggtctttagcacctttgcgatatgtcgcgttgcgattggctagagatactctttaaaagctattatattaaattatatgagacccgatatttagttggaccaatcgcgatattgacacataagagagtgctaggcaccannnntgccctttagcatttctctaaaaaccatggtagaaaattcaattgacatttagtatcaggtattagaatttttattgattttctttaatgtcatagctcaatatccctattgatccctaactttgaaatcaaataatggtagaattaatgtgatcaatgatcatttaaaagcattaaactaatcatttaattccaaccactatgatcggctaaaaaaggaaaatacttgagattttttctttgtaaaggtaaagaaaataattgagatttagaagaaaaccaagatgttgattaattcagttaatgacattattagggtcgggtttaatttagaagaatgaaaatataagagtaataataaaaataaaaatgaaataaaatttaggatgtataaaaataaattgataaaaaaattattaaattttttcattccttctatttcaaaatagaataatctttctaccaaaatagtagaaaaatcatttcattagaataatattctaatacgtggtgtatggttggaggtaatgaaatggaatggaaaggaaacaattttcaatttttttgtagcatgactattccattttgaaattggagaaaagaccattccaatacatgcaagaaaaaatttaataattattttatcaattttttttatatattttaaattttattccattccactattcttattcctatattttcattcctgccaaccaaacgccaccaaaaatacaatcaaataaataaatgaaatgaaaattatttcaccttagtttttaaaaaagataagctttcaagaaaatctcttaactaataaatggtaaaaatagtcccttttttttcactttcctaatttagttgagacaaaaaataaaatatcaatctttcaaccaactaaatcaactaaactacctttcaaaaaaaaaatcaactaaactaagatcatgaagttcatctcttgaaactcaatcaactaaaaaaaaaaaaaaaaa

SEQ ID NO: 80243 - DNA, 2277 bp, Cannabis sativa
  modified_base (624)..(644): a, c, t, g, unknown or other
  modified_base (1872)..(1873): a, c, t, g, unknown or other
agagagagtataacatatattgctttgaggcttagttgaaaaggattgatcactcaataaaaaagttcaatacataaagatgaattaattagtgttacattgaaaaatatatactttgtacactatgaaagatcaaatcattagatttcttttgtatgattttctactattttccataactttcaacacttagagctatttgtaataattgtttggtatattaaaatatattatagcatgcttaattaaagttcttctttatttcataacgtggcatgcattcatttgtgcaatttattattgtttttaacatgttatacaataataattttttacgtaaattataagctaattaagatttttatctctcgaactttaacatgtactaaattatacccattgaacttttaagatcattaaaaatgcacatgaattattgagactgttgaatttaatgacttttgtccaattttaataaaaaaaaagtctaacatagatgaaagttcaaggaacatgatttagtttatgtaaaaattcgaggtgcatgatttgatatatatcaaagtcttgagagcatgatttagtacatgaataaacagttaaatagtaaaattgaatgaaatnnnnnnnnnnnnnnnnnnnnnaacaatctcaatagtttagggagaatttttaacagtaaaaaaaatttaggggacatgattttgtacatgttaaaatttaggagaaaaaattctagttagcctaaattatatgatgttagatcatctaaaatataaagtataaatattgtgttaaatttgacatgaaaaattaataaatgttatatttgtcacaatatttattattgagttttaatgtacaataatattgtatgatgcaaattataacgaacagtaaaataacaatattaaccattattaataaattaaatatttaaaaaataactaataataatattgtaattaaaaattatgtattctaatttatcattaattaataataaaattataattatgtatatttattggtgccaaatttaacataatattatatattgtgttaaatttaacacaactttaaaaataagtcaaatttgtcttaatctttaatatagtattgaagaattaattttcttagaagtggtagaatataccgctattttagcacaccattaaagatctcttaggcaccttgctaaagggtttttctggtttgtacatttctcaatgaacttgggattggcagactttgcccctttttttttaccattcacaaaattattgatttgaaaagtttgagattttatggaactaaaacattaaaggttttcaattggggtttgatcaataaaagtactgaaaaccaaaagttgtatacgatgaacaaattaaacaatggtctagtgatcagagcttcactgagccccacatttggaaaaagactgcacccaaattatttatgcattgctggccctttcttgtcactcccttttctcacttttcttcatatagtacttttaacaaataaaataaaataaaataaagggtcttttttatttttatatttttaatttttttttatttttacgaaattatatatagaaactcttattgtaattagggttgtacaaaaaaattcgtaaactacctaaatagaataattcgcccaaactaaaccgaaaaccgaaaaaacgaaaaaaccgataaaaattacaaaccaaaataacttgaaaaaattacaaatcgtccaatctgttaattgggcgtgttgaaaataggtcaaacccgcccaattaaaccgaccaacccattttttaattttaatttttttaaccttttagtttttattatatataacataaatgattanntatataataatataaagttatatatttaattgttagttttaaagtcatatatatattgcgttgtattttagtggaatgtgatatttttaatttatctttctaatttttattgattttgactttgaaactaaaaagaaaaagtttggccggtttgggcgggttaacccgaccaaaccgatggtcggtttatagatttttttttttaaaattgagcgggttgcacttaaattttagcaatccgatatttaaattgtgttagaaaatatataggataaaccgcccaaactgaccaatgtacaaccgtaattgcaactagtgctgcaacttaaattgcaataaaaaatcgtatagaaaatcttattgcaactagcgctacaaccactttaaaaacttaaaccgtaaat

SEQ ID NO: 80244 - DNA, 2132 bp, Cannabis sativa
gaactgctcggggctgaacctctgtaaaatttctatgtctagttattgctttattatatattcttaagtcaacaacaggtattctagaaactttgtggtggattttgggattgattttagagagatatgaagtttttagagtttttgcaagaaaccgaattaacccatcctgctggtattgtagaattggttaaccgtttcaccaagtaggacctaggaacatgtttttcgtttggggaatctggtttaccggtttgagcagttttttttttttgggggaaaatacttgttattataaattaaactggtaagtcatttacaacaacagagtacaaagatggaggaaaagattccatccaatagcaagtctcatccacccctaaagcatatctagccaaagtgtgagcggccatattagccgtacgtttgacatgtgatattgatacacccgggagaaaggaaagaagacaagaaatatctataattagatcattaaaagctgcaatgctatttgttcggccatataatgcattagtcaccattaaagcatctgtttccacatgacctatttgtagctcccattgtgaggcccaaaccaaactgtgaaagatagcctttgcctccatttcgtgagaagcaaagttaccaataataggcatcgagagggcagctatcacctgacctgtgctattacgtataacagcaccaagtcctattcggtttttagatgaatccacagctgcgtcaacattcatttttagttccccaataggtgggggctgccaaggaatgtgaacaagttgagttgggacagatgaaggaggaacatgatggagttgaggccgatactttaactgggcagatctgtaattggacatgtaattgttagcaaaagaagctaaatgagttgctggtttggcttgttgtccatgaactacccggttcctctctgaccaaatacaccaaaggatacagaaaattgattccatttcggtgactgaatgaagcgtggtaaggtgaattaaaaaatcacccttgtgcatctgtgtagccttattccagtcaaaatggaagttcgaagcacgccatactgctttagcgtatttgcatccaaaaagtgcgtgaccaatagactcccacgcaagacgacataaagaacaagtggagtccgtaatgattttcctgcgcaccaaagaagtagctacaggcagcgcttcatgcaagactctccaaacaaagattttgattttttgtggcagttgcaaatcccaaaaatacttccaccaggccgtgggtgaagttgatggggagcagaggtttgtttcttcaagtgaggcagcaaaatgatatccagaatgtacattgtagatacctgaaatatgaggatgccatatgagtttgtcatctgtggagaaaaaactaagtgggattgtgaaaattcggtccatatcaacacttgaaaaccactgctgcaacaaattgcagtcccattgtcgatcctcagtgatcaaacttgaaacaacagcttcagccggtccatggtaataagttggcaagaaattgtgatggtttggtatccacggatcagtcgcacatcggatgttccttccttcacctattttccaccgtagcccaacttttaaaagatctcgaccatgtagaatcccttgccaggtaagtgatggtgaatggccgtggggagcttcaaggaagctgttatgtgggaagtatcgactcttcagtagtcggcataagagtgagcttggattatcaagaagtcgccatgattgcttagcaagtaatgcctgattataatgtacaaaggatcgaaaacccatacccccttcagacttgtttttgcataaaagtttccagctacgccaatgaattttattgccattctcatttgaaccccaccaaaagttagacatcatcgattcaatttgattgcaaatggtagttggaagcttaaaacaactcataatatatgtagggatcgattgcaccacagctttaagcaaaatttccttgccaccgatagagaaaagcttatcattccaagttcgcattaacctccatatcttttctttaacttcactgaatagttgttgtttatcccgatcagtgtatgc

SEQ ID NO: 80245 - DNA, 1194 bp, Cannabis sativa
tgaaaattgttttcaagccaacaaacctaattatttttaaaaataattttttttaaaaaaaaacaaaaaaataattttttaattataatgacaaaacaataaatgtttaaacaaagatcagtatataagtgattgtggttaaaattcgtttgaattctaccccatttcttccaagtcaaatctttattttaacttttaagttgaccacaacaccttttcctttataatccaatgaacaacagagttctatccccaaaaaaaaaaaaaaattgactaccacgcacacccctacaaatttcaagaaatatttcaataatatcactgaagatcaaaccaaactcattgactacataagagttaattatgatatctgcaattaaattgaaatggccattattgctcctccaatatattttttttattagattgacaaacattttaataaatagaaaacctttgagaattattagtatgattcatcatttataattgaatatagggtgttctcttctattgatgagatactagttgtctatgattgtatgtatacacattaacactataaggtaacccatctcaaatcaacaatcaacaataaccaatatcattgttatcattatcattaacatcatcatcattaacagcacacaaaatataaaattcaaagaaatagtagaatacattgaattcagaattttcaggattatgtcgactattagacatcattagacatcacgatttttgttattaaatttcggaaatgtacaagatcctgtagtggttcggttgtctcaaggaattttcagaattttcttttttgtattaattagtctcaaggaatcaaaaatccattctcagttgtcatttcattataatgcatagcaagagaagcactagcagttaaacttcaaaaaaatcagacatgtgactctcacctgaagagtccaaattcccttcgggcctcgaaaatctggaataccacaggaagttgatattcctgcacctgtaaacactactaaatgcttactctgcaagtacaaagaaaacaaaatctttaaaaagaagccataaagttttcaagatagtaaagattaagtataatggtgtagttgaaagtcgattaaccacatcaaacattacccgaaatcaatacgattataacagagtcttggctaggtggtggctcgacgagca

SEQ ID NO: 80246 - DNA, 737 bp, Cannabis sativa
  modified_base (438)..(456): a, c, t, g, unknown or other
tttgatttcaggttatgggccttgccggtattctcaaatgtgagcaattaattttgcttaatagtattgtatttgtaaggtatatttgaatttatttctatgatggaccaagtagggttaaaagaaaggtatcatatttgttcacttttttttttggaaatatatttgttcacatttccaaatcaatgttctactagaagagaaatccggctctcgtttgatatctagacagttctagccgtaggcatccaactccaacctggttgtgctattttgtagtgtatgcaatatccaataagtacattttttttattttggatacaatttaatcagtaggatagttaaattcaatctaatccaaaatattataaattgaatcaattattgtagattgattatttttaaatatagatagtgtttggtaatatttttattttnnnnnnnnnnnnnnnnnnnaataaaagtaaaatttttgttttaaaattttatttttgaaaaataaaaatgtgttctataactattttttgttttcattttttaaaaacaaaaaataaaagtgtgttctgtaaattttattttcattttcatttgttgattttattaaaatcgagattgggtccgaggtaagggatggccaaattcaggtcccggtttggtttttaaagtctaagttggggtcgaaatctaaaatattggttaaaaaaaactgtttaaaaattaaaaaaaataaaaaggaa

SEQ ID NO: 80247 - DNA, 2013 bp, Cannabis sativa
  modified_base (1059)..(1066): a, c, t, g, unknown or other
ggtggtgggggagcgagagtagcaggtgaagaaggtggtggagtttgtgtgtcgccggtggatgtggtggccggcggtgatgacgtggaggattccggtggtggtgatgatgaagaagaagtagtatcggaaggtggtggggtggtggtggagttggaatttattggaggaagaatgtcattcaatcctgacatcttcttcttcttcaattttttctttctataattctcttttcattacagagctctattataattatagataataacaaatttaataataattacgtaaaacaaagatggtcaaaagaaaaaacccatgcaaaagggtcgtaatacgtaaaaaaaaaaactgcaaataactatagcattaatggctatgggtgcctttgaaatttaatcaaattatgtttttttaaaaaaaaaaaattaaacgcgtattgatgaagaaagagaaaagagaaagaagtggtcttgtgttgttgaattagaatagaaaaccaaaattcatgagtgccatgatcatcaacattaaacaaacgacaactaaaaattctctctttttttagattaacaaaatgaacaaaatatatttatttatataaaaaataaagaaattataatgttatgattgtgaggagagagtatattgtgtaaatctaataatgtattatggctacttgggtgcacgatcttcattgaattagttcaaattctctctcaactgtctcaccttcttttctttgttttgttttaatataataccatgatttttttctctcctttaatttcgggttaccgtgcaattttaatttcgtaatggacaaatcttgaataattgagaaaacattgttaggatttttacacaaaatcatttctttgcccatttttaatacagagataattaaataatgtactatttttttggtaaaatttttacatatttttaaagattttattttatatttttataaaaataatacgaaaataataaaaaaatatataaaataacatctaaacaacatcgaataacagcaaaaaaaaaaaaataacatacaannnnnnnnaaatcaacaacaaattaacaaaaatacaatataaaaatacattaaaaattcgtattttctataaataaaattataaaaatatttaaaatttcacacaattgtatttttgtaaatttttttttattattcttgtgtatttgtaaaataattgctttaatatatttatagggtcaaaattatttttttttttatgtattttgattaaatttttatgattttttttaattatatatattttttttttgaaaccaataaaacaacctgaaaaacaaggtaaaaacaataacatgattttgtaaaaatatttaatatttcgtgcatcagtatttttataattttgttttatctttttcaggtaattatgaaaacatcttaaaatcatttgttgttattatgtaaaaataattagtaatgatttatattattaataacaacactacttggcttttgtgtgctggaagcctggaagtgtattagggaacaataatcaattttctgtactaagaaatatcaacggttttcactattcttttattgacattgattttttgatatagaataaaatattaatgttgtagtggtttatatactaaaatgttaaatataagtctaattaagttacttaaacaaaaacatgtatgcacgaattataattaatgatataaatatgatgggaccaataagttgatacaaagcctagtattaattgtgcttataacatgtttacatatgattaagacataactatatatgtaccaccatgtactattccttgttacaacatttgtctatactctacatatataactaacatgtaagttgaacaaaatttaaatttgctaaagtctctctatcaattgattaaagtgaaatgctttatttattaattgggttattgattagattaaaaaataataagaagaaataaatatatactactctttccc

SEQ ID NO: 80248 - DNA, 4509 bp, Cannabis sativa
aattcaatgcctttgatttccaaccaaattcaaaatgccaatatggaagatgtacatgggcaagaaagatcctttgtccaacatcaagtacattgaaatgcaaatggacttgtgggtagtgaaggcttctgtacggtgtaaatagcttccttggcagaggtcgcctaatagtggtactttaagttagccccaagaaaatttgattcatggaattctttcatggtagagtttcatgcacagttctccccttctaggaaactcctatcccacttagaagacctggtcaaagtaaaacaaatgtcagcaaagcctatgagggattacatcagtagatttatggccaaggccacaaaggtaaaagggtaatttgaagaagggaggctagccgccatcttaagaggaagtgaacaattgggagaattatggaaagatattataagagacttattgtaggatcaatgggagagtttctagaccaatttgatggatttataaagtttaaagaagcagtttagcatgtagacacagttggttagaaaaagaaccgtttgcacaacactactgccaatacatctgtcaagcagaatcaaaattactaaaacaataacagtttgagtcaaagtggtaaaaaaaaaaaataatggcaaccaacgtggtaatgggaagaaaggcaagttcaataatagctccgaacaacatcctagagagaatgccttgaagttcactgcctttactatccttactgaggacataaaaataatcttcacgacaacccagtcagtggttctgtataaaagacttctttccataaagaaagatatgagcaagtgggataccgccaaatattgtcactttcatgaggactgcggtcatgatattaatgagtgggataatctgaaatgagaaatcaaattcctcattaggaaaaataacccgcacttgtaagagtatggtaagaccgactaggatcgaaaattgttgatgcccctacttgttgatgaatatctacaagtaattagtgcatgccctcacattagtgcagactcgaataaagcttgagaaaggtatgcttggaccctacactacgaacagaaatcaaaattggaatatgggttattggaaatcaaaattgttctacgcgtttaagatgttaggggtcaggattgacttcaatcgccgaccttgtacgtggcatatttccatacgtagcatttatttttatagcttttgtagacgctaatttctaaattttttatcgcagatagaccggctcaatctgtattggacacatctcttctagaaatcgctgaggttttaagtggccttcccatgcaacatcgcgactggcgtctattgtgtactactgcaaagttgcaagaacataagcttattccagatgacactaagctttagcaagaaccagtgtacaatgaacattctaagaagtaaaagaaaagaatagacaaacgtctatccaaatagacttcgagaccgacatcagttaatgtaatctagtatgttgaatactattttaccttaataaatttttactgatggttctccttgcagacatgactttcttgaggcacgctcctattttcaactgcaagcctaaggctagtactacaacaccatctcctgcgtttcccagaaaagaaacagtgacactgttcctactcaggtggttgctatcaaggctcgcgacatcatggttcttcaagagaagttcgttagggatgaattcctttccaaagtcaaggggattcttactaaggacctacagcctcgctcaacttaccttgccttgtaatttatgacagtgtttttcgtgggcttttgttgcaggttctaaggatctcgatcttctgaagaaaaaaaactcggttcttcaagagagtgtggagaaagtgaagttagatgcaacaactaagcataaagagatcgaggatcttggaaaagccaagggtcaggcagaggaaaaggtcaaaactctagaggcgcgagttgttgatcttactcacgatcttgagaatgaggaagagatcgggaagaaatagtatgactaggccatctctaactacatttagaccaccctaaccaagctgcttaattttgacttcacagtatttatacagtagggggttgaaatggccaatgcatttcgcaccatgtcgcgtattgagactcaaggattaggaggaaatattttccccaacgatgttgaagtcttgaatactgctaaagtcatagagggtacaagaaaggtcgtggacgatcccaacactcctgtcgcttagtcttttttatttattttgttgaacttccttttgagcagtacatgggtactcatgttttgtacttaaaacagcttattttgccaagttattcaaacaatgtatccttttgaggatacttcttttgttaagtacttgtttatccctgaattgatgtgtgtttttagctaaagctgactttattctcgcataattcttcatcgatctattcacagcttggtgtgatggatttttcctaagtataaacatggaaaaatgtaaacacttcaaaaattttaaaaattccaaaaactgagtttcatttcattaaatagtcaataatacaatatatatatgattacaccccctatacccaggacatttatgaaataaattgactaagtatttatatacatgggagtactattgataataatattttaaactttctccattccaagctcgatcaagaattgagccgttgagatcgaataactgataagttacattgtcaattttttagcgatgagataaggttcttcccaattgtcaccgaatacgccatgcatggagttacgtgtattaggcatgactttttgcaatactagatctcctactcgtaggctcctttctaaaacttttgagttgaaatattgagttgtacgctattgataggccacattttttaaatgggcctgatcgcgcttttcctctagaaaatcgagttggatcaactgattttctgtattagtttcaatgttgaaaacatcacttcctaacgacccgactccaaccttgactggtaccatggcttcacatccatatgagagtgagaaagggtttcaccagtcattaagtgagaagttgtgttgtatgaccatagaacttgcagaagcttttcttgccacactccctttttttcttcaagtttaccttttatagtatgcttaatgattttgttgaccacttctgtttgtccattactcttaggatatgcgactgctgaaaaagctttttgaatccccaaatcatcgcatagtttgcgcattttcttacaatcaaattgttttccattgtcagagattaatttgtaaggaatctcaaacctgcaaacaatagctcgatagacaaacttgtgtaactttgcagctgttatggtcggtagagcctcagttttggcccacttggtgaaatattcgactgcaaccactgcatactttacccctctctttccttttggtagcttgccgattaaatctatgccctagactgcaaatgtccagggactagtgatagagtttaactgacttggtggtttgttgacatacgtcgcaattcgttggcatttatcacattttttagcgaaaatggtttcgtctgctcgcaaggtcggctagtaatatccttgctgcataattttcaaagcaaaggagttgcctccggtgtgatgccacaaattccatcatgtacctctcggagaatataatcgcactcatccccatcgatacatttaagcaacagttggctaaaagtcctacgatatagtttgttgtcataaataacatatcaagcatcttgatatcgcaattttctagcctcgactttgtcttcaaggagtctacccattgttaaataagtaacgaatggagtcatccaagtgattttcttagttacatcgacttgcatcatctccttgcaatgaatagttggatgggctaacacatcaacaagaattacatcgagtaattctgcttctcttgttaagaccaaacgagccaaagcatcttcatgagaattataagcacgaggtattctactaacaataacttttttaaatttttttaacaactaacaagtataggaaaggtattttgttaagcgtcctcctctagccaaatattctccattaacttgacaaaccacaattagtgaatcactgaatgcctcgaggtattcgaccttcatttttcaagagtaagctttaatcctgcaattagtccctcatattctgcttcattatttaaggcagggaattcaaatcttaaggcagcgtgcactttgaatttgttagggcttatcactattattccaccaccacatccttcgttgtttgatgccccatcaacatacaaaatccacccttctctcgatggcactttagggtcgactcgctcttctgtaataattgctattttgtcgttcgcaaattcgagaatgaaatcagcgagggcctatc

SEQ ID NO: 80249 - DNA, 962 bp, Cannabis sativa
cgaatatgtggaatcaagaaaggtgagattggggtaaaggtaagacacaataaatgaagaaaaacatatgaaaagtgtagacgtagctggttttggggagacaaccagaaagaaaaaaatcaaaacttaaatgaacacagcaagattttaatttttatatgagagagtgtgagagaaaagttatatttatgcacttccaagttatttaatgtatatatgatttagaaaaagaaatcccactaccttattcagtaacattaatctgtactactggacttgtaagacaaaaaaagctccacccaattgcacaattgtcagtagcaaatttggacaggtgtttggctggtctatcacgactttatttccccctgaattctttgttttccaaaaagaagaaaaaaaaagtgtatacaaacacatcataataattttcatcaaaaaaaaaaaaaatcataataataatttacttacttctaatacaaaaatattaatttactaattatttttaactcagagtgagtaactaaatgctcccattaattagcctattaagttttctctcttcctctcatttaagagattttgaacaagatgaaatagcaaagggatgttgtagattttttttttcttaaaaaaaagtcttggagttaaatatgtttttcttttaatgattattaaacaaaaaattattaaacaaataattagtttttctctatctagttctatccgtttactttaagaggagagagatagagaaagatagagagagagagagagtattttgtgctgtgtgttttgtcacgatcattggatgcacgtggaagcccagaaggtaaattcttctaaacttatagtgaagttcatataataatctattgaaatggattagagatatatttgatatattatatatataatacataccaatttcgtgttgatacccatctttcatcttcctcagt

SEQ ID NO: 80250 - DNA, 777 bp, Cannabis sativa
  modified_base (713)..(726): a, c, t, g, unknown or other
aacattaaatgttatttctggtctatattaataagtaaatctgattatattgaaaacagttttatttagggcataaaacccaacaccccttcctcgtggaagcggtttccacttccccatatggttgcccttgtttggcttgagttttgctacgagaatcttcctgccttttcccattaatgcggtcccctgagacatattgtaaatcactgtgccaagtttcttgccaaatgtgactcgtcatctgtccctcccacactttgttacgatcacacccttaaggctaaagtccgcattacctctaaccctttctacattgccaatacacgcacaacacttcacccacttatatgccaccctcacctaatgtctactcaacacctttttcgtttaccccaaggacaaattatgccaaatcatccttacaatgccccgaaatcggattacaacattcaacacttcagtcaagctcgcactgcttctgttggccgttttgtggcgggaccttcaaacactccaggctccttgcctgtccatatggattctcatttcccaacttttacgacaagatggaaccccgtatgctcaacaacttgctcccccatgtttcccaccaacctcttcactcgatgagtcccactaaaatgcccatcaactcacctagagtagcagctggtgtagcacttaagactactgttgggttttatgccctnnnnnnnnnnnnnnacaatctgattagttatcaattttgaagtgaagtatgtttacatgtatgtt

SEQ ID NO: 80251 - DNA, 1312 bp, Cannabis sativa
gttttgttggcatttttggtgtttaacagtttttgtgctcatttggcaggactgatgttcttgtaaccttattctttgcttctgttaagttttttgtttcctttcggaaattttactatacactatcttgtttttcctaggaatatgggccattttacggaacaatgagatgctgacctgggcagaaaaagtcaaatttgcaattgggcttctgcctgcaatggtaggcggacagccttatgtcgaagctcaagatggtttcaccgtcaaagattggatgagaaagcaggtaaaataatggaagaagaaattcttttataattgtaagtttgtaaaagtattcaaagggattcattttatggtctcatgtgaatttttgaagtttcaagttcgaagagtgatttatgatgtttctgttttctttcagggcatacctgatcgtgtaacggatgaggtcttcattgccatgtccaaggccttaaacttcattaacccagatgaactttcaatgcaatgtatattgattgctttaaaccgatttcttcaggtatgttgtttacatttatccttctaggttgatatatcatatcgataccataattttattttattcccgctcatataaacaaagaaaggaatctagaggttaagttactatgcctaaagttactatttcctatcagattgtggaatttggggacggttaggattccgcattgaccaattatgagattagttagtagcatataactatttgggcaggctagcgtttgggagtgagttagtggttgtattaagtagtatcaaagccatgcaccctcaagtgggaccaacgtcgcgggatgggcgacttgtggatcaagcctagtgtgggacaccgcagagtaggctaccgtagagtgggctcccatgggcgtaagctccaaagagattggttagtagtatatagctatttggacaccctcgtctcttaggttaatttttgggaatgagttctacccgagtggtttcataagactactatgatctgtttaccataaagtatttgaagcaatagtgttaaaagtagtcaatgtaccaaactaaaaatttcgaagatttgaatggagggaggttaagtaatacttatacactttttgtacgggtacaatttttaatgccttgaagggatcatttcttcttaggttatgaacattttgatactactgtttttgtcataaaaggaagaaacttatttaagccaaatactttttgatgagttttttgtggaatgttacattgaaattaaatgaacaggagaagcatggttcca

SEQ ID NO: 80252 - DNA, 4894 bp, Cannabis sativa
gatgttaaaacatacttgttagtaaatctagatcttggtaaaagatattccaacagtccaacaccctagactgtccaacaccctaggctgtctaacaccctaggttgtctaacacttgatatctgcctattaattcatactttgtaatcctaagggtgctatagcagatcccacctatagtgatctggatattatctccctcggtataaatacaacaaaatgggagtaggtcattacccgttatcacaagggggccgaacctctataataaatctttgtgtttattgcctttcattctttgtatgtgtaacacgtggcaagcatcagattcatacaattccattgtcggatgatcactttttgagattaatagttcgatgtttttattgagagcgtggatatcgtatttgatcaaatgccatgattaacacaagattaactcctgtcacaccatctacatctttgggtctccctcaagactcatagattgtagatcgagatactcaggttccggtcataaccggaatttcgatgaacactgcagatgtggtaaatcctatcaccacaagagtcgctatgagtctagcctcctctagacagagctattgtgacctgccaggtcctacaggccttatactgccaaatcctacagcccttgtcttgccaggtcccacacaccttgtccggccaggtcctgcacacctttggcggccagacctcccctgtaagtctatgggcagcgaggattacctggtaggactttatagtggccagactgacacatgcattatagtggatccaaatggcagacccatgcctctaagagtagacccaccattggcgcctctgtctgaaggaagaatccttgaggggtacccccaagaacaacaacaagtttcacccccagtaccatgcaggacagatgaggccaggaattggtgagcctcacctgggcttaggcaaagaccttgagttttccagactcaggaaagttgtgggccatgtaggcctaattcaagaaccatgcgctgcttaatgcgatgtatttgctcagcagagacccaaattctttgaagattgatggatgaccaagatcacatcctttgatctcacaaggtagatttagatcgctataatagagaggtcagcgatctaataaggcagttcaaccagagaaccaataaaagaggcaagggtctcaacagagatctactttaaggaagtctttttaatagatcaaggagggtttgttgatatgcttatcaacccagttcctcagggactgggacagatctctccttgacagagggatgacagacctttcctcaaaggccaaacggtgaaaactgccagatcttgacaactaacgacatgaggggctggctagggatctcgggctcaataatagccccctctgtccatcttgtggctggccaacaaataccaagagtccctatggccgaccagactcctccagtagtccccatggcgggcgagagaagatcactccctccccaaggggagcgagtcaccccaaagatcaattttcaactgaagatgactgggagcgagtgggaacatccaaaaaagaatttgagaagtggaattaatcacttcaaacagttggacccaacaaactctagtaattggtgtgatctactccatgtcaacacacaagctccatcaaccaaatagagaagtgtgggcggccaggccctgcccagcttagggctggccgaccatgtacaagcacaatactcagggctgactgaccttgagtataccctctcccaaggtatggtaggctagggcctggccaatctgaggctggagctcattcaaagaaggccaatcaactagccccctacaacaacagatccttctttgcaagcacaacaagacatgctcaagggtgaggggatcaccattctcatcatacatcaatgccttacccttaccaaaattcaagatgtcgtcttggaagatgtacacgagaaaagaagatcctctagtacaccttaagtactttgagatccaaatcgatctcctacaagtatctggagatgtgcgatgccgattctttcaagaaactctagataaaatagcctaataatggtattttaggctggccctaggaagatttaagtcttgggaagagctcttttgagaattctatattcaattctctacttcaagacaaatacttgcccgactggagaatcttgtcaaaataaagcaaagacaagatgaacccttgaaggactacagtcaacgattcatggctgaggccaccagggtcactggcttgatagaagaaggacgatatacggccatacttagaggcatcctaccgttgagtgacttttggaaagatattaggaggatctcaacgaatgaaatggagttccttgagcgagttgatggcttcataaagttagaagaagctgtgcggcaagcccaaataagagggtgtgacaaccatgaacaaacacaaggcctcatagcgcctgaagcattgtcgaaaatgctgaccagcgcagacaatctctatcaattctcaaacaacgagaatagtggagaaaagcacaaaaatgatggctcttaccaacgtatggcaaaagaaggaaatttaatgattcctttaagtcatgaagtccaagaaagaaggaggggaagtgtgtatgtttcactcttctatcaaagctcccaaagcacagcatgtcaagacatattagcagggcaggtcaacaacaggaagtcagaaggttggcctctatctctgaagtctgcccctggctccgaaggttggcctccctctttgaggtcttgcccctgcctctgaaggttggcctccatctccaaaggttggcctccatctttggccaggcgtacagacagataccaccaactctgcccaaacctcagatggtaggacacttaggggttgacattgacggaccccatattgcaggcgagaccaacaaagccagagagtgctatgctcaaacactctgtcataagcaaaaaagctcttcctgcaaggcgaagaacaaggctctaagcaaccaaagcttggagagcccacaatctctttctcaaaaaggagatattgtccaagatagtttctcgcacaatggccccctgctcgttaccgcacaaatcaggaatatgactgtagcaagatatatggtggacaatggagcctctttaaacattcttttcaaaatcaacacgcaagaagatgaggctccaacccgctgacttggcaccctgcaatcaagtgatgtatggcctctttggccaaggcattgcaaccatcgcgtacataagactacccctcactgttggggaaagtccaaccaccagagctgtgatggtgcaatttttcataattacgttcccccagctttcaacgccatgataggctaaccagacctatacaacctgaaggcaataacatccatctaccacctttgcctgaaattcccaataagccacgaggtaggttgtcgagagcagattagtaatttgcctgtcactgttacaacttggccatgtcccaagccaagaaaaataagatgcatccaccagatcaagagcatacaagcttcatgacagacttaggcctgtgctgctacaaagtcacacccttcaaggctgaagaatgcaggggccatacattagaagcctatgaaaaaaatgttcaatgatcctattagccacaacatgaatgtgtgcgtggacgacatgcttgtcaagctcaaaagggctaggggcatatggaggacctagacaaaaaatttcaaaatcctgtggagctacaacataaaggagctcaaacccagacaagacccgagcccttttgaacatgaagtcgcccacaacaataaaggaagtataaagcacaacgggatgcactgctgcattaagcagacttatgtccaagtatacagacaaatgtgtacccttcttcaacatgaagcagaagcaacaacaaacacgagtggacaaaggaatgtgaaactgcattctgagagctaaagaaataatttagctcagcaacctatgttgcccaaatcctcagaaaaagaagagctaggcatgcacctagcagtcacagaacatgttgtgaattttgccctcacaagagaagaagataatgtacatcaccttgtatactacaccagcaagagatggatcaacactaaaagtccattcccactcatggagaagctgacccacatcttgctcttagcttccacaaagctaaggccatactttgagatacaccctataagggtgtacaccgatcaatagttgcaacaggttctacagaaacctacagcatcaggccaacaactcaagtgaacaattgagactcggccaacataaaatcacctcacaaccaagcatggccacaaaaggccaagctctcactgaattcatggctaatcatagaagcatatttccccgaatttctcagtattcagtataaaagcaggagccagagaagaagcgagaacaagaacccaagaggtgcattataacgccctaaataattaggcacgctacccaagtcacttattaagccctaatcccccaaactgaattactaataaaaatggcacagaatttaaactttaattacaataggaatgaaaataaacttgtaatactttaaactttataaacgaaaagttacagatgttgagatccaaaaaaccttttaaaaaaaatattattacaagtcctttcctttcggccggcctaagcggcaaaacagagtttcaaaaatacagcactggtaaaccccaacccgcttggtctgatatggcccgtacatgtacattctttgtccagctcctacactcatggctgatcagcaatagtctta

SEQ ID NO: 80253 - DNA, 2952 bp, Cannabis sativa
gctaaaagcgaagtcaacattttccaacttaacttccacttttagtttaggctttatatttcaatttcactataacttgttgttattttgccagggaatgaagagggtgagttcacagttaagcatatacacggggtacatggttttccccatttggaaatagaagatatgagggagggtcttaggagtattttgatcactatgaaattgaaggttttacaaaacttgatttggaggacatggcaagaagctttgaatataggtttccttttggtttcctatacaagccctatgggaagcatttaaacatgggttttatggttgtaaacaatgtttcaattcaactcatgttgaaggatttgacaggtataattttaaagtttttttacatatgttagttgtttgttgtcataggttttatggttgttgttgtccttatttggtagctagaaataatgcaaaggctaacgtatatctggtgccaccagatccacaactaacattggaatgggaggaggatgctgaagctgttaagatacaaaaaccagagcaatcttcaaaagtttagaagtgtaagattggaagctacctgaagggtgtactgttgttcctgatgtttttgtgaatcccccagggcatgtcaatgtggatgaaaaattttaaaatttctttgtcaagtggggtgagtttatggctgcagttacaacaaaggaggtgatttcaaaagaattacaagaagcaattgagattagttcctcatctgattctgaggttgcaccacaatttctcccagaaagtgaggattcaaatgaggttgaagaggactttgattatttcaatcctccagagatggaggattatatggtctgggtagaggacttgtttggatatgaagacaatgacaaccatgaagcattttatctcacaaatgaataggtaaatattgttggattgtttagagttagaaattattagtgtaattttattttttcagttttcaattagatttgcattgtgttaattatacttggactttgtcaaacattacaggaaccacttggatgcaaagatactgcaaatgaatctgatgcatataaagagccagatgaacctaactcccctgatgctgtggtcactggattcaaagaacctctagaagaaactccaagggctaagaggttgagaattaggaggatgagaaaggctcaaccccaaacacaagcacctggtacccctctgtggtagatgccattaatgactcatggcctcaaacacaacctgaaacacagccccaaacacaagcacctagtacccccctgtggcagatgccatccatgacacattgcctgaaacacaacctgatacacaacttgaaatactacctcaaacatggcctgattttgacacggatcaactttctcaaccccaaacagaaacacctgtagaaatacaaccccaaatacatccccaaccccaaacaaaaacacctgttgaaagataaccccaaacacaaacaactgatggtgaccttgaatttatagaagaggagttcaatccagccatacagggggaagtggaaagggaacatgttggaccatatgatccaaacagatggtgaaaccaggcaagtgagattcgtgttgtcaatgacgatggcaatgattggttagattcaagagatgaactacacaatgttcacagtgatgatgaagatggtgatcatacctcaaagttggagttcaatcccaaaacaaagaatgatgatttcaagtttgagttgagcatggagtttggtagtatcaaagtattgagggctgcactaaaggagcatttcatacatacagacagggagtatattctaattcacaatgataaatgtaagttcagagctaagtgcaatgtagaggggtgcccatggatgatatatgcacatgtccaaccagatggaatgacattcaagatcactacaataagtgaaatagggcactagtgtgacattgtcttggataacaggttcttttgatcttttattgttattgattgttcattagttttaagtgtttttattcatactgattgttcattaacattatttttcaggcttattgatgtgaattgggtgaccaaaaacttcctagatcagtttaggcaacaccctaatctggaatttaaagtttttgctgaaatgaccaaggacacaaagtattctaaggtcacttcatggaaattctacagagccaaaacaaatgcaaaagcaatacttgaagggtctgtggcagaatagtatgccatattggatgattacttcaaacagattttgaacaaaaacccaggaagtacagtcaagattcaaatagagttaagggatgggagaaggatctttcaaagatgttacatttgtcttcaagcatgcaaagaagggttttacagaggttgcatgccattaatagggctagagggttgcttcctcaaaggttactgcaaaggtgtgctattggcaacaattagtgtagatggagggaattccatatttccctagcttatgcagttgtagagaaggaaactactagcagctgggaatagtttctaacattattgaaagatgacttggcaccaagggatacaaacacactcaccatgatgagtgatagacaaaagggtcttcaaaatggtgttgattctaatttcaacagccctgacacaagattctgtgttaggcacatgtactgcaacttcaagaaagacttccctggcctattactgaagcaactagtgtgggcagctgctagatcatcaattcctgctcattttgaccagaggatgaaagaaatcaaggatatcaatgaaagggcttacaattggttagcaaccaaaccaaagtcagagtggacaaagacatacttcaaggaaggtgttaaatgtgacatgttattgaacaacatgtgtgaaagc

SEQ ID NO: 80254 - DNA, 1836 bp, Cannabis sativa
gggaattggatgtggagtttatcaggataatatttattaaggatgatggtgatctcatcttgcggttacctgttggttctttggagtgctaagataaacttatttggcactattctaaggatggagattactcggttagaagtggatataaggtggttactcaaacaagaaactgagggaagaatcttgtatgaggggagttgagtcctggtagaataaattttggtcaccttaagtccctctaaatgttaagaattttatttggaagctttcccatgactggctcccatcgagaaagcttctacaaaagtgtaaaatacacgtggggaaaaattatagatgtggggttgatgagaatcttaagaatttgtactatgctatttgggggtgtcgagagagtaagaaaatttggaaagaagttgggttggaggagtttataactagagagagggaggaggatgctatggggttccttatgagagttgctgagaaggttgagaaggaaaaatttgacttccttatgactttgacttggcaagcctagcatgtgatgaactatgctttgcataaaaaatttgtaccagttgtaaagttgacagtggaatggacggccacatatgtgcaagattattggaataggaatgggggacgcaaacataagagaaagaagactatggaaagcaccgataggaacctccagaggaaggagagttgtttgtgaatgttgatgtgacaattaattcaagtgaaggaagttgtagctcgggtattgtcatacaagaccataatgggagggtcataacatcgaaaggtatgttcgttgaacttccttttacccctcttgttgcggaactgatggaaatcaaggatggtgcgagtctggtggcgcggttgggattacaaaactgttgggtggtttttgattgtaacaaggttgtgggcatgttgggtcgtccgccaaattagagtggggcgttagaattgttggtcaaacaagtgacaactgaagtagaagaggcggctgtgttgggagttctcttcagtccaagagattttaatgttgtggctcatgttattgctaagtaggttcttttatgtaagagctctagtgtttgggatgggggtgggggggttccttctctattgttagtggagagaagcctctccctaattgatgtgttttgctcatttattctaagaaaaagaatgatttgttttttttattaatatataatatatatggatagttacataaagtattacttttcgtaaaatttttacatttttatgttttaagaattttttttttttgtattttacgattttttataaaaacaacacgaaaacaacaagaaaactgtataaaaataacaagaaaataacatcaaacaacatcaaaataataacgaaaaataacatatagataataaaaaaatcaacaataaattaataaaagtataatataaatagaccgtatttttgtaaataaaattttaaaaatcgtaaaaacttttaaaattatgtataattgtatttttataattttttttgttatttttatgtatttgtaaaataatctctaatatatatattaaggatttttgtttaaaaatcaactatttttttttttcgtaattagagtcatatacttttttatcttttacattatatacatcactaataagcggttaaattaatataccaaaaggtaacgggaaatagtatattttcacaactaagataaattatggtttgttaaaaacacctttcataaaaatagtatatttttacagctatcattatattaaaagatgtttttaacaagccacatatcat

SEQ ID NO: 80255 - DNA, 1957 bp, Cannabis sativa
  modified_base (1754)..(1754): a, c, t, g, unknown or other
gtttctcttactatactgtttatatttattaaaaagtagagattacttcgttgccaagaagccgagagcattataattaccatatcacccataattacgagtaacaaaaccagaactcaaactcgtaattagctacgaaactataagggtatatttgaaattaaaaaggaaaaagaaaaaagtccaaacttttcttaacttcatgtgccgccccacctttataaatattattattattttcttttcttttaatattattatatcttgataattttcttttcctttttatcgcctattaatacacttgagttgcattgttcaccttccctctcttttcctcacacaatacaactctctatctaagatcaaacataattaataatagaattgttggaggctagaaattaatatggagccaaaagagtctagccacgtggtcatgtcatgcaactcggtgagtgggcgtgacctaacgacatcatcgtcgttgaggttcgcgacccaccgtggagatcatcatcatcatcaaatgatgatgatgatgaaacgaagcccgtcggagttagattttgaagagttcataaagaagagcttgcgtcccgaagatactcacaacaagcctaccgccgacacttttagctttggtttcaaaaacatggttagctatagatacacctcttcttctttattatgtcttgcttatatagtttatatatatataatagcaaactaaaaatatggaacattgccatctacgtaaaaattgtttaaaagtagtagtactaattataattttcttttctacaaatagtaccaattataaagttgatcatggtagtatatgtatgcatatagctatatttggctgagtttttaccttctgcttttagtttctttagcacgtcacatcgggtggattttacgggttttaggttcgggttttgggtttcgggtgtgtgggaatactattaccgaaaccgcccattgtggagtgcgggtttttggataggggtgggctgggctcgagttgggacgagttcgggtgggtgaggcccgggtttcaagttgggctggagttgggctggaccataaaaaatccataaaaaatgagttttttttttttttttaaatatgtacatttttttcatatgtattggtttaattctatcaatttaatatccatttatacataattttgattcaaaatctctatttcatacttatatatttcacataataatatgttaaagatttttaaattccatataagagtaagtagtattatatataatgtgtatatatatatatatgagtttttttttttttttaaattgtagtacgtttacgttctagtaattatattaggtaggttttcctttttgtttttgtttttttgggctgggctgatgtatattattaggaaaacttatttgagatttttacacctgaaatttcattttttttttcattgtggagtagaatttttttaaaaaatattgtgtatttttactattgttccactgttagatttaattattttgttttgttttgttattttacgattattttataaaaatacagtattttttaaaaaaattccataatagtatatttgtaaaagttaacccaaattccaatatttttataaattttccaacttatttatttatttaatttttagagaaaattacattgtatacccatttcactttacttgttttcatttttacctccattttcatatttttttaganatacccacttttatggatgatgtctccacttttataaattatatgctagacttaagtagagagtgagggtatattaggcaatccactcaaaaaagttggtatatttaataaaaaaaataatacgagggtatttttgagtaatggatacaaaaaagagttatttttcaacttatccctaatttttagggataatttcacaaatg

SEQ ID NO: 80256 - DNA, 1902 bp, Cannabis sativa
atatagttttacataaaaatattgcataaaatacaattcaatataatacaatataatgcggtgtaatacagcgtaacaaacgaaccctatataaaagtttacgaacatacataattaataagttggtaatttctcttcaaattggaggagaaattttttggtgagtactgaatattttcctctcaatttttctttgttaccaaacagtttttcttttctctcatgctaattctttctctaccaagatcgaaaagacaaaggtgtttcagatttcatctactgggcttttaaacaaagttgggtctattttactgggcctaatagtttttaaaagtattttaatattaaaagaagtttaccaagtttacgatttttatcaaaaataccatttccattcaatgttataaactaaatacatcatctaaaaaaaatcatctatcttaaaatatttcacaaaaaaaaaaagatacaaattattttttctatttgctagacgtgctatatagttatattttaatgtgttatatgttaattatttttctcggacatatttattatttgtttggattaaaatgttatcacttttagtttaatgttttatttcattcataaataaacatataataattatactccttatttatataattttccaattgcatttttcttttgttgtaaatcacttgattgttcataagcaatataaaataaaattgttaaattgaaataaaaaaaaattacataacaagttacatatgaaataataaaataaacgtttgtttacaaaacttctacatttaatttcagtttatcaagaagcaactaagttagcttctaattaataaaaactcattgaaaatttcaataacaataaaagaaaattatctatctatttatcggctattaatttaattcttgatgagagttcgaaacttattcttgagccacttttttgtttttgttcccattgtctcttcttttttggtgaatttataactttgaagaaaagttcgtctagaagcgtagtatttttcatcacgaaactttgaaccattacaattaggtattgtaagagatttattgtcgtgatgatcttcttcaaagttgaatatgatccaatttgtattagatgatgttaaagttagatcctcaatagatttgttggtaactaaactttgatcggccattatgaaagttgatgaattggtctttgtaaatgtatatagtttattaagtgtgtgtgtgtttactagtactttagtttaaaccctttcttctaagtgcttttataggccaatatcctttacgtgtttatttaaatttatggtaatcaatcagattttttttttttataaaaagataaaatatttgacaatctatttcttgtcctacaaaaaagctgtttatagaaataatcaagactcctattcctatactttttaggacttaataaatagtaaattcaaatatatattttaaaaaaaaaatccttgaaatatttgataatatgtggcagtttgatgactttcatatatataatctaaataaaattgaccaagtcaaaggacactgaactatttttcgtttaaatgtaatttccaacaaacagatattataaaactctaaatttattatttttattattattggaagattaaaaaaatatcaaattattcagagattaaacataaatttagtaattaatcctctaaaatattttacaacagcactcaaatttttaaattttttcaaatttaaattatacgtgtatgagaatatataaagttttaggataatattatatggttaaataatattaattataggatttatcaaaataataataataataatcaggtttttttatcataaatatactcttttcatgttttatttacaatt

SEQ ID NO: 80257 - DNA, 1026 bp, Cannabis sativa
atgcaactagcaaaagcaacaaaaacactgactaaatgatggacaatggtgtcatgtggaacgaattagccgcgtcttgccgggttgcattttgaggctggcttaactgataaagcttttcctagtaagaagttggttgaatcgagatactaaacctctaatgcgaaaagtgaaaattttgaaacttaagaagcgaggaagatgccatgggtatttaatatgtactaggtggagtgccttacacgcaaagcaaacgaactagatcatttaccaaaatagcatccaaagatctaacaaatggatagttgagaagactgtatcagccaaaacatttaacattcattatggcatgtctcgtgaagagtgtttattaaatgaggggtctattcaatcaacttgccacaattttgacatctccaaaggcacgcgcccagtacgtgcacattgcaagagtctgaatttagagcgctgttagtttacaatgctgatgatatcctccatcagtgacataatgagatcttaagcagcgccacgtgtcaagaataaatcatgataaagcaaggaaacactgcaagctctcggatcgcaaatcgtctcgaaagcttggggggtaaatgttgtctagatttttgtaagtgtgacacatgggatctaacggaagaagccaagtcaatcttctactaattagtgcgttcggctttggctcctgtgaggggcttccgcgaaggatatatctattgtaaggcggggacatggagcatcagtatgcatgacatttcttattcccaagaatgaaagctcaagtgcgtccttagggaacggaagcaccctacaaaagccaaggagttccttgagtacgcttatgtgggttgcgaaaagacttaggatgagttttgtccccatatgatgtcacgaaaggtctccttccatatctgtcagattacacaagagacatcaattcttttttttttttggtataatgtcagttcagtctcctatgtcaggaaatagtacgaggcatgcgca

SEQ ID NO: 80258 - DNA, 2162 bp, Cannabis sativa
tatataatttttttaaaatatatataaatatgtgtagatttgattgaatcggttatttttacatgtcaatcaacatttaatccgcatttaaattttccaatcaagtttggatattttattgcgaattggattagattggatattttatgaacacccctaactctttaaatatacgaataaaaaaataacacgtgaataatgacttaacatttaacgtacctacgaagttctaaaatataacttatatattattaccgataaaaattaaatttaaatattcattttacaattagaaattaaacttaaatatgtatacaccaaattattaaataaataaattatgattctataaacaaaatgtcaccgtacgtctgcattgaggattctgaagtagatccttgctaagacccataaaaaataagaaatgataggagctaggtggttggactttatttaatatcaatggatacagctaagctttattaaattcagctcaactgccactgcctaattttctctataaattcagcagtttaactcaatatttacccatctcattaatacctaccacacacttcttattcaattcaatttaatttaattataatataattgtttttttcttccaatctttatgaaccgatatccttaaccaaaagaaatcaacatatatggccgatttgaactcaacaaataatcaggagcacacccatcagacaataactggtataattagtactggtactagcactgcaagtactacaagtgggaatgaagaagaagaaaaagaattggtaataaaagtagttgaaatgagtgaaattgagaagagcaaagtgaccattatgagggctctggtccacacacaagatcgttggaactcgaaggaagtgagtgatgatgtgatgctaaggagattccttagagctcgagacatggatgttgagaaagcctcgcacatgttcctcaagtacttaagctggagacaatctttcatgccacccaatggtgggtgcttcacacactcagattttcccaatgagattgctcagaacaaattctttatgccaggccatgacaaacaaggacgccctattgccctcgtctttggtggcaggcataaacagaatgacctcgatgagttcaaacgtacatacctaataatattatattatagtattcctgaacctttaattaattacagactaattattatgataatttattcttaataaattaattttatgatcatcatcaggttttgttgtctatgtccttgataaagtatgtgcaaggtaggtcctatatcgtatctctcccatctctcttggttaattttgtgaataagaaaagaaaagaagtaaaaattgacatgaatagacagtatcccaagatatgtggacaaatgttaatcttgtcttttgagcaaaactatactgtatatatatcctttaatccatttaatttctttcgaaggaagctaataataattatataattaattaaatgaattattgtgtcagaatgccaagagggcatgagaagtttgtagccattggagatcttcaaggatggggatatgccaattgtgacattcgtggatacctagcagctctatccattctgcaggttacatatttcattcaatcattatttattattaggtaccattaattattagttacaaagatataagtgtgtgtgtgtatatatcaaaataaacactcgttcatgaagctctattaaatcttgcattctaacttatctgaaaatttgagaaaggttttctttttttttaataaaattacaccaaatatagttttatctaattactaaaatcttatgaggttaaagttttgtaattactagtgtaatataaatattataaattactagcaatatgaacaatgtaggacaaatgcatacacaattttttttttaataaaatcacaccaaaggattttatgttactacattatacactatcatattataaaaatagagttgtaattatatatgaataaaaatacttgtagatgattaaaaataattactacccaataattttccattatagatgtgtatgtacattattgatactatataattattagtcttggaattttttttctctgaaatatcatattatgtaaagcttaatt

SEQ ID NO: 80259 - DNA, 1861 bp, Cannabis sativa
  modified_base (26)..(52): a, c, t, g, unknown or other
  modified_base (683)..(689): a, c, t, g, unknown or other
cttgatttttttataacaaattagannnnnnnnnnnnnnnnnnnnnnnnnnnatagaggttctactgtatatagaagtcggtgacagaaattcattgtttaattaatcggtgaggacgatgtcttttgcggcagcgaatgggattgggagagtggagaacgacgagagagatcatgacatggtgccgtcctcctcctccgatgaggaggagtttgagttgtattagggatcggattaaatcatcacgagggagtcgattcaatctgattgcaaacgagttcaaactggcccaaaataatatgtaccgggccgggtcgggttgtgagcccgataaatgtccgaatcattcaggccaaagtcgccccgtcgtgctggggcccgatccgacccgcgaaaatggcacaaattgtcatttctaattccaactcaccaaataattatacacatactatatttactccaaaaatactcattcattatgttatataactgattctattttagttatgattggtttgagttatttcgtgttattgtttttattcattataacattgttataaaatcggttctattttaattataacttgtttaagttattttgtgttatttatttttattcattatattacagaatcggatatattttaattataaccagtttgagttattttgtgttattnnnnnnnattcattatgttatagaactggttctatttttgtttatatctgagacatctacttccgatgactttttcagtgacttttttcgacaacagtgacttttctaacaacttttttggcgacggtaacttttctgacaacttttccgacaacactaattttttcggtgactttttcaataccggtgacttttccgatgaaatttattattgttttacaaatattagatttctatctttttttacaaaaatatggtataaaaaatcctatataaatgtaaaaaaaaaaaaaatacataatcccataatattatttatttataccataaaaaagtaaactcctaaacttttttactatattgtgtaatttaatttctactagaataaaagactcgagagacttttgagaaattacggcccacaaaataattaggctaaatttcacaaatacacaaaaataataaaaaattataaaaatacagtttcacggattttgaatatttttaagaattttttaattttatttacagaaaatatggtcttttttatgttgtatttatgttaatttgttgttgattttttgttatatgtgtgttagtttttatttttattttcatgttacatttatatagttttcttgttgtttgcgtgttgtttttacggaaaaccgtaaaaatgtaaaaaaaattgttaaacttaaaaaattgtaatttttcttataaaatatggttctttatctaattattccaaacaattagcaatatttaagtactgtgtgacaaagttggtgatctcccatttattatattacttattacaaataatacaacactaataataaagatgtttgcaataagataaagatggtttaaactgagtgggctatgggcgatgagtagtacatcattttttgtattgtaggacattattaatccaaaacaaaagtttcatttctacagctttgagtttttgttgggaccaagcacacatataacgacacacaatagacataatgcctaaataaataaataaatcatcaccgccccactctatgatttggtgccatgcatacacactttatttgagttctaattaatggagataatagtggactaaggacaacttgttaaataaattaacaattaacccaagatctatttgtatataacatagaacac

SEQ ID NO: 80260 - DNA, 981 bp, Cannabis sativa
gttttatttaattgcattgtttatgttggtgtttgaatttgttgataattatattgtggtttctatattcatgtgattggagttctctggatgtatattttttgttgacggtgtcacagggtaaaatttacaccaatgaagaaatagtcataatatgataacatttatttttgaggggagggcaaaatttttaaatggggcttaaaaaaaacccttatacaactgatttttacatttgaaataaaataaataagaaaaaaggtagtaaattgggcattttttttaatgtttattggggttggcctcttggaactctaagttccaattactcaacctcttatcatttatttattaaaaaaaaaaaatgttgggcctatgaatgtgtgtgagatttcacacatttttttaggcctctttaggctggggcctggggcagtggcccttgctgccccacctttcagctggcactgatatccggttcttgtttggtaaatgagtttggtaatgtattttgagttgccgttggttggaatacattttacagtctgcttttaattgaaaatatttttcaaaaaacattgaaatttagatgtctgtagcttaattgtggaaacattttagtcgatattaattacaggagatttgatatcaattaggtgcacatatcattactcttagagagcaatagatagttagataatttattaatataaagtaaattgcaaaatcctatctaaacacttaaacaactaaatttaaggtgattttgcaattaattacatagctagttaagaaattgcaaaaatcttgaaatagttcctgataaaagcttattgaagaatatttcaaattttaaatagcggttattttcatcatcattcatatttgagagttgtgtaggagtctgatttttttttttttaattaccttgtcattttttgaagatcacaacatttgtttttttcttctccttaatctgca

SEQ ID NO: 80261 - DNA, 1766 bp, Cannabis sativa
ttctctcaaaaacacaaaaagtgagagatggagagacttttccccctcaaacattagggtttggttatatacctatagcattcttagatttacaatgttaaacctaatgatgtgtgtacacagttagttatgtaattgattaccatgttgtgaatataatataccattgcagcattgccctatctttagtattacttacccttttgcattgccgtttgtgaagtccttgactagttaatgaaggaaagtgtttaaaatgttagatgagaatgataaagtttggggactaattaagtagtttttaagttaaagtgatatgataactattaaaatattaggcttagttcttcaaatgataatgaagattttgagttaaaagtgtactcaaatattatgtaagtcaatttgacaattttgtatccttcttattattctcgcttaattataaatgatataattagaattaagattttctgttaaaagatagtgtttcatagttaaatcaatttaattgtgacactaattaatttcaacattttgaggaaaaaaaaaactatctagatagttaatagagtctaagaaaaataattatttggagttatcacatttaaattgattctatgggacaccaatttttaataaatagtcttaattctaacatagtatcaagatggaaaattaaaatcaagggaaaaaaattctttatacatctttcttacccaataatgcccatttagttttttaggttgaagaggtagcaaaaaatagctaaacaactgaagaaatccaggaagtctctcactaattcagcaagtatcttcttcaagcccaagcgccttcttagacaaatcgtgggcaatagtgttggctgtctggcgatgtgactaaactgaacattctattgaaatatattttaccaggatctagatttactaacagatatgttgattaacaccctaaatatgaatttttaaaaataatagaattaaacacacataaagtttaagaaatcttacatcggtggcaccggaataatctgtctcattccactcagatctctaacccttgttcctttcgcgaatcctgtaccttcttttttcttcctgggatcgaagtaggatttttctcagggttcccctcggtagggtaccgtatagggcttggttccctggtcttgggcctctgagtgcttggcgaagactcttcttgtgtttcctctggtcccgcggggatggccttgggatgtatatgtattctagccgtttccatagctttttgcatcgcgaccattatctcttgcatcttcttattctgctctttttggacagccagttcggcttcatgatcagtcgcatttttccttaagaccagcttttcagtatagctaccttcgtcataggtgtcgtacccttcaaagttttcttcatattcctcatcgttcgcctcatctcgttccttagagcccacattttctcgtgaggccacttctttgccttctgggttttgaatatctcgaggaggacgaggttggcgtgtgttgtttcgagtttccaccattgctatttctgattctttgactgttgtcttcttaacaacgcttatgacagctctcaatgaaagcaccaaaatattgaccgagttttcgacaaccaattagatgagataatgatgagagctgtggaataattaatgcaggtgatttttacgtggttcgggcattaatgtgtcatagtaaacgagtctttttttattaatgagagttctta

SEQ ID NO: 80262 - DNA, 650 bp, Cannabis sativa
aatatatatttaaaaggttcccaaatttagaaaaataccattttatattgagtcttgccaaacgattggttttgggagaaaattattttattaataacgtaaaatcaatggagcatatattctaatatttgttttctttgaaaaaatatatatataatatattaattaaatattttgtttttaataagattcattgcttaatactaatactaaaaagtgtcactttcaacttttctttactcattattttgactaaataaataatgttattagaaaccatgaccaagaattttcattaatggagggtttataataaaaattatgtgtattaattgacattaataaacataatagaaaaaattatattagtctacttcatgtcaaaattatggcatttttaaaaatttatattttgtggggggttgaataatataaaacatatttacaagggctttttattactaattaataaattatgaaatatataatatgcatttttaattatcttttttagtggggcttaacactttggttttgcaatttttttttattattataatataatttatagaatattgttattagacatcagtaatacttaatacttatataaaatggcagcttggaaatgattggtagttttttataat

SEQ ID NO: 80263 - DNA, 2776 bp, Cannabis sativa
tacaaaacatttagaatgatttttatttgatcacttctccaacaaaacaacttaatatctcctagttaactgacaagacaaatgcaatggttgacagtagtaccaatccatattagtacctagaaaagtgtatgtatgcaaatgacataatcttcaagtgtaaatatagttaaggataaacaagctaagttacatgagtgtgctaacataaaataattctataagacattctattcaatgttgttcaaatcatttactttcattccttgagtatataatgtaaggatgaagcacattggatttgctgttgaacagtgcatgtctgaattttgtccagcaaaggaaataataacaccactcgcaagtgcgaacaagaaacaaaagttttttttttttgtataataagtatgcaaaaaaatctcaaacaaaatcaagggaaaaacaacaaaagaatctaagagatgaaaattagaatgagacttcggtttggcttcctcctagtcctcctttcatcaaagagaaaaaggaaggaaagaaagaaagccaaattccaatgcatgtaatgacacattcaaagaagaacgagaaccttataacttgtagtttctaactaattttaagaagaaaaaacaataagtatcaatcctaagagactcgagaacttacgggttgttccagtcagtagtatcctcattgacaagatgtgtccattttgtccttccactacgaccgaaatgcttgacctgcatgactttaggcaatatagtcttgtccatcttatcttctccggttggagcagagtaatcacgagtgtagataccatctggtccagcagtagcagtatgatcatcagactctgattgaaagaaagctcccttgtggaaatatttctgcataaatctccacttttgctttgacttgggaggagctttgggattcttcctctcccactctcttctttcttcctcggtcatgtttctcaccctctcaatttcttccttctcccttaacattgcttctcgctcttccctatccctcttgatcctggctatttccctaaccttccaagcttcatactcttcagcctcgttaatttcatcatcagtatcaatatccgcaatatttgcctcctgttctaaactcttctggatttcttcatccttcctgatttcctcaaccacaatctttttcgtctctcttttcctctcctccaatttctttttcttaagctcttcaacagccagctcttcagcctcaagacgctcacgctctgcaacagtatccctctctgacttgggcacaaagacaggtttaagcattgctataccagtgggctcgtcatctgaatcagtctcatactcggactcttcttcctcctcttcctctacttcttcctcatcttctgattggagaagtggagcttcttcttgctccctttgacgcagtctctccttaatcctccgccttctttcctctaaagcatctgcatcatcttcctctgcatccaaaccttcctgtcttctggcttcctcttcaattgtagaaacaatctctgcttgccgaatacgcctatggtcagctctcacttcctcgcgattatctatcctactttcagccaaacgacgcagcctgggatcatctttcctcacagtttcagaatattcttgtgttggaaaagctttctccaaggcagctgccttggacattctaatatctccctcttcttcggcgtcatctgcccactcaggagctttaccaggccaatacctcttaactttagtttgaccgattttacctctaagcttatccctgacagcaatcacagtatcactaacacctgctgtcaccgacattgtgacacactacaaatacttatctgatatttcttcttatgagtaccagcaccaaattccgatcaaatgcttgtcactttaccactccaaaaactgcttaacccctgtggagagagggtaaaaaagttagcagaagcctagcacaaattgtgtaccaaaacgatactcatcatctttgtatatttaataagacaaaactttcatccagactgaattaaaacaataacgactgcagcagatattaaacatttccaagtggtaaataaaatctaagaccaaaacctcatcaaaagattaaaaccaacaaccaacacaagtcatataataactcagaaaatgaacagatctagaaagagaaaacaagcaaacaaagacatcaaagtccagtttggataatttgatctccaacaaatagcagccactgcaaattgtgcctcataaattaaacttctagtttgaaggagacacaaaccaaagccaatttaaatccaattaggcctttgaaaattccagcactttgaacactgatttcacacaattacaactaagaacataaaaatataatttcaaaaaatagaaacaaaaggagtatattgattgacaataacaaaatttaaaaaaaaaatagaaatagatataattttctttgttccaaatcctgcaaactgaaaataattacaattcaaattgcctagaaaaaccataaattagattttatttggagagaagtttcacaatgttaccaaacacttcatcaacaccaagatatagaatcatcccaaacttaaacacagtacagtaatgaaacaaaaaatatgaaggaacaaatacaaacaaatgggattcacatgaaagaaacagaaatttttttttattgaaccaaaatcagaaaattatgaaactttctttggccctggtcctta

SEQ ID NO: 80264 - DNA, 823 bp, Cannabis sativa
ggataaataaaatacaactatatcataaaaagaaaattatttatttagatattgaaaactaaaaattataaaattaagttaagaaattattaaatattttaagcttgctgaattaattaaactaataaacatattacaaatatcatgttaaatgtaacatgtacatgttaattattaattatgttttttttttattatttttctcttttttctttttattctcagcaacaagttatgttaatataaatatatattatatgttgcatgttatacattaagtattaattaaaacacaaattttaaatacgtttaagattctcaaatatttgataaacacgtatccaataatatacaaactatactatttccaaaaaaaaaaaaagaaaaatacaaacaatactatatatatcattgggaccatataatatacatatataatatatcaaagcattgatatgatagtactcaaaattggaaaattattaaatagaaaatataaggtgcctcccctctggaccatccaatcactcgacaacgttgtacgtatatatataaaaataaatatttacaatattaattattatgaacttcaaatattttcttagggttttttttctttgaaaaagatcttattaaactatacataacgtcatcgaatttaataaaaaatatatatgtatatatatatagagtcggcaaaagggaagtcgtccttttgaatccatgcagtgaatgaatttgaattaaaatttaggttgtcaatttattttttgctgaaacttttggtcattaatattcttttcttcaatataatatatatata

SEQ ID NO: 80265 - DNA, 3454 bp, Cannabis sativa
  modified_base (3312)..(3315): a, c, t, g, unknown or other
ttctaaaaaataaagtggtcaatcggattaacagttggaatggccagtttctatctcgtgttggcaaagtaattcttcttaaaatggttattcaatcctttcccacttatgctatgagtgtctttcttattcctcaaaaaaattacactaaaattgagacactaatggctaacttctggtggaagaccacatccagcaaaggtagcggggttatttggatggcttgggataggatggcagttcattaagactatgggggcattggtttttgacgattacatgattttaaccttgcaatgcttgcaaaacaaggttggtggcttctcacctcaccaaattcgcttatcaaccaaatttataaagctaagtatttccctcggtctgattttcttactgttgatcttgaaaataatccaaactttgtatggcggagcatttggcaagcaagaaacctggttaaacttggtgcaagacgtatcataaggtcggggaccactacaagtatactatctcatccttcgttgcctgatcactccaatccgtatgtcaccactactcatcctggacttcatcacaaaatggttaactctcttttttatcataataatatatcctgggatcatgagattgtccatgacatgttcaattcgcgtgattcatctttaattctcgggctacccttatgtttttcaactggtgatgattgttggtcttggataggggagagcaccaattttttctcaatcaaaagtgcatacaatctgctgtagaaattgacacaatatcatcctggtgttgataattctaggttttggcccaaactttggcaacttaagatctccccgaaagttaaaaatttcatatggagagcagttttgaatgcccttcccacctgtttacagcttgtcactaagcatttaaacatctcttcggcttgtccagtatgcaagagtcaacctgaatctatccctcatgctctcatcagctgctgctttgctcaggcatgttggaagaatgctcaacagtccctcaatattgctagtaataccacggctggtacttagcttcacaatgtgtttaaaccttctgataatgataccagctgtcgcattatcatgctttgttgggcaatctggaaagcacgcaacagtcttgtttgggataagaagacttctactccccagcaagttgcttcatcggcattagttacacttgatcaatggtgcaaagctcaggataaggtcaatttattatcattggctcttaaaactgatggctctaaagctaagtaatggactaaacccgtacctaatataatcaagattaatgttgatgctgctttatttgaaaatgaaggctcttacggctatggaatttttgcacgagactcctttggcaccttgcttgacacagttgcagtttgcaagaatggctcttttgctgctgaagttgttaaagccattggggtaaaggaagcccttagttgtctcaaagataagagtttggataaagtggagattgaaaccgatagcatgctcaccgttcaagccattcgtgcctctcatcggatgtcctctatttttgggttgattgttaatgattgtaaacttttactttcaaatctcccaaatatctctttgcatttaattagacgatcaactaatcgagttgcccactatgttgctaggcattctcaatttttatctggttgtagcattcatttacagaatattctgcctgatctacaggaccttttgtactctaaatgctaaatttcaatgaagttgttgtttcatttcaaaaaaatattatcgtctccaaatttttatttaaaaaatattctcaaattatattgagattattaaattggaggatttttgtccaatttcattcaattttactaatgtgatgattgtgcaaaattaaatcatacatcttgaactttgatacgtactaaatcatgtcttttaaactttgacatgaacaaattgtgcccctgaactttcatctatgttagtaaaattggacagaagtccttgaatctaacaatctcaatagttcggaaaaaaaaattgatggtctgaaaagttctcaaaatataatttgatgcatgttaaaatttagggtgcaaaaatcttaattaatctgtttacaatactattaataataaattattgttattttcttgtgaagagtaaattattattattattagaaagtcaataatatcataaaataggttaagaaaaattataaaatagcaatgtttgttttttttttttttttttttaaataaaatctttgtattgcattaaaagaacacttacaaatcgctgcactagcagctaagaaaaacaacattcagaatctatacaattttgaaagccaatcttggtctttcactcttatttttgtggtaagtctcccttaatctatttacaatcaaatattttgcaagtaaaataagcactttaatagttctcatctcatgagaccaaatggctctatttctttcagcccaaataaagtatacgcaagagttaaaagacaagaatataagtttccttttttactcgctttgcttcttcttatataattcaaaataccttgaaagttgtagttacgaggaccaattccaatccaactcaacaactcctttgtaaatctcttgttaaattcacatcaaagaataagtgcagtttctaactcaatctcccacaaagaacaaattttatcagtctcaaacccaatcaccttgagaataatgttaaattattaatgtatataatggtgactattcaatggttacatttttattgtaaccatgatagttgcatttttgttgacttgtaatagcagggtattcatagttgatctaatccaatccgcacgatccaatctaatccacaaagtgcggatatccgcattttacgaattggattagattagaaaattcaaaatccgtacttgtgcgaatcggatgttaattaacatgtaaaagtaatcgatccaatctaatctctacatatttaaaaataaataaaattatatgtacaaataatacattcatgtaaagaaaatagtaatttaaaaagtttaatacatataatacaattatatttcaaaactttatagatcacatgtatattccattcttatacataattttttttttctaaatataatgtaaaatgaaattaaatattttttatacatacaattttttttctttatttgaatttgttatttgttattttatttattttataatttgttgttgaagacattaaataataataatttattttattnnnntgctagttatgtaaaaaaaaaatattttttcatatatattaaataatttaatattaaaaaatctgcacttttgcggattggattggattcaaaaaataaaatccgcacttggtgtggatcggatgtactatgagcaaaa

SEQ ID NO: 80266 - DNA, 1588 bp, Cannabis sativa
  modified_base (1504)..(1507): a, c, t, g, unknown or other
atatatatatcactattgacatgtctggagttggtattttggagtgtcctgtttcatacgtaattatatatacggttggagcaaggtgttgtggtccaccttgcattgtcgaaacaattctacggtgtacatagctgtttttccctcctttcttacccgacctctaaatatgttgtatgtaagtaaagcaagttcatacactcttccaagtgtttgtcaattttggagggttaggaaatgccattatatcttttagttgactctaggggttagtggttttcactgtcatgatggtatgtatggtgttggcggtgtaatattgcgagttttacagaagtagaaagattaaaaaaaaaaaggacaaaaaaaaaaaaaaaaagagagggcacactttaaatagatgttagatttatatatataaatatatatatgcagtagccttttgatattatttcaacttttctcctgtctctttttgttctatgacttttgaaatttctattggttgaaatatatttcttgtgattgcccaaaaatattcgtggctctctcttgtctgtttcttacaattttttttatttattgatcaatttcatttaaaaaaaaaaataaataaatgaaagcgagttgtgagcctgcctgtctgtactctgatggtgccgtttcttttgatttttgtgatgagcaagatgatgtcgccacctcagaaacctactatttttgcatgtatatatatatatatttattttgattattgtcaaataagtgacagaaaagtaacggtaattattcatctaaagattcggacctgtttgttttaatatataaattaggaaaattctatccactttcggtatttaaaaagaaaaattaggttattttttttttttaattctgcaaaatctgaaaatatttaataattaatatgttgtaaataaagtttaaagagtattttatgcttgatatttttataagtgatgtgaaataagactgtttgaatattaaattttatattgtaatttatcataaaaatttaattttttttaaataattataaggtgaaccactataaaaaaaattgtattaataaattattggttgcagatgttaaaacgggattgtattgggggtcacaaatggttgcagatgttaaaacgggattgtattgggggtcctttgtgaagcaccttataaattatataaatataaatattatattcgtttaataagttactcaatgtaacacacgagagtttgatacagtgtatcgagtgtaagctgttaatgttataaattcaaacatgaatagtttgccatagacatgcatgagtaaaatgagattaattagaagtatatatagctcacataagtgaacaggtcaaatattgtaacattgataacattgaatttacaacgtgatactaaattcaatccattctgagttttttcagtgcatgcaccaaagagacacaaagaaagtgtctttcatttattattattattnnnnttattattattattatattttagaggtaatctttcatccattaactactactgatttcttattcgccttctttttgttaat

SEQ ID NO: 80267 - DNA, 2260 bp, Cannabis sativa
ttgggttatgtataaaccattggcgtttaagaattgtttcttaaggtttattaagttttttcaagcttgcttaagttgatttttatggctagttgtgtttcatcctcgaatttcaaccaggttactttccaattctgctggagataactcacatactatttttgagtacaaaagtatcgatggtaggcttctttctcagcttgaatcataaccaaacatctcgggttggcatcaagttcttcttgagcattattgaaagcctcttttgctttcctgtatgtgttagagatatcacccttctcggttttatgccatctttacaaagagtgttttactctatacagcttcttcactatgttcttgagattggtttgattggagtctttctacccgccaagaataacatctttaaatccctctgtaaaagcccaatggttacaggtgcaaaaggacttgtaccagtgttactaccttcaacaagcttaagaacgcaatatctatggtccgaaattgcccccatttgtatctagctttgatgttcgggtactgatctaacaaagcctcattcgagaaaactgtatcaagttttgaataaattctcacaccctcctcatgtttgttagaccaagtatagaaagccctaatacttttaagctcatccatttgacccaaagcgagccaatcttgagcatcctgaatatccgaagctttaacttgtctacctccacacctgtccttataggagaacatagcattaacgtcacctagaatgagccacagtttttgcaaagtaccgaagctagcaagtttgttcgaaagatctttcctctcagttaatgaattacttccatagacatcgattatgaagaattcttcttcgaagccaaccattttcactttacaatgcacaaactgagtatcctccaagatcacctctacctttaccaacttatcaatctaaattaacataatacgataggataaaatatgactagaataccaattctaattaagaaaaatattcattacattctcaattctttcatgtctaattttggtctcaaagagagcaccataaccaactttattttctttacaaatatcaaacaaatctagttgtttctcttttttatgcagccctctaacgttccaacccaaaatgttatacctgtccatcattagaaaaatgaagatcattatctgaagcctcagtctcctcatcatttagcacctcatatttgttacttgttatggctttagaattcgattgcaatacatgcttagcacctttccttcgaggagttatccactatcctgtgtctttgttcgaacccagcacattctcactagcaccaacagaagactgcttctcttttccatatgttaaactcgaaccagcaagctgatgaacaactccaatctcctttgcacaagtaggaagttgttatattttcgaacccaaaacagcatgctattgcatttttgaacctaacagcctattgcttcatcacaggatcagcttcttgtaagtcttttttctcatttgcttcaactttcttatcctctagctatttcttcttccaagctactggtttgctcttattatagtttgatacaatgtggcccaaaaaatcacacgcagcacattttgagggtaagcattcatactcaacagattgcttcattaattgttttctttcattcatagacctctgaagagtgattttataaacttacttatggtactaaccaaggcactcaaaatgtctttcccaatattgtaatcccaacctatatttagtcttatccaatctggaacacatttaaccatttgcttagttaaaaaatagtatttaatttttgaaaccattttaaaaatataataattaattgaaggcaaaacatattttaaggctatccaccaacgtcaaaagattattgccaatcccaaattactattggacccacattttaaattcttattccttacaaaaattaggaaggtaaacagaaatttattccttattttcatttcattctctatccccacaaataaacacatgattaatattgttctaattaatgcttttgaacgataaaataaatttttgtaactaaaacagtatctgcatagtacaatattaaaagaaaagaaacagctaccaacagaccaattacttcaagtcactaataccaaagcacagccctttacaataaaagcgcgcgtacgtagagagcgctatagatcgaatttgttgtg

SEQ ID NO: 80268 - DNA, 839 bp, Cannabis sativa
gtcaataagatgttcaaaactcagttgggaagcaatatggaggtttatgccgatgacatgctagtgaaatctaagacaaccggagagtacagtacagacctcgaggaagccctcttggttctctaaagatacgagatgaagctcaatcctaagaaatgtacatttggtgtctcctctaggaagttcctaaatttcaccatcagctcccggggaatggaagcaaacccaaagaatattaaaccttctgttgacatgccatctcccaaaagcacaaggatgtgaagagtgttgctgggaggattgcagccctcagtaggttcatctcgaagtccacgaacaagtgcatcccattctttaacatgttgtgaggaaacaagaaatcaaatggactaaagaatgtgaagaaatcttccgaaaacaaaaggagcatctgaccaaagctcttatcctatcaaagctagtagaaggcaaagatttgaacctttatttggtagtgtctgatcacgccataagtgtcgccttagcgcaagaagaaggaagggcccaactaccggtgtactacgtcagtaaaagattactgggtgtagaattcaggtatcccttgattgaaaaattaaccttttgcttactagtttcctctagaaagctcaaaccttgatttcaagcccacaccattaaggtattaacaagtcatcctctccgctaattgcttgaaatggcggaggcatctggaaggctgttaaaatgggcaatggaacttagccaatttgacatccaatatcagccaagggtatccatcaaaggccaagcccttgtggactttgtggtggaatgttcta

SEQ ID NO: 80269 - DNA, 582 bp, Cannabis sativa
tgtaaaaaaatattctttgaacgtaaaaatataaatattttacaaaaaatagtgccttatgtaattattcaaataaaaaaaaaaagcagtggtatttatgagattagttttaaaatttccttccccaacgtaaatttctcttttaatattccatgctcatcacttgaaacaaatggcttgtgtgatttggggatagtgtgaatttaaatagttgaaaaaaaaaaatataatatttaagtgtatagaattaaaaagctatagtaaataataatatatataaagtcttaaaatatcactttacacaatttgtgttttataaatacaaatatcttttacagttatatattttatatactagtttatttaattttacatataatgtatgccaaaatggaaaacatattcttaaaataaaaaattgaaattgggtacttttgcatacaaaaccgtatttgagagcccaacctacatagttagtcctagcccaacccaaaacactttgacagtgcagtctttccttagtcataatcactaacctttactcatttcagtctcgaagagcgaatacatacagcttcctta

SEQ ID NO: 80270 - DNA, 1420 bp, Cannabis sativa
  modified_base (1164)..(1167): a, c, t, g, unknown or other
  modified_base (1300)..(1300): a, c, t, g, unknown or other
ataaactatcctgattcgataaagtcctacacgatatttatatttatatcctaaattcacaaataattctaattactatatataaaaaacagtactatgtactaaagatcaggtagtatattaattagctgtcaagttatgccccctattaactttttaccttatatacatacatatttatcttttttcccccacactaaagtagtagagagaggtgtaattgggtatttatcatttggaagtatgtgtagtgtggtggtccaatttataatattattgctatataggtgttgtgactagttgtttccattgctaattcaattgggtccccatacccaacttattattaatacaccctaattaatctcatatatttatctcttcttttttttttcccatacccacttttttttttcaataaaaaaaattaatatcattatcaattatcatcaccatcatcatcaatattattattataataataataataacaataataaaccctatcccacatttgcttcttttgttataaatgagtgccctatcaagacaaagaattccagaatggatgtcccaaattctccatttcaagaccctttttcattcattcaatctctctctctctctaatttctctttctctctctaaaatttttttggggagctggggttttaggttatatatatatataaatattatgaaggtttggaaagaagatctgatgaaaattgatgtgtgttgagcaagatggagaagcagggcacgtgcattactaactcatcattataattattattttcaattatatattttctttatatatatatacacacacaaaaatatttggatatatacatatatattaatcaaggtatttttcttactatatatattcaattacagattatatattatttataatccttgtttcaattttatttttcaaaaagaaaaaaaagggcaaggttctatttcatcaatatatatatatatataaaaattcttgttattattattaattaattaaacataattaattatggtaattgcagctgttctaatgagttagttcttcatgtgcccatcttccccatcatgaccaacttcatcttactctaaaattacatatatataatatatgttttgtatatatatatatatatnnnnttatatatgtatatatatatattgcatgcagagacaattcctatcaagaatggtgaagcttcgttttcacttttttcaggtgggtctatctttgttttaattttaacggtatattatatataaatatatatanatatatatatatacatatatttactcataacctttttgttgtacgattttattatatatcattttccaataattatatttccatgtatttataataaactttttaatatatatatatata

SEQ ID NO: 80271 - DNA, 2528 bp, Cannabis sativa
tgtttattttattgttttagaaattcatatttggatgttaatgaaacatacttgttactaaatctaggtcctggtaaaatatttccaacagagacttacccctactacttactgtttggaggagtgagcaaaggaaaatgcattcctactactatagatggcccacttatccaagtttagctcagtagcactgcttactacttgatccaaaagttttggagcaaagggctttacttccctcccaaccttgggcaccaatcacttctctaaggtctcagtgtctatcattggccctccttaaatggtggtgcggatgccctcaaaaatctcaaccctcttcagtgatgaaaggttgtaagccctcttttaaagaaagttcttttccttctcatgacacttcttcaaaatgttgtcaccctcccctactttcttcaggattgcatggtcgaggcgagtaggcttcaacaggaacttgaagcttaaagatgggttcctaggcaaggaagtgacaagcacaatattttggctggaagtagaattttgacccctcaaaggaatgatggatcctaattggagttgttgttgttattgttgctattagagttggtgttgtttctattagagttgctattgttgttgctatgataggtgttgttttgatggtggttgatgtgttgattttggagtttttgttgttgttggttttgctactagttctgttgttgttgctataggttggttgtgtttaatgatgatggatttgagagtaaagtggtggatctttgaagatccccttctcctctcggagagcgatgcatgtctaaagtatacttggtcttttaagcatccctatggatggtggggtggagtcttgcatttgggatttgaggaaatgtccttttgggggaagacaagtctgtctagactctcatcggaggcattgacgccaaccaagtcatcctggacagtcccttccacggccaaagtttgcaaagcctcgaccagagctaatggttcgagatggcttgtctaaactatgccactcccagacatcaccaagtccttcgaagcctccttagtggtggcaagatttgtatatgctccagcgggagcttaggagttagaagctttggtgctcaccttcacgagagaaggaacttctcagacgttcgatgaggaagaggtagatggactcgtcgacttacagagcctatggtctttggtcttacttttctcctttcctttggagcccttcgccttggcaaggctcttagtaaccttttcactcaaggacttcaacatcttggcttcaagagtatctgcaaacataataaccacataattagcaagccaaccctaaacaacaaaatcaaaagcacaattagcatacaacaacacattctaagaagtgtgcatgtgggtgcaactgtttagtgaacaactataaggttctccatgagcaaagaaagtcatgtcctcccagccaacgaagctgccatgttctttgaagagtgggaaggacatggttgcaaaaggattcaccctaatagtatctggagacaactctagattgctagaattcttaatgatctcatctaccctatctataaagtcaatcatggggtacttagtgtgatctaacttcaagaagtaatttttgaatcccctttgatccatctaggataggcgatgaaggctaggtgtacgaagtacgcagaaaggtctgtcacctcttttggaagagcttgctcctagagcaccctcatccgggtacgccgcatcatttgaatcaaatcatagaagagtttgaaagagagagatcaaaaaagaaagtgtaagaattgttacctaggatttggaagctgagttggagagtggaaaccctcttcagagggaaactattagagaagaaccaatactctctgaggtcatgaaacgcttagtcttgctggtggggcagtgagcatcagaatatctctcaagattgtaaaaccccaactttttccatttggtcctcattggttgaggcttcaccccgtaaaagaacaaaatctcctccaaagagggcaccttgaatttatgaaccttgcaaaaaaatgtaccatacgtctaagagattataagatggaggtataagttgaaacgagcaatcccaatgcacgcaataaactctgcaaaacaggttcttagagggagatgtgccccgcatgagatatgggaccagctccaggcaatgtacccatccgaccttgtggatgatgactcctctgggatagccaacctatgccacatcaatcctggtatgatgagcagtccaactttggtggaatacgttcctagcatcccgtatgaatagaagcacttttccttttggtccatcttctagaaggagttgttgatttctaagtcggaggcaaaactttggccttccctttccctttggactttttgggtgtcccagacagagtgacctctaggattgtctcaagggcagcatccaagttaggttcccctgcaagaacttttgc

SEQ ID NO: 80272 - DNA, 2947 bp, Cannabis sativa
aaacgtacttgggcataaaagttgccaataacccatgttttcttgcaatggacttgatagtttcacgtgcataaactatgttatcagcagaaatggtgcatggtccgtagcccaaaacaacctcaaattgacctttcccagtttctgcatgtacctacaaaaagggaaatacgtacgtaccaattgagaataaataaaaaaaaagagaattttttgtaaagcctttcctatagcccttagtaaaggaaggaatattgggaatagagaataataacatatgcacctgttccactgcaatattcaaagaatggagggcagacacaatctcttggaatataggagaaacagcatcataagatgatgttgagccgtatgaagttgaatcaattggcatccattcttctttcccttccctagcaaagctcattaacaaacaaatattaacaataatctcaagaaattcctttaaataaatatatcattaagcaagaaaagtttaatctcaaacctcagtacactcttcaacaaataaaactcgatctcaaatcctgcattcattacctggaaaaaatccattcaagatcaaaaacaaaatagaaatattctaattagtgctttctttcgtatgttacccaagttgtaatacatacaaagttaaattcttctttcaaaatttttgaaacccttcgcaaggcttctcttgggcaatattcccatggttcaccaggtttcagacacatgtcagccaaaaccatttcttctcgagtttccctataagaaaagatgttaaaatttcgtacatctggtctactgattctaatcaagtttcaaacatgtagtctattttgaagaccttactcatttagtaatatgtaaaaaaaaatagatattttgtaccagggaattattcttcttgttgataaatcaggcaccaatctgacctgaccaactgcagtcagtccacgaattttctaagataggaacaccaaatgaaggatttcccattaaaagaacaggcaaactgacaccattcctctgaaccacattctgaaagtgtggtgaaggcacaacctattacagtaatggcattatggcaacattaattattgtttttgttcattcaataatgttggtgagagcttagaaacattactagctagaaagaaaaaacaaagtagagacaaagaaaatatggaattcgaaaaacagagaaaaagatactaaatatggaaaactcacacggcaacgttgttgtcctgcaagatcaacccatatcacacgaactaatgtgatgccactgagttcaatattagtttttgtaggtgtagatgacatagtatttgttgacccaaaagattttacaggtagcttaagtttgtaaagccgaatagaattttcagcaaatatgtctttagcagcttgaatagcctcatgaatatcaagatctccatcaatacaagaatcacgtaggacagaaaagatgacttcacgtgattttttagcacctaaaacgacaagtcagattatgaaaatgataatccatacaagctaattaaataattatagcagtaaaataactgtcaaatttaacacacctaagtaatatgtttcaggaaatgcgtatccatcggtgctgaacattaactgaaaatataattatatgttataaaaaggagaaagagctattaacatttacatattaatgatctcctgaaaaataaaaacagtgtacaaattttatattataaattgatttaactatcatatcaagggtccagctctagcatagacaggctagcgtccacatttttcgggctccaaaataaaaaaaatgaaagacgttattagacttttatttaactaaatttaaatatattgtaaacaaaaaaatattcacaacttagttgattttaatgttaaaatattcattcatgatccaacaaaattatatgcttaaaaaaattctttctgattctttttataaaaagaaaaaagtttctctttttaaatttaaaatcctatttttttaacaactatttttttcttccctttatataataagtcgctttaattaattttttttatagtttataacccacacatatttattattatgagggaaaaaaattattaattaaatcattataaagtacgcttaataataatatttctgtaaatatgatttgattgatttaaaaattttagttaaaatttgaaaaatattgttgattgtatgtttgatttttttatataagtaaaaaggaattttttgggagggcctccaaaaataaagggatgatttcataaatacacaaaaacaacaaaaatttatgaaaatacaatggtaaattttaaatgtttttatagtttttaaaattttggttataggaaatacagttttttgatatatttttatgttgtattattgttaatttattgttgattttttttttgctatttgtatattatttttcatgttgctttgatgttagtttgttgttattctaatgttgttttttgttattttcatgtaattttcttgttataaaaaatatatataaaaaaattgaatataagaaagtaaaaattttacaaaaaataatttttaaaatttaaattggcttgtgcccatatattctaatgataggccatgaccatctgtgtgcacttttctctattatttataaagagaccttatttataggagcaaactccaagagttgtttgattgaagttgtcatctcatggacactaagcttaggaagagccacaccaaagtctagatacacctgcaaattataaaagcaagtagtagtttcaatgaaatagtttatttccaattgagtaatagatgttatttatttacaagggaaaatatttaggtgtcgtttggtaatacttttgttttttaattttttaatcacacaatgaaagtaaaatttttgtt

SEQ ID NO: 80273 - DNA, 1730 bp, Cannabis sativa
ttctttagggcttaaattttcattgagtcttggtggctcaaggctctaaatctgagccacctataccattttgaggaattcactttatctttttgtggctcctatacccgagccccttggttcactcatgtgcttgaatttctctgcaaacaacattccatttcggctcctaaaatcggctcccaatcatgtcaaggacatctgcatataacaacttataaaaaggaagtttttggcctatagtagactagtagtgggacatttgtatcatgcgcttgaaatttcttcgcatatccctaccatacataatatttatgatttttttttcttccaaactttgacatgtaacaaatcatgtcaactgaacttttaaggtgaaaatcccctctgaactattgagattgttgaatttaagtacttttattcaattttagtaaggaaatactaacatggataagagttcaaggaacatgatttagtacatgctaatgttcgataggtataatttggtagatatcaaagtctgaggatcatgattagtacatggacaattactgaattagtaaaattgaatgaaattggacaaaagtcattaaattcaataatcttaatagttcagggagaatttttaacggccaaaaaagttcaatagatataatttggtacatgtgaaagttcaaaagttaaaaattaatattaatatctactttttttttataactaatatatgcagcaatatatacatatacttgaagaagttggatgtagcatagcactcctaggtgcataagtggagttttccttggataatggcactccatttaatcaatgttaaataatttgataaattatattcaacaattaaattaataatcacttaactaaattaattcactcttaatttagctaagcttaatcaaataattaattaatagtatttttgatgggtacttgttgagagtgtgcctcacaacttctatacttgaatatctttcattgagtcattaaacttttttctgaaattagggtaaaatattttatttattttgaattattagaccaaacatttttagagcaataatgaagctgttaaaataggtataagggaaataataaaaaattggtcatttaagtagtttgttgctattttcaaaattttggtttaattaacaacaaaataaatagttataccacaaatttttctatttttattattacaaaggaaatatttatgggtatatatggaatattttaggtgaatgcattatggttgcccctatagttggacaattttttttagcacttgaaggaaattaaaatgcaatttctattgtataatattgtatattgtagttagaagagacatcaaatattcatttacaaatctcaaaaatagaataataagtgtcacaagtatttaagaaataatatgttaaactaattgcttaaaatttattttaagcaccgtaagttttttagaatttcataaaaattaatagaaacagtatacttaatattataacatggcaagtcaattgtgagagaaatgatctagagttttgtataaactatcttcttaggggtgttcatcaaaccgtctatattgtgtaaactgttcacacaataccatattatataaaaattacagtttgaaatcttttgtggtgcggttgtagtttgtatttttttcaaactgcacaatgtgatacggtttgcgattttaagtagtt

SEQ ID NO: 80274 - DNA, 2006 bp, Cannabis sativa
ttaaaactttacaaattctaaaagtttctactggacgcctaaataaatagaccaaaacacctcttttgagaaagtttacaatagacttaaatggttaaaatatactcatatgaactttagctaaaggtgttagataagttttatattttgttaagagcattctcaggtctgtaatctatcttttataataaataatattcattgaatatagagattagctaatatacattagtagtcatttttattacttctgagctaaaactattttaaagaagaaataagaattaaaaataatctaaagaatttgagagcactctaatttgtaaaatatgtaaaataaaaaatgaagaagctaaaaaaaataaaaaattagtgaggtaattttcaaacaaaaaattaagatttttgtctattaatattgttgatcaagatttttgacaattacttaatcttttttaattataaactaatgagatgtttaagagaaggatttagagttagaaaagaaaagaaatatagagactataatttttacatggttagagcattaataagctttagtctacgagtcacttgtattagtgcttaggatcatattacaataatagtgttttttgttttgtgcaaggattaagttagagaattcctagtgtcttaatcctcccctcatttttctcatccttttacagtgacattctctccttatttatatgaaaaatagagtggccataaatggtctgaatttactttcccttacaagttgtagcctatatggctattttctaaacaaggaaatgttcccttgcaatgggcttgttgaataggcttaaggtaggcatttggtgagacaatacaagacatgtccgcgactggtgggattgcagatgagcaagtcgtcgataggcgtcttggaggatgtatgtctgctttttgatttgaactcattttttagcttgtacggaaagagtcaacaatgatatttttcctcgagaaacgtggtgagagttgagaataagtacatatatcaggggttcaggaggtcctgaccctctcagatgcttgtactttattattttaatcctttcagattcccaaaggtcatgccacccttttggatgcctttactcctcccggagcaatgcatgattaaaatttagggttaacccttaatttccaccaaatggggtcacacaggacatgtggctctgtgccgagaggccacgtatatcagtaaaaatcagtggcaatgtttgccccccaaagttccaacttgcattcttgtaagttgagacttgctacaagactcctcttcgtttccctccaggagggtttttatcatgacatcatagctagatgggatacaattgtttgcacgagtacattacgtgttacttgatgaatggctcatatgtcagcatgcttttttgcctcgattctggtgaagtcgatttgcattttgaagtagaatcctgagacattccataaatgcagagtgacattcagatactcaagtactccaaacatctcttcattaatgtgtttctttgcatttgtccttggatcaaattgtgttacttgcaatttgaaaggggtctttggatgagaaagggcctggattgaggtcttgagtcttataaatagcacttgtctcttctctttcacactttcacattttaaaaatttctttagagttggaatacttttcaagcaaacctgattttcttctacttttctttgacgttgccaagcacgtttttactaccaccgcttcattgttcctgcacaactattcagacctcaattttgtaattaattaattttcttttcttaaactatattgtttggcacaatgcttccaataattggagcaaactttctttttgggggaaatttttattaaactttcagaagagttttaggaatctccttgatggtctcctctttcttagattttttcaatctacttgaaaaaggtggaggaatgacataagttggtacaattggtt

SEQ ID NO: 80275 - DNA, 1410 bp, Cannabis sativa
aaagatgtactaaaattaagtagcaagttttttgtagtagttaggtgattttgttgcttggagtttatgaatttggtttttgaaattgtgtgggattttcttgtttcaatattgtttcggtggagattaaatttgtatcgctaacaatcctcaaatcacacctgaaattaattataattaaaaacataatattacaaattcatggaaaataataaaaggagcaaagagtagtgttttatataaacataatatatatgtagacgtacccaagagcgtgagcagctttaatggtaggaacaactctaggatgtaaacataatataattgtgactaattataaattattattgtgtttgtgactaaaaggtctgtggctgaaagtatttgtccaaaggtgaaccgtttttccattccaaaccaggtcgttttgggcgcgccaaacagctcaacaaattgttgccattgtacataactgatccgaggtagcttgctgaaacacgcgacggcaccagtcaagaaaacaagacccaggagtgacagccgtgcctattccaactcgattccaacactgcttgataacacggcaagttaccaaataattcaaaacactctcctcttcttccatacagatgggacaaagcacattaacatcgacccgctttgttctgagctgtatcattataggtagacattgagtggacgcccgccacagcagattgctgattttagaagggagtttcatcttccacagcttgcaccagaaggcagcaatctcatcatcaaacctgttatttttttgtttctgcagaaaactatacgctgatttgacagaatatacacaccagagttttcaaaggaccaaaacaattggtctgttgctgcagcagaggacaaaggatactgaaaattaaggtttggtcccttgcctcaaaaagatcagcaatgatctcatgatcccaaccagagccatccatataaagaaggcttgccacggtaacatccacaagtgcagggtgagttgaagtaacccaaggattggattcatttggaagccacggttccttcaaaactgaaattgaacgcccattaccaacgcaccaacggatccctgcatgaaccaggtcttgagattccacaatactccgccaaatgaaacttgggttagacccaagttgagcattgagaaaagaaccgtccgcataataccttgctttaaaaattcttgagaccaaagaagagggtctagtaagcagcccccagccctgttttccaagaagagcgagattaaagtcacgcaaatttcgaaatcccatgcctcctccccttttattcttgcaaagtttgtcccatgacatccagtgaatgcccttgccgtcactcttcgtagaccgccaccaaaacttggtcatg

SEQ ID NO: 80276 - DNA, 1042 bp, Cannabis sativa
tttttgcttcagttatgaaccgacgctaattgattttttgcttcagttatgaaccgaagcaaaaaaaaagtttttgctgcggttcataaccgtagcaaaaaaccattgcactgacgctacgatataagttgatgagatctgaccccacagtggaattcaacttctccaaaactcttgaaatcttcactaatatcatcctgttgagaagtcgatgaaacccagtagaaaagtcgatgaacatatcgtgggtggagggtggtggaggtagtggatgtttggtaactagttgaacagtcacgatgggcattaagcaagaagaagaataagaagaaaaaaaaagaaagaaaaaatatatttttttatatttttaaataatatttatgatgtggatcaataaacttttaacacatggtaaatttaaaaataacaaacgattaattgggtacttacggacctacaaaaattgtaatcttgaagactattactgttaatttttaaagttaaaggcttatctgtatcaatgataagtttttagggagttacaccgcaattatcctttatatctatacatatatattgcaaaaaaaaaaatgttgttgatcattctcaacaccactttacattacatggcatatacataaagtttttgtggtaccgctagatattatttagagaaatactaaagagtagtacttatggtgtctagtatctttatgaagtataatataactattggtgcaatttaatattagatctcacttactttactttagtaaatattataaaagatcactaactaattatatagtgacatttcatggtggtaatcacggtgctagacaccatacctcttaacaatgttcaattatttagtactacatacactaaagtggtattggcacggcaccatataatatactttataataacaattcttattaaaacaaaactattggctatatatgtacatccatatacaacttacaaggccggtgtgaaaccccccaacaatagctagctagtacgtacgtgctacctatag

SEQ ID NO: 80277 - DNA, 1406 bp, Cannabis sativa
agcaagtattgtgactaaaaatacataaaaatgatgatttataattagttacaatatttttacttttaatcacaaatttttttttgcctaaaaataagattaacttactcgataataaattcttcttcttttttaattataatattggttttaagtctattaatggtataggtcatgactcatgatacaacaaccctactatgtctaacatttaagtagatttaagcttggagttgttagcaagtcgattaatttgaccttattagttttttcataaaaaaaaaaaatgaaaaaagcaacatattctatgttgttttttagtgcaccaaataaatatatagtaattccatttcaaagaaataaattaataaataaatatagtaaaagcacatgatacataactgcataatttaaggacctaacgataaatgttatttaattgaaaaaacaaattaagggacaggatgagatgagaggaggaggcactaccacttctaagctcgaacctaggaacaaaagcaagatttatggaatacaagacccggatataaaaacaaatttttaacttgtagttaaaaagtaaaaaaaataaataaataatggacaaatagtaggttcacagatttactggctagtattggtccttgccggtcaagagtggaaaaataattataatttaaatatttgtttagaggcactgctttacacaaattttgccgaatcacttacttaaaagctggagaacttcaaattacacagatacaaaaatttataattatgtaaattataaacaaaaaaagaaaaagaaaatccccctaatgatcgggcttactgtttccggttttcccggttactggtctcgcgcactttttttctttctttttttattattaaagtcttttcatccatttgttttaccatcttttgacatcagaaaaagaccctcttcaaccggctaatatttactggatattccattgcttcctctgttttcatatagatatattttttaatttctttttttcttgtaaaatacaaaaataaaaagaaaaagctgattaccacaagtactttctctttgaattacttttctttttccctacaaatttctcatttggtgttggatgaaaaagctggatgagtactacactaaaacataagtttatttttaggggttaaagacaaaaactatatggataaaaataataataataataataatatcagtcttatactgaaataaatatctgatatttttaacacttttggagggtggtgtttttattggggatgttttttatgggattctcttctttcttttaaatacatattttttttttagggtctaaagtgaatttgaggggcagatatttgcgatgaaccgatggtacttgaataaacacatg

SEQ ID NO: 80278 - DNA, 1401 bp, Cannabis sativa
attgatatatataatcacatcaaataacagacacatgttttatagtatttcgaaaatgcattactagtacttaacacttttttcggtatcatattatcaatgatgtaattaagtatcagatcctcggacaccactagtatccaatgctctaagttttattaggatgagtaaactaaaaaaagaaaatagacaaagaagaataaagagtagcccacctggtttcgtgttagacccgtttgattagccaacatgtgcttgtctgtgtcagtagggtaccttaaaaaaacacaaaaacataacttactatatatatatatatatcatgtcatatctatatatatatatttccaaagaaaataagatatatattacatacgggtgaagaaaatggtcaaagagccaggctcttaaaacagccacagaacgttctggtaggcctctttggggcctccaaactggttgttgttgttgttgttgttcttgttggaaactcatcatcaacttatttggcccactattactattactacttgacttgttattattattattattattcatgtgcttttggaaacttatttcatgataatccatgttgatgctattattatattttagcctttgatgatgattatctttactattattgttacttgtaggtgatgatgatgatgacaatattatttcttctcccaaggctctccttgtgtgttttaattgatccgaaatcgccattttaagacaccgaaaatgttgagacatggcttctagggctaacgacacgtatggcgttgatgaactgaggccggcgaccgattcgaatgaggataccaccatgtccatttgttgacggtattgcttgtaccttttgctaaccttgaacaacaacaacatcataattatcatcacaaagagttataaaataaatattatatattattatgatgttatattgtagagcatttctattgtgtgtagcaacttataaatgagtagcgatattttataatagttattaggataaatacttaattactctgataacgatataatagttttagtatttttctatattgtatgtactagatagctagaccaatcaaaagtggctaatcatgcacattcaatattcatatcttttttctttttttggaagaaaaagatgatgaggttttagccttgttaagattttggattatattttctcgtgtttgaattgaatcaataaattaagaactctattttttggaaaaattactttttccatactatgttccctagatgaatttttagttagtattatgtttgatatatacaatagaatttactatatagagtgaaattagaaggagtatgtataacatattgtttttgttataatatcaaatcttacacattttg

SEQ ID NO: 80279 - DNA, 3363 bp, Cannabis sativa
  modified_base (798)..(799): a, c, t, g, unknown or other
cttcactccattatcagtatcaatcaaagtgctttccttaaggggcgccaaattactgataacattcttattgcaaatgaccttattcatgccattcattctagacgttcggggaagaaaggttgggcagctattaagcttgacatggaaaagacttttgatagggttgaatggcccttcctaaatcaattgctcactcatgtaggttttcctgcatcttttatctctcttataatgaatgcctgtctactgtcacttttcggctatccataaatggcacccttactaatccctttcattctacccgtggtattcgccaaggggatcctctatctccctatctctttctcttaattgctgagggcctttctgctgctattcgtttgcatgaaacaaatgcaaatttctctggaattcagatctgcaggggcgctcagcccttgtctcatctcttgtttgctgaagatagcatgcttttctcccaagtcaattctcgttctagtgatgccctcaatgccattctccatctttacaacagagctacgggccaattggttaatagagataaatcctctattcttttctcccctaacacctctgctgattctcagcttcagtttcaatagtctttgcagcttcatggggagggctttatcagcaaatacctcggtgttcctcattgtgtgggtagggtcaccaattccattttcattatctcctccaaaatgtttcttccagattaaatacttggaatgataagttcttttctcgtgctggcaaggaaactttaattaaggnngtggtccaagccattccttcttttgctatgtcctgttttaaagtgcctaaatcgatctgtctgaaaattcaaattactatagccagattttggtggggttctcagggcaccaaaaaggtccattggaaaaattgggctgacatctctgtctccaagttctttgggggtttgggttttcgtatcttgtcttctcataaccaagctcttctggcgaagcaagcttggagagtgtggaatgataaggattctcttcttcattctattcttaaagctcggtactttaaacattctgattttatgaatgctcctgttggccataattcttctttcacctggagaagtctcctttggggccgtcacttacttaagaagggtctggtttggaagattggtgctggtattaatgtccctttatcagcaccaaattggattcctagtattcatagtcccactctcttacatcctattgacccgtcccaggcttttgtttccttctttatcaaccatgattccacttggaatgtacctaaacttaaacatttctttccctcttatcaagttgaaagtattctccaaattcccctggatccaactttgtccgactctctcatttggggatttcacccttccggcattatcactgtcaaatctgcttatcatcttgcctcttcccttgcatcaatggatgctccttcttcttccagccccaacccttttcaacattggtggaaaaagctttggtctctttctgttccccccaaaattaaacatttcacttggaaagcctttcaccatattttaccttgtgccttaaatttatttcagaaaaagattcttccccatccgaactgctctttttgtggcaacaataccgagtctgtcactcatgccctcatcggttgccccagagcaaagaacatttggaagctttcaaggtttaaacaattttacatagattatcatcgaaatgatattagggaattttttcttcaggcattgcataatatacctaaacaggattttccaattttcattgcttttgtctggcatatttggaatactcgaaactcaattttatttaaaaaatctagtattcctaacaatgtggaagagtttgttattaattatctacaagaatatattgctgctcagtagagctatcaaggggataatctggattctgaggctactcccatatctcataatactcagcagctgcattctattactttacatgaggatactccatctctttatgttgatgcggcccttgatcacaagaatggcttaacaggaaccggtttcatcttcaagcttggtcatcagaatgttttagcttctcactgtcgtcctttgcccggcgctgctactcccatttttgctgaaggccaggcgcttttacagagtttattgtggtgtttggattctaacttgtctcctaagtttgtcttctcagattgcttgaatttggtttccaaggtgaacagtgcctggcaagataattctgctctttctgggcttgtttctcggattcgattactcttctccaactttcctaaagcttctttgcgttttctccctcgtcagcttaatatggacgcccatggtcttgcaaaagaagccctcaggccgagagaagataattagaggggattgctttggtccctctctttgctgcctgtgttttagttttttcttcttgcagcttctcttgttaaaaaaaaaaaaagaaagaaagaaagaatgatataagaaaatagaaagcagattctggactaacgcttgacgaaaaagaatgtcgattgccgagtatatgtaagaaaatttgttatttaaattaacaaaggtatccgtgtaaataaaatatattttacgtgatttaatataattttttctatattaaaatgagtttgtattggatatagtaattaaaaaataatatttttattattataattagagtaatttgcggcataaatatacaagtttaactctcagttgtaaataaataaccaaatttaatttttagggataataatacttaagttgtaattctataacttctatcggtacttagttattaagtgtcaagtaaattgccacgtgaaaatctctgattggtccacatcattaagtcttttttttaaaaaaaaaaatcatttaaatataccaataagaaaataacgcgtggataataacttgacatttaatggtcaaatacctacgaaaattttaagaaatataacttaattattattaccgtcaaaaattaaaattaagtatttatctgcaaccgagatttaaacttaagtatttacgtcgcaagttactattattattattagtttgttgaagtttttttttattactattcataatatcgtaccacaacgactgttatacccatattttgaccaagtaatatggttacgacacgtgtaaggaagctgaaaaataaaccaactcgacctataagaaaataatatcaccaagatctgagcccaattctccttcacttgaatgaattcttcacagtcttatacactatgattgagtaccaactt

SEQ ID NO: 80280 - DNA, 1021 bp, Cannabis sativa
caatactaaaatatttataaataacttaatttaattgttatataatttttttaaaaaaaattaatatatagtaaatatatttttataattttattagctaatttattatattcatctattttgttaattttttttttaaaaataatatttacacttagtttctaaatttagttttattttgcatctcaattttaaaagtaatttggggaagttatttttttatgggaacttttcaattttatagttttaataacaatatttatataggagggactatgatgcagacttttattctacaaattggaataaagaggtaaaaacaaaatactctttcattctttctattatatagtgtatacatcacctttattaaaaaattatcattatcatatcaagtatcatgattcatgaacctttgtgatatgtaattgacttaggaggaaatggagaataaaacgacactattgccatcaatggaagaagaagaaaactttaacgatggatttaatatggccaaagacaatctaaggttttgaattgagtcagatttgcgttgttcattctctttatgtaaatacaaatttatatatttataattatgaatatgattactatactttgtgtggaatataatccatttaaaactaaaccttatttttgtctcctaacagtttttacataactgtttttctgttacaaatctttcttatttgggaaagtcggttatgttagttaaacctatttgttgagctattaagtgttggacatttcagctactaacagtatataaggctccacattttgattcattcaatgtgggagtgagagagtaagactaaggcagagagaaacatagagagtaagaaagaaatcaagatcagaaatggctgcatatcatgctatcatgatggttgagtgggtctaagtttgagtgttggagagccatttctgtcattgattgttcttggtgtttgtgtactgcaattggtgtttgtaacttgttgattcttagtggagaaac

SEQ ID NO: 80281 - DNA, 2062 bp, Cannabis sativa
agaattagataaaagttaagagtgtaaattcaattatatatttacactatttttttaaattttattttgttttgtttaatcggttattttgtctttttattagttcacttaagaatcattttgatggagcgagatgatgcaacaattgaacaaaagaaagcattacaaagaaaacgacggagagaattatatgcacaaactaaagaatcacgaaataagcatcggagagaggtggctgcaaagaaaagaatggctgaaagtaacaaaagtattcgcaataattctagaaagattcgtacagaaaatatggtgatgagtgaatcctttcaaagtgaaataggtactttttgttccttcatccatgcatatagttaactcattatatctatactaatgtatttgttgccatttatttttagggagcgaccatatgtttcatgataaaatcggccaccagagaaatattatgagtgaaatcggtaagaatatattacatcatcatcttatagattttttttcttctaataacttaggaattttaagttactcaatttaaaatttttattatgcaggaagtacatcaaacacgtgtgtatgcagacatgatacttttgttgaaagaggtaaatagttatcactaaaaaataatgcatttcgttatttattattaattgtagtaatttctttcataaattctttatgttaggatttgttggagatttggaaaaagagagtaatacaaatttaagtaacaatgaaaataacaagaatacgcttaacaaaaaaaacaaacaaactttcctaaactatgcaattaacttacaaaatgtaccaaaagaagtttatgtattgccaatggcatcagtgtataggcattgtaatgcaaaaaaatttactagagaaagtaatggcttttgttgttctgatggtcaaattcaattaaaattaaatgatacacctaatgaattatatgaattatttacatctaaatcagatgaatcattgcaattcaaaacattcattagaacttataatagtaactttgcttttacatcatttggagtaaaatatgacaagaatttatgcaaaagaaacaaaggcatatacacatttagagtccaagggcaaatttatcattatatcaatgaagtctatctaatggatagtcgtccttcatacttacaattatacttttatgacactgagcatgaactagagaatcgactaaaactttcaaagaaattgtcagcatcaatagtgaatactttaataaaaatactagaaataaatccttattcgatattctttagaacattgagtgatatttctaattttgaaagtcacaaaatacaaattagatgtgactctagacttgatcaaagagtttacaatataccgtcagcatcccaagttgctgcaatttgggttgatgatgatccttctacaattgtcaggacttgtgatatatatgtgtactgtcattctggtgacacacatagagttcaatattattttggatgttataatctgttgcaatacccattgttatttccccatggagatactggttggcatgaaggcattcaaagagttcccaaacaaaagaattgtggaacttcatctagattcgaaaatttaattaatgttaatcgaattaattctgctacagaattaataggcagagatggtaggttataaacacttatcttctcattaaatttatttattttctcatgtggtcttctcattaaattcatttattttcttatgtggtttacttctatttttttccagtcttacagaaagggagaaaaagaaatcaagtttcttgttgtgaatattactgttataaattacaaataagatcttcacataaatcaattctattacattttggacgacttttacaacaatatgtagttgatatgtatgtaaagctcgaaacgtctagattagattactttagacttaaataaaaagaaagacgagctaaacattatcaaggtatcgttgatagtattgaagtaggtgcgagtaggggccataaagttggtcgaaaaat

SEQ ID NO: 80282 - DNA, 1315 bp, Cannabis sativa
tatctttctcttcttcttcttttttacgttttttgttgggtaattttttccttatagaatgtgtatataattatccatatataattataaatacaattgaaattgtttggtatggactataatagcgtgtgggactgtggggtgtgtggtttcctagttagctagctaggtagagttgataatttgatatgtaattaaattaaaagtagtatgtattacgtgtagggaaatgtataaataaatggtatataattgaatggagtttagtggaaatccaagtcattgaactaatcatatgtatattatcactagtttcaactatcttctattctattatatatccatttagctgcaaatatatacatagtcggtgcaaacaaaattctcaactcaacaacattattaattgttaatttgttatcatcctttcattccatccattcatccaataataataataatattcgataaaaaatatattatattaaatgatgtaggactccatacttattaattattgatataacacattatcattaggtatcatttaccatttcccttataaaaattatatatagagttcttttttgataaaagaaaaaatatagaaaaatttataaaaatactagaatttgattaatttttacaaaaatactgtcacatgaatttttttcaaaaatattatatttttataaaacaacattagaacactaaataaaacaactaaatacaacactggaacaactaaaaaataaccgtaaaacaacagtgaaaatttaacacaatacacagtataaaatttacacaatttttttttaaagaaaattatatcccacaatataaaaataaaaaaattaaaaattttagtatgtgatataattattcctaaatatatatactcttgcattgtaatttatatctcagaaattttgtatatcctcttcatagaaaaaaaaaatagactattttactttaaaaatttattattaatatataatttttatattatagaaaggtgtgaaattattatgctatatctatggttactattattaatattttttagtttttgttttcatattttttgtattaaaataatgtttgtatatactttttcttattttaatatttttgtatgtatctttagggggtgtttataaaaatcgaaaattcgaaaccaaccatcaaactgatcagatcgtaactaaatttttggttccatgtcatcattgaatttgatggtcggtttcagttacggtttttttgacatggcggtcagtttcgattttttaaataaaaaaatagattaaccaaa

SEQ ID NO: 80283 - DNA, 2450 bp, Cannabis sativa
ctaatctgttaagttaatcgtgtaacaatattaatattaatattttttgggtttaattattggtttaaacgtttaaaaaaagattgtttaattttttggtttaattatttaatatatttttcaaagttaacctactaacatcgttaaatttaacagaatagttgatttagaagtccgaaacagtagcttcgaaaaaatcatcaaaacatttatccacattaagtttaaaattgtcattccatagcaaacaagagcctcccgagagaacatttgcacttatacaacaaacctcgaagtacctcgatttctttgtcaaagcctccattttgctcttttgaaccttttgctcaatttctttgcagttataccgtagattgtatttttttacttgtcgggtcccttgcaaggccccgataattccacgaaaagattttcacgaggaaaggggggcatgataagggccgcctcctcgtccgaatgaaaattttgagcactttcaacacgaacctcaaccagattcaaagtatccccatttatttagggatttttacaaaaatactggatttatgataaaagtttataattttactcacacgaaagtttttataaaaatactctttttataaaacaacaaaacagaacaattaaaaaataaccgtggaataaccgtgataacagtacaaaatataaaacttaccgaatatttttttaaaaaatacggtacttttgaaaaaaagtctgatacggtaaaaaaaaaattaaaaatttgaatagtgtacaaatcccatttatttatgaaaaagttgcctaaaagataaggtgagttggggcttctagtttgggcctgacatataggcggtggtataagtgggcccagataagcccgttcatattccaataaatgaaatatgaattgcaacttcatcatcgttcctcactctcttttccaatcttcttcttcttcttcttcttcgtattaatcatatagaaccctaaccctagctccagctcaacaaaccggaattgctgctaatcggtatagttttttctattttgttgttaattgtacgattcgtgtttactctatatcattgtcattgtcgattttatgttttacgcgacgtactgtgtgtttcttaggattgtgtcgattggtttttgttgtaaatgatattgtcttcttcttgttaccaattacgttttaatcgatctattaagtcagattctaattttctgtcttaagaatctcctctaatcaataatatgtactggctaatctattattagattattgctggtgttttctaattaatgacagaaattgattatgctctattcgttggctggttttatgaatctgataacattattggtttaatttccttgtacattgatcgattgatttcaaaatggtgatattgatttttttttctatacatacatgtgaattggaatcatcgatagttttttttttttttttttttaactagttgatgtattcttagattggaaaagaaaatattaatttgattctcattctgatgattctgatgtgatgattacaataatacttttactcttatttccatgtatgttattgttaatttgtatatctttcttaattcttagtttgtcttacttgtttcttctgacttgatttgttaattaatttatgggcagatggcagaggtgaaagaagatgaggttttagtagaaaatactactaataatactaaatatgattttatcgaggaaatggatccttattgggatggtaaaacattcccatcagattcatccgatgatgatgattctgaagatgaagctggttggttaagtgttataaaccaactcaaactaactgatgtatgtattaaataattccaaactttatttgctatgtatacaatttactaacttgctaagtaatatttcttatgaatatttacagggttttcaggttgatcatctccctaataaccaagcaaactggagttcatttgttgtggagtctttttataagacttatgataagtatacaatcgaagcagctcatgccgccattgctgaatttaacaagctcaaggtgacttttgtttgtttgtttaataattttataatcattattgtatatatgtgttacttaaatggttttaatactatcacaaattacagggtgctaatttggagctgaaaaaaattataacttcgatatttagtttaggaccaagagagtattcttttactctggaatgtacggatgggtgttactatgaagctagggtgtttatggttgggaaagaaaaatttgatctgaccatctttaggcctgcaaaacattacccaaggcccacacccgcagagtaattatatacaatgctatttaatttattttttaacgttaactaaataatttaatgaataaacatatgttgttttactgatatata

SEQ ID NO: 80284 - DNA, 2501 bp, Cannabis sativa
gtatttttcaacttatccctttaataaaaccaataaaaattaatataagcccaaataaaaatctaacataagtatgatataggagataatctctacatatgatgttatggttttgattaatatggatgtatacgatataatttttcaataaatataattatgataattgcagggtcagttctggtatgtatactgcgaggggctatggacgagcaaacggtctaaaacgttggtagagtcttggttttgtttatagttagtaaagtaatatgagttcagtgagatgttttaaatttattttaaaaattcactcaactacttattttatttttaagtatgaatgatcattcgcttttgtatattcattgtaaaattcgctgtgtattttcaaatagttttgagtatttgcaagtaatgcgtcaaaaatagtatttttttatatatatataaaataaggcaaaacatatttcggagcgttacagttggtatcaaaaatttgtagttttgttttttttttttttggtagtccatcatgaaagaactctaaagttcagtgtgcttgactaatttgagtaatttcaagatcagtggcctcctgtgaagttttactaagaagtaggcgagcgagtgaaaacaaaagtacgtacgctggaaaagacttgtgttaatatgtaaagtcaatcatcgtactataaagcaaccaagagtgatgtgtccgtgtataataatcgttagtctgtgagaaaaggccaataaaagtttgaagcgggatgttacaattttaaataaattataaatatatacatggaaatattatagaactatttcaaataacagaggtgttcaaggaggaggccacattcatggcctaagaaaaactatatttctatatattatgcaatacctttacaattttaagctttacctttacatttcaaattggtctatactaatatatctaaggctgtgatgcagaatctgatttttgatcatcagcatcagctgtggcctgaacttgagctgcatactgtagattccaaagcacatcttcaaaagatggcctagatgacacttcatgagatatgcattttcttgtgattgataccacaattgataatgattcttgtgaagaagtggtcagcacaattggatccactatcctttttctaccatcttgactaccaaaggatgcctgtgtggttcatcacaacactaacaaatgtcaaacataatcatcatcactatgtacaatataaaatagaggaagaaattattataatattattttaaaataaggcccaattatttttttttttaaattaacactatttatatagactttaggaaagtatcatttttttatatatatactttgactttaatttggacctcttcgttagttggttcatagttttccaatctttgtcatctgaatataacattccactttaagacaagaaatgtctccatattatagcctcgaaaatgaagttcattaaaaaaatgaaagattttttttaagagcttaccatttcatttagtagaaaagtctccccttttccactcactattggtccaacaagtgattcaagtaatataaatccaaagttgtagacatcatcctcaacagttttcttatggctgcaaaagaaatatgtagcaacaacattagcattctataattattattgtgggactataactcaaaattaactaaaaaaaaatgtatcactagatgagaattagcttatcaaacagtatatcaacacagtaacaaatacctaagaagaaaaattatggtaaattgttgtactggatataggataacattgttccacatgaattaaatataaaaataatgagtcatatataagaatatgagctacttagttttgaaatagaatctcataattctcaacataatattagagtcaataattagtcagccgaacaagaacaagagctactctactcattattaattaattttgagattgaaccccatcattctcattagtggaacacatctttttggcctaagatttcaaactgtaaaatgcttgactctaattactcaagtgatcacaagacattcctaatccataattctctactttgtattaccttgattttgtgcgttctcccttggcctacaaatgaatataagatgtgttaagtacatcattagaacaaaaaaccattaagtactactaacatcaataacttcatgttgtcaagaaagaagcacacctcaactttttcaattgcttctctgatgatggaaatcccataatcactcaactttgcaattcgatgctcgtcgagcaatatattgttcgttttcaatcgattgttgaagcaaccaggaataaccccagtgtgaagaaaatgcacagccttggctattccaatcaaaatagctagtctttcagaccatttaagaactttttctggacaagtttctgcacaaaattactagataagttaataaaagtgttata

SEQ ID NO: 80285 - DNA, 7989 bp, Cannabis sativa
aaattataaaaataaaattaaaataagtattaaaattaacataaaataatatgaaatttttttaaaaaaaaaatattacgagtgatttttaaaaattatattaaaattaattttttaaaatattaatatgcacttatcatttttaagtgcaaatataattttcttaataaaaaatgagtataacattgtaagaactattctaataagtaaaataataatgattagaatagacaagcattacaaaagattcaaagacaaaacaaacaataaaatgaaacttttgattccattacagccttcattccctcaaagcaaacatgcagttaatgaaaattcatggaggagaaggtccaaaatgttgaaagtactcccacatggtttgatgttgggcattcatagtgtttaaattggtattaagagaagcgagttgtccatctatagtgttgaaacgttgatccataagtgtgaaaaggcgattaaaagccttctcaatattgaaggaggaagaggaatgagcacgaagaggcgtatcctcttcctctccaagcatatgatcatcacccccgccaacctccattgctcggtcaacatcgcgaggaggagccataggatcgtttttcgatatccacactccattttgaacatgaaaacccatccggtttaaagaaacatggttatatgtgtcatttagagttggcttatacacatcattttcactttctaaatgaacattaaaatattggaagattttggttaagagcatgccatatggtaaagtaatcacttgttttttgtaagttttgatagcatgtttcatgtgattaatgataagagctcccaaattgataaaacaacctttgaaaatgttatcaagaaggtaaaggtcaaattgggtaagtgtacacctattgccacctctaggaactatattaaaagtaagaaaatggtgaatgacctttgcttgaatggtgagatctttactttggggttttaagtgaaaactttggttaatgcaaattctagaacaagcattagaaagtgaaaaatcctctaaatctagttcacaaggatcaaagacaattcctttattgggtacacctagaatgtggttcaaagtagcaacatcaaaagatatggtcttgtttttcaaagtacactctaaccctagtttatcttccattggaacaattgaagcatagaaggctcttactaatctagggtacataggaagattcaaagagataaaggaattccaccctaacttagagaaaatatcttcaaaatgaatgctttgcatttctgtaaagtttattactttaccaaaaataatattccttgagcaaaaagtagtggaatacctttctttgattttagggtgtttgatgagtgggatatcatcattgttcttcttagctctcttctcttgatgattatgctcatcaagtctcttctctttactctttgaagaaccagtccttgttgatgtcattgagttagggtttggacttgggagagtgaagtgaagtttggaaagtaagtgagaatgtctgaaaatataaaaaagaactgtaataaatttcataagcagaggcaaaatggtaatttcataagtaagaaatgtttaattgggtattgagccattgactgtatcttggaagatttcaagttatttttttttttttttttttgaaagaactgatttgtaacaaaagaatatagaagagagtgaagttacaaaatcaggagaagaaggaattgaaactatgacaattccaaataagatctgtatccgtttccagggccttatgagctaaagcgtgagcggttgcattgtggttacgagagacgtgagagatataggcaccaggaaaagttgataaagaagcaatgattttccgaactgcatctgaagtgggagatctatctttagatcgcttgtgaatctttttcactaaatccaaacagtcggtgtaaatggaatggagtggcaagtgaactaaggaacaccactgaattgcttggagaagagcatatgcctctgccaaggttggggagagagcaccagtatgaggagaactgagagctgcaatgatctggccagtggagtcttgaatggcagcaccaaatcccatagttgagcgaggagttgaaattgctgcatccgagtataaggtgtacatgcccgcaggtggaagtggaggctgggttccagtagcaggaggaattggaatggaggcagcagaatgttgctggctatttgagtactccttcaaataatcgacaacagaatcttcaatatcatggagaggtggagactttgattgaaagagagtttgattacgcttattccaaatggaccacagcagggcaacacagagggacagctggtcctttggaagaatttcaaaaccagtgaggaggaagtccttaatgtcctgagaacggtgagcaatgaagaagtctgcaagggttgttttttcccaaattttcctagctctggaacatcctaggagagagtgagtgacagtatcttggccgtgagagcagaaagagcagtggggggagggaattattttcctggagaagaggttggaggaagtaggaagaatgtgatgataagcacgccatatgaaatgtttaatttttggggggatagggagatgccaaagggttttccaccaagttttaacaaaatcttgattagaggttgagggagcagagatagaagaagaggcagaggaagtggctagatgataagcagtgttgacagtgagatttcctgaagggtgggagctccagatcaaagagtctggctgagaaatgtcgatgggaatagtgagaatggccttgacaatgtcttgagagaaataagtattaagcttgtgaacatcccaactcccagaatcagagatgaagaaggagactgttgggttagggggggggacatgggttttgtaggtgatgtttttgaatccaggaatccagtagtgacggagggtatcagtagtttcaccattgccaatcttggaaatgagaccagaagaaagaagatctcggccccataataggctagaccaagtgtaggaagggcagtgacctttagaagcagagagaaaatcattgtgcttgaagtatttggcttttaaaagtctagcaatcaaggagtgaggattagtgaggatgcgccaagcctgtttggccaggagtgcttggttatggtggacaaaattacggaatcctaagccaccgaagaatttagaagtgcaaacagaggaccattttttccagtgtaatttattatggttgccagaagaaccccaccaaaactgggcagtaagtctgtcaagggttttgcaaattgaaatgggaatgcggaagcatgacattgcataagatggaattgcttggattacggcttttataagagtttcctttcccgcctttgaaaaaaatttgttattccagagttggagtttggcactggccttttgggtaatgtaatggaaggaggatcgcttagaacgaccgaagcattgagggactcccaaatatttggaaacaaaaggtttgttttcaagttgaagagtggtaaggaaaaaatccttatcggaaggggaggtgttgggagagaataagatggaggacttggagaggttaactgattgaccagtggccttgtggtaaagggttaaaatttccttgatggaacggcaattgttgtgggaagtggtagtaaagaggaggctgtcatcagcaaacagaaggtgggagatggaaggggctgccctacaaatagagataccattgaagttagaatgggaagcaataacacgagtggctgctgaaagaccctcagaaactaaaaggaaaaggtaaggggagagagggtctccttgtctaattcctctggtaggagaaaaagaggggagaaggtgattgttaatagaaatggtgaaagtgacagtggatagacaacgaatgattaaggagatgaaagtaggtgggaaacctaaatgagtaagaatagactgtaagaacccccactcaacacggtcaaaagctttttccatatctaactttaaggcaacccatccaacctttccagatttacgattattgatggcagaaatgatctcattagcaatgaggacattgtcaaaaataattcggtcactgagaaaggcactttgattactagaaatgagatcactgagaacaagctttagccggttagcaatagccttggaaataattttatagattgtggtgcaaaggctaataggcctgaagtctttaagggaggaagcattctttttttttgggacgagaaccagagtagtgttgttgatggaggaaggatcagattgattatttaaaacatcaaggacagcctcagtgagcgagggaccaacagtggaccagtttttctgatagaaatgggcatttagaccatcgggacctggagctttgtctccaggaagttggaacaaggcatcatgaacttcatcaggggtgaaaggatgactgataattgaatattggctaggggtgagggtgcgagtggtgccagagagaatagaatgtacagcaggaaaatcaatgccctgggaagagaaaagggaaacatagaagcttctgaaatactggcagatttgattaaaatcatggatgacagtgccattatccagagtgatatgagatatattattgtgtctacgacgggaagaggcacggtgatggaagaatttggtattcttgtcgcctgccttaagccatgaagcacgggcccgctgtttccaatagatttcctctttatagaggacacagtcaagatcgttttgaagggccttggctcgatgaacatcagtgtcagtaagggtagtagaagagtagatattattaagagaatgctgaagttgttggatggtatgtttaaaatgttgcttgtttttaccccactgcttgagttggtcaatgcagtgagattgagtggcaaggaaggaagaaagacaagtactgttttgggtgggaggagatgagtgccaattggaaagaataacatggggaaaatctggttcggagaaccaagaattttcaaagcgaaaacccgagaaatggtacatggattgactgggatcagtaagtaagattttgaggcatctatggtcagagccgaagaaagggagatgggtgagggaggctttagggaaaagggcagaccaattcgcattgatcactgcccaatcgagtctcacaagagttttgccatgcttgtaagtgaatctgtttcctttgaagggcataggggagagagaatacttggagagaaaagtgttgaagtgaaccatagcattagaaggaggcattgtactagtggacttatcaacaagggcaagataatcattaaaatcacctaatattagccaaggggaggaaggagcaacatcatataaacgattaagtaaagtataacaatctaatttaccagaggaataaggggagccataataacaagaaagatgaaaattaatattatcagtcatttgtacaaaacagtctatatgactacaagagtaggataaaacagtaagattaacaacatcattccaaaaaagaaaaagacccccaccaaggcccctcctagggacttcaaacccaaagtcaaaagaaagttgagtcttgaaacgatcaatagaccccgctttaagcttagtttccatcacaaaaagaagcagaggttgatgttgcttcaccaagagggagaggtttcggaatgctcgggtactccctaaaccgcgagcattccaactcaaaagactcatttttccgggcggggttgcagagcaacacccgcctgatcatcagaggtatccagggaagggaccacagcaacatctacatcctcagaggcagctctggctcgcttcagcatttccctaacagagttgccaaactgaacattctgcctttggaacgaacgtttagcaccagacagagtgaggggaggaggggaaaggatgattcgaggacattcagagaccatgaccgatttacccttgtctatggtagtgataacagaggtagtcaaaagaggggtgggagatagaggacaagagaggctaggaatcccagccataaagttggtggtggccatgacagaggagtgaggtggggagggagtggatcgactaccatcagatagaacatccagagacagagacgtgttgaccatactggggatgaggaattgattaatggcatcttgcaggctttggttggaaacagagtggcgtgaggatgattcttcgaaggggacagagttggagagatcaaagatactttttttataagtggttttggtaggagctcttaagatatccttataaggcagggaagggggaacaggggaaacatcacagtatttcagaagtttttcacatctattgaaggtgtgatcaagcattccacaataatagcagtaattttgaagcccctcatacataaatttcagccatttaaccgaaggcaatgatcgaaatttgatgttcataccacggcgaaggggttttgtgacatcaacaaggacgcggatacgcataaaaggagatatggtatcgtacagagaggctgcatgaacctcaatgagatcgccaagttgaagagagagaaatttagcaagatcatgggagcgcttgccaaaggggattaggtggatttgaacccagagtgggacatagctaacttgagagggaacaacagtatcaaaagcatcagggatagccaagaggataaggttacggtcaaagtgccatggctggccttccatgactcgtcgacggtcaccttcgcagccgaaccgaatgaggaacatacccgaatgataatcagaaaaagagaaagggcagcgaaccatccaagcttccttcatagctttggcaacccagtcagactttatgagcttgggggagaggactttggcaaccaaacagtaggattgtggggtggaatcgtggtggacggagatgttgtcaaactcatgaacaagagtttcttcatcagtaaagtcagagggatgttgttgggattgaggggtaaggtccattactcgtggttggtaggtaaagacagcaatataaaagaggaaagaatgcagggaataaaagggttgtgcagaaataatcaggagaaaaaaccttaaatagacaaaaaaagcaaagtacctggagaagaaaggcttcatgcggaggctaggaaggcctggaagagggagcctaaacatagctcagcaccaggaaggggaattaaactactgacagagcccgaggaagagagaacgacggtaattaaaaggatgatgggatttcagggttaataacagccagagaaaggagcctgcagagagaagaaacttgataaaagaggattagcagccaaaattaaatgcaaatccaaaagatcctctttgtcgctctgaaaaataataaatggtggaaaggatggttaggagaggatgagagggcagaagcaattaatgcaggagaaaaggaaggagggaaagaaatagaaaaggtgagggaattagattagaagtttaaaccagattgcaaactggagattgaaacccgactagaagggataaacccctaggataattccagagccgctggagctaaaatttttagtaatgatatgttgaatagatttcaagttatgatagttggtcaattgtctaaaatttcgttcacaaatttgggtccaaaattattttatttatttattatttagctttaaaattaagagtaaaagtttgttgttttttctcaaaaataagtaaataaacatgcttgtacaatgatgccaagttaggttggttggctaattaacttcacttaagtgtcttgatatatatatatactagtttttgaacgtgcgttgcacgtgtaatatatagaggaagattgtatgtaaaaaaaaaaaatcatatgttat

SEQ ID NO: 80286 - DNA, 1000 bp, Cannabis sativa
tttttttataaaagaacaaataatttttttttttttaaattaagagtccaaatataagtaaaaatacaaaaacacacatgactaaaatactattatattttttttttcctcttactacatataagccataaaaatatccaaaaagattaagtgggcccataaatgaaagtgacatgggtttttgggcccagtagtttttgcatgctgggctggctctgaagaagcatgccaagtttggctaagacaaacataaagttaagacttagtatcaaaaatctcaaacagataaataatagagggaaggctttagggaaaaactttaaaagcatgtgaagttgatctctaaagaaacactaataatctttttttttttcaaagaaagaaaaaaaaaagtgttttatgttgatagtaaccactcattgtatagcctttgaaaaaatgccactgtagatgaacatgccaatcaactagagcttgacaagtgtttaagctagtagaatagaacgaaaaaggacgaacagtaacacaagttagataccgactcttaaaagaaaaatctcgaaagttaacaagtgtttaagctattagaataaaatgcactacaagaaatattacttttgtggaaatacgttggcaaaacttgtcggcaaaagatcagactcaagcctcaattaattcagtctagggttttgccaatgcatatatgctctggtaaaagttacctttatcgacgagattcatgaattgcgttgacaaaaggttaaaatagaaccatcgtttggcgtgaacaaatttcaacgattcattaccttttaccaatgcaattatacgtcagtaattgttgggtaaatccccgcgtatgaaaaggttttagcggcacaaatatgcactgacaaaagtttcaaaaaagattagtgagaatttttctaggtgtgtttttgtttttgtgggaaagagttttattaacttatatatgcagtaacacaagtcagataccgac

SEQ ID NO: 80287 - DNA, 2869 bp, Cannabis sativa
  modified_base (49)..(61): a, c, t, g, unknown or other
  modified_base (2842)..(2842): a, c, t, g, unknown or other
attgttttagaattcatattagggagttaatgaaacatacttgttagtnnnnnnnnnnnnnggtaaaataatttccaacaaacccgccgtggactgcccaagctgcacaggagtgtgaagataggtttgtagaaatgcaagccagaattaatgagcaagataaagaaatcagacgcttgagatagcagggtgctcctacgatccctgctccaaaaatgtaggtagctcctacccctgctgtgcagggaggaccagttgttgcagtgaaccgtatggaaccactgtatgaaaggtttcacaagcaggcaccttcagcctttttgggaggacctgatgtaatgaaagtcgagtagtggctaatggttattactagaattttgaatttcatgggcgtcacctgtaatgacagagtggcctctgccacattccagtttcaagaagatgctctagtttggtgggacatggtgtccttgacttgtgatgttactgctatgacctaggaaaagtttcgggagttgttcaacgtaaagtactacaatgaagcaattagaattacaaaaaggaaggaatttactcatctgacccaaaaagaaaatatgagtgttactgaatacacaactcactttgatcgattggcaagattagcctccggaatagtgctaactgaattcagtaagaaagagaaatacctagacggattgaattcaaagataagacatgatcttatgatcatcactgatgataacaccacctatgatgatatggtgggaaaggcactacgagctgagggcgcagtggagtgcactcgggagtctcgagggacttaggtcgttggtggggctcctattcctcctaccgttggtaatagtaggggtggtaatggctcgaccactgatcatgaaagaagggcaccaactgcatcaggtggctcaagttagaacaagaggttctaagggaactagggtggaggcaaccgtgagggtgcatccgaaacctgatacacttacccgaaatgccccaattataaaatagcgtcatttgggtgagtgtagagactatgcacagcttaaaaatgaagaacagaagattgctacaaaacccgctccagcaagggtgtttgctctaactcaggcagatgcagaggctagcccctcagttgtaacagatcagctctctgacaaaaactcttatttctctgtgttgtttgactccgaggccactcactcttatgtggcatccagaatttttagtaggttggatagaccacatgatagttatgataaagggtttagaaccctattgactggcagagaattagtcatctccaaaaggtggataaggtctatgcctattagaattgaggatcgggagttgagtgctgacttaatagaagtgggtttagcaaattttgatattatacttggaatgaatttcttatccaagtacttaggcagtattgattgtaaacggaaaatggtaatcttccaaccacagggtgaggagccgtttgtttttgtgggatcatttcagggatcccggatccaagtgacttcagtattaacagctagagaattgttataagatggatttttagggtttctgatcgttgtattggataccacatggcctaagacaattcggccagaagacatcagggtggtttgggaattttagatgttattcctgatgaacttccaggtttaccattgcggagagaaattgagtttattattgatttggcacctagagcagaatcggtttctaaggcaccatataggatggctccaccagaacataaggaattgaaattcaactttaggggttgcttgacctagggttttcacgacctagtgtgtcaccctggggagctcccatattatttttcaagaagaaagatcgatctttgcgtatgtgcattgaataccaggaattgaataaactgactgtcaagaacaagtatcctttacctaggatcgatgatcagcttaggggaagacaattttctcaaagattgatctccaatcgggctattatcagttgagaatccgaaaggaggacattccaaagatggcttttcgcactaggtatgggcattatgaattttgggttatgacttttggactaaccaatgctcctacaacatttatggatctgatgaatagggcattcaaggatttctttgatatctgcgttattgtacttatcgacaacatccttgtgtactctcaatcagaagaggagcatgagtaacatcttcggatggttctatagcggctacgagaacataaactgtatgaaaaattcaagaagtgcgagttttggctatctcagctatcctttcttggacacattttcagtaaaaatcgaatcaaggttgatccaggaaagattgaatctgttagggattggccaagaccgaagatagttacagaagtaagaattttcttgggtcagctggttattaatgtcagtttgtagaagggttctctaagatttgtacgtcctcaaccaagctactaaaaagaataagcggtttgtgtggacagacaagtgtgaaacaagcattcaagagctgaaacaaagattgattgccgctccagtattagccctagcgtcagataaagaaaagttcatagttaactgtgatgcatccaggcagggtctggggtgtgtactaatccaggtcaatcgggttatcgcctatgcctcccatcagctgaaagaacatgaacagcgatacttgactcatgattttgaacttgtcgcggtggtgtttactttgaagatttggcagcattatctctacggagagaaatgtgaaatttatactgaccataagagnctcaaatatttctttactcagaaatat

SEQ ID NO: 80288 - DNA, 1205 bp, Cannabis sativa
tgatttgatttgaataacatactttctatcaaaaaaaaaaaaaaaaaagaaaaaagagacgggcattacacctactaaactcattagtaacataaaatgttatattataaaatgtttaaagtgagaggtttttacatcaaaatttctaattttttttttattgtgggattgaattttttaaaaaaaaatactgtgtaagtttcatactgtgtcctgtgttaagtttttactgttattttacgattattttttttttttatttattttactgttatttttaattgttttgttttgttattttacgttgttttaggttattttatagaaaaaaagtatttttgtaaaaaattccgtatgtaaaattgtaaatttttgttcaaaaactaatatttttataaaaacccctaaaataattggtgttgatcattgcttgtctcgctcaaaatgaaagaactcaaacataattcattatgagacgtgtcttttcaataattcaatgaaatatgatcttattttattatatgtttatatataagaataattgaatgagatatttttataaaattaatagaggtgtgtcaagtgcacacaaaaaatatctaatattggggcatggatcctaatattttttttctcctatattttttatgatggtagtcatagcacaatttttgtaatttaaaaagaaattgaaaaaatttcagtaccaaaataagtataaacagttattttttaacaagtatgaaaaaataaaaaatagatatacatttaataatttgaaggtaaatcatttaaggtttcttaaaactttacatgtgaaaacgcttataaaaaattaagagggtttttacgtaaaatattaaaataaattaatttgttacatttttactgcaacctagttatttttgcatttataccgcttaaagctacttttttatgtgcaatttctcaaattataatctcacttaaaactataaaaatacaatatagtttaggaggtttatattattattattattaaacattataataaaaaaattaaaatttatttaataaaatttcaacaatataaaaaaaatgtattgaacttttaacgtcactaatcaaatcattgtactaaattatttctaaaaaattatataattatgggtaaatactattttggaccttctgttttacaaaagttaccaattggaccctgtgtt

SEQ ID NO: 80289 - DNA, 1757 bp, Cannabis sativa
tttaccttctctttactcttgggccagtgaattggaacctcatatccatcatgtggaagaggtacaagacacattaccggtgtttttgggcaactcctctctgtatgtcgatagctttggagcttccaagagcttgtttcatagtcaatgcatgggatgtaattgtgtttgctctttgtactgcataatttccaattataatgcatttttggatcaaacaaaggacccttgagctttttcttcttcattcctcttttcttagattcatcatcgtcactttccaacgtttcttcattttcctgatccacagtctcaaccagaccaccttcaccttccgtgtcttccttcacttcaccctctctatccaaagtttcttccttaccatctactaccaatccttcttcttccccatcctccttttccttctctgactcttcttcctcttcttctttttcttcagattccgccggtttcgcttctccttctgtagtctttaccggtaacatttttttctctttctcctttttcttaataggcactaccctggaattccgcttctcatgcttatgctcgtggaaagacttagagacagacccattaacttttttctcatctttatccaaactagagtcagatttccccttcttttcatgtttcttcacttctttgttactagatttagtaccaaaattgcgtacactcgagcttcctgatacaggttcggctatgtcatcgaagctttctcttcgagcggccactgaagaggaaaatgaagaagaagaaaacatagtccatacgaatacgaagcagagacccaatacggctactgccgtcatctttgcgcagaacccatatggtcgtttcgcttgccggcctaaccgagcaatagccatctctaaactctaacccttaataagcactccgcagaataaaaaactaaactaaatctgaatcggaaagtgagagatccatgcctggtgtctgctgaaagaagattgttgttattgaggtggtggagtggaaagcccatcaatcaatcaatcaatcaatgtgatctccaactccaattatccagataaacatgaggcttcaactgcatttgttctagtatcgcattcaccaacctgattcaacttctttatccaaattacaaggtttttattatacaggtaggagaagtttccttttcagtagcagagcagaagtagtaaaaggtggagaaagaaaagagacaagtacaattgggatctaagagtaaattttgtagagaaagtgaaaatgaaaatgggcagaagaagtgaaagcgtgggaatttacagattgtattgtacgatactatcacctgggtcggagaaggagtagaggaataaaggaatagcacgtggtggtggtggtggtggcgagtgatttaattaaataatacttttgtgagttttgtctacggagttcagacaaaatttacgcccaacaatttctcccctcgttgtccttggcgctttttaagtatcatgcgtgtgtgtaattaattttttttttttttaataaattttaatcacttaatcttatcaaaattgtttataattaattaatgggtaaataatatttggctaattagtaattttttcccccgaactttgacataaactaaatcatgctccttcaactattttggctgttaaaaattcccctgaactattgagattgttagatttaaggacttttgtgtaattttagtaaaaaaattctaacatggataa

SEQ ID NO: 80290 - DNA, 1245 bp, Cannabis sativa
atattggttagacataatatgggatacagtatttggacagagaatcttgattcatcaaccacaccaccaacaaatttagtgggcagttcgagtgaccccactaataaatttcaaccaattaggaaaaagaaaaaatagttaggcaatgttgcccaaattggacaacaatgcccattttattgcttcccaccccacatttactccaactacttcttgccaatgccaatgtagctctaacatgttattgtgtttgggcaattatattttatagcaatactcttttaataaatatcttaacacatgatgagtttatttaccttgcattctggcttgttgagcatgtaagttccaccataaactgcacttaatcgagcaaatgcctgccaatgaaaatcacaagttatcaactaattttatctttttctcatcaacaaaatatatatatatacacacaaaaatattaaagggtagaaacaaattaacctgaggcaactctcccaatccatacactggatatatatagggtgaccctccttgaaatcgtgctagagagtctgcatagagctatacagaagaaagaataatacagttatttattataagaacaattatatctcaaactttttgtcaacctctattttaaaaacatatgctgaagtatttttcttttctaattttttttttttcatgatgatgtttgttatagtcacagcaacatttctgtaaatttttaaagaattctgaatatatagtttccggtgctaaaaaaatttaaatgcttctctgttgtaagtaccaataccataactagaatttttagaaagtttttttttaacaaaaaaagttaattaagatttttgcccctaaactttgacatgtactaaattatgccttttaaacttttctagcagttaaaaattctccctaatttattgagattgttggatttaagaacttttgtctaatttcatttaattttactaattcagtgattgtccatgaactaaatcatgctccgtgaactttgatatctaccaaattatgtccctcaaattttaatatgtgcaaaatcatgcctcctgaactttcatccatgttagacttttcttattaaaattagacaaaagtccttaaatccatcaatctcaatagtttatggaaaatttttaacagtcttcaaatttcatgggcataattttgtatatgtaaaagttcgggggtaaaatcctaattaaccttttaaaa

SEQ ID NO: 80291 - DNA, 3581 bp, Cannabis sativa
actctacattgccagaagccaggcttatttggagctttgaacgttgctaagtttggtggagcaacaacatcaaactgtccaccacccaattcgcgcttgctaaattccgcaagtctcgccattatattcttccacacctgattgacatcccaaggaactcctttaaaaatgtatgcatttctcgtattccagatggctttgcacatgcacgctataaacataatcaactcttcatccgcaaccattgtccaccacattccaaagtccgataaattctgccaattaagattatccaccgttattccccagcgattcataaaccataaaagcacgagtaaaaggacactggcaaaaaagatggaaggccgtttcagtgtcctcattatagaaaacacaattcccatcctgtatggcaccaagtcgagctttggtagggaggatatcagatacaattttccaggagaagaacttaagtcgatgatgcattttaaatttccataagcgaacccacataacgtttggaggagagaaacgttgttgattgattatccaataggcacttttgacagaaaattcacccgattttgcagcattccaaaacacaatatcccggccttcctgaatcggtttaattctgattatatcccttgctacctcattcacaaaacactttttaatcaattcttcattccatcttcgggtgccttcgataaacaggtcattgactttccaaagggcctggttgtttacaaactgaaatttgtccttaatctccgaaggctgtctgtcagggatccacggtctgtcccaaatctcacactccccatcagctatcagaattccagccccttggaggaagatttcccttgccgcaagcaaacttttccagctacgcgaatcctcacctttcttatccactgtccaagccaaagtagtacgacaatacttatccaagaacatctttacccgaaatttctccttcccctgcagaaccagccagaaaagcttggcgaggagagccacgttcatgtccgcaaatcgcctgaatcccagcccaccgcagagtttcggttggcaaatgtctccccaactcttcaaagcacaataatgttttttgtcaatgtttccaatccaccaaaatttagcaatcactctgtctagctccatgcaaagagtctttagaatttgaacagtggacataaagtagttaggtatgctctgaagtactaaatttaccaaaacagttctgcccgcttgagataagtggcgagctttccaaccctccaatcttcccagcattttctccttgagaaagaaataatccttccttttcctagcagtgtaaaagaaagggtttcccaaatacttttcgttattgctcaggaaattcattcccaacagagctttaatctcattgcggctacaggaaggtgtgttaggagagaaaatgatcccacttttcgctttgttaacctgttggtcagaccaactttcatatttctggatacaactcaaaatattgctagcgtctttccttgaagcatgacagaaaaaaaattgcatcatcagcataaaatagatgagatatggggggtctgcattcctagccactctaatgcctgcaatatttccaacccgttcctctttgagaattagtttagagagtacctcactacagagaataaagaggaaaggcgaaagaggattgccttgacggagaccccttttaggattgaagggagccaacggagcaccattaagaagaatagagtatgagaccgtagacacacattgcatcaataacttacacacttgagggttgaaaccattcacttgcaagacacggagtagaaatccccactcaaggcgatcgtaggccttgctcatatccgttttaatggctagagtccccatctttccttttttgtttctcatgaaatggagaacctcctgtgctacacaggaacatttagcaatccaacgcccgggaatgaaagctgattggaacggagacactagcctgtctactacccttttaagtctattggtgagaattcaggaaataatcttatacccaaagttgcacaaacttattggccgaaatttgtcgaaatgaactgcatgacttcctttagggatcaaacatataaatgagtggtttagctggctatagaaagtctcagtcaagaaaaaattccttaccatatcgcagacttgtttgcccacagtatcccagtattttcgataaaagatgccaagaaagccatccggcccaggagctttcaacggatgcatctggaaaaccacatcttttatctcttcttccgaatgaatcctgcatatggcttcattttcttcctgcgtaaccttgtcttggaataaagactcgaagtcctctccaatatcattttcggaagactcatacagagccttgaattttgtttggaagtagcctcctatttcttctctttgtctcaaccacactctttgatcatcttcgatgctgccaatgaaattacgtcgtcttcggataatagttgatttgtggaagaatttggtattgtcgtctccatttagtaaccaattttcccgagatttttatttccatattctatccatttttgcctccatgtcaataatgtcaagctgaatttccgcctctcttttaacattgtactgagaaattggtgccgattgaatcgcctgtaaatgagcagcaagttcgtttaatcgtttatcacaaaatccaaagacttcacgattccattttttgagatcatgagccgttccttttagtttcttctgaagctgtgcaaccacttcccctgtaacagctcttctccacgaattctggatgatcacttcacagtcaggtctggaagtccacacctcaaggaaacggaacagatatcttaatctagtttgatcaccccaaatattaataagaattggggcatggtcagatcctgtaatgggaaacttggatactcgagcgttagagaattcagtacaccatcgagcatcagcaatagccctgtccaagctctttcgaactcgggattccgcaattctcgaattctaccaggtacacattcctccatcacagctgagatcaactcctcccacttcaaataaaaaattactaagcaactctccttcctttctctgaaaagttctgccttcctctttctccgaatcgtcaaggataacatttaaatcccccaacagaacccagggcaaattgcaattagataccgtctcagataaccacttccaataagaaccttttagagaatagtatggggtcccataaacacaaaaaatactccaatcggggaagttctctcccatgtgaatagatagatgaagtccttcagcaaattcttccaacatatgacattgtattccccttttccatgccacacgaaaccctccagcaataccgatcgatggaatacaaacacaatgatcatatcccagccgattcatcacattgaccattcgcaactcatccaccttagtctcagccaaaaagagtaaatctgcatcactattacgaaccaaaccccgaagggttcgct

SEQ ID NO: 80292 - DNA, 3685 bp, Cannabis sativa
  modified_base (991)..(993): a, c, t, g, unknown or other
  modified_base (1068)..(1075): a, c, t, g, unknown or other
aattctaattaacttaaaaattaattaaatcttaaatgattagagtgaccgcaattttgattgcaaatgtgaagaaaggaagtattgttatttgttaaccacgattaaatcattaataacaattcacattgttaatgcataaaatttctaacaataaatttcatcaaattttcctctctacttattactttaactcaattcttgccattgtcggtatttgtaaagccaatatgactaattataattttataaggttggtttaataaaaacacattatatgcatgagtacaaataaatcttaatctttatattaaagaattatgtgtgataatatttatataaattttctatattttatcaaatatttgatattaattatttttttttattttattttgtaggtgtcctactagtgagatgacaatcacaactctcatttaagattttcttttttaatattaaggtttattatctagttctttgggtacgatatctctacattcctttatgatagataataaacttttaatggaagaaaaaattctctactttttacgtaacgtcgttatctttattattttaacttttttgatttttctttaaaaaaatttattgatggaattttaaaaactattttgtactatgccaagactaaatatttacacatacattttcttttataaggaatattttttttttatagatattgttgatctattttcgtaatttaaatatatgatagaaagagagattttccctattttagagggacatttatcgattttgaatgagaatctttgtaaaccctacattatataaatgaccttaggcaaagtagaaaggacctaaatttaaagtcccataagtactattgatcctctctctcacgcctcttcactcactcattcactagacatttatgtggcgtttggttggaggtaacgaaatataatggaatggaaaaaaaaaataattttcattccattccttnnnttggttgcatttaaaactattggaatacaattccgatggaatgacttttatatcattttggtagaatgactattnnnnnnnnaaatggaaggaaagaccattccaacgcaaaaattgaaaaaatttaataaatttttttactaattttttatgcattttaaattttattccattccattcctatttcaatttccattcccatttctattcctattttcttcacaaagtctcataaatttcataagttttgaatctgtaaacactcagttattgaagaagaagagaaccatactagaaattacaagattcaagcttgtaatctgtatggtattatctcgagaatcaatacaattaaaagaagagtaggtcattacccgctaaacaaggaggccaaacctctataaatctcagtgtcacctttagtatttgtgattattatttacacgtggtgattatcaataataaataaagctcctctgttagttgactgaattctgagtcagcaggtatggtcgtccgagaactcgcgtctttaaacctatcattgatactattcctaagatcgcctccacaagttctttctttctcacctttggctttatctctctttgcatttaagcattcccggaggtccgctattgacatactatcttctgggtgaatcttctttaccctttcactttagttaacataatcacttggatgttttttctatccccgaactgtatgcctttatacctaagcaccaagcttatcgttttgcacaactttgcctcgcagatcaatagagcggcgttaccctagagcattggcggttttttttttcatacagtttagttggctacattcttattgttccttcgagcattaggaatagtcttgttcgcgggttcctccatgataccttttcctttttcctttactggaatagaaggtccaacatctataggattagccttttttgtggtattattttcttctggagtaggctcgtcaggagtattttccttaggaacttcattttcatactcgatcctggcctatagccatgctatggtttctcacattttttgagagaactcttcctgctccaccaatttctgtttggtctcagcaaattctcgagccattcgaatcactttgcgatcttacttgtaaatactcctaatcgttcttgttataaccattatcctcaagatcatcctcctgttcctcccgatcctcctcgtcaatgggatcttcatcgatgtatttttcacgttgctgattcatcttggcagggctgatgctcacttctgaggtctctccgtccctagtaacactcatatttgcatgtgtaatgggaagaggattaactcatccatgatggtatccccatcacgagcggcatgtttggtgatagtggttctattggctactattgttgtagtatacaatattggtatcgaatttttcttagctctcaatgaaagtaccaaaatatttattaagttttttggatccaatttaaaatagaataaaagctaaagaaaataaataaaatataaaaatcaagacgaggatttttctatagttcgagtgttaacgaactctagtctacgagtcaatattatttggctagaaaagcctttgagtattacacaagttttcttgtctgataaatgaaccctaggtttggccttagcttgtaaaaattgaattattgaccctttgcatgaatggattttattatatttataggttgggatttgcatgtaaatatgacccactcatgtggtaaatacaagtaatatattgacattgagtccattcgttgaggcctagcccgtaagtcaataattacctgtgcatgtggaaactactttacagtgttaggtggaaaacgtgtgccaccttcacgtgtaataaagataatttgatagttgttggacaattaccatattttcttttatggttcccatgatttttgaatttgactttggggacgaagtcgtaatatagtgagattcattattaaatgagcatcatatcagtcttgacattcaaagatctatttagttatccttttggaagcatcgctaaataggtatctagatgctctctttgttgggcccttctctcgcctggatgagatgttcttccaaaacctagatgacccaacttaatgagtttaattcattatcctgactgggcctttgctgattgaatttggatcttggaagtacacttgtcctgctttcggaaacatggataacaaaaactattaaaaaatgttaaaataaaattatatattactttatttgtaaagtgtaacttaaaaatttgagtatttatgagtaaatatttaaattctattaaatttagtaattttttttatataattgttatcttaaattttgcactctgacgtggcatcacccaacggtgacacgtggaatcaatttcacatatttgctcgcaagggatatgccaagcagagcaccatatatattcgagcggacgaagccttcctaaccgagcagtgagcagtccgaacaacactccaacacttagtattttcaactctcacatcgtgaatcacggaagcaatctctataattttgagatcatatcacagagatatggcaagctgtccaaatcccttgatcaatgtattctgtatttaatatgtaatcttgccaattatatctat

SEQ ID NO: 80293 - DNA, 1564 bp, Cannabis sativa
tttttgcaattttatatctaacgacaaattaaaatatcatacacaactgactggtaaaaaactaataatccaaagtcattaattctacagtaatataatataatctaaggacagtttaaatgtctaactcaactgaattttccaacaataattcatatttcaaacctttttttcttagtttaaaaaactcagactaactgcaaatctgaaaattgagaatttcatctaaaaatagaatattaattaatttactgatacaagtttaagggtcttagtcaacatttggtgataaatcaattaaggaatattataatatttaaataggaaaatgggtcccaatgtccagtcagagtacaactaagctaaatacaaattgtttgatttttgatgttcatacaaatttgaagtagcagctggtattgagtctcactcattttttgaggtcccacatccaatgcttagagacaaagaagaatactttgattaagaagctcaaattcaataattttgtttgcaatttcagcctccaaatttacaaacaaatatttgcatgttctatgttgttattgttgtcaaaaaatgctcaataagtactactgatactatattacaaaataaattggaaaattgaaaatacttatattatgtacaacaggaaaagagattatatatattttttattattattatcttggaaccaacttagcaatcttttgttaacttaatgctattatcacttaagctccaaaactgcaaattattcagataaaggatactaaaaaactaagacaacaacacaattaatatgagaagtagccgtactaaacaatactgaaattgtatcgcccaaatccaccgaagcactacctcaaacaataatagttaaattaagaaattgaaaatgatgtattccatatgctgaaagagagaaaaagatcattaaattataaagttattactctttcttttaaattactttattaaatttttttttttattttatctcacactttgatataacaccattagtaattctatttctttttacataatttaagaatacttccatcaacttcactactatgtcttttaaaatatctcattattttttctattatacttcaaatttttacataacactattaagatattatcaattactttattttttctttacataatttaaatgttatatattttatgtatttattaatatagatgatagatgatatgaaagaaagagaaaaaaataataataaaaaatatttaacaaagaaataaatcttaactaaatatgaagatgcatttttatgagctaaaatagagaaatattataatttatctattggaagttctcaactataatttaattttgtacctattatactttgtaaacactacatttttattaacctatctttccaatattgatattgattttaagagtttagaagagttattttaaaagctttgattgattgtgttaaaaatagttgctgcaaaaaataaaaagaataaatttatcgaattaactgtatcggagctttattacatgatagagaat

SEQ ID NO: 80294 - DNA, 1186 bp, Cannabis sativa
tgtataaaaatgtttaatttaatgggggccggcccggcccaaagtatttttgtaattttttttccttttttgtatttttctgtctttttcccgataataaactatgaataacaatatacttaataaagattatacatcatatggagagaaagctttatatttctatttctgaatgttttatgacacaaaatttcaaccctcatacaaatggaaggagagagtatttattgagactctattggccctagtatacaagttgtcctaaggggataggatagtactctgacgggcgtcaagtgaaagagctgagctgcatgtggtactaaggtagtcgtggtttggtgagagatggttctagttaacatataaaaattgtgtctccactacttgtacccttggtacctctttgtaacgccactaccttgcttcaaactttgttgaaataatagttacacctataatttttccttactacatttcctttgtacccccaaccatagattgtcctcaacatatgctcctggctagagttacattctcttgatatattttctaagtgttggaccctctgggggagaagggtgtctcatgccatgttcctaggaaaaggacctctcaaggagagtcctctcataacaccgaggttcattggatggtaataacaaaatgtagtcatgtctagaccagtaagtaaatgaaatgaggtagtaagttatagaaggtttcactagtagtacactcccacaagagcatgtaaaaacgaggaatgaggaattttttttttttatcaatcaatcatgtacttcattactccaaaaacacatttacaacctattggcatcttcaaaagaagacccggatttagtctatacaatacaatgtaattacaacttccttttgtattatatattacaattcacggctgcaactctaaccagaaaaaaaatcagttggcttcagctgctatagagcaacagacagcagtagctgcttctaaaccagtcgacatcagcagaaagagaagaaaacagctgctatagaagagcaaaccagttggcatcaactggtttgtgtttctttgtccaattacacaacactctattctttacatcttcctttatagcacggacaacaacatcttgtgctattctccttgaattccatatcaaatcattgcgatttttcc

SEQ ID NO: 80295 - DNA, 1933 bp, Cannabis sativa
tatatgtacatatccatttttatggtcctataataaggattttatatgagtgtctaatggacatgacaattgacaacatgtcctatacgttattgcaaatatttgtagcatattttagggggaaaaactcaaagaacataccaattctattaggatgaggtaatactataccatatctatctttcttttgccaaacaaatatatcaccaagaataacacatgctaaaaattagtattgagttaattagttataaatttttagaagtggcatacatatggtaagtaatttttagtattttagttatggtaatttattgatccttttatttacttagttatgtttgagtttattgttgtaatataatagtgttttttgctttttggaacaagttggtaatagtagtgttttatcaccttattttgttttactttgttggattttttattgaaaaatattaaaatgtatcagtggtatgtagcaccacttataatattataatttttatatcgatgttagagtaattaagtactggattctacaaaatttaatttaataattaatataaaatatcgttaattatttacaatgtgtcatatctaattagtgctaaacatcactagtgtttataacagtgtttttttttctttaaaacacttaattgcaaaatcgttagtgttttccttttctgagaatgatcttgtttttcagatttatcttctttgtgagaatgatccatattaatagttgaattgaaagggtttttttttcttctctaagaaaaaaaaacatctcataggaaaggatttgagtggtttctttaaggtagtaatgggctttgttataattgttgttcctctccaatgatttgagtttgtgtatgaaaaaagtgaaaaagttaaaaaatacactaaaacttttccactcccataggtgatggacaagagaacataagcattaccatgcatattagtcaactttgataaaattaaatcataaaaataaaacaacactattgttatcaggtatcagtgatgttatcataagatgacatcttataaatagttaacaatttttcataataaaatttaaattaaataatggaaaattcaatatttaattacaccaataacgttataacatgaaatctatattacttagtttttttttggctgatgatgtccccataaagataatcaaatctcatatagtggactatgtaggcttgggggtggtggtggtgtctattttattggattctatatgaaaatctgaagtgggttgtgtctttaagaaaaaaagtctacaatggctgctaaaagaatcgactaaaataaggaaactaacacaattggcttaaattaaattaaataaaattaaaatcatattgagaaaaaacaactccaactccatcatatgtaagtacccagtgagaagcacagcttttagaataaaagaagaaaaagcataaaaaaagacaaagggattgctttttataaaatgctgagtaatatgcaattcaaataaataataattttttttaataataattaaagaagtgttataatggtccagactccagagactgccatgaaatgaaatcatggaaaatattaattaaataaatgaaaaaaaaaaatgttgtgttggtgtagtagctaaactgctagagtgagagaggtccacatattatccactgttactactactaccagataccaaccttcttcaataaataagattaaaacattcattgcattgcgacaagtaatacaattgtttcttttggaaaatttgattttctatacttaaaaattaaaaatgtttaaaatttttttttaaaccaatacattttacactacaaaaaatatgatacttttttcaaaactccaaaaatacccccctctatctactttgtctctctctcggaccgaa

SEQ ID NO: 80296 - DNA, 3499 bp, Cannabis sativa
tctttaagtgtgaatttcttgtccaaaaactgtttgaaatgagtgatggaaagttcactgttgctagccacaatgatgtcatcgacatatattaggacagtaagtattaatgttggtgttctttgatgaacaaagaattgtttgagagggattagtggaaactttcaattttgagtgtggtgcttaatttttcgtaccactatcttgaatcttgtttaaggccatatatactcttgttgagcttacaaatagtgttgggtggggccttgtatcctggagggattttcatatagacctcttcatggagatcgccatgtaaaaaggcaatgttgatgtcaatttgatgaacatcccaattgtacattgcagctagtgcaagaaaaattttgagtgtattaaatttagccacaggtgcataggtctgatcgtagtatataccttgttgttggttgaatcatttagctacacggggagctgtgaatctaacaacttcaccttgttggttatacttgattttgtaaacccatttacatccattaatggctttatggccaggaggtaatttggtgacagcccaagttttatttttttctagagcttcagtttcactgtccatggcatgaagccagtgtttgaattgtgaagcttctgaatatgaacgaggttcaatttgagattaggctgcaagaacgacagctctaaattgaggactgagtttggtataggaaaggaactattcaatggggtaagtcgtggatgttgtgtggaagacatagtcctttatatatttaggtttattgatatgtctgccagtttttgattggagaagtaggtctaaatctgaattttcagaatttgcaggtgatttctgctggaaatcagtatgtaagattgggttttggtcttcagcaatagtggctggtgtgggagagacaccagaagtgactgctggtgtatcatgtgcattaggatttgttgtgcattttgtattatcaacgagacttgttgttgtatggagatgagtatgaataatatcttttggtgattgattgtcgccaagaatggttgttggtgtgtgaaagacaccaggttcatttgtaggagtttgtttaatatcagtaatagttgctggtgtttgaaggacaccagatgtagtagctggtatgtgattgataccaggtgtgagcatgggtgtgttgactcgattgagttgctctataatagggatgatgagtgggtgaaagaattgatttatatcagtagtggaagtatgaccatttagagggaatatgttctcatggaagatgacatcccgagagtgatatatttgtttagtttcaatgttaagcaaggtgtatgctttcattccttgaggatagccaatgaatactgaggcacagcttcttggtgaaaatttgtgcctactggaagtgagagtagatgcataggctaagtacccaaaacttcgaagatggtcatagatgggtggtttattgtgaagtattttataggaagttctgccttgaaaaagagcagagggagttctatatatgagatatgtggcagtgtatataagatatggccagtatggaagtggtaaatgtgattggaagcccaatgctctagtaatatttaaaatatgttggtgttttcttttcataatagagttttgttgtggtcgttcaacacatgaatggtagtggataatgcctttggatgcatagaaggattgcatattaagttccttggcattatcagactgaattgctttaatatttttagagtgttgtgtgcaaaccatgctatagaacatagggataacaaattgtactttagatttggttttaagcataaaagtccaagtaaatcgagacttattatcaacaattgtaagaaaatatttgtacttttcaatgcttattatgttgaaggggccccaaatgtccatatgaattaaatcaaatgtatgttcaacaaaattgctgtttgaaatgaatggcaatcgtttttgttttgcaagatggcaaatatgacaatgctgatttttagaaaaagaatctgaagaaaaaattttattgaacatattagaaatgtacatagagggatggccaaggcgcttatgccaacggtctccattatttgtagaaagtaaatgacaactagaactagctatgggaagagaatcttggataagaacatatagttgtcgaagtcttttagccgtgccaatcaccaaactcggagaaagagcctgtaaaacacatgaatcatggtgaaaataaaccatgttagcagtgttgttaaggaaagtagggatagaaaataagttgatattaaatgttggtacaaaaagtactttgtgtagaatgagatgttgattaatttttactgttccaatgccttaaacagggatattagtgccattagggagaagcacatgtgagggtaaggcatgattggaaaaataagaaaaacaagatttggtggaacacatatgttgtgtagctccactgtcaattatccaagagaaattttggaaaagaaatgagttaccagccatgtttaatgctgcaggagcatggttagtgtcatctcgaggttgtgcttgactgaattgctggctgagaagtgagatcagttgttgacattgggtggaaagatcaacaggagaattggtggcagcagcttctggtttgttgctggcagtagcacaattggtagaggttttgcctttgtccgattttttttgtcaccataacccggtggaaatccatgaaggaaataacacttatcaacatagtgtcctggttttccacaattagtacatgatggccttggtttcttggatcgagtggggttgttggatgatgagagtcgaacagaggaggcaagtgagggcaaatcagatgaaccaagagtcctttgcctctcttcttgtacaatcatgaaaaatacgcgagagagattggggataggtttattgagaaggatttgagcccgtatagatgcatatgactcattgagaccagttaaaaattataggacttgattttgattatagtaatcaagaaacactttcattgcaccacaagaataggtggtgttgggttgaaattcttttagctcatcccaaattggtttgagctttgtgaagtaagtggtgacggattgattaccttgctgcaaacgtgtgagttgtgtttgcaactgaaagattcgaggtccattgccctcattgaacctttcttgaagatcataccacatatccatagcaagatcgaaattcatgatactctgtgcaatttcagaggagacagagttgatgagccaagacataatcatgttattacaacgattccaagaattaagaaaggggttaccagtcgcaggtcgagggagagaaccatcaatgaaggcagatttgtactttgctgttaaggccattgtgatgcctctttttccaagactggtaattagctattgggttttgtgccctaaa

SEQ ID NO: 80297 - DNA, 2627 bp, Cannabis sativa
tatatttgttataacatctccatttttactagtttacatgatgttgtaattgctaattttgattttctcccaaatagtactaagataaaagttcacaaataaggaaacattaaattttcaaataatctttgtctacaaaatgtactctatgttcctaaattttatctcaatcttttcaatgttccaagcttccttgccattcttacaaatagcatatttttcactcacaattgatgcattcttcagggttcacagaacaagaagattgggacagctaagaggattggtcatctttacttcttgctgctttcatccaattcttctagctcttatgatataaatttaaattgtaataaatcatgtaacactgcctttttttggcattctagacttggacatccatccatgtcaacaactaacatcaataaaaagttttattttaatacttctactaatatcaccccttgttctatatgtcatttggctaaacaaaaaagcttacctttcaatttccaacaaaatattgctcaactatgttttaatttagttcatcttgacatttggggcctttcatattagtagcattgaagatttttgatatttccttacaattattgatgatcacagtcggtttacttgggtttatatgctaaaattaaaatctgatgtacatacagtattcctcaactttatatcatggttcacaccagatactttgtcaatatcaaggcagtaaggtgtgataattccaaagaacttaatattacttctttttatactgaaaaaagtatcaaaatctacaattaatgtattgaaagacctcaataaaattcagtaacacattttaaatatggcccgagccttggcttttcaatcatctatggcctttgtttattggccatacttagtaaacgcagcagtatacctcatagatagaactccaatccctttacttcaacataaaactcttttttgatttgttgcataacaaaacccctatttatgaccatgtaagaacctttggctacctagcttatgcctcttccttattaagcaaaaggcacaaattttcaattagagctcatgcttgtatttctattggctatcccaacagcatgaaaacttataccctccttaacatttctaccaacactattttctattctagagacgtcatcttctatgaaaacatatttcctctcaaaggttctttatcaatacaatatatggagaatttatttcctttttcaccagatcacattgcagatattccatctgctttagatcctactgcaccagaccacattgcagatattccacctctttcaaatcttgttgcactagatcatgttccagatattccatctaattcaactcctactccaatagataatacgatgactcctacatctacaataccaccaacaccgccatcacctttaccagatgatatcaacaccacggttcccatacctgttgcaatataatcacttgtccagcttccaatcaccaaagcatggacacaagttttgcaaaccacctcacctcaaagactatgtatgccattcatctgttgctcactcccttactgaatttctcaactatgataggtttacaacttcatttcgaaatgctattttacatgcatacactgaattagagcctaaatcttacaaacaggctactcaattaattgaatggctgaatgccatggataaagaatttttttctcttaaagagaataaaacttggactgttctgtccttgcctcctagaaaatcaaatgcaattccaaagatgaagttgaaagatacaaagcatgcacccttagtagtaaaatggtatatgtaataacatggaattgactatggtgaaactttcgcacctattgcaaagtttaataccctaaaattgttccttgctctaactgccattaacaattggtcacttcacaaaatagacattgatgatgccttcttacatggataacccgatgaataagtttatgtctcttcctaagggataggtgcatgagggggagcttcctccaaacccagtgtgaaaattacataaaagtctctatggcctcaaacaggcatctagacaatggtttacaaaattgagcacgaccttaatcgagcatggcttttctcaatctgcctatgatcactcattgtttaatagagcctctccaacaaatttctttgtactattagtctatgtcgatgacatagttattacaagcaataataatctagatgttgctgcttttaaaacctttctcaattccaagtttcaactaaaagatcttggccctctacattttttccttggtcttgagattggcagatcaaaagcaggtatctctgtgtcccaacatccattcactttacaactcttcactggaactggtcttttaggttttaaggttgttactacacctatggaagaaaatctttacctcagcaaggatattggaccccctatttctgatccaatttcttacagaagcctaattggtaaacttccttttctgaccataacaagaccagatatatcctatgtatttaatagacttagtcaattcctaaattaccctagacaaccacatatgaaggctccttatc

SEQ ID NO: 80298 - DNA, 1118 bp, Cannabis sativa
gaatccttaggccactagcctagctttgtacctggttatggttccatatggattgagtttaactttgtaaacccatttacaggctatgacttttcttctttcaggtagcttaaccaaaatgtaggtcttgtttctggccaatgcaagtatttcatccgtcacagtagaattctaatgctcattgagtaaggcatcaacaagagactcaggttaacaagaggtcatgaacaactttggcttagaaattaatacaagacttccctttggtctgcatggagtgagaattcactaccctggtattgacggcaaaagtagtagttggagacaaatcaggagtggcttatgagcttgtagtgcttagagtaccttgaaacctcaaagaagagcatggatgattaactacaacatcaactgtaggaggttgtgcaattgtaacatttgtaaggccaaattcttgtgcaacaactacatcaacaagaatttagaagtttgagtaggagcaccactgctatataaataatgagaattgtcaacagaagcatattggtcaagcatgtttggaagagaatgagtgtgttcaaaacctaaaccaacagatgaggaagaagaagcttcattatctggtataggagcaacatcattggacataggcatatgagagaaatgaccattactggtaagaataataccaggaggtaggcaatcataggaataggtaataggggtttgatcatattgagaagttttggcaaatggaaaaaacttttcattaaatgcgacatctctgatatgtaaagcatgtcattagaatccatacacttgtatcctttgtaaggatatacccaagaaaagtgcaagtggttcatctgaaatccaacttatatttattgtaaggtcttatgttgagaaaacaagcacacttaaaggttctaagggcttggtaatcaggtgtttgattaaacaaaatttccaagggtgacttgcttttaagaacatgagttagaaacctattgaaagatagactactgttctaaaggcttcatccaagtactttaatggcatagatgcttgagcaagtaaggttaatccattatccacaatatggctatattttcttt

SEQ ID NO: 80299 - DNA, 1259 bp, Cannabis sativa
  modified_base (932)..(932): a, c, t, g, unknown or other
  modified_base (1033)..(1047): a, c, t, g, unknown or other
aaatctagtaagaaggagggttattacttatgcaacatgctcggtctatcatgtggcttgggagtcaataggacatgccatatttggatgtaagtatgctcgttccgtttggcgtagttttagattggaatcattctaaactatcttgttcatctttttactttttacaccaatgttgaaatggaactcaccatatgtactcttttgtgtatttggactgagttgaactatgtaatacatggaggaaatgctaagtcagctagacagcttgctgactttgctgcaatttatttacaacattctaaattttctgaactcaagttcaatctgctgctattgcaactccgaatattactccaccgtcaacatctcaattgtcgtggcagccaccaaatttgggagactataaattgaatgtagatgatgctttagatgctaacaagaatataattggtattggtgttattattcaagatgctcgtggctttgtagtggctgctctttcaaagtcgaccactgacatctttgaatcgaatgagatggaggctaaggccatgtttcacagtttaatttaggttctccagttgcagttgccaattgcacaaataaagacggatgtgttggtggtttcgaatatttgaatgtaccttcttttaaaatttcatcttttcatgatttaattgtagatatctctagtcttttattctttttctctagagttactattactgatcatgtcaaacgtagtgccaatatatatggctactcaaggcttagctccgtatactctagagttggataaaaattgcgcctcttggttagagattattcctccgcctatatactctattattataaatgacactacaaaattttttacttttagttttagtcacaacaaaatttgtgactaaaagtaaaaaaattgcgantaattataaaatatcattcttatgttgtgactaaaagatctgtggctaaaagtattagttacaaaaattataatttgttgtaactaaatgtatttttagtnnnnnnnnnnnnnnngactaaaactaaattaatgacaatctgtaacaaaatattatgttttaatcacaagtaatattttgttgtgactaaaaagttgtcactaaaaataactgtttttttgtagtgtgactcacactttcaatttatgatagcataatattatccctaaacaaaaaaaaaatacatattaaccccatatagcatcaattttttttttaagtaagaat

SEQ ID NO: 80300 - DNA, 1830 bp, Cannabis sativa
ttaaatataaataaaaagtcacacccatgaatttctcataaaccaagaatttagttatatagggacactttatatagaatagatatatataattgatgttatatattaattaccttataactattttttttggttaattaattatatatatatttatatagttagggatttgtaattatttgcagcagaagagagatgtttggaaatgttaaaacaagacatggacatagaaactcaaaataatgtttacttatacatataactatgcaaacacactcgtgctatcttggaaatataaaataatttaattaattaattaaaaagactatatatataaatattaatattaggtagcatgggatctctggtcaacaaacagactctttttgctaaatgttccattttatatgtaatctaatataacattctctatacttgttaattagtataaatatatccacattctactagggtcaataaaagctactgtgttcaatattttcactatatattgtattcttttgttttaaaaaattaatatatgttattagttaaataaaggaaaccctagtgtatatacatacatatatgtatatatatatatggtgtttcccccaagtactatagtgcaccatgttctccatttactgaaattgtgctaaaatgttgggatattacttcttctaagaaaactttgctccttcattgatcattccaaattccaaagattaattcttcttctctctctagctttgagctaataataataataataataataattagaattattttatatactatttttctaactttttttttcttttcaaatttacagtttgaatttttaaagtggttgtatgcactagttgtaatagagatttctgtacgattttctgttgcaatttaagtggcagcactagttgcaatacgaattttctatgtagaattccatagaaatacaaaaataactgttctgaagtgtaaaaataaaaaaactcctaataataataataataataataatgtatatacagataaatattggtaaaggttttctgtaatagtatcgattgctagctttagaaaaaggagaatttaaaataaaaaagttgtggctttaatctatgagagcatactttataattatgtgacattataattaaaaaagatatatatatatatatttacatatggatatcgatgggtttattatagagcctgaatttatggtgctcgatctaatctttcatatcatcaccaccaaaattataacattatttcagagataaataataaagacaaaatgtccccttttgcattgtcggaacccattaattacatacataaattatttatatatatttgcatgtgtaaattaaattaattgttgtaattagcccatctcataacctaatacccaaattatatgatacataataattattatatatgtatatagtgatggaatctcgtccccacatcacaaatacattgactctctgtgtctctttctctatctcactccaagtgggtcactcacacatctttattaagtttttctttaatttctttttttttttattatttaataattattttttctatttattaatttggctgaatctcagagcgttgggtaagttaatttttcaggaagatgtacactttactaattagcttttttattaaatagtatttgtgtggaagtactttcttatttgatcattaaaacactacaagaaatgtcacttttaccagcacagttcgctgctacttttaccagcgcatttcacaaactgcgctggcaaagagatcaaagttttacca

SEQ ID NO: 80301 - DNA, 1287 bp, Cannabis sativa
aattttctttaaaaaattaagtgacaccttacccgccaacccaacctggcttggatcgatcggacggcggcgtgcgtatgtggtggtccaatgtgtaagtcatcacccatacgcaccaaacttggtaccccttagggcccaatcccatatctcaaacttgcactagttatacacttcaaatgaagtgtttctatcccatgtgggactcctactcacatactttacttttctatttttacataattttataaaaagttccaaaattaataaaaattcaataatttctaatattagaactccatttgaaaataacttccacactatgtattatggtgtaatattattgtgtatagttgagcctttctacctaaatggggtggaaactcattaataaagatcaattcttatattgccaagtgctagctgtcaaatactttaagtgtactctttttcttcaatacaattattttggaagaatgtggttaaggtaaaagatgttagaaaaaatgcttactatgtggtagctaataggaaaaatattaatatttggaaagatttatgggtggcccatggtaatatcttttgcccaactccaaatagatttcctactctaggcactatgaccatggatttattattagaaaatggagagtgggatttttataaactgaataggttgtatcataacacagtaggagtcattttggaaggaggaaagtcatcaaagcaagggagggatcacttcgtttggacaaagaaacctgttgaataaattccacttataaccaatccagtatacttacaaatatccacatcagcaaaatacaaaaacagaaacaagtaaatggactcaatcctagggtggcttcgcctctagtggatcaagacttagtagttagttacaactaaaattgtaactaactcctaagcctttgatcaaccgactctacaacaatataaatacatgaatcaaagagaagaaacctagatctaacacacagaaaccagatcaaaaaattacagagagagagagaagagaaaaccgtagtttgaagacttcagctccaagatccaacctcgagaatggagacctcatggtgaggaggcagaagggatgagtacatgcacaacaacaaacaaacagagttagatcgagaagaaaatcagaaggaaaaacaaataaaaacttgtacaaacaaagaatcgagtttacctgatcagatcttgtgacaggaagctccaaatgactgtattttgcctttgatcatagtggatatcaagctaatc

SEQ ID NO: 80302 - DNA, 557 bp, Cannabis sativa
ccacccacaccgcgaacactcctagattaaatgtacaaaaatttggttctaatcatgtaaagaatgatcactttagttcttatacctattaagaaagagtacaaagatgagctaattatcaaactataatcataataatgtgagaagtagatctcaagttgtcatatataacatcactaatatgtccaaatggggaatgtaaatcttgattatttaaaaaatagaaaaataataaagtcatagtaatcaatggtccccattcatctcattggatggatggattatactagatccctcataacatacaataaaaataatacattgaaagtcataatatatgctaccttccaagtaatctaaggataaggcacattggaccaccaaccaaacaccccataaaatatatgttatgtctttgaagagaatttatttgatataattaaatattaaattctacatcatttaatttaataactattatgaaatatattaactgtttataaatcaccacctctaaataataccagacatcgctgatatctaatagcaatactaaa

SEQ ID NO: 80303 - DNA, 1066 bp, Cannabis sativa
tatttttaatcacttatagtatttatatatgaattatgaaagtattttgattgaccaagagaaaagaaacataaaagtttctttaaaattacaagaaaaaaaatgtgtatttaaacttttagtatacaattaaataacttttaaatatgaaatcgtatattaatttataataacacataaaatttggtttgtaattaaattttatttaattaataatttaattactttttgattatagaatataaaagaaattaaaacattgcttttgattttgattattttttttaaaaaaatatatatattttctacagatcaaaatgactattttaaaaaataagatccaataacactacttatgaaaaataaatgagtaatttttcattaaaatcttatcaaagctataaaagaagcttatattctagttactcttaaatataaattaccacaataatttttaatagcttattaaactagttggcatattaaattttatttacattaaagtttaattattattttttaaaaataaatataaaagaaattaaaatattactagggcgaaaaaaatttatacctcccacatatcaaaatatccatcttcaaaaaatatgtaactttggtgtactttttaaatccaaacaatcattaaaatgattggaaaaacttttttaaatttagtaggaaaagatagagagagagagagatatacattataataatagtttatcttatgtgaaaaaaaataaaaaataaaaaagaaaagacgaagaatcaaagaaaggaagtaaattaatgagaaaaagtacaaaatttttacctgtgaacaaaatccgtaattgtaccgaatattgaaccattctttttataattgatgatattaaaatgccaacggctacatattttgaatttgaacatttcgtcacttatccacgtcatcattttgcctctccaattcttgaattaaaatccccacccgatccccattaatggttcggcccaactccccatcatgcctagaatgacacatacctccacgtggtgcccctccacatcaccatcctcctgg

SEQ ID NO: 80304 - DNA, 801 bp, Cannabis sativa
ctctttaacctattctaataatagagaaagaacaatattatagaaaccaaaacctaatataacactctagattcttacacaagaaaccctcttcttacaaagatgaaaatgtaaaacaataagattagaaaagattaaatatttggttactttctaagttttatttatagatcttaaaaactctaaaaatagtcacaaacaagtttacaagtataagatactttcctaaaataaacttcaatacagcaatagaatcgcaatctgcagtgacaaatcagataagatcttccaatctttccaataaaggcaaaatcaagattttgtcattaattcctgtcataaaaagatcacaaaatctgctttcaaaaccaattataccatataaagaccatttattcaatatttcataaaaagaattttttctcttttatgaaaatatttcctaaaatatacaaatcagccataaaaataatattttacaataaaaccaatatttaatttacactaaatattcaaaataaattgacatttcacatctatacaatgataagtttataaaactcatgatattccatgctgtgcaggcacaatcttcttccaaaaccaatggtttctccaaactgaagccatatcatgaatagacacacctttagtctcaggcagaaacatcgaaacaaagatggtcataacaaggatccaaccagcatagaaaagaaagagtccaaattttaacacacaaagcaaaggaaggaaagaatctgcaacaaatgaggtgaaaatgaagttcacagctactgcaat

SEQ ID NO: 80305 - DNA, 2278 bp, Cannabis sativa
tcatttttattattcttgctacaactatgctccttatattttagttagcacttaattattttaataatattttataatttaaatttattaaataaggatattggcggctaaaccacttgaactttacggtttgtaacagttaaccacctatagaagccttattggcaaactaatttacctcaccatcactcgaccggacatctcttatgccgtcaatcaccttagccaatttctcacttgtcctcgggtgcctcatcttcaggccacacatcgtgtcctacaatatctaaaacgcactcctggccaatgcctttttttcccatcaaactcatctcccaacatctcagcttatgctgaaacaagcctgtccccctccaacgttcagctatctttctttgctgatgcatattggggggcatgccaggacactcgacgttcaatttttggctactgtgtcttcttaggccctgatcttgtctcctggaaatcaaaaaaatagcaagtcctctctcgctcttcagctgaagccgagtaccgagccatggcaaatgccacctctgaagtcactttggatcattgctcttctcaaggattttggcatcctcctcaacaacctgcgtctctatactgtgacaacactgttgccatctacatcagtgaaaatcctgtctatcataagcgcaccaaacatgttgaaacagattgccactttatccgagaaaaaattcagcaaggcatcctcaaactcctctatgttcaatctcaacaaaacctagcagacatcttcaccaaagctctgttaccctcgtctttcaacaatatagtttccaagataagtgtattcaacatctacacatcaccttgaggggactatcaagactaggtgttagttattctcttaggattgtttttcttggcgggttttataagagtttcagttaagttagttattcctcaactaaattagcttgactatataaatctttgttcaaaaataataaaacaaaaagctttgctttctctgaaactttctctcttttttcctcttataatattatacttaatgagtcgatactgtactctctctctctttttgatatgtgtgaagagatataaggactataaatgttacctatatactcaagaaaggaaaataattattagatgctcttctaatcaaattaaatcaatatacttgcagtgatttgtgaaaaagctgtaacaagtcatttcaagttgatttataattatatataaaatcaccacataaaaactagttagaaaacgtacaaatttacactattcaaaagggtggttctgagggcatctctaatggaaacccaaatttagagttaaatcagtaccaaaaaattactattttaacactatttttttttaattccaaccacaacactaaaaattacactaaattttatattctttattattttattattttattaatataataagagtattttaatactaaatatatataattatttattttttcttctttaaagtattatttaattattaaaaacttttttttaaaaaaaatagtgtggtctacagtgtcccaccaaatttagtgggacactgtagacaatgccatttataaggataagtttagtgtcccattggagtaaatatggtgtgaaactacactatatttggtgttttagtgtcccattggagatgacctgatacaatttttcttttacttgttttgttatttaataggtttctaattttagttttgtttttttataagatgcatcttgttaatatttaagattttgagaaaatttgaaatgatttacaatgttaatatctatttagaaatttttaaaaatttatatttggtctaaaataagcaaaacatacgtgtgtgattataaaaaaaaaataactttcaaaaatatagaaattaattttaggaggtattataaaattacgtacctaatatcttattgaaaaagtcttagtctaacctcttaaataggtgtttcagtaaacctttatatccagtttgacatatttaggagaattttttaaattaattttcgtttttatgattgagtatgtcttaaaggaggatttggcaaagtttacaatggtaggcgttttaggggtcactaaggggataaaaaaaaagggtaaatggcggcaaaactatcaatacttttattttagtttcattaaaccccaaaacccaaatttttgccggtaaacccccaaaaccaggaaactattagcaatttaacacttccgtcca

SEQ ID NO: 80306 - DNA, 1327 bp, Cannabis sativa
aaaagaaaagaatgactagcagcccacgcagcaagagcatgagcaggaaagttaagagtcttgaattccacaccacccgagcatcaatcaaagaatctagtcgatccattagaagattaaaccaaaacttatattgccagcatggggcccttttagcagaaataccatcaaccaacactttacaatcttaaaggagagccgaactttgccagccacgcaagagacagagagaagctgcatgaagaagaaccaaggtcacttcttgaaggggagaggagatatcaaacctgactatcaaagcttccaacacaattctgccattgttcatctcaatgatagctcccgtagcccacaaacctctacaagcaacatccataaaaatacaaacattgcctaatgggaagacatacatcacgtcctcagctctaggagcaatagaagatctttttattttaggggtcacgacctgggatatcaggtttgcacagttttgaactaaagctttgataccagctaccgttggataaacaccctcataataagctttattccttgccatccacaaatcatagcatagacaacctacaaaaatactaaattacaccttgagatcaagggggatgccgagatgaagattgagatttaagatctagttcaataagtcaaaataattatcaaaaaataaattctcagatcttaaaccccacaaaataaaaaacctagctcctttggccacaggacatttaaaaaagagatgctggaaggaatcctcaccaacatgacagatggatcaagtcatactattgccaaaaacttgttggagacgactatcaaaaggaagaatgtctctaccaagcttccacgagaaaaggtagagccattcatggatcttaaacttctaaagatctttttgcagagggtcaagatggcccacccctaatgagttcatcagggtgtgtaggtggaaaccttgacaaagaaagaatcgaatcaactaagctaggtacaaatcaatggcaaagcttatccgagtcccaatcgccatttcccttaactagaaaaggggtaacaaaagatggggagacctcaataataggattatagggagctcggtaattatcccaatcaatccaaggaatccaaagggacttccaaatgtcaatagttgtaccaaggcctactaagtagcaagttttatttgtaagaatctctctagtagccatcaccccacgagccccaaaagataacagaccgtgttcatttaacgactagaaaaaagaggagttacaaaaatacttggccaaaaaagaacgacaccacaaggacc

SEQ ID NO: 80307 - DNA, 646 bp, Cannabis sativa
tgaacatttaaccacaactctgttatacggtaaaaataagattaaatttataaatatttgtaatattttgataaataatgagtaccagaagaaaggtcaacataatcacagaaactctaccccagaagcacagactacaaacaaagacaagtggatcaaataataagaggcaatcttgatcaaagactaaacaagtcgttaagaagaaatcttaacaaacgccaaggaaacaaacaagcaagacttcgagattaggcagtgacactatgcttccaagttaaaacaaaaggttaaagggttgctgcagcttgttcttccgttgctgcgttgaaattttggtcaaggattcattcatttgaatacctgatagttcaaggagttgcacttgcaaatgtttacagaaattcacttctacacaaattcgaatggttctctcattgttttttatgtgaaagacaaggaaacacgtgtaatagtgcagataattataaggtaccacaaacagcaattcaatttgggttaaacacaaccattttttaccaactcaattcaactaattaagagtattacaattaaaacataaccagtaacatgctctgtagcattttttatatgaaaaattaaattaaaaaagcaaaacttaaaa

SEQ ID NO: 80308 - DNA, 1170 bp, Cannabis sativa
aacatggctctcatcagtataaccaaaagccgacaaataataattacaaaagaacaaattccctgttattttaaaaaattcgaccgcataacgactacattttgaataaacccaaaaatataatctacacaaatatttacacataaatatttttggcactcaatgtcgcagaacactctaaaaaaatatattgattaagttttcaatttttcaaacaatttgtaaattataaaaattagaatatgtctaattctattcaatacatataagatcatgtccaataatcaagttgagtccctacctctcccaagttgttgtccaaaaaagacgatcctaagctctcaagtctcgagctccaatcgttaagtctaatcttagatatcactcccatctataccatctaatggctaaataaattatcatcgttgcatattacatccaaaactgagtccagcgatatattataagactatatttaaaagtttggagttttgaaacctcacttaaacggtacacattaactattagtggcagtagatatcggtgttccgaaaacgtcgtagaaaataggagtaacatatatcaaaactaccacctcgacgagtagatcacacccatgtcaaccatttatcgaatcggtacacgttattgtcggaaattcgccgaaaagggacagctacaaaaacgtcaccagaaaaagtaacgagctggacaaaatggcttagtgtagattgttctctttgatgaattgagtctagtggtaaagataattcgtcaaacaaacactagaggtggccgaaaaatccgttcaaagtttgaatcttcaaactttgacttgcgatctcaggctaacaggggagaaaggagcgacaccatttggaggttgaggtcgccgtcgggtggggaatctaatgttccagcacatggttagagaaaaagagagagcgagtgatgggagggagctgggcttctccttttattttatttattatttttttttttgttttgactcagtttaaccgaatctttaccgaaccagtataattttcatttataagtctcttgtagttgtcacgttgtctttgaaattgtgaaaactacttcagtgagagaagggatctgcaccacctaatcctttttatagctaaaaaaaattataagtagaatacc

SEQ ID NO: 80309 - DNA, 1916 bp, Cannabis sativa
tacaatttaagttgcagcgctagttgcaataggagattctatataaaatttcgtaaaaatgcaaaaaaaaaaaaactattttaaagtgtaaaaataaaaaactgctaaaaaaatattactaatcagtcataaaatactacctttaaatacaatttatgataatattaataatcagaaaaatttgcagcccagatgggtaattcagatctgatcatgtaactttattaatataatgcatttaaggtcaactgtgaaaatttctcctttagtactgtttttactaaattctttttggtcattttcataggcctgccccccccatcccccactcattattataccattttaaaatctataatagcttctagtattgtctcctcctcgtataatgcgaagaaaattaaccttgaacaacttcgttttctattttcgctcctgctatacctgtattgtaccttaacaatttattacacatgactatcatttgtgattaaattatagtgtctagatacaattgatataatattattatttatttaatttaatgttaagtctcacagcttattttattttaataaaaattataagaaattattaattatagtgcaatgcccttaaattgatgtgatcactaaaatttgtatagttgttaaagattattgttattggacattagtggtacttaacactttttttagtgtgtcgcttcacaattggttagcgatactctttaaaaattattatattaaactttatgggatccgatacttaattaaaacaataatgatattgacacgtataggatggtattagataccactagtactgagagatgtaaaaattgtactttatttggcacaaaaagtagttttatgctaaatttacatcaaattttaactttgttccaatgtacaattacaaaaatttgatgtaaaatttaatatctaattaatattttattaaaaaataaaaactaataattttataatcaattttattattattttaatatgtaagacaataagaaaataatataaatatttgtcatagtttaatatattaataaactaatacacatgatataaatgtaaatgaaaaattaatacatttattgtggtgtaaattttacatcatagcaaattttgtgccaaattttacccaattttttagtaccttcgtataaatacgttaatatcaatagtgttttctttttttaatatatattagacaaaattcacggtaaaagcttattgtcgtgaattagcacctatcaacaattaaataacactttgttcaaaaaataaaaaaaataaacaattaaataagtacaatctataccaataattttttagttataacataaattttttatgactaaaacatgatatttaaatacaagttgccactaatttaattttattcactataagtattgtgactaaatacacattaagtcacaacaaattataattttgtgactaatatttttagccacagatcttttagtcacaacataagaataataatttataattaatcaaaactttttcactttagtcacaagttttattgtgactaaaaataaatttttttgtagtataaaatatttccagtaattataggcagtcaattttgtgcctttttttgggaaccacggattggtcccgcgatactgtagcaatggtccttatgtatgttattaatattatattgagttagtaaccgattgttctaagttgttgccccaagtttttcccaatatacgtggcagctataatgcgggacacgtggtaggtagaggcctattacacagagatgaacaaaagacttgattaaatctcctcagaaccaacaattattattcaagggcaagctctcgaacacgagcaaatagctccacttcttctccgggaggt

SEQ ID NO: 80310 - DNA, 2460 bp, Cannabis sativa
aaccacactagaacagaagaataaattctcatgacaacatatatattaattcactatgccatattaatttggtcgaaccaagtgaagctaactatatttattgcattaaattttttgtaatattagactttattgatcatacgggttaagaaaatcaaagttcacatcctggttttcatacaaatataaactagctaagtgtaggtcctaaatatcaaggatacaatcagtattcaaaagaataaaactaagttaacaaatcgctaacaatctattctaacagaataacgtaatatcttcaacatctttcttgaatcatgatacccagcaaagaacaaaagccaagaagtataaaagtagcctgacaagtcttgaatcagaaaagaattaatgctatcttaacattagtttcctatgattacctgctgtcctgtccatccaagtacaattgacttttaatcagttgagattggaatcagttaagtgggttcttcaaaagaggcatttgtttaaattaggctaatgtcatattcaacaatagttcttaaggccaatattttgcttgtataattacaaaaacaacaaaaggaagtgtagcatgttcaaaattaaatgacactagtgtttttattttgggaaaaagattcgagtaatttcagtgctacagtacaaagtatttagcacatactttcatcaatgacatgtcaatgcaaacacctccattaggtgacaaggtatgtccttcaactgaagtgcctccaccatatggtacaataggaacctgctcatggattaatgcaaattagttgagtatctaatgaaattatttataaaactccagcattgaagaaaatggcaaataaattatagctacaaaactatgggatacatagacagaaaactgtggacaaatcactatcttattttacaagtaagaaccagacttctgaaagaattcttttgtacggaacaaaagaaaacttaaaaggtgattaacagaaaactaatacaaagtggagaagatcaaaccttatacttatcacataactttactatcttggacacttcctcttcagaactgcaaattacagagaattgcgcaaaggaaataagtgaagtatacaaaagcatgaccccagcaaagaagcaaccagtatacatatgataaatttttatttggctgggtgagaaggaagataaatggatacatgtgattgatcgcaaatttaatgttaaactcaatattaaatatactgaatgaaacaaagaaagcactcaattagtcttaagaagctaggtgcattaaaatgtagataaaaagtatacctaggagaaacaacaacatcagggatgttaatggctttgtggaagctatgttgtggttttccatgactatacctctcatcatagtccattgtcatgttatcctgcaaaatagactatattatgcatctggaaaaacaggaaatgatctttgggacaccatgaatttcaagtaagagataaacacacaccaaagttaccagaaacaatatactctagcttaatgtttccttacttgaaacaatcaaatcaaacagctattaataaattgaaaaagagtaataataatacttggcatatagccttcaattcatgaataagctcttctggaactttcttgtacaagcctttcaccacaaagtcggtgctgtctttgccccccaaactgacacctctgagatccaaaaagtaaactacaactcatgagcaaaccatgtctcaaaaataccattaaactcaaaagtagataaatggattattaaataactaactaagtggatcaactaagagtaagacattcatttactaaatgtgaatggatttcaatgtataatataatatagtatccaaaacagtacaaacattgcataatcaatcatttaaatcactcaccgagcgtcacaaagtgaggaattggaatcagatgccaaggaaagtgatccagctgagaatgcaagagccaagggaagcagagagctggaccaccaggatgagaatgaactagtgttcctattgaaagcgttaatggcgggcggaagtggaggtagtgcgttgaatgagcacctggtataggtgtgggaagcagagcttcggagattgagtttgatggagttgtagaagcattttgaacaagaacgcagtgaagaaaaccaggaggaggatggtgacaccattgatgaccacaaaggaaagatgatgaagactgaagtgtactctttcttttctttttagtttttacttaaatcagctacccgtgggctactttcttaaatgctttcattttctcttttaatttttttaggagcttttaaaaacgttttccaatatgaatattaggtatatagtttttgtttggaagtgactttataattaatatgtaggataattattagagtggtaattacataatttagtaat

SEQ ID NO: 80311 - DNA, 917 bp, Cannabis sativa
ggcataaaacccaacagtataaagatacgaaataggagttcaatagattttgtcgtcaaaattttaatttttatggttaagtgttaaaaaacataaagttcaattaattttcacaccaacatcccttcttaaaatcatgtgtcaaccctactttcactaattcacttgattatgtttttttcgtatctagatgagatgcattgttgaatgttgatgaccaattcaagaaatttgaattgttaaaatgcatgtagtgaacaatattctcatgtaccattgttgataacttaattatgcgctcaatgggaaggagtcttactggagtattgaaaagtatgtcttattttgtaaaagttactctcatttgtttctagttgtattttctcttatattaacagggattgtaattttgccgctcataatgtggttaagtggacgtttaccacaagaggcttggggttatcccgttaaactccattccgacaaatattttatgtaacgaccgtaaggtctaaccggtttatctatcagagtacgttttttattcaaaaaaaaaaaactatttaaggccataatttgattattgtttggaaacttatcacaaagccataagaatagtcttatatttccaacctaccttattttaacacttaactattatcaacaatataattaatttttttgttcacaaaacgaaatacaaaattagttaccttaattatctaaatggattttttcattatataattttatataaaaatttaaatgatttataaactcattttcattaatcttggtgaaatatcagatacagtagaacctttatttaagattactctattcaagaataacttttaatttgttataaaaaaatcaagtcccaatttgggccagataaataagaataacctctaaat

SEQ ID NO: 80312 - DNA, 1079 bp, Cannabis sativa
agacaattattatagtcatccaaaaaatagtattatgaaatattatttatagatatccaaatcaccaaattaattatcactattattgcttagttgtattttcctttattacattgatttaatttcctattcttttagtcatatttttgtataaataagagctcaccatattaaaataaacaactaacaaattctcattcaatttctctttctctttctctttctcttttcatctttttttttcttcaaattattttataacaactttcatacagtgccttttttttaaggaattttcatataaagttaaactgttacgctgcattatcaaatgccacaaagtaaagcttaaatcaaccaactcaataaagtattaatcactattttcatacaaaatggttaaacaaacaatacatccaatacattgacattctctctttatctaaaaacataatacttcaagatagatacatatggccaaaatactatatttacaataacactctcctaaaataaaagtttattttgtaaacaaaattaatcaataaaaaactatttatctgacacactaatttgtactattaggtaaggaaacaagtcgagtcttaagagatttacaatacatacaattaaagagggaagaaagataaggcaaataaatatgtgatttccatgatattcctattctcgagaaaaagttataccgaattttcaatgaagtcccatcaaatcatgaattacagatagataacggatgctgcagtgtcactcactcactgcatactatcttttcatttcgcttttcaaaacatattaatttgtttttagaaagtgctacggctcagtacggatgtgccttttttggtcaacaagacaaaagcccctgccctactatcacttcacttttaccctatcttattattatttacaaaaaattgagttatatttggtaaaaaaaatgttttagtgatattttttacataattataaattttaagacaaaatttaatatatcatttaataatttattaaaaagtataaaataataataacgaaaaaataaatttaaaatttaataa

SEQ ID NO: 80313 - DNA, 2300 bp, Cannabis sativa
atagtattgtcttaggaccgttctagactcagtactgtgtggaacacggggattagggttatgatcgtgtgtatgggcgccaaagttataacccgggtcatttatatgttttatgttatgcttttcttactcaatctgtcgactcacagtgctatttccatgtgtagctaagggcaaggctaaaggtgaggagccgtgaggaggagcaggtgaagattgtacatgtcggggcagttatgcgtagagcgtacaattgtaggggacatcaaggcttttgctgacagtcgctggtgataaaacttttgtattaaactagcaaacttttataaatacattttgtaatgggatctcggattattataaatgtattactatatgtttttaattaaataagcaaatttttattattcacgatttccaataacctcgttgattagcaacgagcagcacagtacgtttaaaatcacgctaacacacctatgctagttagggtgttacagtatctgaagctgttattgtatattataagtctttgcttggatcccagattgtaaataggaaaaaggtgtaaaacaaggtgatatttgaggggcctactcttgattcttcacaagctgctctactggtgaagttgttcaccatagaagaagtgaagatggcactatttgagatccctggaaataaagcccctagacctgatagatataccagattcttttttcaagacaactgggatgttgtgggagaagacctttacagagcagtcacatcttttttagaatcacgaagaatacttgaggtggtcaataccactatcttgacaatggtggccaaggttaaatgccctactacgatcaaggattttagaccaattgcttgttgcaatgttgtatataaggttgcaactaagctatagtattctagaatcaagctcatacttcctgacttggtttcccaaaatcaaggagggttcattcagggtaggttcattgggcataacatcatgatttgtcaagacctggtgagacactatggaagtaaatcaaacaaggaaaattgtttgataaaactaggcttacaaaaagcctatgatactatagaattggactttgtggaggagatgttacaggctttaaagtttccagagtctttcaccaagttggtcatgaattgtgtgagaacccccatattttccattatgttcaatggctctgtacatggattttttgaatcaagtaggggactgagacaagcggatcccatgtctccctttctatttgtgattagttggaatacctatcaagggtcttgaaaggggttggcaacaaggaagatttctctttccatgagagatgctctaagcttaaaataaaccatatggcatttgcaaatgatgttctactgttcagtaaaggggagttatagagtgtttactatttactgaaaggtttaaaatctttgaacaaactttagggctgcaaccaaaccctcaaaaatcagctgtctactatagcaatatggccaattttgaaattaatagaatccttgaagctttaggattttcacagaaagagatgccattccactacttggggtgccaatttgtgctaagaagatctcaaagaatgaatgtttagcccttgctgaatagatgacagcaaggatttgtgcctggagttcaagaaacctgtcatttgtagccagaactgtgttgataaactcaatcgtgttagcaatccatgcctacttgtcacagataatgatcctacacaaaaaaatagtgaataatattgaagcaatatgtagaaactttttgtggaaagggcaggctatggaagtaggtcctagccttgttgcttgggataatctaagtcattctaaagcaactggatggcttggattcagaaaggttcatgaatggaacaaggcagctatgtggaaatacatttgggccatctcaaaaaaggaagatagtttgtggatgaaatggatccactgtgtttatattcgaagttaggactagtggagttacaagtcacctgaccaaggcagttggtattagaggagacttttaacattaaaagaccagtttatggagattattgcaggtcatgtcacttccattcaaccttaatgtgtttctaaaggttgtcatttactttggccaaattaggggaaagtaacctggagccaacaagtttgggggagatcgaatactcccaaaaacagtttcattagctggattgcaattcaaaataggctcaaaactagggataggttacttcagattggattatcag

SEQ ID NO: 80314 - DNA, 911 bp, Cannabis sativa
tttttttttcaaatcaagaatgtagaattcctcacatgttttatatgacttaaaacacatgaatggtctttctcttgtatagtagtacccactatgtaaggtgtgttcaaaacaaatattgatcttatttcacttaagtccaatctataccttgctatattttcacacttcatcatcattacaatccatttatattaattgtgacatacaagatatatatcaagtagaaataataatcaacattgatcatcataatatatgtatagtcttgtttgttcttacaaaagctagctaaattagggtttaatttattatgatagtagtagtgcaatttcaaggttcaacaacatgtaatccattattgtcttttattttaggtgcattaatattataatgatcaatatggtttggctcttcttcttcttcttcttctgagattatcatttcaaccttctcatctccatcttttccccatagcaacatatatagcccaacaatcacaataagtgctccaagtatgctgtgataaaaaaaaatcaaaaataaaacttaaatataaatatttatatacatattatatctactagcgagaaaaattataataattcacttctacttataatatatgatctggccattcattattatattattgtactaatttgtactaatgattgatcgaaattgtacactactaataaatttgtatgttataaaaatgttatgacttttgagaacgaattacttcttaaaatatgtatatttgtaaaagaaaaataatttttttaacctcagggctaggtgtgccctaagtgcaggaccaatctagactatgtggtagtactaaataggtcagaattgctacaaagttgtgatcaacaacaactcttaaccaatctcgtgctgccacg

SEQ ID NO: 80315 - DNA, 2683 bp, Cannabis sativa
aaactatagatattgaaactaaggataatattatttttatagcatgctgtgcttcgaacaaagcctggaagaagatacaatggaggtggcgtaatcatgagtgtacatgatttatctactatcataagacctcgttatagtgtatctcacatgacaattaaaaatggacctgataccatacaagctggatggacggtgagttaactattattttttttttcttaatatatgaagtcattcttttaaagcatactattactaattaaatattaattaaatatatttttataattagttaatattattcttcctttctagttttgtttttccacttaactattactttatctttttaggtaaaccctaatttgtacggtgatagtaaaactcgcttcttcacatttttacaagtaagtttctttctcatatttatcataaattattctattttaaataataattaaatatttttaatcatgctattatttacctattaattaggctggtggaagatcttgtttcaacacacattgtcctggttttgtcattgttaataccgatataccactcgaccatgtttatcaactactttctcaacgtggtggcccaatatatcttacacaaatttttatttatcgagtaagtaatatatatatatatgtatatatatatataaacatcatattaatacattttatcattagttttgaaaaaaaattacaaaatatctcataaatatgatacttattttttgagatcaagtttaaaataaaaagatttagttctctcactatatgttgttatatatgtataggtcaaatatttatgctattgttatcctttatttttctaataggatgctgtgaatggaaattggtggcttgaatatggaagagacgggactcaaatcggtttctggcccggacgcatatttagtagtcttaacacagggagtaaccatgtggaatggggcggagaggctcacactccaccgggacaaaaagctactcaaatgggcaacagtttccgtccaaaaggagattcaagattcgaagcatatatgaaacaaattacaaccattgacgaatctcataaacaagtcattgctacaaatactgaaacctttgttgatgataaacatttatatggtattttggattggggaatggaagggatacatggtcatgttatgtcttatggaggcccttttttctctgctatttaatttttattactaattatataataataacaataataaaaattcttatggaaaaaaaaacaaggtcatgttatttttattaaataataataacaataatatgtacttttatatcaaattagtaatcccatgtctacttttaagccattctattaattttaataagttcaaattattatgcaataatgtttttctaaaaaaaataattattacaaaatatttaaattgaatttttcatataattaaaatacaatttttaataaaaaaaatgacaaattcatattttatcaaaatatgcactacatgatcctttgtttgacacggttttatgaatgtaatgtaatttttatttacgagaaattttaaagagtattaatagtgtaatatatatcaagatattatatcgatattcatgtgattaaatattaaaatctcatacatattttaattttaataattaatatagaaagaaaaaagactcctaattaacttgtaatgatatttaacaactctattacctaataatggcaaatatattcactaaaaaacattaagtaaaagacttaatggatatttcacattaaaaaaatatatttttctaataacaatgttttagttataacaaaaagttacttgtaactaaaatataatatttaaatacaaattgttaataatttaattttattcacaacaaatattgtgattaaaaacacatttaatcataataaattataatttttataactaatatatttcaccacaaatcttttaatcacaatttttttaattttagtcacaaagataagagtagggtagctacattaatttaaaacattacaaaacacacaacagttataattattattattattttaattaccacatgacaaaatatgttattattattattacttataaatttaattatacatgtaaaacttcttcaaaactattcatcttccttctttatcatcaccaagctagactcactgccctccttatggttctcaatttttcaatcaatttttgtgatgattttattgattgttttcttttcatcagtacctatatatatcaacaataaaatcataaaattaattaatgatacatacacaataataacatatttataagatttacaaaaaatatatgttttaaatcatacgaatataataaatattataggatattataaatttgtaattacctctctttttctcttaagatcagattcagcctgctcagacataaataagactaaattaaaataatttttaatacgaataaattgtcataacatttttatatcgattcattattaatttttataaattatttaaaaaaaatacaaaattcaatttattatttaacaaaacaaaaattttattcaataacctttataaaatataacattaatttgaaagtatttagtactaattaatatttagataattttaataa

SEQ ID NO: 80316 - DNA, 707 bp, Cannabis sativa
atatttgtagttacatttgttgtagagtaattaattatgtagggcacatatatattcctttatgatattctactacatataaaaaaaaaaacaatgtataaaatcttacatgtctattagctgtctaaataattcgatatcataaaaatgaaattatttttagtttatatcatttaaactgaatttttgaaaatttgtattttgctaaagttattgatgaatttttttttgttttattgaatagaaaattagatcctatattattttataccactttggaaagtaaaatccgaattattattgggaattttcatctattaaattttgtaaaatacaaaatttaaaagaatatttcccgcacaaaatatgtagattaattgaaataattatataaaaataataattagatactaagtaaaattaactttgataactaacttttatcaaagtgttgctaaaattcttttgcagatgatgtagctaagtgtgctagagttcctagccaactagattaccccttgtgatcccatctaattttcttagttaatcaacaagatgttctttaaaaaaaaatcaaaatctaaattatagcgaatatatataacaaaaaaaaaagagtatatagataaaaaataatgttagatatatattcaaattgtacacgcttattacatacaatgatatgtaataaatattagttatttata

SEQ ID NO: 80317 - DNA, 1248 bp, Cannabis sativa
cgcactcaccaatgaaccaacacacagactacagcacaaaaaccacggctaaactactagccacacacagggtcacactccacaaagagaaccaaaaaactcttttaatgggattctccttcaaagctcgtaatttcgtaaaaattaaaaattaaaaataaactaaatttgcaaataggccaacataataaaaacacatattattaacctttccagatatcaaggaagttgaataaactaacaaaaaatttgcaactatcgcacacaaaatttctcctatatttaacttctagcaccactattgaaataagctaccccaataaaaaaataaattttgaaactgccattagcggctagtaattctttttttttttttgaaaggagcggctagtaattcaaattccaatataatgaactagaaaaagtatgatctttatatctcttacatcattagaatatatactttcaaatgtactaaatttcaaacacaaatcaaaatattatttactaatttaatagtcaactccttagcttcaaattcctaaaatttacttagcatgtttgagattaccctaattgatactaaaaacatttatagtaaatcaaaattttgacaatgaaattacacagatgcccaacaaaatatattgttgataaactaaacatctttttgtacccgaattgacaaaaaaaaaaaaacctttaattaatcaaaaaacttgtttgtggctatatcacatttcgaacctcacaaagatttctccctttcgagatcctttccacgccttcaagaattgaataagcaagcatcgaagattttagatgaacaaaaccattgatctaaacacagatcaaaattaaaaattaaaaaaaaaaaaaaaaaaatctatcacttgatcaaattttttttggctaattaagatttttactccctaaattttaacatgtaccaaatcatgcccttgaatttttctggctattaaaaattccatctgaactattgagattattagatttaagaacttttatttaatttcattcaattttactatttcagtgattatttatgcactaaatcatgctccacagactttgatatctaccaaattatattcctcgaactttgacaaaatactaaatcatatcgcctacactttcatccatgttagactttttttactaaaattaaacaaaagtctttaaatctaacaatctcaatagtttaaggagtatttttaatgaccttaa

SEQ ID NO: 80318 - DNA, 1562 bp, Cannabis sativa
tttaaaattgagtatactactcattcctctaaaaaatgagtttaacattgtttaatgtaagtggtcatttgtttactaacattttaaactattttcttaattatcaaaaaaacaaaagactgagaacccagcaagcagcattacattttcaaaagttgaagcatttggttggacttatattaaatgttttagatgaagactacaggtggatgatctctcttgaaatttagaataagttagttaattcagtttttcttagttggacatctatgatcttatatatgagttggtttgtgtgttaagttgtgagatctgttcttgttttctcttgtgtatcaatttgacaccttgaaataatgcaattttttaagagtggggtcactttatgaacaatttccagtgaactcaatttggcttaaccatagcatgaaaaaactatcgaacacgtctcaaaactcgtttttctatacatttcatatctacaataagacacctaagagtgtcattttcactatcaaggaaatgagaaaaatgaccaaaatgatcataatcaagacaaagggaaactctcctaacgttggtggctcctcaaccttattcttcaaattaatgagatgcaggaagttctcatcttgtgttttggacaagtacaaatcccgcacccaaaaaaaaaaaatttagacaataaagataacgtccgtcttgaaacaacataggagctttagctagtaacacaacactgaaaaactacctgaaaagtctcaaaacaacaaccacaaaataaatcgtttagaatgtctatctaaaaaaacaaatatattcaataaaaatactaaatttttagactctactacttaattcaatcaagtaaaacatacacgaaaaaatttaaaaataattagccaaaggtgataatgtctatgatttttttgttttattttgagtataatcaagtactttatgctgttttttctatttttttttttaaattttctcataaaatatattttttttaaaaaaacaaatcatatttttgttaatttatatatatacatattttgagcaagttgtaaatttacactttaaaaatcataaaaattgatgcaattagtctttagtctttttttctgatgtaaatgtttcacatgttaaacgttctgtaaataatgcggctcatgaccttgctaaatttacattaggggtgaatgaaacttgttcttgattggagattatctctccacttatatactctattattataaacgaaacactgtttgtttaataataacaagtattttttctaaaaaaaagggaaacttacaaaaatactggaatttggattaacttttacaaaaatactgtcacacggaaatcttttaaaaaatactgtgtttttataaaacaccagtaaaacataaagcagaacaactcaaaacaacagtaaaacactagtagaacaccagtgaaaatagtatattgttgtatgaaacttataaaaaaacatagtaaaaaagtaaaaaatagttgtgatgtagctgtggccgaaacctttggtgattgca

SEQ ID NO: 80319 - DNA, 1084 bp, Cannabis sativa
ccagttctttcacataaagacctttcacgggtttctacaaacccgccatagtgtgtttcatagcactaaaattaatagcccttgtgtttcagaatcgccccactaaacaccattgatcaactacatattgctcctcctcaatcacgttctcaaactccactccaccatctttctcttcctctaactggatattaacatatagatcatcccactcttccacactccgactactaaaagccataacaatcacataaacaaccaagcacaaaagataaaaaaatttaggaccaaccttaacacatgtcaaaggacaagacttattatatttgatgatttaatatttttaaaattaatagttattattaaatttgtttagtaaccatcaatgcgtgttaattccatttttggaatttttagattgacaaaaaaaattataaatgtattatttattttttggctgagtttttaattttatttctacaattttgtatttatattggttgaattataataggtagaaaatatgactagcttttctatttatgaaaagtaaggcataaaggataagtttaatgattcaattaatatctattgatctagctgtgtatatatgatcctttgtgagttttcttaaatgtttgatcagattgaagcaagactttccttttctattaaaggaaagtcacacttactgctcacgattctataggtacataggaattttttgtgctgattgaagaattattttaggaaagtttccaagtgagttgcggtcttgttcagaccatgtatgagctatcattaaggtgtatattgattataaatacaccttatatcagctaggtcatgtatctctttcatacactttgaattgtattcatatcttttaaaaaaaaaagagtcttcattttgcagagaagagttgttcatctctttttctgtgtttatgtattatgtattgccttgagtctataatcaagtctataaaggatgacaaatatcagtgctagctttaagagaaggttctacaagctttcgagagatagcttttcaactctttccttgggaggaagcaagcactctt

SEQ ID NO: 80320 - DNA, 2052 bp, Cannabis sativa
atagatataaatgtatagcaattatgtgcattcaatcaaatttatagttctttcaaaaaaaattatagtaaaaacaaattataattatttaattcaatttatagtacaaattaattaggtataatattacagtttttttatttttttattttaatttaattttttaaataatttatagtataaatacttaatttaatttctagttgtaaataaatatttaaaataattttgaacagttataatacttaatttatatttttgttacactgtaggtatctgaccgttatccacatgtcattttcttaatggtacatttatttttttttaaaaaaaaaaatattaatgactttgaccaattaaaaattgtcaagtggtaatttacttaacacttaacaaccaaatacttatagaagttctatttttataacttaggtattattaccgttaaaaattaaatttatgtatttatttgcaaccgagagttaaacttaagtttttttgccgcaaattactctttttatttatttatttttacaaaaaatcacatagcaaccaacggaacctaaatcacaactaaaatcaacatagcaacccacatataaactaccgaagcaacttaaattgcaaccaaaatctacataacaacccacataaaaatcactaaacaacccaaatcataaattaaaaaaaaaataaaaatggtatatagagtaataaaattacgtgaaataataaaccaaaaatttcaaaaaaaataataaaaatatattaatatggagaaacttttatttttcagtttgagtttttttatttataaaaaaaatgaacttcaataaactatttgatattttttattggtatttttgatagtttatttatagttgattttttgttatttcataattattgtgagattgatttctcgttattttttagttgttttcttactttttgttaagaaatttgtatttttttgaaacattaaaatcgtatttttataaataaaaactttagactataaataaaacctagaaaaagaatgtttttgaaaaaacccctaaagaaatagtaacaatataagcttacaatatttctttcttttttcttttgaaaggataagcttacaatattcaaaatagtactcagctctccatattatatttttgaaaaattattgttttttaataaaaataaaaaaaataattaatatctatttttagtggaattttagacaaatttattttactatgagattcttttttttttatgctataagattgataaaataaaattttacaaaaaaaaaaaaaatgtaagaaaaagtgacggattttaaaactatatattataaatattgtgttatcatctcataatttattttgctttttttttagtaattattttgtcatttttaaaaataattattttgttatctttaatagttgtattctttattttttttaccttttttacagacaaaattaaatacctttttcttttacaataaagcgtttttattgcttctaacattttgattaattataattattttttatatggtaacatagacattatataatttcgctaaattttatgaaattaattatagttacgaaatgagaactcaatcaattcatttgccatttatataatttattcccatatcaaaaatatatacatacaactcggataagaaaaaaataatagcatatttaaaataaaattaaatatgtaaataaactatattttttcattttgaaaaataatataatctaaatatacatacatggcccgtacttcagtagagaagatatttttttttcattgtaatttcacgtgacatgataattataaatttcacaaaataatataacaaaaacagcaaataataatattacaaataaaaatctatcataatataataattgataaatttatctattcgtgtctatataactgaaattcttgttttttgagaaatttatgggtaacttttaatttttatttaataaaataataaaatattattcatatataataaaataataataa

SEQ ID NO: 80321 - DNA, 1249 bp, Cannabis sativa
tgactactattttttttggaatgaatgaatgaaaagatgcaatttcattaattcaaatccacacctacccactctagttggtaggtatctttattctttaaatgccataacttataccaaaacccagaattatcaggcagactccatctcccttgcaaagattgaataaaagcataactgtgtagtgagccttagcttctttggaccagaaccacccatctggtatagtattaatactcagaatcaagccaacatccctcattccaacccttcgaactactcactgtagcatccaaaaggccatttgaaactgaagacacataaggatccaaatcatcaggcagccaaaggttcattcagcactttgatactaacacctgatcccactaatatcctacccccatctcgaatattaccccgagttttcaaaaatgctctgccaaataaaattaggattacaacctaatgaagcagtaagaaaagagccattaggatagtgccttgctttaaaaatcttacccaacagtgccaaattgaaatctgtcaaaattccaccactctcttttggacgagccaaatgattccccagctcatccaatttgtatctttattagctctaaattcttccaccggaaattgctcaccattctctcaatttggtaaaagaaacacttatggcatgatttggcaaaagcatgaacaacattttttattgaaatttctttactcgcctttgtatttcttcattagtctcagtcttaccttattaaaaattaaaataaataatatttttttagttgatcaaatttaaataaatatttaaaattaatgacttaatttattattattaatatttttcattaatttttttttttgtaattacttttaatatatatcttaattagtttttatatatattaagtgattttttttttagaaaaaaatgtcactagaaaatacaagaaacaaaaacatttatcaactaaattaataatattaatctaacttaatacattattgtaaaagtagtttgtatactcttaatattataaattatattcactagaaaggataataaattattgattttaaattaataaataatatttccaaaatataactattcaaaattatatatttaaatatatataattgaatgttgttattatagaatgaagaaagatttataatttttcttttaaattaaaatttttattcaactagaaactcagtctcagcaataacatca

SEQ ID NO: 80322 - DNA, 1029 bp, Cannabis sativa
  modified_base (637)..(643): a, c, t, g, unknown or other
atttttatatataaaaataaataataacatgcgtttcaccttcattgctgctacaccaccaaccaatcacaaaacaaaatcactaccatattaatgcaccacgaatacattaatgccacgtgtcattttctgtaactcatttatttttccaaaacaatgtcatttttcggttttgcatggctaaaaatgttctctttctttcctctctaataataactctctctaatataatatcaacacaatacaaattacaataagttaagagtgattagcggttttcacatactcacctcgggtctcatataatttattgtaatacatttaaaatatattagtcactatcgaccactaaccaattataaaacgacacgtcagtttattaatgttaatagtgtatataatataatatacacgaagagcattatatatatagaaaataaatattaattacaacattctattataatttttacgttcgaaatcatatgtcgaaattttttttttcaattttttttatagttcgtaaattttttaaaaattctgaatagtttacattaacaaaaatagagtttctgatattgcggcgttcaaaaaatattaaatgtattttcggtactgtaaactatttaaaattttnnnnnnntttacagagatgatgttgtaagcataacgaatactcccgtgaaaaaaaaaatattctgacatgtgttttcgagcatagaaattgactaagagattgtaacaggaggttatatatatagataggtatagatatagtttgtagtagagagtggcgttgggctgtgagtggagagagttttctgcaaatctttctggccacacccaaaatatcggttgagccaacttcaactttcttccctttcattttcaatttcactgccttttattcattcattcattcatatatatatagatatagatatagtccgtacataaatcgttttcattttcagaatttaaaacagagaaagcttcactctctctctcttgctcttgctcttgctcttg

SEQ ID NO: 80323 - DNA, 1166 bp, Cannabis sativa
aaaaaaatgtggcattttttaaaactaataaaaaaatgtgtaatttaaaatgatctttttttagattcctaagttaggtgtgctctagccacaaacctaatcggtatatgtttaagattgggtctgggtgatggtggggggtggagagttataaaataaggcagcagtagggatggagaaagagaaggtggtgacagtaggcatatggtgacttatggtgatataatgatatttaggtttttgtggattgtagtgtgatgggggaggagatgtattataagagtaaggcttatagtcatcacttgcagtcacattggtagtagttattataaacaataatgccaaagaatatgctaaatgaggccaaaaattggtaaatttttggcactttaaaagaaacataaaatttaagtctttgagctaagtggatcttaagtacaagcctaacctgcttatactcatggtcaggattgatgtgctttagagcaaagaatgaagaagttgtaagtggctttggtgttgaaagggatggtttcagtggttacaaaactaaagggaggaatgatttttcaattttattatttctcttttgctttctttaatttaaaaaataaaattaattattttgtatattttcaatgatcattattagtaatagagtagtattgatttttataattaatttgcacctaggagtgtaaatggattgagtcgattttaattcaactatgatctgacctgatccagatcatgtacggattcacccctcccttccccattagattagatcatatctgactcgacttatattgatcaaatctgatccgattcgatttttttaaaagacttgtattaatagattgtgtaaagataatatattttcaataaactcgattccaacacaaactacgggttgggtccgggtctaggtctgagtctcaggtccaagtctggaactgggtccaggtacgggtctgggtcccgggtacggggttcgagtccaggtcctgggtacaggtcttggtttgggtccgggtttgggtctcgggtcatggcctcgaactgggtctcgaatttgggtccgagtccaagtttgggtgcccgattttgggtttgggttcgagtcccaagtttggtctggttccgagttcggtctcgagttcggg

SEQ ID NO: 80324 - DNA, 1978 bp, Cannabis sativa
gtaatgggttttatttagggcacaaaacccaacagtatgctaggatgtgtttgtggtttttttgttttgagctacttgttgagctcaatttatacctatgttagatttggtatgtgaagagcaaatcttggtttatgcttggtaactggatgaatttttggtgtgatttgtgtaagatttgaaagcatgaaaagttggaatttttgtgtggaatcaggggtcgttgctgcggccacagcaaggctcaccgcgacgaagctccagcaggttggagccgttgcggcaagggcttggggccactgcagcgagagccttattttccccaattttttgttttcttgtttttgccataacttttgactccaaactccgttttagacattcttgatatcattagaaagctcgttttgggctctatgtgttagtgtatgattggagttcatattatgtatatgtattaaaataaatttgggattaattctatttgtgaaatctcaggaatgtctcactaggattatcgatgcttgctcaggaacactcatggatttggaatctccacatacttggattaccaggtaaggcagtgaattagtgcatagagattagcacagtggcactcatgtatattattttgtatatttatgcgggaaaccaagactagggttattacccttagtttagctattatgcggtctagggttattactctagaatgtatgtgaatgtgaatgcaataatgtgttatatatattgatataaagagttatgcggttaaagcataactaggttaaactcgatattcagaaccgagataaaccattctaaggtcttattgttaatagacgtgtgagcgtaacatgtaggtctatgtcaaatagactatagatgcagtggcatcaacacttaaatgattataattgctattcatattgttgtttatactgtcttgttgagccttggctcacgaatgctctattgtccaagaaagggtaagtcggttgttgagttgccatgagattgagggcttttgcggtgcattatacatgttcaggccaagttagaccacgagggttcggtcttccaagggaattgttgtaatctccacttttgccgcttaggtcggcgtattaatgacttgtaatattttaaaaatattttacgggatcctggaataaaaaatatactctttttggatttatcataaagtttaattattacaagttattattttattctgtattttaaactttaaattccgctcttagctctagtatatctcggattagaaagattagtgtatgattagtcacattacgtggcgttcctattgttaggacgttacacctaacacccttaaatggtcacaaacaatcctcacctcgtgaattgggcctcactcaaatgccctaaagtcaataactattgtattttatcccatcaaaagacctagttgatacctttaaaccatatcgggtctgagtatgcccatacctagttctcccctataattagaatattaccccttcatgcaaagggttggaagttaaattttgaggagaagaattgagaattagggttcttcaattagcgcaaaaatacttgtaagaaatatttagaagcttttgtagctcaataatatccactcgtggattagagtttattaacactcgaaccatgtaaaaatcttaatctttttttctttagtttacttctttcttaagtttatttactttataattagtttctgaaaatctcgacaaacactaacacatttctaaatttctaaatttgaattttgtggggttgtgttaaagaatttggagaattttgtgaatccattaattaaaaaaatagtgtagattgaggataaaaatattataaaatagttgtgtgaatttttgtaattttaaatagggtttttttcaattttaaccaaaaaaagtaacaatattacaaaaatacttccaactggccaaat

SEQ ID NO: 80325 - DNA, 1965 bp, Cannabis sativa
attttataaaaaatatttaattttgattcaatttataagttgtaggaattaaagtttatttttagtgaaagaaaatgagaaataagcaaaattggaagaaaatagaagtaagaaaaataagagatctaaacactatttattttattataatttatttattttaaatattttattttttaatatataataagtaagtaaatatattattagtacaaatttattataaaaacttttaatcaaaacagctttttcagaaaattagactgtagtttctccataaatttttcaataagttgttttttgaactatttactaaacacttttttatcatagctttttcaaaaattaacttttaatttttccaaaagctgtcccaaacgatccctaggttgttttgtgttagttttcttgaattgaattgtttctttgtatttatgcatacaagtatttattatttcagtttccctttcatttttattgcagtgcattcaactcagctataacaatagttcatcaagatggattacttggaaaaaagaatccaaataggaagaatagggcaaaagggtattggagtagtggatgtgatgcatggtttcttcttcaatagcttgtttgcagttgtggtggtgattagatcagctgtcatatgctgatcttcatctctcattcattggtgaggtttcacattggggttattccaaaactccttcactacataacaaaagcttatataatgtgtgtaaatataataagtatttgaaatggtaatattatttcttataataataatattcatcatgtaacatatgaataatttctacgaagaataattcctatgagttcaagaaattgatatgacaaaatgtagacacttggacaatctattgcctaatttattgtaaaacaagaagtatgattcaacctaattatgctccaacaatattgggagttttgagccttcaaaactggtaaatatttctctttcaactagagacaatgctgtaaaaggcaacaaacaataccaaccttccaaaatttagcttcatctacttgtatcttcctcttcatcaactggagtataccattcaggttgatgctccaagttgctccacctgtagttcaatagtaactcttcgttgcagagagctcgtgtagacaccaacactaataatgtcttcaaaagaggcacctcacatccagtatttctaaagctcccatttttgaaccaacaacttccaaaccccttcaactttgagtcttctaaattcctaaatgcaacatttggtatgtaaactcgcatgtccttttctgtcaatggcaagtcataagggcaaaccataatgtttggggccacacccttggcagggtggttggcataatgagcaaaagctaatggatttcttcgctcgataacatcactgccataattcacttgtttctcatcaccctgtatattgataccgacttttgaaacagtcgaggcatcccacacctcacgggtttcatcccccaaaccccaaggttgagcattgatcacattcccatcataccttgtgatcaaatgtgggttggtttcatgagctgttgggtatccaggaatgtagcgataacaagcaggtgagtagattacaccggggtagatggcaaccacagcaccaacttcagcttcaccatctaagaataaaccttgccctgcttccttgtgaggtatttgagagggtttaatctcaagtgtgtagcccataagatctttgagtgtctgagaaacttcagcttgtcttaatggcctcgtttcagatacatctgcactgaaaaatcattctcaaatatcattccaacattcttttcaattagaagaaagatatcatgctcctctcacaaaaatctcaactaccaatgtgcaaagattcttggaccatcaaaggaaagtacaaatgtatggccatatagaacgtgcatgac

SEQ ID NO: 80326 - DNA, 769 bp, Cannabis sativa
tgaatttggatcccttgatcgacttgtttaaacgctttgtaagacctagcctggctccttttgcctcagagataatgagccactttgctgccggcttgacccaactcccaatgaagaggtatgctgcctatgcttctaccaacccagtgtatcaaatccagaacatgagtgcagccctcactatagtgagttcttatcttttagattcctcaagtctctcttattttttatacaaatgtattttctattgactgccaaattacagcagaggccggtcgtctctcaaagacgttaattgatcacggatacattatgtccgaatttggaggtatggaggaggcaatgaagagtctccgggagtcagaggagcaaaagaaggcaattcgtgaggaagctcggaaaaaggagtctcttatggagcagaaccaccgggaggcactgaaggccagggatgaggtcgttgctatgacgaagagggatctttgggattccagggaagaagttcaagaactaattgccaagttgaaatcattggaggagctgcaccggattgatttggaaatagcagctagcctgactttgaagtaaaggagctccgtgagttcaaggagcaggctcgcaaagaagcagctaaagcaaagagggatgccatggtggctccagtcacttgtcaacactgtctaaagtgttttgatgacggtgtgttcatgtgctagaaagctaactatttcgaacctcggctccttttctaccctaatcctgaggaagt

SEQ ID NO: 80327 - DNA, 803 bp, Cannabis sativa
tttgttagtgatctaatataatttaatatagttacatttctcaaagtgataaagaatcacaaaatgattatttaaaaagcctcctgaagaagtcttaaatacatttgctacttaaaatagttaaatatatttttatgaacctagatgtatagtttttatcaagttatgaaagtgacaaaaaacagcttattacatgtacttgttgtacatttaaatatataatatatcaaatcataataattagactgttgaataactacgtgttcgaaagacatggggaaaaataaatattatattatgattatatctatttgactattgcagcaacatgatgaagttgtcttgtacctatatatgtccacatcattaaattgataatgaagaaatataaaatttgacaaacaaatagtaactcctcaagagtgtatatgctttaaaaaataatataattagtttattcgtgtatataaatataaaacttataatgattactgatatattatagtgattttataaattatcctacgaaagttttattgaaatataaattatagtgaatcctaaatttatgaattgagttattttgacatgatcaattatacgcaataaattataaatgatttgactaaattttgttgaaaaaccagaagattctttccattattaatttataaggctcaaaagaagaatatgcatatattttgcccatataaaatgtgaacgtatattttaacattttcttttaattttaaaaataatatatctataatttcattttcttttttattatcctttgtaccgtg

SEQ ID NO: 80328 - DNA, 1236 bp, Cannabis sativa
ccacataactcaacatttccattaaacaaagattttgagaatgtactcatctgtgtgccttgtggtatcatccctgtaagttgattattactaaggttgagataagcaagaagtgtgagattccccaattcttgagggattcttctagagagcttgttgttggacaagtccaatgattcaagttgtatcatattctcaactgattgtggaatgtggccttcaaaattgttacttgatagattcagaacaatcaatgactaaagatccccaataaattgtggaaccattcctttctagctgattatgactaaggtctagcgtaattagtttgcttccatccacaaatatctgaggcatctctacactaaaattgttctctttcatgttcaacacttgaagatgttggctgaaactacccaagcattgtggaatagagccaattagctgattatttgagacatcaagaactccgagattgcttaaagtgcagaacattgagctatttcccagctgagggattctttcagaaagcctatttttagagagatccaaataagaaagctgagtcaaattcccaagagataatggaatagagccctcaaatttgttgttagacaatttcaaccattgaagggagctaatggaatccaaacatggaagaatctcaccattgaagttgttattggacaaatctagaactattagactagtaatgttgcagaacaatggattaatttctccctgatgttgttattcgaaatgtacaactcatctataagaaatggtagaacagttggtaatgggtctcaaaatttgttgtagcttaaatccagaaattccaacactttttgcgaaagcattttcaacacttcttcccaacgaatgatgaaatttgtagacatgtttaatgaatgtaaggtctctgcccctatggtgaagaaccatttgggaacctttcctttaatttttttgctggaaagatctaaatattcgagctcattttgggtttttagaaacttaggaaattctgtaatgtttcatgaagccaaattcaaatagttaagtttgaagattagagtggaatttgttgttgtgtttgtcattacagatagattgttatgtgaaagagaaagacatcgaagttgcctcaactatgagaacatgtgcatctctattgtgccaataaagtaattttcattgagtaagaccacttccagttttttcatttcaaaaatt

SEQ ID NO: 80329 - DNA, 1658 bp, Cannabis sativa
aaaaatctgaaacttttttttagtattttcttttattaaatataaaatttttttattaagcaaagaaaatctttttttttttttttaatttgaattattttaaaactaaaaagaagatttcccaacaatttataactgttgggaatacttagtattcccaacacttgtaaactgttgggaatactaagtattcccaacagttataaattaatgttggcattcgctgttttcttttaaaaaaattcatttcgtattgcccacggttgttcaccgttggcattggtttttcccaacgatttttttgcttcagttttaaaccgttgggaaaaatctccacttactttttccaacggttttcataattgaccctcttattaaccgttgggaaaacctaattttgtagtgggttacctttgggttttttaggtgtggttttacaagtgttgtgtgaggaagataggagattttggcaaacgacttcattctcatattctgagaattttgaattggagcaatggtgattgtcctgactagggtacttcaactttgcaagatctgacattgaagattttttatttgcctctttggtaagtgttcagttagtttacaattgttttatagttgttaccttttttttgctgttaaatttattttttacatttgtttgtatgtgatgttattgtgtatagatccaagtgaagaatttgaggcccacttctgaagagtttaagtagttactactggatagtttttttaaggatgtttttattgatgatcgtgtaccagttaaatctacagctgatgttggtttttcatcgggggagaacgtttctcgtgatataaagtttttgacagacaaagtcaatgcaattatttgttctctgaataggttgactgataattaatttgctcttttgagagattttgttaagcttaatttcaaggatgcatgtgttggatgtaattggtgaattgaaaacaaaggtcactaatttttgtgacatgtctcatgttttagtatgtttaatatgtcattttaagttggtattattttaattattttaaatcatattttgtttatgttattagttgttaatggggtattttatgatttctacaagttaatttagctaaaaatagcgaagagtcaaaatctgatgatgacgaagaagaaaatataggtctagattcggagaagaatgatgacgattttgataatgttgttgattctgacggtgatggttctcgtgaacatcatagtagtgttgatggtgaagataataacaatgatgatgtggttggcgataaggaggggtgttgatgcttcaaatgttggtgaacaaaaagtgagggtgctgcagcaagtgaagaagataattagtctatggacgttggcaatatcaagggcaaagaagttaatttaaagggagatgattttttcaaggacttaagctagcttgatattgatgaatattaagttgttttggctggtttgaaggctattgaaaaaaattaaagtatgttgcttttttatgttattaatttattaagattgtgtttcaaagtagttgtttcatagttgcaataaaactttattctaatatatctttatatattaaaagtgtggcaattcttggtttaacgattcttttttttat

SEQ ID NO: 80330 - DNA, 1901 bp, Cannabis sativa
  modified_base (1455)..(1459): a, c, t, g, unknown or other
aagagcaaactatttgtttgactatttgagctacccctcttaagtattacacatgttcagcaagtgctcaacttctgtagtgcccttttaggtatcgctaagttcactctcaagtacactctaaggttctcaaatttaaaagcatgcttctaatgctcaagttttgctctcttttgtcttactcattatggcttctacacatgtccccaaatattttcgtgtagtcatcaacttctttactcgcatttccttctttgcttcctcaaagttgcttgaagctttttggaagaactctcagtggatccttgcctccactttgtgcggttgtttccatcttttggaagtgtccaacttacattttttcctcaagcataaaataaagttacaaagtttcatgatataagtcgttcaaccatatgaaaacatataataaacaagtaataagcattcaccatttggtttcacaaattgaaattgcattactcaaattttttgcattggcctagaatacttcaagctttggcttatgtgaaaatagaagtgaaaattaaaacaaataaagtaacgttagtatataatataatttcctcttgtatatttatagcaattaattttaatatctaataaataataagttgaaaactatatgggatgcttggaaagtatatatctgggataaaatggggtgggtagtatcactcccgaccttaccccaaacccattttgggtgtataaaattgcacctcatccccgctccattacccatcaaggcgggtaatccgcgccctattttgggtaagtactcgtgggtacttgtccctggggtcaaatttccatctctaaatagggctattcaaccttttgcttctaatctaatctaataatcccgttaataattagattttaaaaattatattcccatccaatttaataagttttcaaaatctaatttatctaatctagttaataattaaatttaattaattttttatttaaatttcacttcgacgcttgattttaattttaattttaattaataaaacaaatatataaaaactaaactatacatgagtttttagaatttttttaagtatttctttagtaatatgtaataggatccataaaacattaataaacaataagaaaaaattacatttaaatattattttattatatataaataaatataacatttttgtaatgtatattacatgtaatttgattggatttgattgatttttaaatggatttgaaagcatcattcaataacctatctagtctaattaaatatataaattttcataattggattaaattagattagttcggtataattgaattagtttaaatgttgtccaacatcttgtatacattttttctttatttgaaggataaatatcattttggattatgtatgttgcaaaagttactaattggaccatctattttgttaannnnnaaaatggaccctgtatttttcaaaattgtacaaataggactctaaactgattttttttttcaaaataaaacttaataataatccgacctagagatgttatgacaaaactggttatattttctttatctgttcgtgtcaaaaattgtcttaaaattaattatattaaaaaataaaattgttgaaaattaagctcaggatcttatttgtacaatcttggaaaatacatgatttattttgtcatttaacaaaacagagagtccaatctgcaccatttcttttacaacaaggaacttgatgtcaatatgttttgactttgtcgagaatctattattgttggaatacaatacaactcatttattatcacaatacaacttacttcatagcggcatgtaacgtccccgcttcaagcttccattggacccttacacccacggaatgaatg

SEQ ID NO: 80331 - DNA, 1999 bp, Cannabis sativa
aataggaagtagttcaagaaagaagaccataattggaggaatagtaggtggtgtaggtgctctaacactcatcatcatacttggaattttcatttggtttaaaagatattctaaaaaatcacaaccagttgctagaggtaataatgtatatttaaccattgatatcatttcatataaatttatatatatctacatatattaatttcatgatggaggattatgtattattttcattttttaacaatattaattcttagaaattgaattaaacatataactccctcattcaggtaacatattgggaggtacagaattacaaggtccagtaaattttaagtacaatgatttgaaacatgcaaccaaaaatttcagtgaacaaaataaacttggcgaaggtggttttggtgatgtttacaaggtgaagatgataattcataaatatatgatcagttcttattatagcatttataattttttgtttgtttgaaattaattaaataaacagggaagtttgaagaatggaaaaatcgtagcagtgaaaaagttagcaataggaaaaacagaaagaggaaaagctgattttgatagtgaagtgaggcttataagcaatgttcatcatcggaatttggtgcgacttcttggctgttgcaacagtggaccacagcttcttcttgtctatgaattcatgccaaatagcagcctcgacagatttttatttggtaattattaatatatattacaaaatatatagtatacatatagggacacgattttgtcccgtgaatgtactttcacagaatgtattctgcgatgtaagaccggcgttaaattggatagttatttgatctgagcgctgaagttgatctaggggtaattaaggttaaaaaatggtaacgtaccttgggacacattattaagtacttattacgtacctgccgtacaatggaatacattctgtattttgctacaaaatcggctgcctatatatatactctcaatttttttttttttgaaatgaaatagcaacttcattgaaatattagtatttagagtacaaaagagcttctagatcggtccaaacattgtactcaaaaacactacgaccaaagaaaaatcgagaatatcttgccacaacatggacaactcgatttgataatcgtctaataaaacgtatacttacaaaaggtaaagaagatagtaaaatctggcaatcgtaggaatttcttttagttgttgaatatagagcaaaattatgtcatcttattattattgtataattgtaccaccaaatttcaacattactattagctgatgctccaccccattacaaagtggtcacaattgttatagttagcaattttttgtaaaacttattcacttgaaataatctaatttattcatcatataattactcttcctttttagttaataaatatttatatttttttgtaggagagcagagaagaggaaatttgagttggagtgaaaggcataatataataatggggacagcaaagggtctagcttacttacatgaggaattccatgtgtgcataatacatagagacattaaaacaagtaacattcttttagatgatgatttcaaccctagaattgctgattttggtttggcaaagcttttgcctcaagatcgatctcatctcagcactagatttgcaggaactttgtaagtcaaatttattaattaattcatcctaaccattcaaatgattcatgtaacattaattaatagtaattattaatcattatcaggggttatacagcacctgaatatgcaattcatggccaattgtcagaaaaggctgacacttatagttatggtgtagttgtgcttgaaatcataagtggccaaaagagcactgagattaaagagagtgatccaaatggtcaatacctccttcaacgggtaataattattaatcctttttactaattaatgtataattaaggctcatgtcgtgtggataaattatttgca

SEQ ID NO: 80332 - DNA, 1105 bp, Cannabis sativa
aaatgaatagcaaagcttaacttgaaaatcattttatgttcatacctaaccatcaaaatgatgacatgtacgaactccactttgaagacttattactccttaaaatggcaaaagaaaagagaagagaagagtagatatttctagttttgtagatttggtaaagagaaagaagaagaagaagaaaaaaatgaaaatagccaattaaggacactctaattttgaatgtttgatcatcacctttcaatgttaagatagagaatttgaaaagaaaaagatagaaattgtatcaccaactccatttatagaagattcatgggtttggtttggtttcattcaattgtaactcatctaatgtttttatctatttaacttctttacaaactttttttttttaaatcaacttctactcccaaaaataaaataaataaataataaatcaactttctcaaccgttcctttggaaccataaaaaaaaagtctccaattaagctaagtttttggagcccttgagaaaatgcattaataataatattactctattcgagactttgcctatatttttctcccaatttcctcctcattcactttttttctcgaaccattgtcatagctttagactcgatacaaaatatttatagagtattgtcattgggtacaagtggtgtctagcacctctagataagtcgcattgtaattggctaacgatactcttttaaagttattacattaaattaaatggaacctgatacgtaattgaaccaatattcatattgacatataaaaggatgctaaacactattagtaccttttagcatttctcatatttatactatttgtctaattattacacagatactattgcactaattacaattttaattctaattatatattacaaaaaatgactaaattttaaagattcttcctaaataatattggtattgagaattagtggtagttactatcttctaaaagtttcgtcttacaattagttagtaatattttctaaaagttattatataaaattctatatttaattgtaccaataataatattacacctaaaaaagtgctaaacacccatagtacattttaacatttctcct

SEQ ID NO: 80333 - DNA, 5485 bp, Cannabis sativa
  modified_base (30)..(39): a, c, t, g, unknown or other
  modified_base (5382)..(5397): a, c, t, g, unknown or other
catttctaaaaataattttttgaaaacaannnnnnnnnnacaataccaaacatgctctaaggagtttaaaactacccaaatcctattagaaagaactttagcaactaatttatacatggtatagcataagctaatgggcctatagtccctaacttgggtcgcattctttttcttaggaattaggacaatagtggcttcattaattaaagaaatgttcgagctcctatttaaaacaacaagaataacatgacacaagttaggacctacaacaaactaatttttctggtaaaaataaacattgaggccatcaggcccaagtgtcttatcaccagataatttaaataaagttagcttaatttccttaacatcgaagggtttgtctagacactcatgatgagaagcactaagcttactgctaatcccactaagaatctcaacagtggcattgtcatcagagccttgggaagaaaaaagatctaacataaaaattaacaaaactactactaatatcattatgattactaataataataccatcatctcgagtgatacttctaatgatgttgttcctttttcttgaggaagctttttggtagaaaaacttagtgttcttatcaccaacctttaaccagtccactctagaatattgtttccaataaacttcttcttcagacatcaaggcatcaagagaggtttgaagggttctagctttacaaatctagtccctgggtagaggggaggaagaataaattgtatcaagttccttatggatagccaaaattttatgcttaagactacaattatttttatcccaatttacaatgttgtgaacacaacttgtttgtttggagggaaaatcttgaatattatcacgataagaaccaaaattactagaagaccaagaatccttgactaactggaagaaattcggctcagttaaccaatggctcaaaatggattcttcaagttctagtagttcttactatgtcatctttaaggataaccttaagatctcggtggcccgaaccataaaaagacaactgtaacaaagagacataaggaaaaagattagaccaattactattcacaatgcaccaatcgaaataataaaaaattactaccatgcttctaagtgaatttattaccaacaaaagacaaaggaaacaaattatgtttagataaaaaggattaaaagctagacaaatcatacagggggattagaagaactactcctatcatcaagtgagagatagtcattaaaatcccccataacaagctaaagagaagtaggggcaacatcataaagtctatctaataaagttcaagtatcacactttgaagaaatataaggagatccataaaagcaagaaaaatgccaagttatattatcatcgaaggttacaaatcaatctatgtgattgacagagtaagttaaaatattaacattaattaaattgttccaaacataagtaaacctcccctaaaccacttctaggaacttcaaaaacattatcaaaagaaagcttaatcctaatactagaactagagcctgaagtcaactttgattccacaacaaaaaggagcaagggctggtgttgcttcataagcagagagaggttgttgaatgccctgggactccacaatccatgggcattccaacttatgagactcatttttccaggtagggttccagagcaacacccgccttgtccataagattctcaacagtgggcatcacaacatcatcacttaaggcagcacgagctatttttaaaagacttctaaaagagcccccaacttgagtattttcaaaagacttctaaaacaacactaacaatgagtttaggagaaagattagctctagtcctcttgtctcaacaggaagagcaataggggagaaaataactccttacccttactacgagaaatttgaatattaccaaggttaatagagccttctacaactttcactttttcaacaacagtgataacaacaaaaaccatagtaggagtatagggaagcttacaagtcacattttgaaagccaaatggggaagccatagtagagatcatagaactcagagcactaggggtggaatcgctagatatattagctttatcctcaatagaagagccaacattcgggggaacaacaaaagaagtaatgctagtaggagtagtagacacaactttagaagtgtaaaactggttcactgcttcttgaagcccttagttataagagtttccatgaaatcccatctctttcaaaggggtatagttagaaagctcaaaaggattttttaaaaaatagacctagtaggaacacagaggtagtctctagaacccaaaatatgaggcacaactggttcatcataaattttagggaacatgggacatttgttataggtgtgatccataagacaaaaaagtagcaaaagttctaaagaccctcatatctaaaaagccaaccatttggtcctactaattttcctaaaatgaacattcattcttctacgaagaggcttggtaacatcaagaaaacccttaatatgaaggtaaggcccaaacgattcaaaaaagagagagtataaatctcaataaggtcaccaacttccttagccacaaaatgagcaagttgaggggactgtttccaaataggatatggtggacttgcatccataaaagggatatatctaagctggtcaaaactaaaggtgtccaatccttcaagattagcaaaaagcttaaggcacttatcgaaatggtagggttaatcttcaagaacacgacacctatctccctcatagccaaagttggccaagaacgtcctaaaatagtaatcaaagaatttaacgggaaaacagagagtccaagcctccatcatagctttttcaacccagcttagcttaagagacttagtggtaagaattttaacaacaaggagatatgactcagaggaagatcatgaacctaggaagaccttatcaaagtcgtgaataagactctcttcatcagtgagggttagattttgagtaatattgatactaaggctatctaattttgctaagtagaaaaagacacagaagaaagtgtagaaatggatataatttaagattatgtagaaactatgaaaaagaaggccccttaaatagaaaagccatggaggaagatacctaaaatggaagagccattttggagagaaaaaaagatgccaaatcaatccaactattgatcttccgtaggtaatatcttcgcatgccaggcttcatcatcaccaaaacacctctgggaacgaaaacgatggcagagagagggagggaaaatattgagcaagagacgagcaccaaagaaagcctatagagtaataaatggaaggggaaatagtaaaatcaaaacaataaatgcaagcttagaatgaaattaaagcgaggattgtgggtacagagaaagagttgggatgattagcttaagggtgagagggatctggaacagcaaataggaaaatgtaacaaagacctagaggaactacagaaaaatctaaagagttcttaaaaattatttattttaatatattttattcattttaataaataaatacataaatataataatatgacacacatatatatattaaaaaaatatatttaaaatattaatatactatttatatctcaataaataatagttcttggcatgtagctaagcactatttatcagctaaatctcttagttataatagctaagatggggaaatatttttaattagtttttatctcttaactaattttagttacgtaggtgctctaatacttatcctcatcacacttaggggcgttgatataagaagtaaaaaaatttgattgattagaatattaaagcagagaatatgattacccgtaaacttataattgtgtttagttagggatattggcggcaaaattacctaaactttatagtttgtagcacttaatcacataaactcattttttaactgtaaaacctactaaatcgccattccgttttggtttttatacttccatccaaaagcttttgttaagtgtcacggtggactacccatgtgtacacaagtgtacacgctgcaatattttagtggtccacgtattattaatcattaaaatattataaaaaattatttaaaaattattaaaaataaaataataattttttttcttttcttttcttttttttttattcttcttcaataccctaaatttgtagaccttccagacccccaaatctactcccggaagccagattcaacaatctaaagaagaccctaatacccaaaatgaccatactcccctccatgacaaaaagctaagcccttttccttatccttttcttcaaagaaccaacgatggtgaccacagatgatgatgaaccctacattctccaagttacactggacgagcaatgacaaatccacctcctcgctgaagatggagactgacgaagacatcgtttcgacagatggagacagagacattacttgaggattattagttgaggggtgagagagagagagagtgatatcgatgatctcgaagtcgaatatggcatcagagaagaaggttttagtggcgatgatgtcgaagaaggatgagatcacagtaacactgttggagagataccgaaagctagcgacgatgccggagaaggaaacatcaattgttggagaaggagaattgaggattccttgcttaagatcttagtgatcttctgcttatagaatcaccgcatgcgatgctggagaagaaggtcttgccatctattgtggagaagaactatcgttgggagtgacatcgaagaagaacatgcagtggagaagatcgataacacaattttagggtattgaaaaagaagaagaatagaaaaagaaaaaaaaagaaataaaaaagtaacaaaagtaattattttttctttgatttttaaaatttttatatacttaaaattattttttcattaacattatgtggaccaataaaaatttaccatgtgtacacttgtgtacacgtgtgcattccactgtggcactcaactgaggtttttgaacataagtgtaaagagaaaaatagaatgggggttcagtaggtttcgccatttgctatatggggatcgatctgattggggcacttcccacagggcgagggggagccaagtacacagtggtagcagttgatttcttcactaaatggaccgaggctgaacctcttgtctccataacctgcaagaaagtcctcgactttgttgttaaaaacattgtctgtaggtttagatttctaataaagataatatctgataacggaactcagttcgatggtaatttatttattgaattctgtgttgggttttatgccctannnnnnnnnnnnnnnnatataatcagatttacttatttttttttttttgataaatcaatgaattgtattgcataatacgaaattttttacaaactatgcgcacc

SEQ ID NO: 80334 - DNA, 2183 bp, Cannabis sativa
ttgttgtttttatgtttttgtgaaataatccctttaatataatagctttagggagtatcgctaatcaattgcaatgtgatgataagcaatattggtatccaatagtaatgcttgaaaagaaaatagtaattacatgagtaacttgatccgtaaatcttctcttaaaagaaagaagaaaaaaaactaaattggtaattttttttttttgtaatccttacaaaaaaaaaatgacgggtactcgttgattatttgtagttactaaattggtaatctttgaaattatgccttttaaaagagaaatttaattttacacgcttgcattaggctaaaaataagaacttaaacccatgttgaagacaatacgtaatctaggctaatttttaaattttattttcaaaatacccctcccataagttaacatcatttttctcttctctttttcttttctctcttttctcacttcactcttccactcattttctatctttctccctaaccaaatcccactaacagcttgctaaaatgtgaagatttaagctgctccaagcttagatcggaggtggattggaggtgggatgattttcgctgcaccaagaaccaagcacaatgcttcatgggaagcattattttgagcaatgggtaaatgatttttgaagaatattgtttaaatgttcaatctgtgggttgttggtgtttttttgctgaattttttgtgtgaatcgttgtttttcaaaaattcttcatttttttggtttttgagtttttctattaagctcgatggtttttgataggggtacgatagaggcccgatggttttttagttcagggattaggggtgatgtccagatgaacatttgattgggggacgatagaagccagatgatgttcgggtgaagagtcaataataatgtcctaatgttgtttaatggaggacgataagagcttgatgtttagccctgcctattaagcacgatattggtcaatgattgtccgattgtgataggataatattttaaaatattttctttgagtacgattatagcttgacggtgttcgatatgtgttcgatattacacatattcaatagttattttagcatttatgttttttattattgtattattttttttttttgaatgacaaggtcaactgtgtttgtattcttgatgtataatggtgtttctgagcgtgaggataaagattgacttttaatggagcaaaaaatttgacattggaaattgataagaacataagttactcacaactggtcgaacttttgtactcatagctggaggttgaaaaagtgcaatatgacttgaaatttgaagtgaattacaagtacatgaaagggttaatgtaattgcctgaagttataagtaatgataagtgtctaagtttatattgtcaatgctttcgaagaagccaaatgaatttgttctcctttttttgactttattgaagaataatgtaatataccagaaaatataatgatattttaattggacatatttttattaaatatgtgatttgagtggccattaaagtaggattataatcctacttaaactagttacaagttgattaggaaaatatgagtaaatgaataaataaagcgtaatttattaattacggaaattttattggactatgggggtatcgtggatactatttttaggataaaatattttcgagttcgatggtcatggaaaactcgacggagtggtcaaaaatatcacgataatttgagttgtgatacgatggatttttaccggactagttaaggaatttaagatactagtttattcggggaattagaaatgactaaaatacccgactaaagacccctaggattaattttaggctttaatgttttacgaagggtaaaatggtcttttttggtggggttaggatttttattttgtatggaattttctaggctgaggtttcattaaaattaagtttatattcagttaaataatattaggaaataagatgggataatgtaaaaaaataaggatcattgcatagcattttctctctccctcctcttctccttcgaagccttagaacccagctgaagctatggggttttctttcaaattcaccatttctagcaggattgataaggtttaaggattgttcaagcttggaggtaagatcaccttcttcttctctttaatttt

SEQ ID NO: 80335 - DNA, 2654 bp, Cannabis sativa
  modified_base (175)..(179): a, c, t, g, unknown or other
  modified_base (302)..(307): a, c, t, g, unknown or other
tggaaagaacatagcatttatccaagatgcaagcaaactatgttgtagattgtcatatcagttaaaccctctgcgtactgataaatttaggactatatatttaatcacataatcttcattactttccactgtgttgacgacacaataaataagaatataaatgtgaaaagggttnnnnngaatttataaatcaaatagacaagtaattgacaacatgaagcaaataacacacaaatgagtgaaaaatacttttgtttctttattgattatgaataatagagattacattgaaatggagtttnnnnnngggcataaaacccaacatgaaggccaagaaagaataagaagaagaagctgagaccaagaaagaggaagatccatccaagtctcctacgatgtaggcttggtttattaccctttttttatttatttaggaaaagggccttttggccgagacaatgatttttcccttacggcaattttttgtaaagacaaattttgcatctttggatggccaacattacttttatttatttcttttcatttatttcctcgcatccttatgtacaacttaatatgtttactgatttgcatttttattcacaacttaaacaattatattttgatcagacttaagatactttaagtatttccattgatcttgtttttcctttggacttgcttaagtagttattaatacactttatatgtatgcgactagctatattctgctatgctttttattcacgagcagttcttatcggttctacattgcgcgagcagttataatctgacctttataatttagtaagaaaacttaaacatactttgaataattccttttatgatttactttatatattttttgattttctacatgaatagttaggccttctattcatattttaggttaagtattactttttcaaggtatcttggtgcctcgtttataatacatgcctacataatgcgacctgttaggcattcagcctcgcatgtagcttaatgttgtttttatgagataaatctcaattacaactgcaacttcaattttcatttctaacgagaaaggtttaatttgtgattttacattgtcaatagacaatttaatcaattatttggaaaaaaaattaaagtggattgggtctgcaatatatcataaatttctagataaattccagttaaccatatacatatatatgcccctcaagtaattttaaagagaaaaactttgtaattacttgaataatacttcaactttattgataataaaaatttacatcacaaagagaaaatacatcaactacataagtttactaataataaggtcccaaatgttcaacattccaatggttctttattagtaagccattaagctgagccaatttatagacctcggttccaactattgcctcgatagcataaggaccttcctagtttcgtttaaatactcctaccgatgcatctgtcgtgtttgcaaattttttcctcaacaccaaatctccaacattaaagggccttttctacactctcttgttgaaatatctcgtatttagatgctgatatgttgtattagtaatttgtgacttagtatgtttttcttcaagtatatacgaggataacttcaggagttcttggctttcttcttgttatagaaatctcttctgtgggccgcaatattaacttctactaggagaatagcttttgagccaaatgccaacgagaatggagtgtgccctgttgctattttctaggtcgttctgtgagcccaaagtactttggtagttcatctacccatctaccttttgtagcgtccaacttctttctaatagtatccttcaaggtgttgaaactgaggagaagcacttaataattttgttcctttcatagaagtcagtgaacaatgcaccatcaaactgagttccattatcaggcactattttaatgggtattccaaatctgcaaattatgttctgacgaaaaaattgagaacctttttgcaaattatttaaactacaggttcagcctctgtccactttgtaaagaaatcgactgccaatactgcgtactttgtccctcctcgccctgtggccaatgccccaatcaaattgattccccatattgcaaacaggtacggcgaggtcatcattcttagttctattggtgttacgcgaggtatatgtgaaaatctctgacatttatcgcacctcttaacaaattcgtgtgtgtctttatttattgttggccaatagtatccctgtcaaattattttctttgacaagctttgccgacctgcttggtctccactaaagctttcgtgaatctctttgattatctcgcttgcttctgcgaggaggacaccccgtaggagaggcaatgaataacccctcctatacaatttgccttctactatcgtgtagtgaggtattgaatacaagatttttcgtgcctcatttttttcggttggaagttatccgttgagtagatagttaactatgcccgtcatccctgtaggcaaggcattgatcatctcaacttcttccttttcacatatacttggtgttgggtttcgtgccctaaataaaactcatttcaatattattagatttactaattaataaagatcagaaatcgcattttatgttgcatggtac

SEQ ID NO: 80336 - DNA, 4476 bp, Cannabis sativa
cttttgtagaaacatcccaatctggttcagaagtttattctccagaatttttagaatcagaatatcctaaacatctagcctctccatataaacgcagagatttcaaacctcaatcgaaattagaagtaaatgatgccagaattagtgaccatctaattaagtcgaaccaagaagagactgctagtcattataggcgactctgacaagaaatttctgagggcaagtgtcgtttcttgcgagatgtggcctggcctgaacccacaatattaactccactcgcaagaccaatgtttttacccaaagtcactgttgcttttggaccaggcgaccatgagtttgaaatcatgtgtcctaagcctcgcaaatcaaagaccccacaggttcccaatgttaccattaaggcagatattatcgagtctaaggttaggtctatgggggcctacatcggtggcatcctgaagtcctgcgacattaagcagcgaaaagggtgcattataaggtgtgtggaacctggggaattcagctgttttcccccagaaagagtaatatgcgaggagtgtagtggacccagcacgagtaactcctcgggcattggagcttggagcctcaaacatatccaggctagggcatcccttccgcttagggactactttaaggagcactgtaacaaccttggggttgtcccattccagctaaaccctatctcatacaagatccttacgagcctcaaggttttataccgtatcttaggctgagagtgcctcactcctttggagatagcctgcttttactctgtcaaagtaattcccgcgaggaagaacgctgcgcgaggcttctactatcttgggacttatactggtgatcgcaagatcatagttagattgctccaagacaaattttaaagaagactttttatggatgacgggcctatctccaataaatacaactacctttcgcattatgcgtaagttctcttcctcgtaaaacgaactgtaaaaacattaacttgtaatttttaaggttatttgctgaacttttatctatttacagcggttcctcggagaccagtccctaccccagagatagtcgagcatcacaaaaccctgctgagtctgccatatgggttgtgagttgtagatttcttgctaaaggagcagaacctgaagaacgttggcctccttgctttagacgaatatacttgcaattacaaaatacccaagtatacttcatggcaaaaggtccctgccccagacgaagaggaaagtgaagacttcgtggctcacgcaaaatatctcgagagagtctctcctcaggttgatggagcatcccgaggtaatcaatgtgggtggtcacccacagtgcatagggccgaacgtaataccttagtctcttttcgggatagtcggtataattttttcacttggaaacctctcctcatagatcgcatatcccataggttcgatagttggtaaccaaagtttcatgttcaaattagctgcactagctcattctatgggattgccgagcagtatggaaccatgtttgatagagcaggtcacatagattcaagctaggaattagatccactaaacctttatgacatatttatgatcataggatctagggagtttagtgaatattatagtcctcccttgtcatcctctgaagaatatggtaaccttcttaatgtgggagttcttccccattctcacttatttattttgtctaagtgttaatgaatttctcttgtctcgcagatatggatgtagacttggagaacatgttcaaaagtcctcccctagccgataaaaaattcaagaagagtgtcgcccaagccggtgaggcctcgagttctactaagaaacccaaaaggaccaagaccacgaccaacaagaagaaatccttgagccagcttaccattgaggctgctaagtcttccgagacaaggaatgaggtctctgctacagggattgaggtctctgttgtagggattgaggtctctgttgcagggattgaggtctttgatgtagggaatgtcgagggacaacctactaggtcggtgcaccaagtgaagttctttggttctcgttcagagatggttctccttgagccttcttgtcccctacccctaaaggttgggactgaagggtcacaacttagctcgcagcatgccaccaacatttggcgcaacctcttgacacttggatccagagattaggatcttgctattcgaggcagcactgaggacttggtctaaagaagttatgagcttctgcattaggtcaatttccttgccttcttgttcccactttccttattttttccttttttactaacttcagtttgtcctctcctcacaagctttttttcttgtccacgccacacatcatcagtcgtctcagtgggtcgaaatgctcgagagtgagcttcaccagattagggaacatagggatacatggccaaaaagtggaacgattctgaagcagaggtctcttgcacaaaggaggaagtaggaaagcagcatcaagacgaccaaaagagaatcaagctgatctcgataaaaataggttgatcatgaccaaaagcttaaggagtttgaagcttaaaccaaagagagggtcaacagtatcagtaggaggacaatttatcaaatttggttagccaaccctgagttggacttctgttgcttgggagacaaggctgatgccatgcttgctttttgtgagaagactcggagggaagaactaggcgaggaagaagaggttgaagcagaacaagaagatccaaccaagtcccctacaatttaggctcagttttttaggttttttattattattttatatattttagaaaatggacgtagggccaagacagtggtttgtctttgtggcatttttgtaaagacatatttgaaaagttggatcgccacctttgcttttattttgcctcgtattttgcatttgaattttaatatattttcctatttgtgtttttattcagaacttaaacaattatattttgatcaaatttaaaatactttaagcatttccactgctcatatttttctttgatattatttaagtagttggtaatctactatgtgtgcgagcagttattatctgctatgcttttaatttgcgagcagtttttgattctgtttcgccttaaacagttatagtatgttttaagcaaacttaaatatacttttaatggttcatcactttgtatatttttgattgctcgtattaagccacctattcatacattaggttaagtattttttcaaggcatcttggtgtctcgtttaatactttcctacgaagtgtgagccattattattcagctttgcatgtagtttaatgttttatttatgagttaagtctcatttacaacttctacttttaattttcctttcttatgggaaaggttccttaatcaatactttaattttttttaaagtggagtatgttatgtatttccagataaattgtggttaattatacataaattttaaaattaagtgggtttgcaatatattatcttgtatttccggatgaatttcgggtaatcatacacacacatatatatggccctcaagtaattataaagaatgaaactttgtaatttcttgaaaaattattcaactgtattaataactgaagttcaaaaatattacattagaaataaaagttacaacatcaaattactggtagtagggttgcaaatgttccacgttccaatagttctttattagcgagctattaagccgagctaatttataaactccagctcctacaattgcctcaatcacataaggaccctcccagtttaggttaaatactatgcagatgcatctctcgtgttcgcaaacactcgtcttagcaccaagtcaccaacgttgaagagtctcttcttcacattcttgttgaagtaccttgtcactcagtgttggtatgatccattagtaatttgcgacttaatacatttttcatcaagtagatcaaatgacaagacaattttattttaagagttcagttcttggttggtttccttcttgattataaaactcttgtctatgagtcgcgatatttacttcaactggcagcattgcctccgagccaaatactagcgagaatggaatatgtcccattattgtcttctaagttattctatgagcccaaagtacctgaggtagttcatcgacccatctacctttggcagcatctaacttctttttgattgtatccttcaaggttttattaacagcttctacttgcctgtttgcatgaggcctggaaactaatgagaagctcttaaaaatcttgttcctctcgcagaattcagtgaataaatcaccgtcaatttgagttctattatcggatactatcttcatgggaattccaaacctgtagacaatatttttgacattaaagtcgaggactttcttgcaggttatggaaactagaggttcaacct

SEQ ID NO: 80337 - DNA, 823 bp, Cannabis sativa
  modified_base (37)..(38): a, c, t, g, unknown or other
aatatgatatataatctaattcaatacaatacaatannatacgacctaatacgacattccaaaccagcccttattgtacaatctaatcctattaggtatataataatataggatgtgggttggttttgggttcattgggttgagatgaataatttaagctttaatatttatgttacaaacatgataaaatgtgtgtatcattgtatgtaaatattgtgctttaaaaaaaatttagtggtggtggtatcattgtgtgggtagcaaatttaatcctcacgttaaacttattggtaaaagtagtaaggtaattatagactacgtgttggtgatgtattttggttagtttactttctaaagttgtcataattaaagacaaaaattggacggttaatgtacaggaaatgcaattcccacctcatccccgctacctatttatgtccaccatccccgccccattcatgtctaataaccagtagattcaaggtaagaaaatacccatcgattatgaagaacccatcgggtatcaattaaggcaaaatggaaagaaaataatttaaaataattgaaaaaaaaactttcaaatttaaattaaactaatattctcacaaatatttattatgctttcataatccgtagaagataaaagataaaactgcctcaaagttaaagaaaaaaaaaaagcataacccaatagaaaataaaaaaatagatcagtctcaaaattaaaaaaaaaaaaaatcataactatcacaatcatatatctctcaagtctcccaacaaattaaaaagtaaacaaagatgaaattaagaatcgagaagaaaa

SEQ ID NO: 80338 - DNA, 4300 bp, Cannabis sativa
tccctaacctggaactcaatatccatacgctttggatcagtgtagttattctgtctactctgtgaggcaagcacataagcttgaatcttctcaatggcctcactagttctttgcactgctttgggtccaagatatcttcattcgctggcttcatctcaatgaataggtgaacgatactttctcccatataaaatttcatacggtgccataccgatagtactcttgttatatgaaaactcgatgaaaggaaggtacttgttttaggaaccttccaagtccaatacacatgcatgtagcatatcctcaagtattttgaatagtcctttaagactgaccatcatcctgagaatgaaaagatgtactaaactttaatttagtacccatagcttgctgtaaattctcccaaaacttggatgtaaactttagatctcgatcgaagatgatcaattttggagcaccatgaagctgaattatctccttaacatatagatcaacgtacttatctactgtatacatagttcgcactggtaaaaagtgcgctgactttctatatcgatctactattacccagttagaatcatagaatcctgttgtccttagttacccaaccacaaagtccatggttatatcctcccattttcactcaggaatctttagaggttgaaataatctcgctggtctctgatgttctactttaacttgttgacaagttatatattttgacacgtattccactatatcaccctttataccttgccactagtacagtgctttcacatcttgatacattttagttgttcttgggtgtaatgaatattgtgtagtatgagactcatctagaatctcttgtttgataccattgtcgattagaacagaaatcctatttttatgccacaataacccatctaatgagattgaaaaatcctttgctgatccagcctcaaacttttgtttgtactcttttaacactggatcagtttgttgggttgtcttgattctctctagcaaatcagactgtaacttaatgttggctaatttcccaattacaaactcgattcttgctttagtcatatcctcagccaattctagtgagatcttcttcagttcataaacttgccccagacctttttcgacttagagcattttctaccacatttgctttcccaagatggtaaagcatctcccagtcatatttcttaaccaattccaccaatcattgttgcctcatatttaagtccttcgaagtaaaaacgtatttgaggcttttgtgaggcaaaatatatttatattcgtcggcataaacccctttcttaatcgttcattgtcatcaacttttttgatggggtacctcaccagaaaaagttcatccgcgattctagttagcttttgttggcacaaaatcccgttgacaaaactcaattttcatgactggatgagaccgagagctagaagcaaattctcgatgaggaccacatgacatggagttatttcttgggatataatatgtgtgtgatggccgaaagaggaatagttgagggaaaagcggcgataacggtggattctggaggccatagaagacagtgacagacgagatccttataaaaagaagattgactactaaggaagtgaaagagaacaagaggagacaagagaaacttataaaaatatagtattttaaaatttttttataaaacaaaatatggtaaattaacccataataatgaaaagattgttaaaagtcgataacttaacaaattaaaaataggataatatgcatcaagatcattttcatatcttatttttaataatgacattgaatatctaaatcacaatatttattgtttataacttctgtgtattaattttttcttttttatttaatattattattattattactattattattatttttattaagaaagaagaattttattaatcacaagcacaatacaaaccaaagtcaaaataggccaaaccaaaacttacaaagagcaaattgtcatcaagaaattcctatcactttttttcatctttatttgtaaaatactataaattctataacaaatctcgtttttaacttatctataatatggttcacactatgagtaaaattctcaaaaatacaagtgtttctattggtccaaacatggtagaccactgctgctaaaatagcagcagcaacctcatttttcactccttttttttcaaaccttcaaaccacctgatccagggtttaaacaactgaggccaactgctcttgcaccacatgtggactctctgtaaaacatgctgagaatatgatcagcaaaaaaagagcttcatgtgatcttctgttgaatcacagaccggacacaaaaagctattaagttgtatgttgatcctttgaaactgatctcgagtgagaagcttagcattaacaacctaccataagataaaatgatgttttggcactaattctattccaaacaaagtatgataattcactttctcaagtttaataaagcttttgtacaacttagatgcattaaactttccaaggtagcttgcatcaataatcttttgttgagaaaaaattcttctaatatggcacaacttacaccaataccaactagcatcagctttaagttgatacccccaaaaatcttggccctttaagtaaatattatgaatccatttaacccaaagcaattcttgatgtatggtaatttcctaaacatacttggcaatcataactttatttcacttagctcccttgaaaaaatccaacccaccataggctttaggtaagcgaacatcatcctaagaagtcatgtgaaatttactcttcaagccattatttccccacaagaaccacttgaacaacttatctatctctttcacaatacttctagaataagaaaatactcatccaaaagtttctcaatcctaaaagaatggaattaataatttgagatctacctgcatatgaaagatggagactagcctatgtgtgcagcctcatcttaatcttcttgatgattataccacagtcctctgtcttccatttagtaggtctcaagggaactccaaagtattttaggggaaattaaccctctttaatttgaagggtttgaattaacttctctctatcataattagttacccctccaaaaagcacttgacacttgctttgattagcctcgagccttgtactgctacaaaactcatcaaaaataaccttcacacacttaacagactcaacattagctttgcaaaaaattatgagatcatctgcgaagcacgaattgataatcttgaggcctttgcacattggatgaaatttgaaattactctatctagtaccaacttgaaccaagggagtgaggtattgaataactagaacaaataacaccggagagataggatctccttaccttagccctttttctccgtgaaaacttctctggaatttaccattcatcaatagagagtatgtggttcccttgagacaggtcataatccacttgatgaactgagaggggaaatgaagactagcaagaagcctttcaagaaaattctagtcaaatgtgtcataagctttactcagatcaatcttcaaagcacatctcagggaagtattctttctattgtagttcttaatcaagtcctggaaaatcacaatattgtgagcgagtgacctattctgaataaaggtctctacttttaattaatgaagaaggacaaaacctcaacaagttgactaaaaatcattttggaaatacatttgtagagggtgttacaacaaggtatggggtctaaaatcaacagccccagaaggggtatcaatcttaggcaccaaagccagagtagtttcattcagatcattaggaatcaaaacctatttcaaagaagctcgaaactgcttctgagatttctttgccaatgtccttccacatagctttgaagaactccgaactataaccatctgaaccaggacttttggtactcaaaatgctaaaaggatacttcttgacatcctctgaattgaattttctaataagtttcacctgcttatcaaggtcaaggcagggtcacaatttaatgcaatggatgttaatcggctttgtgctcatactagcacttcccataaagcttctgaaatgatcaataaaatgcttcattaatttatcatactccttaacaagcttcccctaatcatcaatgtaagacataattatattctcttctctcctttttttaatgcaagcatgaaagtaagcattatttttatcactttttgtaaccaggtgatcttgct

SEQ ID NO: 80339 - DNA, 1032 bp, Cannabis sativa
tacataataaaaagaacatatcataaagaacatatcatgatgcaattacttagtaaagtaattccaaccccatcattgaaaattggattctttccatttttccacttcttgtcaatggcattgaacttaggtcaccacaatgggaacattgagaagcacattggttacacctagtctttctgcggcaacctcctctttggaaattgaatgatccaagaaccccagtgtactgtaacaaaagcaagaaaataaaaataaaaaataactattagtaaaagaatcccatattagatagaaattgggttttagttaattttagttatcatcaattaactaattaccttgttgaggttccaaattttgagcatagttttgtcatcgtgaagaggatcctcaaagagagagtcacgagtggggagagcatagtagttacacttgagaatggagccattgggcaaaacaagcttcttaagataatcaaattagtcattacgaatttattaagaacatttaaaaccaataacacaaacaaatgtcatatttagcgaaagagaaaatcaggtcatacatctgttatagacaaatttcctagcccacttggcccaaacccttccttgatcttctctgataaattcgggctattatcttgatttaatcaagaaatcctaataacaagaagcaagtgcagacgtaatgaatacattatataggatcaaatttgggatataactaaattaatttttgcatttgaatttttattgggaaccaaacatagaaaacaggaatgaattgataaattacttgaggcaagagtatgaaatggtgacgataagaatgggttaaccgctttactttgaaaacgttaaaataaataaataacacctttaaaccaagcattctgttacatacctacattaatagatataaagcattttaataaactgttatttttgaatagaaaacttttttttaaaaaaaaatcagttcaaatatcaattcaaatattagtgggatttgttttattattatttt

SEQ ID NO: 80340 - DNA, 1063 bp, Cannabis sativa
ggaggatagagccaagaccatcaatggcagctagacaattcacaatcatggtgggaaatcacaacagagtaaattaccccctacaaatctgggatcctcttccaatcatccaattattgtgagggatgacaaaactaaaatggtggcaaattctttaccactaacgaagacaagtaatgttgtagttgaccatgctttgatggaggatatgaatgctggagatatagtcatgaaaccaaatgctatcaataaggaaactagtattcttgttttagatactaaaaggagaaggactgatattgttgatggtagtgggcctgggctagataataatggggatcaaaataaaaatgttgctgaggaagttagtgaggtcacgactactaataaggaaggtaatactgatggttatgatgttaatgggccagcgcaaaatcaatgagatgaaatggatacagatattttgaaaaatgggggttctgtttcacaggcccgcggagggttatgaatgttttgagttggaattgccatgggcttgcgaaccaacgggctattcaattccttaaagagattgtttctcaaaagaatctcaatttctttttttttatgtgaaactaaatgtaataaaaagaaaattgaaagtgtgggccgaatgttgaaatttgaaggggtgtttggtgttaaggcccaagggagttcgggtggtttagcttttctttggagaaaccaggatgatgggcgtgtgctgggtttttcgaacaaccatattgagtttttggtggagtcatctgagaaaggggcatggaaactgactagtttttatggtgaaccaaatcgaaataataggcatcattcatggactctgctttgaacattggctgctggttctactctcccatggtgtgtaataggggacttgaataacattgtgcgacatgaagacaagcgtggtggaataccatatcccagagacttattgatggattccaacatgctttaaacaaatgcaatttatgtgatttggagttattgggtcattcgttcacttgggagaaagggaggg

SEQ ID NO: 80341 - DNA, 677 bp, Cannabis sativa
gtggctttaaataaatacatagcagctaagttaaacttctgaaactgggcttatagtaccaatgttcactcccacggctttcttttgattcataaaccagcatccttaaatccaaaaagtcagatttctgaaatggacattcattgaatcgaatgccgagtataacaaaaacaaaaaaaaaaaaaaaacaagttatcatgcaaggtactattcactctaattttgtttaaagatatcaattattatccaaaggggaaaaaacaaatctgagcgacattaattatcctaattatgacatgaatatagaaattgtaatacacttttagtgatgtataatttggtggtgcaaatagtattaccaaaaatgcagccagaatcaagtaaaggaactaattccctggccatcagatcttcggtcgtcaagacaagcatgtatattatttcttacaagcaactttgggcccaactcatctcattatatgccttgcattcggttagttggccacagatctgtagtactccatagtccaaatgtacactaaacttgtctccatctttggttatttggccattttctcatcaccctcatcgattttctgttcttcaatgttttccttggtaactgtttcctgattagcttcactggttccctcttcatttgctgtttcagttggagg

SEQ ID NO: 80342 - DNA, 2119 bp, Cannabis sativa
  modified_base (51)..(51): a, c, t, g, unknown or other
caaacatattaccaccactagcaccaccaccatcaacctcaacaaaaccanaactgcccaccaccaccacctcaacattttttttcaaatccaaacacaattaaagaaacccaaacactaaatacttgtcacaatctaagatccaaatttcaccaaaacaaacaaacccaaatcaaatccataataaaaaatctcaaatccaaagaaaaaaaaaagaagagaaaatctagagatatggaaggtgagaaagagagattttactcaacgccgaggccatcgtcggagaaccactgtcgaaccaccatgcgcggtgttgcctaggtttgacagtgataaaatgaatagtgaaccgtgggatcaagaagcccattccaaggaggacacgcatctaaaccctatttatcaagaggaggttgagaagccactaaatcagagtcgaatatctcggactccatggatttcggtgaacactaaatttcgattttaatgatcttcaagctcgacctttagaggggttttgttctccaagagctcctgagctcaaccatattgcttaccgttaaaaatagtgccacaataatgtcgaaaaattgattgaaggatttcacaaccgcgattttgactgggcagatctcctccttagcatctcgtgttaggtagggcttgcgagggtggaggtgtcatctaagtccgctagtgtgtgttaccggcgtgagaagagacgagagacagagagagagagaggttgccgacaaaggggaagagaagttgtaaaggttggggtgaatgagagtgaaagattgaagggagaaagatggtttaggaaattaggttttttttatgttgatattattttatttttattaattaattttttggttttttttatttttttttttgaatgatttatttttagttttaaattaatttatttttatattttttaataaataattatatagaccaataaaattacgtgtaaattatgtacacgtggacaatctaacatgtcacttaatagatgaaattggatggaaaagctcaattactaacaaagcacgagttttgtgggttttatcgccaaaaaaatgagttttgaaagttaattgctagaaaagtaaaagtattaaaggttttactacaattaaccttattttttttaataaaatattcatgaatattttattaatgttagaatgtcaatcaaaaatctaaatacttacataaagtccggtaacccggacaattaaactcttatctcatcatgtgataatgcaagtttagcaaaattatgagcaatatgattcgaaaaacgatcacaaaacataaacttaaccaaggataaaatatgatgaagcaccaaatcaagttcaacttaacaaaattctattttacaaagtaagagagctttataatcagtctcaacttccacctcattgccctaaatctcatctttctattttccacactaaaccaaggtcaaagtaaacatttccatttcaatattttgttgtttggagtttggttcattagttattattaatgcagtataatttctctttattattacaatattttaaaaaagttatatgtattttcaatttttgaaaaaaattaattattttcaatttttatgagttataatttaatattcacttcttttgtttaaatttttaattgtacgatatgggattcgatctcagctactccacataggcaccctccagttgatttacttcatgcatattacaatttggaaggagaaacccaacctaaaactaaactattttgtttaaaaggtaaaattataataaattgattctaatttctaagtgcagtggagtaacattttcatttcgataattatcccaattctcattttaattttgatagctttgagttttgtgtttgaagatgtgaatgtgataaatgagcttagatagagcaacaataagtggacatatgttcttcaagagctttgagtaagaatgctcgttgtacgagctgtatcgagatgaaaatgttctcgactttaccctcgtcgggttgaatgtgttcttcctcttcgagcgccttcgcccttctgggttggttagattgctcagctaagacatttaga

SEQ ID NO: 80343 - DNA, 1460 bp, Cannabis sativa
tgtggaaatataaggaaagatgaaatcaatctgtgtttatttgaattttgattgtgatggttcaatgttttatactttggtaaattggattttgcaagtcaaagtttgtaaatgctttgaaaaaaatatcaggtttgatcaaatttgaacactttgttctttttacccaaattactttctttttttatgtgcaaattattttccatcgactaaatgatatttgaaatattattgcacaagtgtaattaaggaactaagaccaattttagacttagtgcatatggaaagtcattatgatttcatcagagcattgtgcatcactggtacccagcactaaaagtcataaaatttatactgtgagatctgttttggtgtgtagtgctgaccattggtaatgctctttagtgtttttcttatttcatgggcaacaaagtatcgttaataaattatttcattagagatttaatcagttctagtggtggaatgagtgtacgcaaaatggttgggaactaattttttgttatgataaatggtaattagaagtaagatgtaaatgtcattaagcatgacctagttaattgaaggtcatcaagtttagaaagagtatttatataacaagtgttgcattggggaagttcagaatgttatggattcactttgtattatggagaacaaattacagaaaatgttttgttttttttataatatggtttggtatttttttttcaatatatagaagaatgaataaaaaaataaattagtgaatggtgtaaattttatgggctcgagtcttttactctggctaagttgatcaatctggcttcatggggtttgattttattttatgtgtcctaggtaattttttcgtgtaaatttggtgatgtgaaatggcacaagagttaaattttattaatttttcttagataataagagttcaatcatactgggaatttgacaattttgatattaaatttggttagaaatggtggttgtaggttgtagtgccatttgccacgagtttttatttggctgttcatggtgggtggtggctagttaaggcaattcttgtttagaagtttcagtggccatgaaggcgatgacactgcccatattactagtctctaagttggcgatcctgacattgaccgtggttctacgtttcacactgttacatgtcgacgagccttttgttattagtcacaattagcctccacattcctcattattttctgttggtttttgggatagttttgtcagtaaaaactaaaaagaccaaaattgaggcaatacgtaattttttttttcttttttattttcttttctctttaaaaacttaggaattttattggaccaagatagtgttcttaaatctaacaattaagttaataaatgttcatttttattaaaaattaacaaaatgtcaattttattaaaagtgatgatgaaattacaattataat

SEQ ID NO: 80344 - DNA, 863 bp, Cannabis sativa
cattcaccttatcctaaattctaatatgtatcatgtcatttgtgatccgtgtgtcatactccaatgtggattttgagcatttttaatttttaaagtcgttttattgatttttatgaacagttatctgaagtgaaatttgaatgttgtgacataattcaaattggtaacctattactaataaatccttctactttagaatatgcatgtattatcccatccacaatgtagaagctctaataaaactacaataaagcttcatgataatactatggatcgtctttaagctcaacaaagttcataaattatcattgtaagtagtatcaaagaataaaaaaaattaaaaatgagtatacaaattactttattttctcttctgtgactctgtcactgagcaacaaactcttaactgtatacacttcagtgtcctaaaaactactgacaaaatcatcattgagcaacaaacattagggaaagcacaaaatccccatgttttcacccaatatgaacatggtgtttcaatggaggacttgccttagcaagcatatccattaatagattataagaagctatgtcaggaataaaacccctatccaacatctcatccaccaccttttcaccttcctttattttcttttctcttgtgtacccaaataccaaaatattataggctgtacaatctggatccaagcctttgctggtagccaacaatcttaacttgtcagcttcaacagttcttcccatgttgcagagatcttgaagaagacaattaaaagtcaatctatccggaaccgcaccctcgtttagcatcttttccatcaatctgaaagcttcatcggatcttgttgcctttcttaaaccgtcta

SEQ ID NO: 80345 - DNA, 1273 bp, Cannabis sativa
aaaaaaaaaaaaaaaactgctacttgtacagtgttaacaggactctcactatattaatttttttgtgcaaacttaaataaataaaattaaatgatgcggcataattatattagttagacataccatgggataccaaacttatacaggagaacttgattttttatcgtagtgttaaacaccactcagtgatttctcaatagacatctaatgatttgcatgtgtaatcaacatttatgtcaattattcaagtattttgcatgtcctcatatagaggttcataaacacattttatttttttcaataaaaaaattcaatttattgtaggtgtagctctttgaagaaaccacttagttgtttagcattatactaatcatatgatttaataaaaaaagaaatgaaggaaagaaagaaagaaagaaaggggggcctattgcctatataagaagatgggttgtcgagtgttcacctaattaagacaaacacaatagttaacaaaaggactatacttctgactctgcctcaatggattgggattgaaaaataaaaatcttaattttggtggatataaatatatagttttatattgtagctgttttcttttcttacaataaatttggtctactctcttctcttgaaataatcaatcaataaattttaaatgctggcagctgtttttttttctttctttcctttttgaatgtcaagccaaaaccaatgacagtatgcaaactttgaacataatttagaaagtacacttaaatatttgacaaggatacttggttaccgacctcttcatgcaaatcaccttttgattatttttttccttttgtagtttagttcactactttttgagtagttagccattaccgagttaagttgagttaatggtattatgttgcacataagggctcgtttgattagttgtataagagtcgtattgtattaaataataaataatactatgtttgaataaagtaatatattgtattaattattacgaacaaatggtccgtattagcttgtattatagtatttacaaaaattttggggtcaacaccaatctttgacccaaaccaggacccgaacccagactcagatcgggatctgggactcggacctggaccgggacctggacccagacttggacccgacacccgaacctagacccggactaggaccctagactcgaacccgtacccgtacctggacccaaacccggacttggactcggactcggacccgaacccagacccggacctgaacctaatcccaa

SEQ ID NO: 80346 - DNA, 780 bp, Cannabis sativa
aaacattataagtctaactttttggcacatattgaaatttctaatcttttatttttacactgtgaggcggaatttttttcaaaaatattgtgtaagttttattctgtgtactgtgttaagtttttactactgttctacggttgttttttagttgttccactgttatttttagttgttatgttttatattttactgttgttttataaaaatatagtatttttaaaaagatttccatgtaatgaaattttaatatttttgtaaatttcgcttataattttcagagccgacccaattgcgtcatttttttttcttaaaccatgcaaaaagaaaaattgtttttgttgtagtgtggttggtctacttgtgttctccattaatacaagacaaattaagaatagtatagttatggtaactactttatctcgaataaatatcgagcttcacttgtgttccacttccaccacaatcaaatcgatcggtttttcaatcttgatccagctttttcaatagggtttttgagtatcaaattatctaagtatcgcattcaaactctttggattatatataagtagaatatttataagtaaattaatcgtttttttatttatataatgaaaagggttgtaagtgtagatataatataaaagcatatgtagagtgttataaacgttgtatatatattttgtagtcaataagctcataaaattaaactagtgtataatgtgatttaaatttgatatatgttaaaagttgtgctaataaaatttagcattaatcaaa

SEQ ID NO: 80347 - DNA, 1446 bp, Cannabis sativa
ccgaaaacctcggtcaacatatttttataatttttattatgaaattctcataatattctaccattaattttaataatttttattacttacatttatcatcaaattattctttaatagagcaatgatctggtttcaaagatgaattttaatgacagtttggttttgctatctacccttaaaaccaccactgaaatggaacaattattatgtaccatgtggtttttatggaccgatcggaataattttatacatggcaaaccagtcctttctccatctcagctttgggccaaatctgtagcttatttttccaactatcagcaacatgcttcttcccataattcaattaaagtctctactggtgcagcaactatttctaaatggaaacgtcctccttctcatgaattaaaaatgaacatagatgtagcttatgatgtctcgtaacaagattggtgttggcattattgttcgcaattcatcgggtcaagttattactgcctactctaaatctctcactggtaggtacaatccacaagaaatggaggctaaggcattactaacaggattagattgggctgcctcacacaatcggtctatcaagtattttgaatctgattctctggtgttagttaatgctattaatagtcaatttgctactatttcctattttggtgatttaattttggatattaaacattgtttatcctatctctcctctgtttgtgtatctcatgttaagagagatgcaaaccaagctgctcatggcttggctaaacaagcattggtgttggataatgattgtatgtggttcgaggaaattctctctgtcatcttctctgttgttgtaaatgactctttctaatttataataacagtctttttctcaaaaaaaaaataaataaaggacatattaaattatttaaaaatatgtcattattaatatttggctcactgggaaaaaaatagttttaatctatattttttttaatgcaaaacaaaaaaaataactgtttcaaaaaaaaaacaaattttttttatttaattactataaataatttaatgcaataaacaatttttttgttgttgtactatgaattagctttactaatcccaatttatatacattatataattaaaaaaattaaagaaaaatatattttaaattccattcagaattaactaaaaatctaatttattttaatataattttttcttttaaaaaaaatgattaaaccgcgcgaagtgcaacgcattccctaattaaaagataatagaatcttaagtaagcacgatatatatatatatatatatatatatatatatatgttgattgttatatataattgtttgagtatatggggtacaatcttattttactcagatttggtgttaaggcttttactaaaagtaccacatgtactgatcaaccaaggcgatgagtgtgacagt

SEQ ID NO: 80348 - DNA, 2257 bp, Cannabis sativa
  modified_base (2070)..(2071): a, c, t, g, unknown or other
aggttctctaaaatgtcacaaaaattgatggcagggtctttgggattgatgtcggaatcccaaagtagtgctaataggcaggtaatctaacaagtggcgttggccatagcctgatattctacttttgatgatgaacgagagacggtagattgctttttagatttccaagagattaatgatctgccaaggaagacacagtagctggaaatagaccttctagggtcactacatgaagcccaatcggcatctgaaaagattttaagatgaaaatctgcattggacatgttagtttcagcataagcgcacaagttagtggaagatgttaaatgaaaaaatttggccaaaagtgcctttaagatattgtaaaattctatgaggtgtaataagatgaagagctctaggattagataagaactgacttaatttatttacagcaaatgaaatatcaaggcgtgtaatggttaagtaaatcggtttaccaatgattctacgatagactttcgaattttccaatggttccccaacattggatgaaagtctaatgttaggttccatgggtgtacgaacaataaaagctcctaagcaacttgtttaagtcaaaagttgtagggtgaatggtcgttgagacacaaaaatgccatttgaggaacgaccaatctccaaacttaaaaataattgtaaaggaccaaggtccttaagctgaaagactgaattaaattgttgttcaaaaaagtaatagcaacatcattattagaagtaaccaaaatgtcattaacatatattaaaagggcaacaaaacaatattatgatttttaatgaacaaggtgttatatgaagtgattgcgtgaacccaataaaaaaaggtagttgttgagttttgtgaactgttttaagccatagctacttttggttaatttacatatagctttcagagtaatatttcccttaggtttatatcctttggaaagcgtcatatagataatttcatttaaattgccatgaataaaggcgttgttaatattaagttggtacaaagactaatttttgatggctgcaatagcaagcaataattttaaggtattaaactttgcaacaggaataaaggtgtgaaagtaatcaataccttatttttgatcgtattctttggcaaccaatcatgctttggcaaccaaaaactttaaggtggtaggggctttgttataaagaacttcaaaagaagtcttttcataagtaatttagatggagtgcgatttattagataaacaacagtattaatagcataactccaataaggtaaagataaatgagattgaaacaataaagttctatcgacatttaagatgtgttgatgtttgcgtttaacaactaagttttgttgaggatgaccaacacaagaatgatagcttatgataccttttgttgcatagaaggccgttaagttcggttattttgcattgtcgtagtgaacaactttgatggagactgaaaattgagttgcaataagagaaatcagttgttgactaaatctgatgtttcatttatcattccctaagtatagcgagaaaatcatcaacaatggttaaaaaatatctatctataaccttcaacacttatagtatgaaaaagaccccatacattaaaatgtattaaatcaaaagtaaaagtagcaaacttactgttagaaataaaggaaagtcgctttcattaataaaatgacatatagaacacataaaatttaaaggtttctcacaaatttgcaaacgattatttaagatagcagaaattttcttagaaagatgaccaatgcaaaaatttcatgggtccttcaaattacatgtagtttttgaaaaaacaaaaaaaaaaagccgatgtgaggaagttctgatcttgttaaagaaaaaatagttatccaactttcttagcagccccaattgtgaaaatcagggagggatcctgaattaaacattgatcagatgtaaaagtgaatttattagcacaatgttcgagataggcattaatagaaaataagttgaacttgaattctgaaattaagggtgttcgcggtgcggnnggtgcggtttttgaccatttttttcaaaacaacccgcatatgctgtttttccaatttcccaaaccgcacccgcactgcaaaactaaaaaattgcgaaaactgcaccgcaaaaatggtgtggtgcgatgcggtttttacagtttttgtggtttggactatcactaataaactatcacaaatacaaca

SEQ ID NO: 80349 - DNA, 2998 bp, Cannabis sativa
  modified_base (842)..(849): a, c, t, g, unknown or other
tttaataactttgcatttaggagaaaattttttgggtaatgtaagcatattaattcaaatttcccttttaaaattacttattaaacaatattatttttattgagtaaattatagccaaatcccctaaagtttcactacacttgtaattattccccaaaattgattttttgactgtaaaacattctaaatatgtgttattttagcaatttatcatttatatccaattctaattgttaagtgacatgttagattgtccacgtataaactcatttatacattgcaaatttatattagtccaagccatttaaatatttagaaactttattaaaaatttaaaaaattaatttaaactaaaaaatataaaaactaatttaaaatttaaaattatttagtattaaaaaatatatttaaaaatttaaagatatataattaaaaataaaaatttgttataaaattcaaagaatcaaagaaatattaaaatattaatttttttttttctttttcttcattcttcatcttcttataattaaagatgactagattcttagactccagatccttaatataaaatacaacattattaaagtttgactaaaaacaagaatgttcataaagtgcgttttagaaaaattatcaatacatggtgatgaaaaattgagaagcaaaaatatgaaaattaaagcttgaccggtgatatatataggttcgactatatagaataaaagggagagtgtatacttgagagatactttaattttggttaagagtaaatagcgaaataagtacctaaaattttaagtttatatgtggtataatctaaatatttatttttagcggcatannnnnnnnatgtttgtaaaactgtaattttattctaatttcgtcagtacaagttctatattttcttaaacagaccacatgtaaggttcagattcttgatcattggatctaaacagaaatatgtagtatcagttacttccaaatgttcctttaataaattcaaacggagtctgtactacaaaactggaagaaaattacagttttactagcattgggtacttatgccgctaaaaataaacattaggtttatgacacttacaaacttaaaactttaagtacttatgccacaatgaatgttttttttttaaaaaatttcaggttggcctgatagaaatgttcagtcctactaaaaactaaagtgtctctactaataatgtaaaaagtggtgtacctatcgtagaaggttcccgatttataatatacttgtaatttctttaccaggatatttatattttactgattaagattaacaaaatcatcacctgaaaaatctcaaaaaattaaaatttgaaaaattataaagaacacaaataaaatctcatttcatcaaattaaattatccaatgcagaataaaattcaaatccaaatctggaatccaggagaaaatactccaattattaaagaaacaaacccacaatctcaataacttttaatctagaaattaccacaaaaaatgtccataatttattttaataagtctcaaagaaaattaatgacattctcagtcataaaaaaacttattatctctagagatcaaatcttcccattcaaaaccgttgagtttgagaggctcgattagatcctatggcagcgacgagatcctccaataccctgaatctgatagaaaaagaaaaaaataatttaataaatgttttttttttctaaagaaccattataaattatcatataataattagctttaaaatatttttttaaaaaaaaatacctatgattggaggagagcttgtggttattgtaacattagaaattttggaaaaataaatttgcagcaactttgccctttcttcataaccttcaaaattatcgtcaacttcaactcttgccaaattatgttgccaacatttcacaaaatattcaacacaacactcttgtgttattccaccttcttcttcttccatttcattagagtgatacagctacacattaattattcaatttaaactttcattaactaattgcaatcatatacacaatttattaagagctaaacaacatttttatgtgagcataaataaattgcgcgcatttggtgcactattgaagaacattcttagttgcggtcaaactatctcaagtgattttgaactatcaaatatgttcttaatcataatctagtctaataaataaggaattattagttgattttgaatagaaaaatataaatcacaccaacaactttaatattttgttagaaacttaggataaaacttatcaaagtcctataaagaattttaaatggacaaaataatttagaaagcatgatttgctaatgataataatttaggacaaaaattttaaataacttaaaattaaatatagaaaaaatgtaagtaaataattggcgaattttgtgtacataccttcaatacaaatgttggtgattttactttattagtggcgataaatatagtgtctagggaaggagcaagccaaaacaaatacttgatcaattgcataatgttggccaatttagtttccttcaagaactttattttcagatgcttaaggtcacacaagggagaaagtaaaccttctcttgcttccttaggaaaaataaaatcctgtaaattattatgaatgttatcacaaaatcacatacatagggtaaatttctatagatgaataaaatgatagtaaagaatgaatatatatacctcttcatgagaacaaacgagagtcaaagttttgcaatgaccaaaatagcttagaaagttcctcatgttttggtagtagtcaagagtattattataatcaccatgaacagaaatctgagcatcaagattaatggatggtaccacaactgtagatggcaaaggtccactataattgaaccacaatagatttggggcatcaatctccacacaagacacattctcacaatcgatcaactccacaaatttcaaatgttgtttgcta

SEQ ID NO: 80350 - DNA, 3013 bp, Cannabis sativa
gaccctgctgttccacacgagcagctgtccactgttgcagcgtggatcgggcagagagaaccacaccagcagccgtcctgtgtttgctcttccaaaaggcatagtaattttcactattagttattataaaaatgcactaataacactttgatacgtatgcaccacaagatgccccttttgatcatttgtatatattcacagctctgactttgaaggattaatgtatgtattcaaacaaaacaaaaaaaaacaagaatatgcagctcaccacaactcaaatcagtacaatccaagaagatccaaaagccaatcaatgaggccaagccaactttgaacagcttgaaaacaagcatttaaagaataagtgttgcatgcttgccacactatgttcgtgttatgcatattaacatgtttaattctaatccgatttatatataatatttatatatatatatatattgtgtcaagaaatcttaactcgtgttctcgtgtgtacttatcgtattcgcgtgtcgactatgcttatattacaaaacaagctaatcaacataattagtattatcacatatttagttttatgtaattaatcacaaattatcaatacaataaataatttttttgcatcaagtataaattatctattttatatttttgcaatttttttctaatttatatattttttatgaaaataaataataattttactataaattaataattttaataatatattatataaacaaattaattcgtgtcgattccatgttacatgtgttacctttaactcaccccaaataataatagtgtcattcaggttcggcccaattccaacccacatttcataaccttaaccataataatttgtatcgagttcattctgtgttgcggtgtcatgaattgccacacttacttaaatctccctaacaagcctggctattcatttactttattttttacaattttgtggttgactgtgaagatggagtgatttgaagcaattttattataacaatatgttctagattatttttctaaataattattaaagtgctcttgaaggaaaccaaaaaacattggcataattttgtgagtatctgtatggataatggatcaagatatattatattatacaatatagtttatatatattatatgattaataatttaatatcatgacagctcaatcaaataataatttttcaaacacaaaaaaaaagacatctttaattgattgaggcttttttctttccaacccataaataatccaatcttaaaagacaccacatttttccagccactcctacctaaatcaactattatttttaattattatttgtttaatttaataataataataattataatatccacataattatcgtgcaagttaatgattaatatgaattataagatatatataatccagcatgcattacatttcttcacgttaaggaaaaaatgaaaagaaaaaaacttgttaattaatggctgcaattaaagttttccttattaatataaatacatttttcttctcttcttattgattaatatttttatttaaagaatgttgtttggtaaaatcatgaatttatacattggattgattataatgtattataatattatctttttttttttttttttatggaatataagattatttctaacacacaacttgtgtatatgttatgttatccattcttacaataattttgacaataatatgttttaattccatataacaacaatttcttcattttttttttcttattttcataatggtttttacaaattttaaactggacaaaagtttcttcataattatttggttaattggatgaggataatattagacactaataactaatattgtgtcactttaaattaatatccttaatcatttgttatatgaggataaaagaattaaaattaatattatattgtcaaaatttaaactatatttattttaaatttttgtaaaaaaaaggcattttcaaattttactctaaacctctcaatactaatagatatatgacataagtgatatcttttatcattttatttttttaatgcatgactagctaatttgggcattatgtgttaattaagaaaaatatttagagacactataacttagcaatcgttttattactattaattaatgtaatttaacattagattctatttattttacttttgagctaagcaccataccaatactccttacttgcttataaattataaagaataaaacgaaaattaataataaattttaaaaattaatttaaaggttttttttttcttttaaaatttaagttgctttttttattttattttttttctttattctatatataactcccctagaatttagtcattcacgttataaaagctgtactgtagttatataaaagcttttgaggaaaataaggaaaagttatgactttgcaggtaaagttagtgttgaatttaacccaatctcatagtacacacaactaatgttattttttttttatttacaaaaaaaattattactttaatactaaaataatttaatgttgttaaacttgagatctaatacacatttagagaagaataatataccgtcagcatcttattacaatattttagtaaaattctatctctgaaaatatttgctagaattttttttttcaatttctttttaaggctgtgttggttataattacaatattatttttgtaaattttttaaataatttacagtgtcaaaaatagatttggagttttttaaatacacttggtaaattgtaataacaagaactctgtattcgttaatataaacttttcgaattttttttgaaatttacatggatgatattaaacgaatactactatgaaaaaaatattccaacatatgatttcagacgtagaggttgactaagagattataatagtgggttgtaattaactgtgaaagtcagtagtcccgtgatctgtaaggggaaataccgggtaagctgtacaatcccaca

SEQ ID NO: 80351 - DNA, 1211 bp, Cannabis sativa
  modified_base (388)..(391): a, c, t, g, unknown or other
aattgcaattgtggtaatttcttattgtccatggattagttattatcttaatttaccaccttcttgcgtaatttttcagtttaaattggattcattatttgcataaattagggtacgtttgttaatactttcttaattaatattttggactgtggtcataggcataacttagtggttccacaattctcctcaaagaggaggtcccaagttcgaatacccctccctcaatgtatcaaaaaaaattaatattttggactccgccctagcccagacatggacacgacttaaataaaataaaaataaagttatagaacatacttttgtttcaaaagtggttatagaacacattttgttttttaaaaacacaaattttacttttatttttgtnnnnaaaaaattaaaaaataaaagtattgccaaacgctcccttacttaaaccaattttaatttcatttcgatttttattgtgttataatagtttattgtttttatagtagtataaaattccagtaatgtgatgactctacaagctcaattttaagaaaaattataaaaagtagtagtggcactcaataccatcaccagatgtcatatcgtttgtataattagatatcagatcacacatattttaattcaataatcattatggaaaattgttaatccttcgtataatgtatgcctgataacaatgatccaaatttagcattaggattgttttattttcactgccttgttagtcattaagctatttatgtattgagtaacaagttcataataatgtaggcttctgcttatcttagaatgacttaattgcttatctttgtattttttgtttttgttgtttcaacatatattaattgacttacattcatcgtctgaacactgaatttgattttgtatttttcatgtattaatggtggatgattacaatcattgctagaaattcttcacttgctctgaaatattgcatttcttcccaaatacagttttacaagctgagatagagaagggaaatcaggaaaatcagaaattggtcaaagaaattgataacttgaaaactaccttgctttctaatatcataattgaggatgattagtggtaaagtctcttattcccttaaaagcattcttcattatgttgtgttaatgtatcacggagccaaatcttctgtcccaatttttctctgtctctctatcccaatccaattaaaa

SEQ ID NO: 80352 - DNA, 1322 bp, Cannabis sativa
  modified_base (27)..(32): a, c, t, g, unknown or other
aaaatagattacattgaaatggagttnnnnnnagggcataaaacccaacatcctcgtggtcttctcactgcaagatctggttgattatgaggatttgttccttgtgctgccctggccgttgcagcctctctttccaactcagtattttgtcggttagactcgactaagcgttgtcgaagttgtctattctctaactccaccaatggtacatatctagttgggtcataagcatcctcactcctaggcacgtatctggcagaattattggcttcttcattcattcttccatgaattcgatcaccataaccatcgttcctccttgaacgtgatgtttcagtggtatggggtctttgagatcccattggctctttttcagggcgatgagttgtttcttcaggacgatttctatcattttgattgtaattagccattaaatgtgattacattaagtttataaggagggacttttttctgagttttattaccaaggctctcaatgaaaacaccaaactgttaacgtagattttcgttaaccaaaaatatatagccttttagtaataatttatctacatgaattaataagtaataaatgataaaatcactcctaatctttttacgtgattttgtagttaaaatctacatactccacaagttcttattattaagaataatttttgagtacagaacacaatatctgattttgaatattagtctttcctctcaaattttgtcgtcctttttcccatagaatctgcccctatttataggaatataggttggcagttatctattttgggattgattcaaatatgactgctaacgaaacgtggacaattaccacgtttcatttaaatatatatgggataatatcttataactacccaactactctttagtcttatcctttagacgattattcctgacatgtaatgtttcatctcgctcaatatgagtttttctccttgtccatattgataagaaaaaaatgctaagtattaggaaggtatccatcttgttatattctctttgtggctttagtaatgcgaggtgatcttctcgctatatgaaatgcgaggcagtttatgttgatacattcattctactctagtggatgaatattcccttcttgtttgtatattccgaggcatgcatatgtctcgtgaaccttagatcaatagttattatccttgtctcgcttttgactataaagtcaacgagttttgtataaactattaatcctttatttaataataacgagttatttaatatgcatttattgatataacattatgttggatatatattttaccaagatctagatt

SEQ ID NO: 80353 - DNA, 1265 bp, Cannabis sativa
  modified_base (1215)..(1236): a, c, t, g, unknown or other
taaataattaacaagataaaaaaaattgcttttacaatcatagaacaaacaagataaagttattacttgggaaattgagagctaggatcagtggataacaacctcatttttaacattaaaccagtcaaattttgatttgagaaaacagtatgttttctggggaaacaaacggctaatatatgagacaaacacttagtagcgctaagagttaatgaaatttggtctcttctcctcaacacatcccatgatgcaagaaaatgttatttttcctagtctaattcatcataagtttctattaatctaatctgacatgacatttttcaatctggcattattctgtgctatcttagattgcataattgtgaagccaaatggttgaaaacccaagaaagaaagactcaaattagggacaatggtgctatgtactaaatgaccctcaactaattcagttcacattgaagttttacagagctggacaatttttcaaattttggagaatttgaattgtctagtgactttagctcagtgtgaatcccagattgagggggtgctgactttcattactacacaataacattagacatataggccaactaggcttccatcaacttggagataccattttcctgactatgatgcatagagatcatgttatccggtccatttaatattcctaacttcccaaccattattggagggagacatggtttttcaaactttaatatctttgctcaaagagtcaactcttgaataaataaataataaaaatgattcatgtcatatgtgtatattttactgtccaaattatcaatcatcaatcaatgaatatacaatcaatatcaatatcaatatcaatatacttatgtaaaagggagtttaagaataatagagtgacatattatatttttttaatgtatttttacaatttttcaaattttcactaaataaaatggtcatatgttttggtttgcgaaaagcaaccctgttctcgtttgcgaggaatatattttcacgtgtttcgttcagctcggtatacacagtataaattgagatgtactttttatattttttctgcttctttttatctttggatgattccttagattcattgtttctcttcccatgtggctcatgcatggatcttgcttgtgtttgcaacgtttctttctgcattgcttgagcttgttggaaatttattttaccagtatcttagannnnnnnnnnnnnnnnnnnnnnaacaccctaaatatgaagatcggaagagc

SEQ ID NO: 80354 - DNA, 1973 bp, Cannabis sativa
caatacaatttctcattctgtttattctgtaatactactatcatcatcccacccaatctcaaatgatttgactaacacatacaaaaggccataaaagcaaaatagttaagttcacaggaaatgatacgtaatagagaaataaaatcaaataataacgagagaataaaacttttaactatacttgaaaaatatggaacaataatatacaatgactcacttacacttacacaagaataatactaaaaatagaacgattttcctacactctttaaaaattctccatagtataggtcaaaaaaaattatttgtgaaactgtatttttataattttttttgttatttttatgtatttgtaaaataatctcaatttaaaatttttttctttttttataaaaatagagtcacataattaatcacttacaaatatgttacaccatttttctttttccttttaagttttttatatttatctttttttctcactctctattatttatgctctttccaaaaataataaataatagtataagtatttaaattttaaatttgtaaataaaataaatttaatgtttatttttaaccgtataagtatattttttttattagaaaactgtataagtacttaatatttataaaattataatttttttttaatttcgtcagtacaaatttttattgtcttaaacaagacatatataagtcttagattgtagattattacttaattagagaaaaattataattttataaatattaggtaaaataattattagatttatgctgcttttaaaaattaaaattttattttaagtatttataccgttatttacaataaatattgttggggacagaggggaaaaaattgccgaaacggtgtcgtcttagaaaggaggaagaagagtaataagaaaacgcagcgttgggttgttgattttctggtaagtgaaaatcttcatttctttggttccctctcagatctgaatctattctctccatcaaaacgacgtcgtgaaaaaacatcatcacagcaacaatggtgctcgtttccgccgcccgcgattacgtcaatcggatgcttcaagacatctccggcatgaaagtcctcatcctcgattctcacaccgtaagttccattatattacattttttctctaatagattatgatcattctacttagtttctgtttgtttcccaagaaaaatgatggtctctgaatatgattatgttcatctaatcaattaacttaccttttgtttttttccctattcattttgattaagtacaagttgatttgggatcattatatgctgtatttagtattctctaatgtgaaaagtgaaattttcatgggtattttcgatgagcgcgttataattagtgaaattgagaaggagcaacatttatttattattagtactttttttttctttctgaaatgaggattgggtaatggcatgatgatctgttctattcattgttcttggtttataaaccaattatactatcatgccactaatgatgcaattgtgaaaagaaaagaaaaaattacggtttcatgtattgtcttgtagacattgtagaattgatttttgtttgattttgaattaatgagatgcaggttagtatagtgagtgttgtgtattcacagtctaggcttcttcagaaagaggtgttcttggtaaagttgatagaatctattgcaatgtcccatgtctcatctccatggaggtattgttcaatcattatatttagtaatacttagttattgtttggtgtttaagtttttaattttttgcattgaaattatatgaaattctgcttttgatatgcaagagtactacatggattttgttacacttgatccttaccatttcactctgaacattctagcaaatcacgcatatatgcttccaactgttgtagaccctggaaatttgtagcatttctatgacgagttgttgatggtatcgca

SEQ ID NO: 80355 - DNA, 1727 bp, Cannabis sativa
gagggatggccaagtctattgtgccacaactcatagtcagagacttgagatttattacaatgagtacaagtagatgattctggtacagtattagatgacacagaagctgtcaagacacttgaaacagctggatttggtgttacagaagctgtcaagactcttgggacagtggttgtatttgagggttgcacatgaaattgagagggattaaaagtatagaggccattctggtgtgtcccagtgagaagggtggctcgagttacctgatctttgacaaagcatttatcagcatgaaaactcaaaaaaatacaattgttatcatgagcaaaacgagagacacttagcagatttttagtaagttttggtacatgcagcagattattcaaaacaagagattgagaggagtttgtgtgaacaaaggactgacctatatgttgaataggaagccccgagccatcaccaacaaagagttgttcaatctccttcatattcaacacctgtgttcagattttgcacatttggagtgcaatgattcgaagctcctgagtctggataccagcagctgtcttcaagttgtgttgtttgagcaacattagcttgagggttggagttgagagatactcctgtcttttatcgaatcgatagaagcaatcaagaacggtgtgtccgagcttgtgacaaagctgacactgaactctatttgaatttgtttgatactttccacctctgttggtaaaattaaaaccaccacgattgttaggattagagaaggaagaggtggatgagtgattacctccattataagccctttgatttgcaaatgctcgaccaattcctctagatgatgacccaaaggatggaggaggaggaactcgattttgattgtaaaatctgctgaaacgatttggattgttttggtaggcaatattgacttcagaaaactgatccaaatctgttgtagcaagatttacacttagctcagtttcagattcttgatctgttttctcgattcgagactcagaggctagcagtagggcttctatttcagctactgaatactcttcaatgcgagtattagttgagataatgaaggtatcatattctgtgggtaatcccttgaaaatagcagcaatatgatctcttgcactcagcacttcccctactgaagcaagaagatcaacatgttgtttgatctttaacagatactcattcaaagacatgcttccttttctgattttctgcaattttgttctgaactccaggatttttgaagaaacttgcagagtgaaatgcttttcaagagcattccagatttgccttgctgtgttgcatcccaccatgcgagtgagaaggctttctgtcattgaggataataaccaggaaactaggagttgatcttgaacctcccaatcaagaaactcaggattgaaggtgtttgaagcttgatctgcatcactcaagaatcgaggtggaggagctcgatcttggatgaatttttgtaatctgtttcctcgaattgctgctagtacctgttgtttccacagaagaaagttgtgatcatttagtctaatagacatattatgattgaaatagacagggttgaagtcatcagtgttgtttcttgatcgatttagattcggtgctccattcgtctgatttgcagatctgctggtgttcgagttgtgctgtgtagcatttgtattcactccaacattcgccatgttcac

SEQ ID NO: 80356 - DNA, 1022 bp, Cannabis sativa
  modified_base (209)..(218): a, c, t, g, unknown or other
atattcttctataaatatttgttggttaatttcgtcaacgctctcatgtttcactttatgatgtatatttttattgattaacaaattgaatatgtatctttaatggaaaaaaacttgaatatatatatgggaagttttatttgtacatgtactccaatttttttttttttttttttatatataatcaattttaataatttttattttannnnnnnnnnatatctttaattatattagtttttaattatattagttttttttaagaggataatagaatggaatattacaatactctttaagtatgtttggacaattgctaacaagaaagaaaatctataagtactttgggtacatagtgtgtatatcaaagacgaagattgatggtcttataaaccacctttgcatggaagttggtgttagcagagattgatagctgttaaagatcatctcaacaatgtgcctgacttacaatagttctcagagattaaatatcaaatctctcaaggctataagttgttatgtccaaaccaaaacaaaatccgatagagcaatgaagtatgggaaagatcactcaatatagttttgtgttgtggattgcaatacaaaactgcaagaaaggttgctgaatttcacatggtgcctgatgcaaattgtgttttctgccacacaatgaatcggctgataatattttcttccaatgttccttgccccttagttgtctccaacaggtgaaaaatggctctcttggagggctggatcgagtaatttgaacaagcttattcgttggattggaaaaatcaaatatagcaagtttcatataaataagtatatgcgactgcactgacaactttagtgtattagaattggcgcgctagaaatgaaatagtgtagaattcgggtaaagtcaaagaatctttgatcataaacaagatcaaaaatcatgttaaaggtagaattacttatttttggccaaaaaaaactaatgttatagatacaaaatggttctccaagttgtaaaaaaa

SEQ ID NO: 80357 - DNA, 730 bp, Cannabis sativa
atatatatatatagtcggtgtgttttacccgtaaagttcattgtccttttatgtgtacgaacacaaaattttcattcttccatttcattagattcttctgaataataataataataatgaagtctatagcatatatgtacatataatgacatgtttgtttgtttgttttagaagaagtgtggtaagtgctattagagtaggcatctttctagtctttctactacgattgatagattctctatctcttttaactttttctggaattgttgttattaattatattttcataaacctgtcaaaagaaatttacactaattaattttaacatttagtttctaagcctcttgaccagttttttgtctcttacgatgtattttacattttcttttcttcaaatttatttttatcaaagaagtagagaacaaatctcccattactagaggtgcaatgaacaaaggccattcatgtatatgagcaatgacgggacacgtgtaaaaacagaaaagacatgtcatcaagggcagggagaggacgcggcgaacagatcaagtgccctttctccatattttttttaatttttaagtaagaaaaattttatttacacttataaaatttataaagcaataattttttataaaaaaaattacttttttttaggattaatgaattttttttaatatttttagagttttctagaaaataacacgaaaaataataaaaaaaaattaca

SEQ ID NO: 80358 - DNA, 2024 bp, Cannabis sativa
  modified_base (493)..(499): a, c, t, g, unknown or other
agtgtttggggcgctatgaagccatctgttcgctcaaggagctcctccaaattgctcgttgagatcctcctgatatctttctaaaagtcactcaacggtaggatgcctccgagtatggtcgtatatcagccttcttctaacaagcatgtgacctaggtggcctcggctatgattgttgaatgtagtccttcaagggttcatcttgtctttgctttatttcaacaagatcctccagtcgggcaggtatttgtcttgaagtagagaaatgaagatagaactcgcaggagagctcttcccaagaattgaatcttcttggggctagcttgaaaaactagtgttgggctatttaagcaagaattgccagaaaattcggcattgcacatctccaaatacttgtaggagatccgtctagatctcaaagtacttcaggtgtactagagggtcttcttttcccgtgtacattttccaagttggcatcttgaatttgggcaannnnnnngcattgatgtatgccgagaatggtgatcccctagccctgtctagctcaagttctaagggctttggactagctaggcccttgagcatatctcatatttgatccaactgtgcttgcacagaaggatctattgttgtagaggctcgattaattagccttctttgattgagctacaacctcagattggacagagcctaaccagccataccttgggagagggtacactcaaggccagccaaccctgagtctagtgcttgtacatggtcagtcagccctatctgggcagggcctagccgcccacacttctctgcctagctggtagagtttgtgtgttgacatggagtaaatcacaccaactgttggtgtttggtggatccaactatctgaagtgattaacttcacttctcaaattgttgttttgggtgtttccacccgctctcagtccttgtcgattgaaaattgatcttcgggtgactcgctccccttggggagggagtgcttttatctggctggccatggagactgctggaagagtttggctggccatgggtactgctggaggagtctggccggccatggggactgttagaggagtttagccggccatgggaactcctgttggtggttggttggccataagatggacaaagggggctgttgttaagcctaaaatccctagctggccctccatgccgctggttgccaggatctgacaatttttatcgtttaacctttgaggaaaggtttgtcctccctctggtaagggaagatttgtcctagttcacggggaactgggttcatcagcatatcgatagagcctccttaatttatcaacaagtcttcctttaagtggatctctgatgagatcttggcctcttcgatcgattctctagttgaactaccttagtagatcgctggcctctctattgcggcgatctaactctgtttggcaagatcgaaggatgtgatcttggtcatccatccatctcaagaattcgtgtctctactgaaggagtacatcgcaatcagcaacgcgtggttcttcaagggatttgcatctctactgagcaaatatatcgctgtcagcagtgcatggttcttcaagagatttgcatctctgctgagcgaatatatcgcagttagcagcatctgattcttcaatttggcctgcatggcctacaatttccctgagtctggccaactcaagatcttctcccatgcccaggtgaggcttgccaattcctagtctcgtctctcctgcatttgactgagggtgaaacccggttgttgttcttgggggtgcctcccaaggattcttccttcagttagaggcgccaatggtgggtctactcttggaggcatgggcctaccacttggatccatcgggatgcatgtatcagtctggccgctatagagtcctgccaggtaatcctggttgccgataggcctacaggggaggtctggccacccaaggtgtgcaagacctaacaggacgaggcctgtaggatctggcaggacgaggcctgca

SEQ ID NO: 80359 - DNA, 864 bp, Cannabis sativa
cccccccccccgcccccgcgcttctcactagccttagaaatgacattcagatcaccgcacaccacccatctggagttacgtacacttctgaacagctgaagagagccaataccaataagctcccttctccctatcataaggagtgccatagatacaaaagagcgtccaaggttctttgccgaatccatcgtcaatccaatcgaagccagagttgaatttgtttcgaacccgtaactttgtgccccttttccacactatacaatagcccccaaccgtatttaaagaagggatacaacttattttctcaaatcccaatctcctagttgttccaaccattgaagcttcatcaaccttagtctccatcaaaaagataacatcaaacccatcacctcgagagagattttttaaggctctctccgccgccggtctctaaagaccacgataattccaagctaggcacctcatggcgaaggtgggggcatgacattggtcacctcctcgccattctcaaaattttggacatatgtaattggaacatcaacacattgagaaagaacttgatctaaattactcaaaatacctctattctcttcccggtgcagttttttgcttcttctagttttaacgtcagaatttctcttcaaggtcgaaacagtgttctcccgtgatctcttcttttacctagttcttgaaacacctccactcattccagacttaaaagtctctatcgccacctctcctccattagcatcaaccaatttctctttagaagaacctggtaatgttaggctaaaattagtctaagtttcgggtcgtatttttggttagttttcactctttgtttctagttttagggctatttta

SEQ ID NO: 80360 - DNA, 1928 bp, Cannabis sativa
ttggtggccattcccttaaaaaaaaaaagttggtggccatttattgtcataaaaggtttcattttctggctttagttctttctcaagttggtggccccatatatgaattgactaattagcaatctattttgaccaaaaaaaaaaataataaaacaaaataagattttttttttcaacactatgtttcttttagaatttaaatttagcttagggcaactctaatggggatactcaaatttagtgttacattaacactaaaaagatactattttaatactaaatttttttccaattacaaccataacactaaaaaaatatattttttattattatattattttattaaattatctcactgtaatatgtatataaatataaaattttaattaatcataatcataaacaaacatatatattattttattttaattttaatgttaaaaaaagaaaaaaaaaaaatagtctatagtgttttactaaaaatagtaggacgctatacactctcacgtatatagaatagtatttagtgttccattggagcaattttgtatccaaactccactatttgtaggattttagtgtcccattggagaagcccttcgcccctatacaattttttgttacaaaatattcctcctaaattataaaaattattagaaatctctctttcttcacattttttgaaataatttttttcatatgatcatggatcaggatgacgtatatagttatagtataagggtgtgtttaataattttaaactattcgaaatttattttactggcgttaaacatacaaatattagctctaagaatatatatattttcataatttatcattatactgttatttattttttgtttgaactcttgaatatttctaaattaacatcatgttaatagtactacattaacaaattctttaaaaatgagcataatgtaacttaaggggtatatttgtaattattttataattcatgtagaaattttacaacaacaaaaaaaaaaattaaactctataaatgttatagttagggagactaatcttgtttattcttaaaattaatacaatctaggtaaaattagaggtattcattcaattattatatagtttctcacagtacaaaaacaaaaaacaaaaaaatgaaaaaacaaaacaaggaagtcactaaaaatttgttttttattttaggtacaaaaatttattataatctcagctttttttatttatgataatgtttaaattgtggtcagacttatagaagacaatgaacatcttcatgtgtccatgtgtgtgaactgtgaacagaaaaatcccaaattaaggggggaaatgtaaaagaaaaaattcaatataatttttaacaattacaaaaaaaaaaaaatgttaaaaacctttgcaccacctaaaaatataatattttaatttatctttctttcacaatattatctttttttttaaaaaaaaattcatcatctgtattaattgcaatccatagtgattacatgattaaaatctgaagtaacatcactactcctgataacacgatcaacaactaaataggatgctcaagctaagaaatgagcaacactatttgcagaacgtctaataaaattgacataaacatctcgcaagtcatttaacaacatcttacaatcagaaataatactcccaaagtatgaaaccacaggaatagagctacgtaacccttgcaccacagaagactatcagtttcaatgacaaccttcctccaatctttatgtttaacccaactcagtgcctccttaacacccaaagcttccaccatttcgggttgcaacacccctaacggacagcaggtaaaagcttccaccaatgggccagtttcatccctaatcacccctgcaaagctataagttgcagttcctggaaaaatggcagcatctaca

SEQ ID NO: 80361 - DNA, 1117 bp, Cannabis sativa
gacagatgaatattttatattcatagttattttttcaatgtatcctcgatatttctttatattcattactggtttgctctttctttttatttctttattcctattttctattgcattactggtttgctgttgatattttataatcagatgaatattttatattcatagttaattcagccaaaattttgtaagtagtgatgattaggcctcggtttttaatgctttgttgtaaatgactctattcatgtagcggtactagttctggacgatcgcttgggattacagattatagtaacttaagtaggttaatttttcatcaatgatctttagaattgcttctcttgttagtgcaaatgttactctattgtctgatgaagcattgatctcacttagcttgtatcatttaaagaagacagttcggatgacaggtctatatacatgtttattgtttctgctctgcaccagatttccattttaagtgtttcctctgatgatattgtttattgggttttttaagatatgtactatattgtagattagaatacagttaaagaactgattatcttgttgttgaaatttcaggtctcttccttccagcagtggtgagaccaatcctggattcttataaagctgctgatccagtccccccacctggtttaaataatgttagtatacagtgaactttattgtctttatttaccattacttttcatctaattatgctgtgttacttccttttcttactgcatcatttgacgataattgccatgtttgaccaatatcttgttgtgttaaatttaaatgtcattcttgcataaatttgaaatgaaattccttgatgcgatcatggtacttaactgagtttgtgtcctggtctctgccaatgtgtattgtattttctctatatataatttgtactgtacaatgtatgtgtcttttaccttaccttataaagtcttaattttccaactttggttgcatcccatctcctgtttggtaatttgtcagattggagtatgatttgtgttatctttaacttgcttagtagcattgcctaattcgagcatatctgctggtgaagaatggggtcccacagaacccccatctgaaaaatgat

SEQ ID NO: 80362 - DNA, 1289 bp, Cannabis sativa
ctattcactatcacacacttaagttccaccagcagtgacctaagaaaagaaactcaaacttgagtttaaggctttaagccaatttctccactcttctgtcattactgccaccgtcaaatttgaaaccaccagtggctggtgctttttatcacagggaagaataaagcatatttattagttttattttgtaatctctattcatttaatttaacttatacaatctacaagatatcgctccttaccgactattaaaatgcattgatcaagacctacaacacatcctgcccgaacgttaatcaaaaactacaaaccaatatataagaataacaccacatcctaccaaaaaattaatcaagaactacaacacaacaccttcattaaaatagaaaaccaaattaataaagaacaacctaatgcccaactatgcaagagtcaaactatcaaagtaagaactaaagtcagaacattttaatcactccattcttacaaaaattgaagaattagtcccaaagcctatcaatttggaaatcaccttcaatattctgttatttgcacatgaagaagattgattttgtttctttattaaataagatcaaacctgaagaaaggttgggtaaaataggcgaccactaggagtgttgacagagacgttggcagtagcgatgggagttcgatgacagcagaagcaatgagagttcgatgacagcagaagcaacgagatttccacggcagcaacagagacggaagttccacgactatggagtttgacgcataaagggaagaggaagaaaagtcacgatttgggattttttttttcttttctatttgttcacctaatttaatttgaaaccttagatataattagatctaatggcttaaatataaagtaaaaaataatgtaaaaatagaattggaacgggtctttatatttgaactagaaaactgggtcgcgcgttgcacggtctgaaagaactatatattatagttagtaaaataatttatcaattaatattaataaaattgagctttgcacaaataaaaaaaaattatttaataaataaaaagatgtgaaattttttaaaataaaattataaatttgtcaaatatatacataaatatttagagtactccttaagtgagggcatcacttttgctcataaaaataaaagcatttttatagcctttgattctcaatctaatggtaataattaatttgactacaatagaatatctcatacagaattaataacttcttttattttaatttattctttaagaaaaataaaaaa

SEQ ID NO: 80363 - DNA, 1139 bp, Cannabis sativa
gggtcagttttatgtcagaccgtgtgcttagggcctgtggtgcttatattggaaagtttgtttcatcatgtccaaagaattatacgggtatttggagggagtatttgagggtctgtgtcttgattaacatcgaaaaacctttgaagcgacgaatgaagatttactataccaaagaagacttcttttgggctaatttcaaatatgaacgagtgcccacattttgctttatttgtggtatactcgggcacaatgaaagattctgtccccgaatgtttgatgaaccggttgaaaagattgttaagccctatggtttattcatgaaagctccatatcggtgttcccagaagcagattggtgcgagatggctcggagaaaatatggcacgacctctgcaatcggatgccggcaatgttgctccggtgacagctaccagttccagggggtaaggctccgaaaaaatcaggatgatgaaatggaggatatggaggtttatgggagtaataatggagagattgtaggagagaatcaagggattgtgggcgtagatcatggtggaataaagtttcctattactactgggatatcaattaatggggaagcgggaaaggaaactcattttgaaaaggaggggtttacttttacagatccaaaaagaagaagggttgaggaaaatgctgagttgggccaagactttgttgataatgggagaggtgaagaggttaggtgcaatccgaatgctgaaggaattgatatgggccttaatgtaaaagatagtgaggttgggaagggagataattatggtacaaaggcagcaagtgtggaagatggtattatttaaaaaaaaaaaaagagttaaaggcgagtaccaacagttgggcctgccaaggattatgagtttattaagttggaattgtcggaggcttgggaaccctcaggttgttcaattcttgaaggaaattgtgttccaaaagaagcccaatgtgatttttttgtgagaaacaattagtaaaaaagataaagttgagtttgtaaaaagtagtttgggttatgaagcttgttttgttgttgatgctgttggaaatattttaccatgatctagatttactaccaagtatattttattaacatcctaatatgaa

SEQ ID NO: 80364 - DNA, 908 bp, Cannabis sativa
ttaagggttatagagcgagtgagatataaattgacttctttggattataatattattttgctgaattttgtatatttgtatgatccaattatttgatgatacaaatcaggttttttcttttgtggatatactaattcttgtgaatcagaattatttattatgatatgacttagatcaaggttgtgttattagctttctgtcaatattggggtaattggaattttaaatcataatcatgaattagtgtggagcttattagtcctaaatgatactattgtagcataggttattatcttttcctttcttatattttgttgttaattatactatatttttaaatatattgtaactaatatgttttcttttgacagaaatgtatggcattggagaataacatttgaagtttaatttctgtcaagttattcgattttcaatagatgtttttataaaatttgtgtgagacttatggactcttttatgaacattttatggattgtttatttattgtttgaaattttagatacggacatttatgaagcatgatatttacttattattaactcgttgtggaattttcaatttaaattagagtgattttttatgtatgatgagcatttttttttggagctattagttcaagtattcaataaattattttttattttttattttttttttgaaagaacctcagttcatagattaagcccagaatagtttgggattcacagggggtaatccctcccctttaacaacctgccagacacccaaatcacggcgtgtggactttgccaaacggtcaacataaccgataatatctcttttaacaaaagcaaacttacaataagaaaaggcagaaagtaaattcaaaataacattaaaggcaacaaacgaaatccattctggagctt

SEQ ID NO: 80365 - DNA, 2443 bp, Cannabis sativa
tgtttgtattttactggttttgctttggacttgtatctcttctctatttgtataaataaaggctcgagctactcttgttaagtaatgctctttcattttaattttgtttaatgctcgagctactttttttaagaaattccaaatggggtactcttagttaagtgttcaagaatttaaaaattaattttgtaaaaattagatgttatttttgtgtaataacttgttgcacaagttagtgcaccgaacttatacttaaacctcaaaaagtgaacttataatcattttacaagactaagacttgtcttaagtttcttaggtctttaagtccttggtggagaaattttgacaagtttggaaaaatgatcattttgccattgattttagtttgcctttgaatatgactaacttaatttgtgctgcaaaatcaagaatttgatactcataaataacaatcaaataattaagagtttgagtcacatctaattggtcttgagaatatatgaaaaaaaaatattaaaaaaagaatgttatgagactcaaactcacaccaatgtgtaatgtgtcatacatcctaaccaatcatgctatcaatatttgttgtatacaatgtacacaattttacataaataaagcctaatgagaccccttcagttttttattttgggcctccaaaaaagtgtgggccctaggcacagacgtagcctgtctatgtcttgtgccgaccttgtagtcatataatatatactgtaaggttagacattagtcgatttggtcagttagtacatattttctaagccaatgtaaatatcgagttgcgaaattctaagtgcaacccacctaattaacccgaccaacaatttgtagggttaacccgtccgtccaaaccgacttaaggttttctttttctgtttttagtttcaaaatagatgaaatttcaacacaaaatattagagagagagagagagagtctctaagaggtcaggtcattggttttttattaatttttttttactttttataaatagtatattatattatattataataaaaattaaaaaaatacaaaatacaaaactaaaaaacaaaaaaaaaaatgaaacaaatcgagttaattcgggtttattgggcatgttgtatctatttttaactcgcacaattaatagattgggtggtttataatttggtcaggtttcttcagtttgtattaattaatactgatttttttgatttgatttgagtgagttattcgggttcaacagtttacaaaattttttgtaaagtcctaatattgtattatgtaactcttttttttttagaaataattaatattattatatttgaggtccaatgtatgtcatgggctggtctggtccaatccgaaattcgatcaccttaaaaatcaaactctcaacccttccgaaagatccaccgggttgaaccagacccgcccacatagaacgatttttttttttaattttcagattggccaggtacgggtcaaatccggtaaaaatattcagttctaattataatttagtttttgaggaatccaaaactataaattttgacataaaaataataaatagtaaatttttaaaaaaagtaatatggagagatacatgtgaagaggcagttaattcgcgggaaaacgttagaagcaaagaccaaacaacccaatcttctcatatctccatctcatatttccgatccaatcttctccatttacttactcaccaccggaaattaaacaaagaatcaaagaaaaaaccatgtggggcggcgccgccgttgttttgatggttgttttggtgggtgtgaggatgaggggggttgtgtcgatgaggttcgacctacaatcggggaccagtaagtgcgtatcggaggatattaaggccaatgccatgtctttgggtagatacgtagtcgtaaacccttacgatgaatctcctctttctgatatccacaaggtcaatgttagggtgagtttactttatttctctctttccatttctaattaatatttctttttctttacattttgaccatttgggttaattaatctaatttgggggtaattaatttgcttatcattgtataatatttgtatctttactacaaactcgaccccaactgcaaccatcatccagggtcggggtcagatttgaatgttttatgagaaatttataaggtatcaatggtgtccaattgtacctaagtacaattaggtatcgatttttatatagataattaaatgtaataatttttataaagagcattgttattggcgtcaatggtgtttaataccttcaagacgtgtctctttacgattagttagcgataatccctaaaagttattatattaaattatgtgtcctgatacttaattgtaccaatagcgatatgatactgaagaaaatattaggcaccactgataccttttagc

SEQ ID NO: 80366 - DNA, 4102 bp, Cannabis sativa
ctggtaaaatattcccaacaattgtaacacctacttgcttaggcatgctacagtgattttctaattattgtgcccgtctttgctaatcaaaagggtttctcaaaaagtttatcaaatttaaacttttaaaattttataaatataaagccgtacataaaattcgtgatcccattttaaaaatttataatcatattaaaaaatatatttataaacatgtcgctctgcgactacaaaataaagacctaagtcgtcccgagactaactctccaggtctaaccatcctgatacgtacaatcatccttaagccctggacccactggtgctaagccttttcctttcttttatctacacacgtaaacaacaaatgtgagtcagtagactcagtaagaaaagcacaaaacataataccacatgaatgacaaaacatgtaacataatactaacttgtatctaggcacgtatacacatatttacaaggcttcacatgcattaagaacgttcctaacagaagtatgacccatgtaccacatgcactaagtactcatcttgtactagtgttagtatggcggaactacacctcaagtaccactgagtgttgtaccatatgcattgtgtacttgtctcatactagtgttagtaacaccgtgtcgtacccttgaacatcatatactttaccaatgcattctgtcccactaccgaactagtgttggtagtatacaaatcacataacacaacatgcaatttatatacatacacaaatatatatacacattttatactaatcttatctcgtttcctgattcaagcgtgtcagtcaacctgaatagaaattcacgtgcagaagaaggccctatgtataatcacacaaattggataaacaacttgctaaaaccctctacgaggaccttaactcaaaactaaaaatttctctatcaataaatagcatggcaataccgaaactaaatgttgattaaaaatattaatacatattggtccaatcatgcataatcaaactataaatagtatctttactaaatgtatatccttagatgcagtgacgaagtcagaaatttgactgagcgagggcttgaataaatattaagtcaaaactaataaaaataacggataaatgtatcctttcaaattttcatcttcaacaaaataatataaaacattgtcatagtattattttattttttaataaagtgttatttttttattatttgtattgggctacttttaaaatggactagattagaatgagggtaggctcatgaatcatgattaagatactcagtgagagcttttgtgaattaggctttaataaattaaatgaagtgaattattatatgtatatatctacatgtgaaaattttgatgtatatatttgagtgaggacataagcctacatatgggctaaaatccctacgtccctgcttacatgtgattcgaatcaaaatcacatgccacttccttacaagatcatacattctctatatgaatatagaattttataatatttattaattttatttctataactaatatattcatttataatatatttgtatttcatatattcttccattaaatatttattttcaagacataaactctaacatagtttatgtgtaattcttgtgatatatatttttagtttatttttacaaattttaaatatattggtaaggtttttgatattgtgagtgtggttttttttagtttatttataattgatttgtatattgcagtgcatttaatgtcatgttatattttttttgttgtttttcagttgtttcctacataaaatgttttggaaaaaatcgtatttttgtaattttattttttaaaatcttatatttgaaaaattaaatttataaaatgtaaataaaaagcttaagttgtaaaactgtaaaaaaatcatatttattaacaaaaatcctttttttaatactgaagcgattgtatatatttttagtagggtgtgaatataatttttttatatattttatataattttttttttttgaataagatcaaaagctttattaattagaatttttttttaaaataatagaacgtacttcagcggaacaatcctccaactgaagcacacaacctatagagaaacaagagtctcttgccaagcaatgagccaacttatttactaatcgtctaacaaaacacaactccatatattagaaaactaaaagtaaattacgaacatcttgaacaaataaatcaaattgaaaaatcatagaaaaattactttggatagcttggacatagtttaaaatatttgggtccaccatatataaataaaataagaagtttgtgtttacattacaccactatttttttttttatttttttgaaagaaaattgcaccactaattaatgaaggtttattaggttaatatattagtatagccctagctagtataattagttgattcatcaatttttttttttttttgttagaaaggtgtaagctgtttaataatgtggcgcatgcaaaatattttaaaatttgtgaaagtgatgaaagtgctgaataaggcagcacttggaaagattatatatataattgaaaggaaaaaaagaaatattatattgtacacgtacgtatgattagtcatcttattattgtgggaagtaacatttcacttgtattataaaattcaagggagtgtgcataccacacactacagcttgtggctctctagtctctgctaattaattaatgataatttattaccaattaaaagactagaagagaactgatccattgaatgtatattaaaattctgtataaagaatgtttaggtttgattgattttagattctaatatatattatttcttaaacaaaggccaagctggtaatgatatgttttggggaaggtcatacctgcatgataatctaagaaagaaggtcagctgcccagctgcccttacttatctccatctaagtccgctaccggttccacaccaatgtgtttggaatattttggtgcataattgtcatatactcgggaactaaaccgaaactaaacattgagggaaccaaatgaaaaaaaataacaaaaaaactttgagggggcaaaataaaaaggttaatttgttagaatttatgtcctaaaagtaaataattaataaataatatattaaagaatatatgaaatacaattataaaataaatgaatacattaatattaataaatatttaaaaattctttattcatattgttattcaaatttttgtactctgacgtggcatcgcataatggtaacacgtggaatcaacttcgagtatctgctcggagagtatagcccgagcaggatgcctcgctgacatacttgaagcaaactgatcagcaaaccgcgcagaggaatcaacacttagcgaattcaactttcgtattatgagtcatcaacgaaatcccaataacttggggatcagattacagggatatggcatacacacgatcccacgatcagtgtattctgcgtcaatcccacgatatttgtactcagcattaaacccacgatcttttctgtttatatccattgtaacgagaagggaaacacttcctctccaagtttacagccctataaatagtgatacatgttcactgggcaaagggtcgcaaacagtttagtcgagaccttaccctaaatatattatctaagaattcttattcagagatactgttgtaagagctataagaaaaagaatctttctccttgttcttaagtcaatgcaaataacgatgattaggctattaccaaactgctcggggttgaacctctataaaattcttgtgtctttatatttgttctactatatatcgattgctataaatcacttaccgcttactaaataagactcattgtcattggctaaaagtgaggtcaacatttggtgctttcattgagagaagaataaggaatcgctcttcaacaaatacgatggtggtgcagactcgtaggggtcaaggggatccagctaattgacagacggtggatgcagaacccaggaaacacaaggattccgccagctgttaatcttggatagcgggcaagcgtgggtcacagtgtaat

SEQ ID NO: 80367 - DNA, 3084 bp, Cannabis sativa
tctccgggaggcatgtctaaggttaatccttcgcttaaggagacttagctgatttactcaaacgctggaccctttccatctacgtgtcatcctctggttggcccacgtattttggaaaaaatcaggggcaacactttgtttaaaacattttgaaaaagttatactccgaacagttctataatgggatgccacatgtcactgtccctgttgccgcgtgatcactcgagaaatttttgggataacatttgcccccaagtttgcatgggaacatctggtagtacaaagacttcttaacttcaatccttgcatggctatgcgacacgtgtatgcattcacatggtctgtctagcaaggcgtcgtgcctacacgaagaatatccactttacgtccttttaaatctcctgccaaaatgatttttacttcgaacaccatgcattgggggatgtgtctgacggatacacacttctccatccagtttttcaaatgaagtgagacctttgaatttttaggagaaaagcacaatcatttcgaacttcatcgcctaaaaaatctttctcactctcttattttcctataaatacttcaaaggagccccatttgaaactttagtattttcaaacttttagagcaaaaaaaaaaaaagcattcctcgagttcttgaagctttttctcgaatcttttgctgcatggaccaatttctcagagatttcttcttcaaaatgccaagtcaaacccctaagtaagtatcctctcccttttcttgcatgaatttttacatgcaatttctatgcatgtattctgtgagtttttgggttagttaaatgttcattgtcgtgggatcttgattttctatcctgattgactatagtttaattaatgtcgtctgttaagggttaatttggtttgggctttttgcgcactccgtcttttagtcgttttccccaattttaagtattataggaaactaggtttttaaaaccctaaaaattatttttcgtcaaaatttcattatgaagatgaaatctttttaactagatccaattttttctttggtcaaagtatcgggaatatttttcttcaaaaagaaatttctgagttgcttggtgtttcgcctttatatgtttcatcttttgtagatgaacccaactgaattctggggaggtgaccatcaaatagacaacgacctgcttaaactactctttcaggatcatccaacactttgtgaagatagctcgtcttcatcctcaagcgagctttcaatttcttctgaactttctgaggaagtatcatcgggtgactcttcggagactaaatttcaacaccactgctatcccgaccaggtcggtggtgacaactatgatcgacatatttgggagctgaatagaagttggaagcaattccttctagcttcgtggacttatatagtctggtcagacgttcaaaataccgtagctactgggtgtcctacttagcttagaaggcagttcgtcctgacagagttagctaattctgtttccaaactcatgtccaaacccactcttccgactaagaaagaattggctcgcacaaaacaaactactcgagcagttccagcaacagatcctgatattgggcaagtgatggcgactgaagtagaaaatgatccagaagtacaggaagcttcctaagaggaagttgaaaaggaaatggaggaggtcggatcccctgatatcgatgggggttataatacttacgtggagcctttgttgccttctggacggtaacttgaggttggggtggactataccgaggaggaattttcggaagccatgcctgtccctaagaaatttaacaagcctcaacctctatgacaatcccctccgttcaggctgccaattaagaggttgaacaacctccgtgctactggtttattcaactgagcaaggtgctatttttcctctccacccttactttcaaagggtggctaattattacaatatctgcttaatgcagataagcctgaattttgcattttgaggcataaaaaaattcattttgatctcaaccttcaaccatttcttcttgaattttgcctttaaatattttaattcttgaacgttaataattgctggagtaatgaaattgtcctacattggaaagtgcatatacaaagtaaatatgaaattggtataaattcatcatattttacaacattgtttaacctataatatatatttatataatttaaacattatttgcaacatacaaatagttttttatcagctctaattgaattcaatagctataaaaatatcaagtaaaaacttaagggataaaaatttatacttattatgtaaattttataaataaatttgaaaacaatagtatacattattcatagaaatttaaatactgcagtatttttttttatagaatgtagtaatttcttttgagatgataaccttttaaatctatttttattttatatggagagccattctaattgcctcctaaaatgatgaattttatatggagtagccctttctaattgtcttccaactcttactttgttgcaatttaaacatgccaaagtgaatagcatttgtccagtttgtagagttgaagatgagttaagttttcatagcatggtaagatgcccgtttacagggctgattggattgaggtccgggctttgtttactgagtttcgtagttggtttgaaatttaatagctaagttagctatgattctttggggagtttggcatgcccaaaatgatgtggtatggaacaataagagctcaactatggatggtgtggtttcggttacaattacttacatcgatcactggaggattgctcaacaagaagagactttggtctcaacaacacctgttaatggtgctctttcaaatgagcattggacaaaacttagtggtgagataaaggttatctgcgatgtcgctatttttgaagctgggaatagctttagagttggatggattgctcagatagtcatggtgagtttattgaagtctgtcaagaaatttggacagttggattctcatgttgctaaagctttgtctttgaaagaggttcttagttga

SEQ ID NO: 80368 - DNA, 617 bp, Cannabis sativa
aaacttaaaagttctaaacctcgagtaatgggtatgaaagttattggtgaaaaaagacaaagggaaacgacctatggtgggtgatgatgattttgatgaagatttttttgaatcagtaacaaaaaatgaaaggcatcctatgaagaagaaatcaaagagatgaagttgattagagtactattaacatgttaagaaagaaggatgttgatgaacctcctaaaggttttattatagtttttctattttattattttgccctaatttgtgtattttgggtctatttttttagtgattgcatctgtgatttatatattgtttgttttgttattttattagtactaagtttactgattttaaattttattagattcaggttgttttttcattttttccacataagttgtagttcattgtttaattttctctatgaattttaaattttattttgtaatgagtctgttactatttttttttatattaatcatttcttttttatgattgtttagattttgtatgtttaagatgatgttggattttaatatttttttaatagttgtattatagttgtgttacagtgtgtttaacaattagtttttactttgacattcttttttttt

SEQ ID NO: 80369 - DNA, 1061 bp, Cannabis sativa
  modified_base (812)..(827): a, c, t, g, unknown or other
ttattattggccttctccttccaatttgttcacataagctttcaacaacattatcaaatcccttgccggagcttgaatcgttcccaccacactcgacgccggtccctgaatagaccccaaaagcttcgaataaatctcacccctagacggcattgtctccagctccttaaactctccaggtccgtagaatttcccctcaaaaacggcgcctgtgaaatcgttcttctcgtcaagcttcctctccttctgaaactctctgtagggtttaatggcggcaggtatttcctcagtgtgaacgaaaagccaagcgttcataccagtcatacagggtttaagcgcctcccatttggttccctcgattgctttgtagaccagtgtgttcttcgctacgattagcttcgtgttctccggtagagatcggcggaggtcttggaattgtttgacggtgaaacctttgtagctgattccggctaggaggtaacagttttcgagattttctttgactgtgtcgacggtttcttctttcttggtccgggaaatggcggatcggattgtgggaaggcggcggccatggtttacgtagggggtgagtttgtggggaagtcggttgaacaatgggttggtggtaggtcgatttagggttagggtttgagaaggagaagaagaggggaaacagagtagggcttccattagagaagagaaggataagagagaaagaagtcttctttgcttactcttatcagtgttatcttatccaaaactagagagacaccatatcagtgtagtgtaggaataataataataataataannnnnnnnnnnnnnnnaataataataataataatttgtatcataaatacttaagtttaattttttacggtaataaatatttttagaatttcttaattgaccgtcagatatctacagaaatttaaaaaatataatttatgtattattacagttaaaaattaaatttatgtatttatctataatcaagaattaaacttaagtatttacaccgtaaattactctattaatattattattatcaaaataataat

SEQ ID NO: 80370 - DNA, 1610 bp, Cannabis sativa
tgccctttagcatttctccttaagcaatatattacaagtgtcaaattataatagatagaacactcaactaagaaataaatttgaacagcaaatttgagtcttttatgattcataagtaatataccattaatgaaaaataaaattaattaactttttatgggcttgatgattatcaaaacataatagtattgacaacattaattattatttctttcattattaccttgcattaatatagctataaaaaaacaaattaaatgcattaatatataagctgtaatttgtgggttaaaatttgcttgcacctgcttcattaataaacatcaatattagaacctcaagtttataattaatgactattaactttagtaaaataattttagcctgaaacttatattatataattaaatagtaaatcatcatataatataagttagcccaaattattttgacccataaattatatttaataaggaagattcatttaaaatcaaaagtgatataaatacatatatattcttatactctcttgtaatttttttgggaggattttaatttttatagagaaagaatactaaggttttttgttatttgaatccaaatataagaaaatgatatttttttcttctcccaaaaatccaacagcttatgggttttgatcactaataaagttattctattttattagctaatatatatatatattttttgagttagcttgattaacacaaaattaacttattaaggacctagaaatttgggggcttaattaataaatcacattttaaggatctcataatatatataaataaaataaaaggagctagtgtgcattagctataatattgtagctaattagaggcacatgattaagtaataccatgctaattaattaaccaactgaaatatatatcattaataattaatattttttttttgtttcaaaaatataattaaatcaaatgtgacctgaaaataaggggtttatgccaacatgtgaagcattggtcaaaacttaattgtcctgctctaataatttttcaattaaaagaaagaaaaaaattagaccaagatagagtatcttttagtaccaattctagctagatgtccaaaataaccaaataattataccccaattcatattttatttgaatttatttattacttcaatattatatacatttaaaaaaaaaaagagaaaatttaatttcatattacttagaaacttggcaaaccaaaaatgattttgtccttaacaattgtgtccaaaaaagagtgactaaaaaaatggcaaagagtaggatacacatgttggattggaatacacaatcatctctttcaattcatgtgtattctaaatgtttttcttttgaccaatatttttatatatttattattatacatttttgtattcaattcagattaataatatatataatattcatgtatacagtaatgatacgagcacacaaaataactacctttgtgagatagtttcaacttgaaagtgttcagattcgaaaatcttcgtaatcttctctaatgttttgtcggttgtagatggtgtgtaatttttttttttttttttttttatttttgggttttttttt

SEQ ID NO: 80371 - DNA, 1629 bp, Cannabis sativa
  modified_base (1479)..(1485): a, c, t, g, unknown or other
aaaaaaaaaaaaaataaaggaaccagccagctcaaaggtgaaacctttaaggaaggaaaaggaaagaaataattttcgtggctttcagtgtaataatcttttctctgttctttctaataagtttttaatatatccttactgtccattcaaaaaaaatatagttttacttatgtcgactctgttatgaatttatatatattatatattaaaattgtaatttttaatagaacttacatccacaaaaatcctctaataatacgtctaaatctacattcttctccgttttctttttcttttttcttctcctattcttcccttgtttttctttcttctccttttctttactttaacagtgaagccttctcttttcttctccttactcccttctgataaaaaaaaattgctttatataatttggttagtagttacttgtattatttaatatcaaaatgtctaatacttcatattataatgcacatattaatatagtatgtcaataatcgcagaggcaacaaaatattttactagggtaacgaaatttattggaaaaacataaattttaaaaatatctacaaataataatataaaatataaaatataaaagtcaattagagccttaagaagaaaactcgtgaatctcctgtttctcttcgtcaatatgctctctctagataagcctaaaccttaatcttgctctcaaagcttgtcgtcgatggagaatattcttgaccggacacgtaacctaactgtggtggatgaggtttttggaaaattaatgatttcaggcaagccaggattgggagatgccacctaattggccgattatacacacataagtctttttgttgttctctcctcaagagcatcctatgttgtctatggacttttttggaatcagattgggatttaaaaatcaagaaagttacaactttgacaatcttgttggttctatctttcactcaagaaactaatctggatcaggttctggggagaatgccatgggttctaaattttggtttcctaatccttgattaaatgaaaggtgttccatcttcttaggaccggttctaaatctcccagttaagatattattttagtggggtgaaattataagaaattcaaaaacttatatacaatattcattttataaaaaattgaggggtgggggcaaatgatacatgcccctacctccgtccatgtgttaggtgttagaattatttattactcacatcgtatgcaatatcaagatttaatttcatatagaaacatagtacatattatgataagtgtataaacatggatataaagaaaatccttcatgattcaaagagaaaaaataattcgaatattagcggaagcgtaccttaattcattgacactacaagaaaattatcctatcttggcagttaagaacccctgtaatagacttatctcagtggttattaaccgccaaggatcactacaaaaaatcttactttnnnnnnnaacaaaacttgtgactaaaaattaaaaaattatgactaattatacattatcattttatgttatgactaaaaggtccatggaaaaatatattaatcacaaaaatcacaatttgttgtgactaaatgtgtttttagtcacaatact

SEQ ID NO: 80372 - DNA, 1659 bp, Cannabis sativa
attgtgactaacagtagtaatatactaacactgacagtagcgatttgtgacttcaattggaatacaaaatatttttataaaatatatgtatatatatatatatattatatagtagtgcagatgcacacgttgaacttagtaagaaaaaatagtagcaggtaggggagtttgattcatccaaagcaaaaaaatatttatagtgttatataggggtcaaaaacctactaccatacaagatagagagagagaataaaaattgtaatgtagctactaccatacaagcgaaaaatatatacatattgtgttatcgacacatgaattttggtcaaggattcttaagggcaatgggattaccattctcgtcaaacaccaagatagagaaagatatatagaataaatattgtaatgtagctacttttgtatagttttaatagttatctctgttttctacgtgtcgacagatcacgtgggagagcggaccacccaaaaataccagtagtaatatgctaacacttacactaaattaagcaatgttaaaggtacttattacgcacaaacaagcatatgacaaatatttgtgatatgattgattaccgtgataaagagaaattaactatacttattgataaggatgactaccaagttttagtcttcaaataatagctctgctggaggaagaaggacagccaagtgcggagcattgggaggttaagcctggaaaaatgttggtctaatatttcattgactccaagtgcagactttaatttactgataaaaataacaaaagtttacttgtgtcacctgatagaggcaagtccaagagaaaataataagtatgaaaacttgtacaattaaaactacttccttaatttatggtgatatttataagcataactgaaaatatttaactgcttcaaaaaaacaaaaaaaaaaataacagtaatttaaataaaattcaaataacttttaaataaaaaacaaatgtatatttatttaataacaaaaaataaatcctaattcaaattcatatttaaacaaaaaaaaaacaaaaaatttatttaactggaacagttcagtatttaaatattattctacaaatttaaaatgctttccgatatgtaagtttgtggggaggcaacatgggtttaattacccattgtaggaaaaaaaaaaaaaaagacccactaaattaactaggtttcatgaaccactgtgcttcaactcatgaataatatatggaaatattaaaaaaaataaactttatatatcctggcatgcctaaggtataatactaaatagcttctagacatggtgccaaaagtaaacaccagataccctcagaaattaaataccagtaccaaatcatgaacgaaacacacaaaaatcaaatgataaaagtagcttaaattttcaatcttgagaaagcaaaactatatgcaactgaataaggtagagtgtaaaaaataatttaggccaccttggcattcatgacagctaagttgacaacaactaatgctgccaagacattgtcggagaacagtgcatagtgacaaagagttagtgcatgtttggcctcataactaaaaaactcttttttgtttttaaaaatagaaaattgttttttgaaaacaattttgcttgtttggccttattttttga

SEQ ID NO: 80373 - DNA, 711 bp, Cannabis sativa
caagaaggcaagaactttagcccccacccctactgcttctatgtttacagagaaagtgcttgtcatgacaggagggtcatctaagatctggtcgcctgcaagagtggcgtgaatctagcaggccatcccatacaataggtcccaacaaatgctccataagtggaagaattagcccatgaagagttagagaaccctaacgtttcataggatagcatggataggcttgtgtatccctagaagggtgcttttgggactccaatgtgcaagactccacccccactgactggtagggataccaaaaggcttatgtccaaccaaactagaaagatatctcccaggggaagttgtgatgtcaagggatctactactccaatagtatctagtccaccaagccaacatcaacaacaacaagaagaacagcaacaaggaaagaaaatccaaccataacaacagtagtaatacatccaacaataacacctgtagcagcaacgacaaccaccaacaccactacaacaacaatagctacacatccaacaactatagccatagcagcagcaataactaatccaaccacaacaatagcagcaacagatccaacaacaataacctcaataaagacaacatcagcaacaatagcaacactaacagcattagtaaaaaaaaataatcaagtgcaatcttttttgcgaagggcagaaatcctaccccgag

SEQ ID NO: 80374 - DNA, 1546 bp, Cannabis sativa
cccagcactatagttgtgctgcaatgatagcgtcaatccataccataagtacagctgaccataatatcaagctgacaccatagttgtgttgccatgataacatcaacttgtactacccaaaggtataaccaatcataatatcaacatatactcagcactctagtcatactgatgtggtagcattggttcatacttcttaaatttccaaacacatataatcatgatatgcatgcttgtgtgtataaactattgctacaactgatatgtcatcaatctggcaatataaacatgtacatatgtatgtgtgatatactagtcttacctcaattccaactttaaatgtaacattgaaccttagtggaaagaggtgttgatgatcggaggccctaagtcacatttaaaaaaaagctgataagtatttgctccagaacacttttggattcttaaaaagaatctagagttttctatcgaactacatggtgaaaataccctaaaataaaacttatattttggctctaaaatatatatatatcatattatagagctcattgcaagcttcataacagtatatagaacatctaaaacacacaatcaagtgaaatttatgggaaaaatacgaatttcaatcctcctaaattaccaaaaatggcagaccaaatttttgcccttgtaaaaatggcaagccatttttatagttggaaacaaacataattttttttccctccaattctaaccgaaatctttccaaattgtccagaacttctagacacaacataaccaacatatttcatcaagaaacccttgcaccacacttgctgcagcaaaccaaatcccttcaaaccagttctaacaagtcctaattaaccttaataagcttttcctaacctctctaaaatcccacagtaattcctattaaaaatagccaccccaaattaactaaaactcaagacaaactaataaattaggttagggttcacctttggtacttgaagaagctacgagttgaatacctcgatcaaatttagcttaaatggagcttgaaaatgatgaaaaccccttggtttttgttgtggttttaggtcatgaaggagaggaagcagtaaggtaagttttttgctttacttcaactttgactttatttttttcatttggattttcttttaatttcactccaagctactggtcatcaaatgagatgagtcatagctccctaatccatcaaaataagtgactaatcaaaggacaaaaagactaaaatgcccttgctcacaaagttacctcgtgaccctaggggtgaaatggtccaatttttgttattgccctaaacccatatattctaaaaagttcaatgatatttccctacaaattacttgataaaaatttgtattcatgtgactaaaattattgtctggcccatttacactgttatcaaatataaaaatataaaaacatgaaaattcacagataacatgcatatcacacttataattcaataaaatctctagaattcaaaaataataatcataacacatgttttcatgaaaat

SEQ ID NO: 80375 - DNA, 2468 bp, Cannabis sativa
ttgtaattgagaaatgaaaacttgggagcaagattctagaaaatattcaaaagaagaatctttactcataataatcgagttacaagatttcattttattacagcaaaaacaaaaagacaaactagtaattgttgtaagatgacacttaaaagcaaaagcagctttgcttgaaccatcatctggaagcatgcacagaccatccttgagccttcctttaagaactttccatgtgtccttatccttgacaaaacaacaattcttatgaaactcaagaaaaacatcattgtcattagtgagcttagacacacttataatattctttttcatctcaagaacttgaagaacggaatttaattgcaataaattgttagaggaagatggtaatcttgcagaaccaatgtgagcaatgagcaaacccttaccatttcgcactattatagtttctgttctagagtaggcaattgtagaatccaagttgtcatgtccattagagatgtggtttatggctcttgtaaaccaagcagaatcattgccaaaatcaagaatagagatagaggcatatacctaaggatcatagtcacaatcgatttcagtcaagtaggctgttggggatgctccattaggcttcggagtaacttagttcttgtcaaaacgatagtgacatacaggagttgtgcaaccaaatcgaagacaaacttgacaaatgagtcttgaattcgccattggatagccacgagaagtaccatggccagttggtcttgtgctatcttgggaatttcctcgagcagaaatgggtctatagtttccatttcttgaagaaccaaaggcaaggttggtttgcatcttgacagtgagatctgtcatagcattatgatgctcaagacgactttcatgagacatgagtaaggcttgaacctcttcaatggatcaagaatcactttgagatgttataccaaacacaacagagtcaaattcaaggcctagaccattgagaagttgaagaacaatgtcttgacttgtcaaagaagagccaacacttgcaagagaatcatctaaagattgaaccatatcaacatagttagagattgataagtttcctttatgtacatgagagaattggcctttaagttcaagcaatcaagctcaagattgacggttaaacttctactcttgggctctccaaacagcaaaagaggtggagtgatttgcaactgaggccaagatcccttcagacatagacgaccgaagccaagaaaataacaattgatctcgtttcttccattcaacgagttgatttcaccattaacaagattttgaacaggaggcacaccactaaacaaaatctcatccaactcgtgaccaataacagttggcacaacctgagacttccacacaaaatagttaacatgatctaatttgatggtgagagaagaggagaaaaagctagagaatggattccatatgggtggggatagagcaggcaaagaagcaatggcacgaccagtttgattagtaggattgaaagaagtggaggtatgaatcaaggactccattggaggcaagtgataccatgtagaagtttgactgtagcaagattaggaagatggtaaaaacaagagaaagcaagatggaaagaaccagagaaagcaagaggaagaagagagaaagattgacagaaaagcttgtctctcattaatgagagatcctttatttataagcacaaaattaatacaagtggacacaataaagagctaaaacagagctctaccaaagcagaaaaaacaaaattgtaaagtaaacagttaactaatttctaacaaattaactaactaaactaactgaaagttatgttagctaacaggcaccaaatccatgtgaggtcacaattgaaattgttgaattgaaatataataataagtcgacgcacttctctacgataataatattcacaattgattaaaaactttgaagtgtgaagattataagcgttaatgatttcgttttctccattaaaaaaatggagagattttctacttttaactcacgaagcaaaaggcaacaatttttatatattacccagcttaatggcgactttagccgaagactagagtttagagcatagaatgaagaaaaaaaaacaatttgttttgttcttaactaactaattaagaatatttttctgtgaaggcagatatacaagcaactgaccttccccaccagcaacagctaatgcacctttcattgaatcatcagtggcaatacatgaaacattgctacctgataccatttcaaatgaatataaataaatgtctaaatgagaaaacataaaatattaacatcaagcaaaatatttaaatactggaaattaggggtgttcataaaatagtcaattcaatcaaatccgtacgatccaatccaatctataaagtgcaactatccacacttgtgcggattggattggattgaaa

SEQ ID NO: 80376 - DNA, 1582 bp, Cannabis sativa
cattaaatatatacatacactagacggctttacattatgcatgatttcattaccttttcaacttttacaaaacccatatcttctaattacatgagtaagaatttttttgatttgttattctaagttaatttatattaattaaattaagcacactcgtgcagaatcaaagttttgtttttcttcatattacaaacgcttcaattattattttttttaattgttttaattataagtaaatgttgcatgtggtccgctatttattatattatgcataatctttaaatttagtaaccatcaaggtaaacaaaatagaattgattactatttatttattttagttgtcctaactaacaaatggatggtcaaatttacttaaaagggtacatgaagaaaagaagtagtgtcactcaatagaactttgaacgtacaaatatattgaatatgtcttaatgtcatcaaaaaaaatctatacaatattgtttagtgtgtgaaagaatgaaaaaagaaatacgtgccacaaaaaaaaaaaagaataataataaaaaagagaacatgggtgggattggagttgaaatagtatgaattaaataaacgacaaataatttgtgtaaggggaggaaccattctacgaaaggtagccatcggctccacttaggatgatgacgcgtgtcctttccaaaatagggtaaagtaggataagcactaggtcaagccaagggtgggtagggccaatgtaggcggattttgtattagctgctctccaattgtggtgcttatccggccacgtcatttttggggaccactttaaaaaaaaattcctctcttcagatattttttttctttttcttcatttcattatttccattttatttttaattcattaaaatttttattttttagattttaacttttttaattttttaattattaaaaaaaattcttaaattactgagttagttaaatttttttaaaaaaaaattatttaattttgtgttctctaaatattaatatttattaaattatctctttaaatttaaattttaacatgtattaaatgatatattttgaatttttatttgtgttaaattttttatttttgtttaattttaataaatatgagaaataaaaatgttttttatgctgtcatcaaggtctcatagctcagattctgatccacttgccacgtgtcaatactcatctcgtcggaatctcctacgtgataaagtggaatattctacgtatcggtgcttcttcctgtttaaaattaaaattaattatttttcgttcgtttgctttgttagcatatcatgcgctgtggattaattatttataattattattattgtgttaacgtaggataagacttttagtagtaggtggcttatcttccttttctttttaatgaaaaaaaaaaccatactattaattaaatattaagattatcctaattcctaaaccacatgatgcgtgtgccacgcacacttgatggaaaccatttaatataattttatatttttttatggaaaccatttaatattaatagttgaaaataaatgggcctttctttcttcttttttttttt

SEQ ID NO: 80377 - DNA, 1838 bp, Cannabis sativa
cctcaagccgtcgaacctaggcgaaaatttctccttatccgacgtcgttttcggcgagcttttccttcccgaacacgaagaaaagtcctgcgattatgaaattttaaactaatcaaaacaaatttaagaggaaaatgtctcaaatcagcgaatcgaaatcggatcatcatgaaaagatcttagttacctgattggaagaagaatctagagaaacatcgcgtgttccggcggaggaaccgaaagctacggtggatgccgccaacaccgaggcaaccagtgttcccgaagccttcatcttgttctttttcttctgtgtggagattcaatggccgaaaaacgacgtcgttttgtgtagatctccacctattttcttggtttaactttttctagggtgagaaatgagagaggtgtgtttatatactgctacttcattttctttatgattaaattgtatttgattttgttttgagttccggggaaattcagccttggagtctggagaatattcgccacgtaaattgactgggggacccacgtaaatagtatttaattttgtttttgatcggacggttgtgggtgggggttgttgggttgaatcatgtgatgtgagtggaggagggtgtagagtgtggtaatgtggaggcgagagtaggggattgagtgggtatgcttaagctcgataccgtctctttcttgacttgttatcaacgccatgtgctccgcctcccaccacactaacacgctatttatattcttttatcatattcacacacaaaaaaaaatatatatatattcttttaattattaaaggtaattttgatttttattttggaaagtattaaattatgtctgttttttttgctaaattattaaaatgattgaatttaggaatttttgtttaattacattttaattttataaatttagtgattgttaatgtactaaattgtcattcctagactttgatatctattaaattatattcctaaactttaacatgtactaaattatgacctttaaattttcatatatgttatacttttcttactaaaatttgaataaaaattcttaaatccaacaatcttaataattcatgaaaaaaatttaatgaccttaatagttcaagaaacatgatttagtacatgttaaagtacgaaagacaaaaatcttaattagtcaattattaaatggaaatgagcacatgtccagaaaagcacaaatatgctcacatataaaaaatataactttggacacattacgacatgataatataaattagtataatatgataaaaaaatatgtgttaaaacacgatatagcaaagaaaaacacgaatgaactagttcaaaaaatacgacacgtgacaattgttaacaataattttataattaaaaatactaaaacaatgtaaaactagtatacatatatatttatttgagtatttatagataaatatttaaaatttaataattttattaatttatttatatgatttttataaaatattgttaaaaattatttaaatataattgaagctataaaatatacctagaaatttgattctaatatgaaaataggttgacttgtttaagaaaaatgggatggcacaaatatatcaggcctacggattatgttagacctaccctttcaaaatattgacagaacttgataggaggacgatgtacactctaagcaaagtgaagacaacttagagttacaattaaattaattttattgtattatccgagacgtaatatcaaataatgagtaaggaagaaaatgaagtagtagtattattggtcatgttttgtgagtgattgctaatatttttaaagttg

SEQ ID NO: 80378 - DNA, 2831 bp, Cannabis sativa
  modified_base (1542)..(1553): a, c, t, g, unknown or other
tataaatcacgagtgggaatgatgaaaatagaagcgggtcaaaattagattgaatttgaagtacataattattatttgcgttggattaaaattaacgtatataatatgaaaccaacacgaattgacttattattaaaattattaatttatacttaatgtattattaaattttataaaaaaatatataaattaaaaaaattacgcaaaaatataaggtagataatttatatttaatattaagaattttatttattgtattgataatttgtgataagctatttattatgaaaattaaatatgtgatactaattatgttgatcaatatgtatagtaatataagtatagctgacacgcaaatatgataagtcgacaagaaaacacgacatatcaagttagggttgagattttttgacacgaaacatatatgggtcgggttagggttgactaattaaatatgtcaacttgcataacacgaacatgtatatgatacggcaacacgaatttccacccctatacctaatccacttttacaagaatttaaaattagttttattatgtgtggatcatctctttatataaaaagtatatgattctttaattacataagcactcaggcatgatcgctacttataacaaatgcattaaattaaatacaaattatttgtaaaataaatgaaagaataattttgattgttcttgttaaagtctgaaattggtacgactatcttggttgaatattaatcgttcttatactagtaacttaaaaactcaagggttcaaacaagttatcgtgtatatttagtctttggattaaccgatgtgaaggtacgactttcacatagggtacgagggagaaatgttgagtcatcgcgtataattaatatacgtcacgactatgcttacttctctctacgtcctacttttattttatttagttatgcaatgcataacgtgcgactagaccctgtctcaatcacaaccttttcacatgtttctatcatgcgaggatatgttgattttcgggggttacacccttgacacattgtcatttttctatgggaaaactagtctacgtgctaattttatgtgagacttactcgtgatttgaatgaaaaagttcatctaatgacattatatacatcagacgagtttgaccgggcttgggtccgggtttttgggtatcgggtgtaggaaatcacataccgaatccacctggtttaaatttgggtttgtcgagtttcgagtcggagttttacttaggtagattaaatcgagttttgggcaggtttgggctttcatctgggtttgggcttctcaattttcaatttatttatttttcacaattgcaatttttttaacaacaaacaaaatttgacccatattttaatcaagccttgagatagaaagcacaactaagtacaaagaagagagaacaacaacaataatcacaacattgtattctattctcagcaaaaataaaatctacagtacactattaatagaaaaaaataaaacaacaacgaagagagagagagagagagnnnnnnnnnnnnagagagagagtgtgtgtgtgtgttgctgcccctgtgattggaacacgatggtaagggggttggctacttcgcctgcgacgataatggatgggactggctacttcgcctacgatgacaatggaggaggatggctgcttcgccttcgacaacgatggaggaggctagctgcgacaggattgagataaagaaatagagaaagggagtggatgagatctgaggatagatcgagggtgagaggagagattgagagggtgagagtcgtgagatattaatgtggcgtttggttggaggtaatgaaacaaaatagaatagaatagaatggaaataatttttattccaatcttttatttagttgcattttaaagtattagaatgtcattccaatagaatgactattctatcattttggggaaatgactattctattttgaagtagaaggaatgaccattccaatggaagatgagaaaatttttgataatttatttatcaatttgttatgcattttaaattttattcatttctattcatattcaaattctcattatcattcatatttctatattttcattccttccaaccaaatgccacctaaaagtgaaagagagtgattgagagggggacagacagtgaacaattgagtgggtgagatctaggttttggagttttttgggtatgctacttaagtgtttatatatgtataattttttttctcttaatttcgggtataattgggtcggtatcgagtttcgtaaacccaaaaatgtattaaatatagtacccgaactcgaacatgattacaattgggtgacacctgaacccaaaattttacagtgtaagttttgggcttttttgggttatcggggtttgggctaggcaagttagccaggtgagtcgaattttcggacctaaatttgcatccctaatactataatacatattatgagcatatcattacaaaaagttaaatatatataagggtattcattgaaccacatccaatatttttaggcctatccagatcaaatccaattatatatcagatgttagattttaccatccgattcgatccaattaatttcagtcatccaatcgatccaacatccattgaatgttggattagatcagttctatctattagatgtattatatatttattggttcaatttgagcttatccaatatttcagacctatttttttggatcgaatcggatctattcaatattttaagtccagtatgtattagattggactgaatccatctaatccaaaaaaaaaa

SEQ ID NO: 80379 - DNA, 1439 bp, Cannabis sativa
  modified_base (147)..(158): a, c, t, g, unknown or other
  modified_base (1387)..(1412): a, c, t, g, unknown or other
tgcattttctccatacgaatacttgtcttcaggaaatgcatctattgtaagcacgggtacaatttgttcgggtgcattttgtgaaggtaaatccacggccggtgcattatcttgatgcaaatgaagatatatatatatatatagagnnnnnnnnnnnnagaaagagagagagagagagtatagtatatatcaaaattattaaaacctaattcagatggatttaattagaataggttatgtataaacacgtaattacttgagtatatacactcatttgcgcatgttaattaatttttagataatttattaagtgatagtccaattaatattaaacatgattaattaattttatccaaaaatgtgttaattcttatatttgacgccatcaattcatgtttaatttatctttgtttttattatcacgttaattagttaccatttttgaattaatggagaactcaacacaacccattaaaaccttcacatttagaattgattacaaaattatacattaatttatctaaaaatacttaatctcatagctagctatatacattaattatgtatagtacggcattaatgttattattctcatagctatatatagctttataaatattttatagatataaaaagaaagaataacattcccacaagtttagacctaaaatattctaactagcatattcattcgtaccattcacaagttttatttagtgggtcatacttgcacaaaatgcacccgaagaaattgtacccgtacttacactgtataatcagtcgttttcgagattatgaaatttgttaaaataataatttaaaatattgaaatttgaaaaataacctcaccgccatattaatggtcgcacagtgtaaatttataatcatttataattgcacaactatttttgcgaccatataaaatttgctaataaatatttattttgcaccataaaaaaaatatgaataccaatcatgcatgcatgcagttatatttataattagcttttattatacgtatagtaccatttagtacctattattttcccatcatatatataaatgtatatatatatcctatatttacagtctaagccaattaactttccactttccataatagcagtttaattttctttttttcttttctgttttgctatatatgcacaatatacacaatttaatatatataattagccgagtaatttgctattttgatacatacaattttagtttacgtacgtccacacacactacaatattagggaaaagtagtaaataccaaaactaacactaattaatcactgtttaattaacagtgggaatcatcagtactagaattatgtagcaaacaaaccaacaaacactacaaaaaaactgctacttnnnnnnnnnnnnnnnnnnnnnnnnnntaatttttttgtgactaaatgtgaatt

SEQ ID NO: 80380 - DNA, 1717 bp, Cannabis sativa
ttttatgcatttcagattttattccattccattcctattccaatttccattctcattctcattcctatattttcattcctcccaatcaaacaccacctgaattctcagtccaaaattgtcaaatcacatctagtgacgaatttgaccctgcataacactccttcaaatcttatctgggtcgatcatggaagtcgtattttaaaattatggttatgttgtcgaatagattaaaattaaagtttttttttatttaatttaattaattttttattttgaaataaattttttagattaaacaacttattataaatattgataaaaataacataaaagaaaatcatgagtatttttgttgctatttttgagttttgtttaggtatttgatagtagcaaaatgaacaaaataaataatttatgccataaatttttctttaatatatatatatatatttatgtttttgaaaacatattaattcaagatccttcaataacaagggcgataaaatagcaggaatagaagatccactaagaatacaaccagctttagaataagagtcccttataaggaaataagttcaccttatttgcaaattgtttaacaaaagtaacagaaacattattcaaaacaaataacaactttttagactcattaatcaagataccatatagtgaaaatatatgaactttgttgttgatagcatgaacaacattaatacactcttattccacttgtatattttgccagtcgttcctttttattctactgagagcttctttaattgctacaacttcagcgatatcagctctaacataactaagtttacttgcttgaaaggtttcaaagaagctgcaatcatgatctcttgtcacaaaatcccaaccaaaacttttttcatcaataaaagttgccccatctacatgctttgatcataggatagttcggtttagtccaatgttcatcacgctcaaaaatagctggtaagctatttgagagagtccctaacatagattgagtagtttttcattgatcaagggtgagtttagaaaataagataactctatcaactaatggttaaatattattccaaagaaattcattgcagcatctccaaagtgcttaacacaacatgaatataagctcaatatcagagttcgtccaacttgaaagaccggccgtgttgaaatcaaggtgcaaaagtaccttcaatactatctctagatgaccatagtgctttcctccaacagttttggaaaaattagttacagctaacaaagagatggagggcgaatttaggtgctgagttgtagagagaacaagcagtatcaagaataatgtgtcttgatcatagttggaccttagtaggtaggaaattaaaggaagctctccacaagaggtctttaacacgagggggaatttgtaactaccataaagatttctgaaaatcaaaaagatggtcaaggccccagttaccttttaattgctgcaacaagtggtatgcaatttttacattgtagacaccagcacgatcctttatccaatactagtgatcttctaaagcaaaaggagatatataattggaggtgaaggataaagtatctgttatcccatttttaacaccatgaagtatctgttatcccatttttagcaccatgatgtggcagcatgaattagtgacatgtgtctgttattctttataggttgctagagaagtgttcc

SEQ ID NO: 80381 - DNA, 770 bp, Cannabis sativa
agcaaagaactatccaatcaacccaagttttaataaaaccaataaaatttaatgtaagcccaaataaaagtctaacaactaagttaagcgtgtttttttcaaagtacttaagatgaagaaaaaaaaaaagacgatagtaattattatcaattatgtcgttcattttgaggattttgattacttgatctaggtggtttaattagggtggtcaaaattttcgagatgaataataaaattcttttattatatttaaaaaatatcgtgaaagaaaaatgagtatagggatataataatatagtatatacaatataattaaattcataattcttttcttttcactaatgagattatggattgtggtccgagcaagtggaaaccactttaattatttaaatttatttggaaaataaataaaactttagggggacaaaatactaaggttagctggctaaataaaagtctatttttttccacaccacactcttaaaccaaaagttttgaagcagacaaacaagtgaacaaaaaaaaaaccaaaatgtttaaaaagaagtgagtaaaaataattaatagtagataagcaaaaaaaaataaaattactaatagcattgatatatgcataatttaaatactatatattgagtaaaatattttatattattatcaaatataatgttttgatgtatatattgttattacttaaaatatacaatttttttttaggggaattactccatatattatttttataatttttttttcaaatttacggt

SEQ ID NO: 80382 - DNA, 1139 bp, Cannabis sativa
ttcccataatcagatactcataactcaaatttcaaacaaaagctggaaaaaagtttaagtttataaaaattaaacaattttcaaaaccaaaattaaagagaataatcaagaaatacattaaactacatctagttacaaaacaggatagataaaatatattagaaccgtgattcatttttagatctgagcatgtaattcttatcctccatgaaaggcagctgagcaccaggtctcgtcaaaggaaaatagaagagaagagctcgggacccattcgacatcgcggccatcgtggctctgccgaaaaatcaagagagatgagagaggacacaagacccatttgacattgggtttcaagagcacaggaagaccatccgtgtttattccttggtgaacaacagccgaaggtggtaaatcatgtcaggccgagactgaggcgaacgatggagatagagaaattaatggtatgggaggaagaagctccatttttcctcaaggttgagagtcaactaggtccttggtggctcctgttcgagcccttagccgacgatgatagctcatcatagtcgtactaggaaccgcgaagaagagagggtgagataggtcgagaaacagagagagaaattgggttgagagggctggtctgggtagagagaacaagagacaggaaaggttgagggtgaggcgcgaatgggaaatagggttttggtgtaaggaaagaagacaagagagatgagatgagacataggggaggttttttttgattttggattttatgttttcattccctttggtctcgatttgtaaccgagatttaagagaataagtctcggttataaaacgagaccatataggtgtgtttttttttaattcttttaaatctcagtttaggctttagtgtcggtttactgaccgacacaattgaattttttaaatctcagttttaaaccgacacctaaaactaagagtattttttagtgtcagttttaaaattaaatgaaacttgaaatgacatcaaaagtgtcttttgtagtagtgttcctcaatgaacatagcatcactggtacagaagagatcgacccagatgttccggctataaagcttaacatttgaaaagccgagtgtgtattgatttcacagac

SEQ ID NO: 80383 - DNA, 823 bp, Cannabis sativa
aaagaggacaatataaaaagagtatagagtgtaatttcctctatataaaaagaaaaatatatttattttaatttttaactaaatttaaaatgtaatttttttaaaaaaaaaaattaggaggctacagcacccttcgccccctagctacatatataatcaccattatactatttatataaaataaaaataaaaataacttttatacccttttattacaaaaaaatttaaagtagccatattattcttattagaaaatatttgttattacgtactattaccattatcattcattacactgaatcaaacgccacttaaatctttggcctatttgttgagggcatagacgattacacccgaagaaggtggtcgcacacaccctcaactaggtcacaagaagcattatgtgcatgctcatagtgaaaaagaaaaaagtaactttgtaactagttacttgttgaatgttgttacttattgtgaaaatggcattcatctctaataacacatgtgcctctagaaatgcctcatgtaagaggttttcaaaaaacacaagcaacaacaacactttttctatagaaaggaaaaaaaaaatctcaagtcgaatctttctttaaaaatagatttgtaaattttatgggacatcatatgatgcctaacactaattgatataccattttgtgtgaattcatttttataatatgtcctactcacatatttagatggtattgttagtgactcatctaaatatcaccacaattgttttagtgaatatttagatgagtcaattgttgtactgaattttagatgagtcacaccataatagaaa

SEQ ID NO: 80384 - DNA, 1252 bp, Cannabis sativa
atataattactaattagattcgattattagacaaatatattttttaattatttttcaattatacataataaaataatatatattataaaataagaatattaaataagggatatagataataaataaattaagtaatactaatcaagccgaactaactattatccatctccatatactaataagacaataacaacaaaacaaagaaattgtaaattacaaagtcattattagtacccattaaccaaaattttctttataaatccatgcttttgtcttttttattttattattttttttttgaaaaaaaaaattaaaatcaacacatgcaacaaaaaacattaagataaacccaaagaaaaaacactaatcccacatatattctcaagtccagctatagccaataggtcttattattagtttttaattttaccaataatatatataaatataccaaaagtatatccacattatattcctttattttgtactatatatatatataaattagaattaaacatatagtacgtacgtgtgttgcatgccattttttttttcttttctttgatttgtttgtttagtggattattaattagtaataattttgcaaatgagtagtactactagtagtgttgatgagaagaagaaagaagttgttatcatttcaagtagtgaaagaagtttgagatttgataagcttttaagatatggagatggtttggattggagtcttatggttttgggtagtttagggtcaattgttcatggcatggctcaacctattggatacttacttcttggcaaagctcttaatgcctttggtgataacattgatgatattcctgccatggttaatgccctctacaaggtatgtttaatacttttaagtgaaattatacgattagttagcgatgttttataaaagttattttcttaagttatatgagactcgttacttaattacaccaataacggtatgacaacaaagaggatgttagacactagtgatgcctttagcaattctctttatataaatatatgtatatatattataattaatatatgagtattgttattgggcacgtgtctagcaacttctaaatgtatcatcgtgtgattggttagccatactttcagggccgaccctgagaatatatgggcttaaggcaaattaaattttggggctctcagaaatatatataaaaaaaattgaaaaatagtgttatgggattcaaacccatgacattgtataata

SEQ ID NO: 80385 - DNA, 1489 bp, Cannabis sativa
tactcggatcctagacccgaaaccatacccgaacctagacccggatgggttaatgtcatggtatggtgctaaaatattgattttttcgtaaattaaaatctaaaaacaattttaaaaaatttgtgacaaacaccattaaaattttaaaatgacaaaaaactattttctattctcacaaacacaattttaaaaattaaaaactgaaaacacaaccaaacaaactaaattatttgatatttttcaaaactttacagaaattatattgtgagtataacgaatattgtaataaaaatagtactaccctatttatttatttattaataattaaaacaatgtaaatttatatatattaatttttgacattagtcaatcttaaataatattcttctggtgtgtctatattatgcgttttttaatatatagtactactgttctcactttatagcggctctttcactctctttttctgataacaaagagaaagagagtgttttttttctttctttttttacttttgattacctttttccctttttctcattctatcaatatctttataactttagtgtgtgtttcccttttttttttctgattatttatcactttaatcactttactatcaggatctaggtcggttttagggtatttataaaaaagtaagaagaagatggaataagagagagagaaagagagaatatatatatatatagttgaggtttgactatatattgtatatgtacataatgtttttcatatctcagcagtagtagtactagtgaacatatatatagttagtgagttgtgctctgaaccttaatatgtaacaatcctttatagtaaaagagttccaccacagtactgcacgcattcccttttcttaccaattttacttaaaagtccaatattaattttctcccactacttttattacaacataattaagatcagagaattgagaaaatgaatatgttaatttacaatgattactaacactttgtacactcaaattattattaaattatatattcttattaattatagatatttccaataagatcacacataagtgtaatttacaatatataatagttggagggtataaattttttattaaagttatttaattgctaataaaaattttcatatgaatgtacatatcaaaaatgtgtttattatgtattaatcattaagtatagctaactttatgtacacattataatttgtacataatattttcaggtgcctacggtgtagattttgcttactcatcatctaaggctacattgcaacagctataatctatatattaatatatatatatatatgcgttattaagcatcaatcaatgtgttcaactctttctttctatagatatatgtccctcttagtgatgctaaacccactctgcctaatagcaactatattgcattgatatatatactatgtgaggaagtatgcgtatatgtatgtataagtgtttacatatata

SEQ ID NO: 80386 - DNA, 775 bp, Cannabis sativa
gtaattactctatcttatattattaataattacgtaaatatgttaatgttaccatacctttatatttacttttctggaaaatgaatgcatatatatatatatatacaagttcaatataataaggatgttgagtttagactttaaataaatattttggacattaattatagcttcagaaaaatagtagatcatgatgaatggattattccatggtcaaaaaatctgtttattctttgttcagtagacagctaagattattattttcacaataaataaataaccatacttttttttaaaaaaataaaattatatcctaccgaagaaaataacactatttgcgttttttttttaataaaaacattagttattgtttttatttggttattaagggagaccatggaagtaagcctttgtacgtatatgtttatttttcctctctctcatggcatttattgcttcaattatttgagtgagagaaggttttgcttttcatccatcgaattgttaaagggcatcaatagtgcctagcattctcctattatcttatgtgttaatatcactattagtccaactaaatatcggatctcatataatttaatataataacttttaggaagtatcgctaaccaatcgcaactcaacatgtggagaaagtgctaagcaccactaatgcctaataacaatgctttaattaatttgtatgtaattaataaacaatttatctgattatatcgagaatatgtatttatagaagttataagttcgtgttctatta

SEQ ID NO: 80387 - DNA, 620 bp, Cannabis sativa
accgactacttttaggtggtaattgccgcgaacattcagtaaaaataatacaacacaatcataaaacttatacctacgcctcttttttcttttatgcaatacttatttatgttggaatttcttacaaagtaagtgaattttcgacgaaattgccgcgaacattcactaaaaccagttttttgatgaaggaactagtttcttggtaatttcttctggtgatttttccgacaacaatgtcaattccgacgacttttttggaatttgctgtcagtgttgaaaaagtcataggaatagttgccggtgttagaaaaagtcgccggagttcctgtcggcgtcaaaaaaatcgtcggaattggcattgtcgctaaagaaaccagttttttagtgatttttttggtaacaatgtcaatttcgacgacttttctagcactggcagcaactctgacgacttttccgttaccgacaacgactctaatgattttttcggcgccggcagcaaactccgctaacttttccaataccagcgacaaataaaactgcctaaacaaacataaatattaaatatgggctttgaaaaactaatttatatgacatatcaaataccataaaaatatctaaaa

SEQ ID NO: 80388 - DNA, 1885 bp, Cannabis sativa
  modified_base (40)..(55): a, c, t, g, unknown or other
  modified_base (1580)..(1585): a, c, t, g, unknown or other
aaccgctcttccgatcttgttaatcaacatacttgtgagnnnnnnnnnnnnnnnngtaaaataatttccaacacaattagtattaagcttattcagttaataacaatatttatttaaaggttaaatttctttttttttttttggacattgtgtgggagttaggaggccatagtagtgggtataatatactaaacctgtgaagaccgcctaagtttaatatattgggttattaaataattacggtttaattattaaatttaattattaattataatttgaatatttgtagaaatttatttaatttcaacatgttctaattatgctatatgtaaaatttttgtttttctgtaattgtgttcggtagcagtaaaacgcgatgttgggccattagagagtcacactttcatatggtttagaatgtttttaatagtgaggcatcattgttagacattgaaaatatcaggaaattgtcgggggtttagagaagaccaaattaccttttaagtcattaaacttttgtctttcgctaaagggcattgtagtcttttacttgaggatttttgtcctttataagtatgatatattaagatttgtataggaaaaataagagaaaaacgtagaaaacacttcctccttcacccattttctctcactttcgaatcaacacacaaccagacaagaattgtaggttttctcagctgaattcaggggatttcaggaaggtttgaagctgaattctaggtatgaagttttgatctttttctctttgggttttcttagctcaaagtaggttatttatgcatgaatttgaggattttattgttgtggatatttaggtttttggctttagtattctggagttatataagggttgttggaggtaatttgagctggattgggagtttgatttggtgtcttagtggaatttgagtttaagaactcaaatcttatcctttaatggtgttttcaatttttgagccttttattgtgttctattgcttgaattggatgtgttggagtatatagaggtattgtggagaatattgtgaagtttgggtgtgatttgaggtcttggggacatttttgaggttcccaacactgaactggtctgtagcaactggtcgaccagttggtcctcagggaactggaattctggttgggaatcggtctaccagtggggtcaattttggaaccctagtttatcttatttttgtgatctttagggtatttccatactattcaatcggaataaggttaattcttagtttgaattttaagtccccgataagtgttttagcgtatctctcatcggaatttcgaatgttgtgatttagggccctatgaaacgttgagctgcaattccactcaggctgaccggcacacctgaacacagaaatgaggtaagatagtgttatacctgaaattcgactggcacttcagaggatgacacgtgtcaaccttggagaatacaaatcaacaaatataatggcaattatattaaaagatactaaatggaataactcatttaatgcggagttaatatagcatatctataactcgctgactgtatagtcttaagnnnnnnaaggatgtatgaactattaattcaggtattgacgagaaaccattttgcgtcagaagacatgattgaaagggtgacatcgataatgaataagagaggcatcaacctcactatgtgtaaaaaggtgttaacaagacatgttgactgttagggaacttagcgtataatacacattatactaactaagtataacagcttaaagaacctggataacgattagcgagacacccatctcgctataggaagggatactcctggtaccttcactaataagatccaaaaatctttaaggagatccactgc

SEQ ID NO: 80389 - DNA, 1674 bp, Cannabis sativa
aatcttattatattgaaatgggttttatttagggcacaatacccaacactgatctaggagtaaacttagacctagttgacttaaggttgaggcataagctaaacaaccaaaggcctttaaatgttcatatacaggtgcttggaatagagagtatgaaaaggagacttgttctttagattgggtgttggtgcctattaataagatagactgcagttgacacacactctcctcaataaactaaaggaacataggattgaaaaagaagtgttctagccacattgagtaaatgctggtgttttctttgaacaacagaattttgttgaggtctttgaacataagaatgacaatgcctaatcccaagctcaccaaacaaggttttgaattgtagctcttttgcattatcagatcttacccccttaacagttttgttaaatttattttgacccaaacccagtctaatgaattgaggaatgacaatttgggcttcgaatttctatctaatgagatgtatccaagtgtatcttgaacaatcatctacaatagtaatataatacttgaaagtattcatagtattaaaaggcccccatatgtcaatattgataagttcaaagcaattctcagcaatattatgattagatgcaaaaggcaacttcttttgtttagcatagtgacagatagagcaatgaaagagagaattagaatgagaatgaaaattcaagactttattcaacagatggatttttacacatgatggatggcctaacctgtagtgccatacagtttcattggaaatggtagaatcataaatagaaactagattgctcattatttgacaaattacaattaagaaaataaaggtcaccacactttttgcccatcccaatcaccttgctcttcatagtgtcctgaattacacattttcatgagaaaaagagaatgtgcacgtagtagtggttgttaatgagttaacagataatagattgcatctgaaagtaggaacataaggcacatttttaaggaccaaatcaggtcccaacataattgttcttatgcaatctactttggcatgcataccagtaggtaaaaggacagatttaagattgggattagtatgaatattctaaaataaagaaagattagaacatacatgatgcgtagctccagtatatataatccaattggaattagggattacagattccatgccaaaaaaatgtgatacgacaggctgatcttgtgaagtttctggtgcagcagcattgttagcaaccttttgagcaagtatggccattagtttttgacactgtgaacttgacaatcctgccaccatgtctttttcaccattcgtattcccagatctctattcctcccccctatgatattagtagatgtagacttcattagaggtcctttggcatttctatttggaaattttccatgtaatttgtgaccgggtaggtatccaatgattcgaaagcatctgtctatagtatgaccagacattccacagttagtgcaggaatacttaggtcaaaatggttggacatttccagcaaactgaccctcactgttcgaaatactcttttctggttcagcactggaactactaccattagttaagcctctttgtctttcttcttcaacaacagtagcataggctttattaacactagg

SEQ ID NO: 80390 - DNA, 1750 bp, Cannabis sativa
gaaaatgaaattgttatcctatgctggtagattaacactgatcaagtcggtttcggcttcaatgccaatctatgcgatgtcaacaaacaagattcctgtgactaattgccgtgaaatggacgctataataaggaaattctggtggcttggaactgctgaaaaggatagatttatggctcttagatcatgggacaatatttgccagccaaaagccagcgggggcctgggattaaggagatttgaagacatcaacaaagcccttttggccaagctgggttggtttttagctagcaggtctgataaactttgggtgaattgtttgctaaagaagtattgcagcattaacaacttctggagtgtgagtattaaagatagcgattcattcctgtggaagagtattttgggtactagagacgtgattagggctggttctatggctttctgtgcttcgggtgtcgatattgatttctggcgtcaaccgtggattccttggcttaatacggtagaatttgatgcgttaatgggtagactgagagcccagagattcactgttagaacactggaagacgtttctattggtaacagttggaatgaggagcttctgctacagatttttggtgaggatttagggaaacgaatcgctactatccctcgaattcctttatcacatcaagatacgatgatctggaaagttagaaaccatggccaattttcagtaaaagatgcttatgttcttgaccaaggatatagatttgattcaaggagtaatatttggaagtggatttgggattcggggatacatccgagaatttccttgatgttatggaaagttttgaatgaggctttgcctactggtgctagaatttcagtcctcacaaagttcgggtgttgttttcgtgatcatgaattagaggatagcctgcatcttttcaaggagtgcgcctttgcgaaagctctttggtatgcaggccgtttccctttgatggtggatatgatgcatcataattgtatgctagagttcatcgaagcactgctaattcctcattctgcaggttttaggaaggagctcatcacttatatcgggtgtgtgcttcagtccatttggaaatgcattggttcggataaagggctggaattttgatgtcaaaagtgttattcacgagatgggtgcagcctttttggagctctcagagtgcaactctgaagctatcagtgaggatatttctgctccaattgaagttcaggaagtgcaacgtgagtcggctgatcatatactgtaactgatgcatcttggaaggacggtatgggaggttatgcagtggtagctattaatcgagcgtccaattcttggatgtaccgtctggactcgggtgcagctggttcccctttggaggcagagactagggctgtcctatatgctttggatttagcagtccgaaattcctggtctaggattcacatcatatctgattgcaaggttttaattcaggccttggtgcagcgttctccccctcctgattggagatttcttaatgtttctcttttagctttagatttcttaaatgcaatttcagagtgtaatttcttttatgttcctagagaccttaacgcagttgcggatgacttggccaacagagctagattgtctagccatgagtcaggtatttttcaaggggagggaattccccctgtaattcccaattacttttctctgttttaatgaacttgttttctttcaaaaaaaaaaaaa

SEQ ID NO: 80391 - DNA, 1252 bp, Cannabis sativa
tgatatccagataaagtgtagtattgatagcctcaacttgaccattagcctgtggcctagatactaacgagaagctcttaataattttatttctttcgtagaactcaataaataaatctccattaaattgagtttttttttcagacatattttttatggaagtcccaaacctgcaaatgatgttcttaatcacaaagttaagaacttgtttacaagtgattgacaccaaaagtttgactttagtccccttggtgaagaagtcaactgcgattacaacttattttgcaccacctcgccctattggtaaagctctaattagctcaatcccccatattacaaatgggtaaggtggggtcatcattcatagttcattaggaggtattcttgatatatgcgagaagatttgacacttatcacacttttttacaaactcatgggtgtctttatttatggttggccagtaataactctgtcagactatctttttggaccaactttgccatcttgcatgatctctgcaaaagccctcctgaatttctctaataataccaaaggcttttgcgggaagtacacaccacaacaaaggattggaatatcctcttctatagaattttccatcaaccagtgtgtatcttgggactatatataagagcttacgtgcctcagttttgtctgctagaagttctctgtttagcaactacttaacaattagattcatccatgtgggactgacatctatcatttctacatcttgcttttcagttttacagatacttagctcgcttaatacctctacgacaactagattcaatttgtctaagttaaattgtgatgtcaattttgctaaggcatcggcattagagtttggttctcttgggacttgttcaattttaaagtaatcaaaattttctaagttttttcaaaatttctctagacacttggcaatccttgtgcctttttcttggtgttgactaatactatttacaaccagctacaaatctctaaaatattggactgacttgacttttaatgttttcgtgatccataatcctaccaataaagcatcgtcttctacctcgttgtttgaggcatcaaattgaaatctcaaggcatagtgaaacttaaagtttttaggtgacaccattattacacatgccccaagacattctcatttgaagccccatccataaatagtttccacacatcatgatctattcctgttctacagtcttctcttgagctttctccttcc

SEQ ID NO: 80392 - DNA, 1593 bp, Cannabis sativa
aataaattaaagcccccttaaaaattaaattatatatactccaatgataataaaaaataaaataagcaaactaataaatcccaaaattgtagaaatatctttatttttagcacttaaaaaaaaaatataactaatttttatttttcaagtcttgtctaatgacatgtttgtgagttttttgtgagtttgtgagatttgtcagttgagagtggtgaagtctgggcctgtgtttttcacttgttatcttgttagttttctttgtctttgaggcaatggcgtctagcagtcatgcagtcgaggaattgggagttcagtgggccgactttcaagtcgacgacgaggagggagggggtttattgttcgaccaggaggagactttggtggatgatttcgatggaagatggtgtctagtgggcaagctattgtcggacagaccggcagattttgattctttaagaaacgttatggcatcattgtggaggcccgggaaaggtatgtatgtcaaagaattggaaactaataagtatttattccaatttttcatgaagtggatattggtagagttcttgaaggtaccccatggacgtttaacaagattccgttgattgttgaacggttgaaggaaggagagaatcctaggaataaagctctgaacactatggagatttgggttcaggtttataacctggaagtggggtttcgatcagatagagttctgcagggggtaggggcctatattgggcaatatgtttcctcttgtccaaagaattttgctggtatatggcgagactatttccgagttcgggttttgattaatgtggaaaagcctcttaaacggagaatgcgaatttataagaacaaggtggagtggttttgggctaacttcaaatatgaacgagtacccacgttttgtttcatttgcggcatcatcggacatactgaacgattttgtcataggttgtttgaggaatcggctaacaccatcgcgaaaccttatgatgtgttcatgaaagcacctgaccggaggcaatcaaaacaaataggggctcggtggcttcgggacaatatgggacagccagtggagggtggcgccggtcatagtacgtcggagaaagtttccatggatgcaatgaataccgaccgtgattctggggatatgttgatgatggatggagtggctaatggagtgattggtggaaggagatttggtgatttcccacaacctgtcaaaggcataaatcacgagaatattaatggggagagggagaagaacggggaagtagatataaataaggaaagtcaacaggagggtatagttatagtggatcttaaaaggaggcgtgtgaatgggaaagaggtgcttggtcattcaagtgaggattttgtggggtcagtggtaattgttgatgatgtggacgtgggtatgattcaagaaggaataaatagagaaagtggcattattgcaaatggggcttatgataatgatagtgagggtatacaggttgtaaagcccaatggtgggaatgaacttttaaggaagaattctgaagctaatattggcatttttccaaaaaacgattctttggcgggtac

SEQ ID NO: 80393 - DNA, 2279 bp, Cannabis sativa
caattccagaacttacttcactatggatgaatatctaggatattcaaactcttctaggatttataaaatataaagaaataaagtttgagtagcttaccaattccaaactagtgttcaagcgatttttcgaaagatactactacaattgaaaagctgcattgtgaataaatgaaaaaatatataacgcacaaagaatgcttagaagaaactgaggaaaagtgtgaaagtaaaacaggacacaatatgaaaaaacctcaagatcaaagagaatgccaaaaccagctcaaagaagtatcttatgtctggtgctattcattatataaggatataacaaatgacaaatgcataataaagaacagtatatatatatataataataatatatgatttatctccctgtaataacggaagatgaataatgggggtcaagatcagagctaatacttaagggacagggaggcataatatacattggcacaggcaacttgggcggcaaattaggcaaagcagcttcaaagtttagaacactcatcacttgctttatagagagccgacatattggatcagatgtaattacatatgttccatatagtaatattttaaagaaaaaatcaatgacatcacaatatttgtgtaaatcaatgacatcatgtttatatctttattacatattatttgacagtaataaactttcataatctattcttatatagtaatactttttaggcgtgcaaaatttgataattataatccaatgcatgtataatttcaaaaaataaaacccttttaaaataaataaataacactcacaaagtcttgtttggtttaatcaaatatttgactttgtataaataaaataaataaaacccgcagaataaaacagttctttattattgatgatatcgaaatatatataattatcaaatcttgaaattaaccaatgctctctagctaagcaactcatgatatttgtgcaaataataaaactcattataagtacaacatggtggtagctataataataagatatacatagtaaactttaataaacaacagatacaaccttcatatgaagcatatatgaacctaaacttggacaagtagagccccccaaagaaacaacaccttagcaaataaagatttaatctactgcaagcacaaaagttgggaaacatagcaacttccaaaacttactagaactagcaaaatgcctatccaaccttcccctcttgtagttcatactctagtatttaagaaagaaactaagagcaacataacagattttcttaacccaacactacaagaagccatattacatattaatgaaaactgaattacataaatgcactgcttctacttaccaagctacaacatttcatttaaactaaagcactcatttcactttactggcttcatatgtacatatcattattcatgaccaattgccatccaatatttgaacttctacttgttcatctcctttaaaatccaacagcaccttaaaatttgcaagtggctacacagtccttaaattacattatgttgggtaaaatagtttaatcctaacaactgtttttatatatgtcaagtcaaaactattttaatttatttctctcttaaaacattgttgagttattaaaaagcactaagatcttgcatattttcactatcactaaatatttaacggttaaaacatagaataatagatatagtactcaatcgtaacaaaaagttataccatatcacataattatgaaacttacaaattaaaagactaacaatcacatatatatatatatatatacatacaaataaactgaagcacatatgacccaaaagggaaccaaccctcttttaaaatcttccaaaataaaaacttaaaaacacacacagagacactcatatatataatataatttagttttgtggtatatatatatatagtattgtaattaaggtcatggagttcggggctttttcttgttgttgccattgtggtgaggtggatcaggaccagaaggaacctagcttcctcaaagcctccaaatcattcaaactttttcctccatttccatagcaaaacttaatcctacctaaagtaatctttgaacatttctatatttctataactaagctaccttacaaaccatttgacctcattcccaattgaaaacaaacacattagcccagatcagagaaaagaacaaatttgtagcccaaaaagtagagaaaaagcaaaagaaaaattactaaaacacaacgtgtaaagcccgcttagt

SEQ ID NO: 80394 - DNA, 3125 bp, Cannabis sativa
  modified_base (26)..(66): a, c, t, g, unknown or other
tttcattgttttagagatattcatannnnnnnnnnnnnnnnnnnnnnnnnnnnnnnnnnnnnnnnnctagtaaaatattcccaacagttacttcgtaggttcttttgtcttctgagttgatcaaagtagttggtcgacctgggccttctggttgtttcctggtcatgtggccttgttggcaactgtggggatttatcccgtataatgactgagtcatctcttaaacattttcttcgtgagcagttactcatagtactatactaactattttcttcagaatagtctttctcaaagtaacatttgtggagggaattggattgattgcttaagttcaacacgtctccatgcaaccacgggaagtattcgtattgctggccattaagatctcgagcaaagtacctacaccaaccactccgtacatcatgaaaatatttccaagtgttgagtagtttgttggtcctcaccctccgaatctcatactctccactttcatggtacagctttcgggtcgctccaaggttggttgcaggtccttttccctttgtagggtgacacagtagcctagagtcattggacctgtaggagaatctcgcgaaggagatcgatttcatgcattgtttgaatttttttcgagcaggtttctggttggtcttataagcggcatgtggtgatcctgtaggtcctcagccccaagtctgagtccttttggatgctcgctcgtagtttgtttctctaacaagttaccgctccacataaactagaggacccataggtccacattgctaagtctaagtccttttagacacttgcttgtggtttgtttccctacagggagcctcagttcctattgcatgttgagtagtggtacaagtaccaagagtggtagtgttgctttgcatgtttagagacattattaacaaacattgagcccttggatgattacttgcttgaaattatgaattccttttgaaacaaaactcatagcagagaacttgaatggtaactagaaactcaagttgtggcaactagaatcacgtcaatcgaattaatgtcgagtgagttatgcccgtttcactgaaggtagttcagcaactggtgcccaagttgacattctggcatcaacctgaatgttgtatgagtgggaaaacataccaaacttatatttttttttatgcctaagtgatattttgagattagttattcatattcttagttttagtgaagtcgttcaccaactctcagatatgtcacttttttgcaaataagtagactcgaaacttctcgatttgttgctaatttatcaatattttagtttgctgaaaagatgaaatatcaaattgagaatttgacttgtcacaagtgttatctctcgtttacaacagaaaagaagttagatgctcaagaagaaattgaaattggataagtagaacccaacgcaccaggctatatgtaaacttgggcgatgagtgctcttcagagagcatcccgagactcgttttgatacttctatggaattcgaaattacgaacaaggtctcctaccctatttttgaccaagataagaagaatgatcaaagaagaactcgtgtttgaggagcagattcatacaaagtagtttgtacatcaatctgggcggaaggcctagcacccatgtcatcctgagtgttagggccctattttggccctcaactgatctcattttcttcctgagaatacttgtatcttcattatttgtgaaaatcaaaaacatttccgtgacactttaaaaaaaaatacttggaactagctcatgttgataaaacatcaacttgagaactaggactaggcactaggtcaacctgggtgctgggtcatagttttaaccaccagatgactctatttgacttcttgaaacactcagatcttaatttttggtgaaaatagagaatgtacctgaaagatttctcgagaaaaatgtttagaaatggcctaggttgacaatatgtcaacctgggcactaggccctagcactaggtcaacctaggcgttgggtgctcaggaaacacctttagtaatgtggtttgaagcgccctaggttaacaacatgccattttaggtgttgggtgcatcactaggtggcattggcactgggtgcccaggtgcctcaaatgggaagtattctgattctgattctagggcctctaacatgtttgtaagaagtcttattcctgtctaagtacaaactttgagccatttgcattaagacttactcgaaaactgaaacccttccctgagatgtcaacttgggtgctgggtgaaaccctaggcatccgggttaactttaggtgctcgatttgactcttttcagttctcaggcttcagacttggattcttccttactttttggatcaaaatactaagagattgtgagttggaaaaaacttggcaggatccaaacacccattctggagctcacaaagtcaacctggacgcagggttagggatctttcctagagttgactattatgaaaggtccctaaccctgggaagttacttttaaatattgttgtccacatcatcagggttagtttttgagtaaacagtgttagtcatagttatgtggatatcaaaaaatttattcttaaagcatttgaatttctgcctaaaaagcatattgagaatctgtttagtttactatgggctctctagaatgaaagaaatgcaagcctttttgggaaaagaaaagcttggatgccttataaggatgtctttaactaggttgtttcattttgcataggtacaaagaaaaacaagttcaaagaattcatagcaaagctaaggttgtcatgccagaacccaaggcaaggtagactcctccccaagaggaagcttaacattaaatgcgaatgcaaccattgcaaacataatggtaagattagggttatacataaagttttataaatcgcccaacccgaataatcttctcaaatcaaatcaaaaattgaaaaacctaacgaaaatataacccacccaatttgtatattggacagattgaaaataatactaatccgcccaataaacccaaactaacccgaccaacccgattaagagagttttaattcaaataatgtttatttgatggtagtt

SEQ ID NO: 80395 - DNA, 1005 bp, Cannabis sativa
agagagagagagattgagtttggattttgtatgaagaatcttctctaagaagaagtttcttggataagagtgtgagagataaacactttgacagaatctaacaaagaatcgatctcgacaatattataccatgtttttgctcattcaataaagataattttggtggtgtttcgaaactagagtggagtcatagattattttaatttgcaggagttgaaccaatatatatcttggtattgattttattgtttattgcttcaactgtttttatttttaacactctgttcatccttattttagtctttgagtgttgtttgtaaattgttaatcttgttattgctaactgtttgttaattaagttttaattgatttaattctgtatattaattataatttttctaaaagtttcatatattttaattttatagttattatgaaaaattaatatctattatttatagtggtgttaaatattattggtgtgtaatgtgtgtaataacaatgttatattaataataataataataaaatgattggtccccaattaaaatataattttaattttgagaatagaatttgtgaggtcaacttattacaagttatcatttatataacttttttccgctaaaagtatgtcaaacattatcttttgatatttactagaagtaaaatacgaattagtaacaatcaaattgaatattaaaaagtcaaatttggtttattttaagttgatttctatctcaatttataatttttttacattattttgtaataattatttactttcaattggaatatctctattccaatttttttttttttttgagataaaataatggtgacattttattagcgagttgcatcaaccaatacaatattcaaaagatccaccggagcatttctttcagtgaatatacgaactgaatgaaaataagagttacgagccatataatgtgcagccttgttagcagaatgtttaacaaattgaatctgaacagattttaa

SEQ ID NO: 80396 - DNA, 3928 bp, Cannabis sativa
  modified_base (3695)..(3699): a, c, t, g, unknown or other
  modified_base (3804)..(3804): a, c, t, g, unknown or other
tgcccccccagccttcctagatttgacaagcatgtcatccacgtatacttccatgtttcatccaatctggtctttaaacatttgattcaccaactttggtaggtaggtccaacattctttagaccaaacggtatgaccttgtaatagtaaaaactcatatatgttcagaaacttgtattttcttggtctggtggatgcattctgatttgattatatgtcaaataggcatccataaagcttaggatctcgtgtccgactgttgcatccacgagcaggtctattcttggaagtggaaaacagtatttgacgcacgccttattgagatcggtaatatcaatacatactcgctattttttgttgggcttgggtaccagtatggggttagctacccaagcggggtagaaagcttcgatgatgaacttgttgttacacaacttttctacttcttttttttaatgcttgtgcccattttttgtctaataatcttctgttttgataccgaccatgtcctcgtgcgactagccaaaaatgtttaggtttgtttttagaaattttattaaagctaattttacttcaagcaacaaacctttgccatttttgagtttcctggtcgggacatttgggtcgatttctatctctttcaattcttctactggcccaacatttgtatttggttccccaagtcggggatccacatcctcgtccgtgccttgggggacttcctattgggcaatacttttccccttgtccaaattctggccagaggaactttcctttttggccttggttagggcaaggttatagcattcccgtgcaatttgttgattccctttaaggcaccctaccccattctttgttgggaacttgacgcacaaatggaaaattgatgtgacaactttcaggtcatataaggctggtcagcccaacatgacattaaaagctaatggaacatcaattattagaaattgtgccatcacagttatgctcctcggagcttgtccaatagtgaggagtagatgaattttccccaaaggttcaacactctggccgaagaaaccatacactggttgggtaaagggggtcaaatcttttggagtcccatcttctgatatggtgtcttgaataggatatttgaagaagctccattatctatcatggtccgagccactgttttatttgctatctctacttccacgactaagggatcgttgtgcgggaagcaaatgtggacatcatctgcttcagtgaaggttatagtgggttctcctacccgtggtattttttgctttctctcctctacggccaagactacttccttttgctcgtgctgtaaggttcgggcatacctctcttgagctttgcctgagtctccagctaggtgtgggcccccaataatgacttgcaaatacccgtccacttgtgaaggcattattagatcttgattattgtctgcttcggcggcccgttgattatgatcggccttgatgtatttttgcacatgaaggttattttttctgatcaagaattcaatttctcgcttcagattgttacagtcattcgtgtcgtggtcgtagtctgcatgaaaatggcagaacttggacgtgtctctcttacttacgtcattcttcatgggagtaggttttttgtacgggaccatagactgggttgtagcgtagatcgtctctaggtcgtcagttaggacagagaaggcagtgaacttggaggcattttctctaggggtgtgttcgactttgccagtgaactttcccttttcctcgttgtcttgcttgccattgttattggaccttttttcgctcggagttaagctgctagggtattgtgggctttgagtaggtgctcctaccgaggggacatctggtagttggcccggcttaggctcgatgtctgctcgctggcgagcctcttcgagcttgataaacccatctgctcggtctagaaactctaccatagaccacataggaccacatcttttaatgtccttccacagttctccgagtacctcgatgcctcctaaaatagcggtcagcctcccctcttcagttaatcttgcgacttttgtagcctctgtcatgaacttgcttatgtaggctctgaggggctctcctggtctttgttttacttcgaccaggtcttctagatgtaatgggagttgatgagaggaggagaaatgcacatggaatttcgaggaaaaagccttccatgaattaaatatccctggtggtagcttgaagtaccatgttgtgcgaattctgtaagtgtggcagggaataccctacaccgcacatcacccagtactccttgcagatccatttgcatctcaaaatatttaagatgtgacaagggatcttcttttcctgcgtatatcttccaagtcggcatcttgaactttaggggtagctcaaggacgtcgatctcgggggtgaagagtgattcgcgtgctcgatccatctcgagattagtgtgttttgggctggccaggccttgagccatattttttagtttatctaattgtgcttacacagatgggtaaactagttcagcctcttaaccgacatgtgtcacgttagtatcccttacagctgggtcctagatacggatgcctagttgagcgactggttaaacgtattgttcgtccagacctcttcttctgttcaaatcattcctgagatcatggactgcaaccaatctattgaatattgaagcaccaggtggcctcagtgtttgactagtttgggcagtgggttggccagaactgtcagtttggatgaagttattaggtataattcacctaaagaacaatcaaatagaatatggccgtctaccgcttggcccacaagtgggacttgtgagcgaggattggacggctgaccattatgagtctgggcggtatgcccagcagcaatttcttctgtaccgcccagtgggatactggacatagcagctggttgctgattagcaacttgatagactcttcgtatcagtacggcagccagccttgttcggtcatcgatggctgcttgctacgctttcaatgtttccatttccctatccctccactcaatgaattggcgtccctgctcatcgaacacaagttttattgcagcatagagatcctccttatcatggtgcatggtgttagtatgacattgcatgagcccaagggcgtcaaggaggttttgaatctcagtgtcatctcctaccgtcctctgagcattggttgtggatgggattccaatgctgggagtgctttgattctgctgcagaactggtatttccagtctcttgcacattcggttgatcccaaccagaggggaagtcacaccttggcccacagtaggtggttgtgtgttaggctgctcgggattggttcctggtaggacccttgtattcccaagggtttgcatagcaggatctatcaccattgggtcactctgatcaaccaagcctctgcgagtttgcaccaccattctgtgtgcctgttgaaacttatgacaaagaacaaacttggatttttgctctcaatgaaagcaccaaagtgttgacctcgcttttagtcaacgacaatgagttaattatgaagctattagaaatataataaaaacagagcaaaaaccaataagcaataaagaaaaccaggttttgaagaggttcgacccctttagttcggtaatagnnnnntccccttagattgtattgacttgagaacaaagaacacagtgtttcccctctcagagctctcacaatcaaatctttgagtgtttctcttagatctctctctaaagnaattctttcgatcccttttatagtgaagctagatcactatttacaagggcttaatgcatgaggaaaggtttcccttatgcttacaatatctataattggaaagaacatttattacataattaga

SEQ ID NO: 80397 - DNA, 1049 bp, Cannabis sativa
tctcaaattaattcaacaaaacaataacaagaataattgaattcaccactcaattatatcctctcacctgccaaataataaatgatgaatttcatatcttatctctatgtactcaacaactactacaaatcaatgttatgagctcttttggatatagtatataaattatattgtattaaataataaagaatattatatttttgataaaattttgtattctattaattattataactttaaattttaatacaatgtgaattgtattatttcatacaatataatttttatactatctgatcctggattcgaacctagacccacactccaaatccgaaccttgatcttgtaccccgccctagacccgaccccagttctgaccccgaccctagacccaaacgtggacccggaccccaaccctagccccaaccctagacttaggaccctagctctggccgcgaaccccagaccccaacttgaacccgaaatcagcactgaacttgaattctggacccagacctcagccccaaacccgacccgaaccacgaattcgatcctgatcctgaatctcgaactctgaaccccatccaaagcctaggttggatccaggattcaggttgggattgagattggatcgagtttataatatggatattataattttggatgttcgatacaaggagaggagaggagagaagagatatgcatgtgagacaaatgtatcaaatcaaaattattctctctattttatcttcattattttcatcaattacttattgagcaaaagtaaagattattctctctactctttgttttccaaaaaaaaaaaacgactctcataggcgttattgataataatatttgcgaggaaactaattaacactactaaaaattacgttttcccgactgttttaaacctttagctaatgtattaatgttggtatctattactttcgcctattcgaccgtcgcaaaattgggtagaataggcgacaatttaaaacagttgaggaaaaatttaccgacaatttaaaaccttcgacaatagtaaa

SEQ ID NO: 80398 - DNA, 1963 bp, Cannabis sativa
  modified_base (1206)..(1212): a, c, t, g, unknown or other
aaattttgtttttgaaaaataaaatgcattttataactacttttgttttttaattttagaaacaaaaaataaaagtgtgttctgtaaatttcattttttattttaatttgttgactttaagttgggttcgggtccgagcccacgtctggattagggtcgggtccgagtctgggtccagattttaaggtctaggtgggggagggagtccaaaatattgatataaaaaattgtttaaaaaaattttgaaagtgatttttttttttgttttcaaaatttttaaaattttaattctcaattaaacatattaaaaagtaaaaactgttctatacaacatgattttagaaaatatttctactttttaattttaaaaataaaaaataattgaaaaagtattaccaagcacactcttaattagttatattttataagaaatttattaaatatattatttaaaatttaaatttatttacttgttttattatttgataaaattagttagatatatcattttataaataaatttaaaactaaattaaattttatgtatttaaaaaacataattaaattaaattatatttaattttattattattatttaagttaataattaagtatattaattctaatataattctaaacaaataacatatttatttatttttttaaaatatattaaacagttgccaaaaaatatataaacattaaataggggaaaggagggtgatgggcaggaactaagaattgaatcattctttgtagtttgagataatatggataaggagagctgcccatgttctcaaatacatatccattaattgttaattgttaaatcaccctacttgttttatttaaataaatagaagttggagtttatggaaatttaaagttgccaccctccctttagataagatttaacaaatttatatcattatgttttatcattgttatatatatatgatccctgatttgttagtggacatggtcaaaatagcatgtgcttattacaaaatgagatcaactagtatgacaagggttgagtagctcaaaatgcatccttggttcataacactatatacattttatttttatttatttattttaaaaaaaaatggtaaatatcattttagactttgtgttatgcaaaagttattaatttgaccttttattttgttaaataataaaatgaatcatgtattttctaaaatnnnnnnnataggaccctgaactgatttttttgtcaaaataaaactaaataataatctaatctaaaaatgttatgacaaaactggttacattttctatatttgttcgtattagaaattgtcttataattggctatattaaaaaataaaattattaaaaattgaacttagcatcctatttgactattttagaaaatataaaatctaatttgtcatttaataaaatataaagtttaattaataatttttttaaaatataaaatctaaaatagtatttatcctctttcattttattttttattttttaaagatacttatacatttaatttgaaaaaaaaaagtacacacatttgatatttgaaacacaaatacaaattacagatttatattgagaacttgtattgcataatatatttttaattttattttttgtcaccttttttctttaaaatagttatgcaaatttaattgaattcaaattcattgctttgtcaattaaaaaaaaatataaagaacttaagtttattgatgtttaaaatgaaactacttttgctctaaaaaattcagcttgaaaaaatagaaaaaaatatgtcagaagtgggatttgaacccacgccctctttcgaagaccagaacttgagtctggcgccttagaccactcggccattctgactttgttgacattcttacactaaagtaatataataccatgatatcatgttgtccaaaaagtttaataaacattattattcattgtttgg

SEQ ID NO: 80399 - DNA, 1121 bp, Cannabis sativa
gctaggcccactcattttagttggccaaataaaaaatatatatttttaataatttttaaaaatactatatatctttatagtaaaagctaaaaaaaaaaatttacctatagtctatttgaattcagggttagaccttattagtttttacaaatttttgtgatgacacgtatttaattggaaaaaaagtaaataatttatttattttaaatataaatatgataatcaattggtaagttttcttaaaattcttcttccttggcaagaagcaatctatgttatagccattattaataatattaaattatcaattatgtagccatttttatacttccaaaagttatgtacaagagaaagcaaaaacgtataaaattgttcaactaaccaacatataaacataattatatatatataatcttatatttgttttatatttgttatatatatatatacatatatattatatagtgaatgtgtagatccaggatgtcaaattgagaatgagatgtcttctgtaaaacattgattggttttagaatttttgtctacctactaattactagaaccttctttacaagaaaattagggtttaataagcaccgatcttgagttgaaatggattataggcaaaaaaaaaaaattttgagcctttactacaagaaaataaaaggtatttataaaaattatttaaaaaaatattttttttatttgagcccctaaaatgagtaaactctaagtgcggatctagcccgactatatctaagaccggccttgatgaacactacaaatgtcatcagtaaagagtttttttttcataagcaatgactattaataataacacgtcgtcgctataaagtcgtcaagagataactcgttaataaaagtatttataataattaattataaataaacaatatatacatgtatgtctatatatataaataaaaatgagtttaattattttgtgtggttaatatgttatatatatatatatatatatcaagactacagccaccatcttattctaaatttgttatttgattttgtcaaattggttgaatttgacaaatttattacagatttcaaaacacattaaataagctttcttttttttaaaaaaaaaa

SEQ ID NO: 80400 - DNA, 592 bp, Cannabis sativa
cttgaaggttatgtatgataacagattttgatgtatatattaaaatattaggtattagtaacatgtaatacttattttgtattagacttgttattattaaattactaatttaaataatattagtaaaattaaatctaatacatttcaattatattttttaaatatataaaatttaatttaattttaaatttatttatacaaaaaaatataactaactgttgactcagacatttagaaacagacttttaaaccacacctacttgttaatttgacgagaataaagtattgttaagtatacataatgagatacaacaatttatagtagttcactccttgtatcgcgacagtaatgaagctacgtctactttgggtttttatttacacgagatggattacagaagaatggataagtctggatgctctaatttctagagagagaaactcaagagagatgctataatcttatggctacttttctaaatatgaaaaataagctagagaagctctcattttataagtaggagatcctattaaatgggaataaaataatccaaaaaatatgaaaaaatacatttaggttatttttgaccgt

SEQ ID NO: 80401 - DNA, 683 bp, Cannabis sativa
atatatatatattcatactcatatacaatcccatttcatccaaattaacagtgaaaaaaatcagacctgtgccggttccggtaggatcgccgccctgaacaagaaagcccttaataacgcgatgaaagattgtgttgtcgtagtaaccttcgaggcagagctggacgaagttccgtacagccttgggagcttccttgggccatagttcgatgtcgagaggtccgtacgtggttgtgatgaccacctttcccctcgtcggaggctctaagacgtaaatcgccgacattgtagatcgccgatttcgagcgccaaaaatccgattttgtgagctcagtttggggaagaagataaaagttacgattaatatctaatatgcccccgaattttagctttaatcttattttggccacaaatattttaaatattgcatattaaacccccgccttattatgtttccattggtctaattattgtgacatcatttcttttttaagaaaaaaattggatgacaatatttttaaaaatataaaaagaataaataaattaatataacaaaagagattttatataaaaaaagattgacaagaaattaatttctgttataaatattaataattatgtggatgcccaaatcttttatttattacattaattgtaattaatattcctctttttcttagttt

SEQ ID NO: 80402 - DNA, 1522 bp, Cannabis sativa
attacattgaatttgagttttatttagggcataaaacccaacagttatttacatattaaattagtaattacaaattactaaaatgtcccttaataatagatatttttgctttatttttatcggttgttaaggccgaattcgcagtctggcttgctatccacgtgtgaagctatgcaccaaaatcctgtttggccaaccatgcactgtaggatgcatgctggccgaccctatgatgtccagaacctagccggcctatgctgaccatagggccggtaagggttggctggccaacttccactactacaaataggggtaagttactaaatgacatataaagactttgcgtcggtctctaaaactgacgtgtaagccatagacgaaaatagtattttatttgcatcgtttataaaatgacgaaaaaatataaaagttcctttataacatgttgtgtcggtttggaagtgacgtataagccatagacgcaaatagtgttttatttgcatcgtttataaatgacgaaaaaattatattcgtcattttaaaagcgacgtaaaatataaaagtttctttataacatgttgtgtcggtttggaagtgacgcaaaaatagctgtgccatttcaaaaccaacacaaaaaacttatttcgtaggttcttaaatgaagagtaacatgttgtaaatacttattttttttacttattgtgtcagttataaaatgtagcataggtgtaggtaagaaaaagttataaactttctgcaattttcctaactgcattttcatattttaaaatcgttttgcataacagtaaaactatatatgatcgataactataactatatgcataatacaaaaaatgttaaaagtaacaattataaaacttatgtaaatttttataattagtaatatctataatcgataacaataaaagtaactattaactaattacataataccaaaaatcttaaaaatggaggcagagagaaataccaaaaaataaagcacaacttagcaacataattgataaaagcaaggctctaataccaaattgtaacaccctaactaattaggcatgttaacgtgatttttaataaaacgtgaaaaaaatcttttcccgctccttctctctctttcggtgcctcaccggagctatggcgaaaagggcgaaaatggccgtgaaagggaaatctaaggggaaaagaactggtccttcatcctcggatagagtcataaagactagatccatggatgcagtgctaggaattcaggaactggcgattgaggaagatgtggattcaatggaacagtgtcgagatgatgaactctatgctgagagatgcctttcacctgcagattcggagttaagcattcaacgacaaagtggagtacaaaatgatttttcagaatggctctcgattgcaaattgaaatgcacaagatattagcactgggaaaaaggtatcacctcctattctcagatctaatatagtccgaaacctagaaaattcgtatgaacttccagata

SEQ ID NO: 80403 - DNA, 1416 bp, Cannabis sativa
ttttatggtgtacctcttcgttgagtgagtattagttctgagagcattctcatcttcttatcggttaatcattagatataagacagctcatggccccttaggctgagctcgacctttttctagatttaaattgtattgggggagcttgtggcatcttaggctgcgcttagccccttacgttgtatctgtgacacttagaacacagtttgaatgttaaagaatcaatactcctttttgtgaggtgtctctctcagagtcgtattcaattcatttttcattttaatattttaagggagatgatggttctgtgaaccgactcaacattttgctttaaatttttaagggagatgagggttctgtgaactgactcgaccttttgttgattttttttttatcccttcacatgctttaggactaattttgaggagcatccctctcattattgcaagtgctcttttttctagaactatcttttggctttcactcttttttggacagttaggggtggtcgatcccagtagtcttaagagtttttttttttactttcgcaatttcaagtgacaagtgtaattagacatgttgagagggatgaatgcgatagtgaatacttaccatctcattaatgaggtaaatatgtgatcgccaaagtacatatgttatgtttggagaccaactttagtgccttctttaatgtagtttaatgtacctaaggtaaacttgtcattgccagaaatgctctctcgtatggtggaacttcatttcaaggagcatcttggatgtttgatttttatgggccataggttggaggcttcacttgaagtgttggcttatgagcgtcgagagtagcatctaatagaccttgtcagaatttgacgagcttcctgaagaacactcaccggtttcttctattaagactttatttcctttctcaagcggatgtattttttgctcttttgtataagtcgtctaagccatccaactcttttttcaatatattctcccacagtctactcccagggtgtaccccagtagctatagcaaacttgagttcatctttagataccttccctactttggtaactttggtgttgaagtaatggatgtagctttgtaaaatttcttgtccccctttcttcacaatggtgacacttgtaacaagcataatgttgtcgcatgcagcctgatgttgttggaggattcgtctaaaagttgcttccaagatgtgatcgtcccctgtcctagctgtctgaacaagttatacgcgaatccttttaatgtgatcatgaaatattgaagttcattacaagacacttttttcatcatcatcagttcattaaacgcaccgagatggtactttgggtcagtgataccatcatatggtgtctgcagctccttgcagctccttgaagttcagtg

SEQ ID NO: 80404 - DNA, 1902 bp, Cannabis sativa
  modified_base (1143)..(1146): a, c, t, g, unknown or other
ttaaattataaaattagacaaatgctatttatttagtattttattttgttagacattaattttattaatttatattctttttaaataacataaattttgatagttagttgatattttgttttttcaatagatatttagggtgtaaaaacctttaatttttgaaaatttggatttattattttagtttttaattaaatataaaatgataatatattaactataaatatctaatttttaaatttagtttattttattagtttaatatattaaattataaggtttcaaatattacattagaaatatcttaattttcaaattaagatattatatcattttatcttattagttatttaattcattaaaatttatttaaataagctagaaatttgaaagttagttggatatttaatttgaattgagatattttaatattgttagatttaatatttttttaatattgtataactacctaatttaaatttaaattatgatattcatttttaataatatttatttaacaaacttttcttatttgttacatgtttatttattgttatcctaaattttgtcaacttaacgtggcatgtccacataagctaagaccaattacacatggaatacaaccttaccaatagtaggacaaagtcttcatacaaggtatggtaaaaccgtcaagtagcaagcgaaaggagttaagcgagccatcaaggagttgtagcaccatgtctagccagccaaaaagggagcatataggtcgaccaaggagttaagcgagtcgtcaaggagcggtaccactatgagctccaaagtgtatctcgcagagttacctcgctgggatagcaacaataaccctaacagcgagctgaagcttttcctatgtcaatttgaggtcgataatataaaaaccattgtttctgctattgaagacataacgcttcatctgataattgtaattcttggtgacaaggtgaacttcagcagtcagcatcatttgaatgtcagcttctatctgagagagctgactcgacggagcattgaatcccattgaaagatgtctgaagctgattagtgaaggtaccatgagtatgccttcctacagcgagatggatgcctcgctattcgttgttcaagttcattcaactnnnntgcttagtttgtataatgtatactatacgctaagtgttctaacagtcaacatgcctcgtttacatctcttcatacgcagtgaggttggtgcctcgctttgcattattgatgtcgtcctaatgatcgtgtctccatatacaaaatggtttttcgtcaatatgtgaagtaatagtttgtacatctgtgtctcgcctaagactttacagtcaacgagttatagatatattctatcagctctgtatttaatgagttattccattttaatatcttcgaatataataatcattatattcgttgattcgtattctcccaagttgacatgtgttctcttctgaagtaccagccgaatttcgggtataacactagctaatcacttgtaatatgttactgataattcaatgaatgcagcttagtcttctttcggttctctatgttttcctttctctagtttctcaactgacataaacgaattatttttttatataaattatatataacaaacgaatatttcaatgttgcaatgcgaatgggacaattaaaagaagggaaatttcacaatctgatcaatagtgtattgtaatatattcacccaacaactcaaaataactgtgatgttaaagtagatttggagagtttgtgtattgcggtggtcactagagaccactttaatgaggttgtctgggtcactacgactaggttggactttgcagatgctctgtgtgacaaggtggctgcgtgttgcttagcccttgattc

SEQ ID NO: 80405 - DNA, 3132 bp, Cannabis sativa
aaaaatgtaaagtttgccatgtcccagtatttttgaaaatatttggtaaaaaaacagtatttttgtaagtttctcttgattaaaccaaatcaaattatgttttgatacaccaaggcctatggtaattttttaaaaatatatgacatatctccatttaaactagattacagtagaagtattggtgtatttttttgctaattgaatcttaacaaaatttaaaaaatctaaacaaatagcaaacagtcagaaaaaaataaatcatacatccaaaaaaatcatttgatcagtatataattaaactacataataaattaaaaaaatgaaacaaaattttaccattacacgagttatttttttttattttttttttcaaattttgttttttacaattatgttattgttaataatgggtattaattttatattttaattttttttgtttatttatttttataaattttaaatattttttaaaaaaaaattaaatacttttaataaaaaaagataatattattaatttggaccaattatttaaatgtttttttaaataattaatcatttaaccaaatttatttgaaaagggatttgtaaaacaaaaaaaaaaatagagttttttcttgcaagtattataatcaaatggttaactgttaaaaaaattataatatgaatttaaatataaaaatagaaattatttataaatattaattgctaaaagagtcattaaatatttaaactacaaattaatttttgttaattatataattaattataattattttaattctagaaaagaaatttgatttattggtaactctagagaatggtaaatagaattgtgtgggttattccatcgaatagtacatatctatatacaaagctaggagactaaaataagaaactactaaatacaattaactttaattttgtacagctaatatttcaacactaccctcaagctggagcatagatgttaatcatgtccagcttgttacaaagataatcaacctgcaccccactcaaagtctttgtaaaaatatctcctaattgttctctagtcttcacatatcatgtggagatcaagccttgttgaatttatcataaattcataataaatcttattcttgctcttctttttgaagcttcctacaggctttgctctggttcagcatcaatctcggtttgtttgcctgattttctttttctttgtttcttcttccacaggtttgagcttctctgcttctttctctcttttagtttctctttgcttctttcttgtttttgcattaattaccccctatcactctttaattttgatgttccattttgttcctgttagcctcattaattgctctcccctgacttttgatttatttccctaatacgtcaccctaatcattatgcatttccccctaatttctcgagctcaatcgctgtttaatgctatctctctctcacacttgcatttaattacggcggctctttcttttcagcatttaatttctctgcacaatctccactcttttcgatcttcggatcgttcttatacaactaaaccaaccgtcaattggtttctcttcctctcacaaaaaaccatcattgcgtatcaacgccgaatccagaccgtctctcccagctttgaagcgatggttcagacaccagttctctcttcgaggcgacttttcttctccaggtactcttctctgtggtttttttctatctttgcttatttatatgttctctcccttactctattcataccactttcgtctcccgctaaaaatcctgttagtttcttttttcctaccttaatggcttcctcctctagcaacccaaaccccataactgctcttgatgatgaggacagcctcgttcatgacttcgatcacatttccatccactcttctactgatgctgattcattttgcttgtttttcaaacttttatctcccaaatctgctaagccctcttggattgaaaaagccatgtccgaagcttggactctccgttttccttgccaaatctctgaatatcattctgggctattcttggcttccttccaatgtgatggtgataggcgtcgtgttcttgaagaacagccatggcattttgataattttttgatggtcttcactcaccctgacgtgtcgccaacccctactcctgaatctattcgatatgtccccttctggatccaagtccatcgaatcccgtttggacgtaaaagtccccaacttgcacaattcattgctgatgaaattggtgatctcctggaaatttatcctctctccttaatggaaaactttggtccttacctacgcattcgtgtgcttcttgacatcactaagcctcttcgcaaaggtatgaccatacgcttcaggggcatatctaagccatgatgggtcagtttcaaatatgagagtcttccgaatttctgctatttctatggctttgttgaccatacctataacaaatgctctaaatacctccttcgctgtgataatttccctcaccctcctctcttcccctcataagaagaaccctttttagctgtccaactccaccccttttgaggagttctttcctcgtatccatcctacatccgatgctcaagatctgcaacaagctgttgaccaatttctccatgttgactctcctcaatccagcccaaatcctcgtatttcgacccaatccccttaccctgcttcatctttctctcctttgccagccactcaaactacttcaggccatgctgtaccatctttctcaatcccattctctgctcctatcattactgactctatttccatctccacccacactgataaaggtaaaggaaaggcctctatgatttctcctccaaccaatccccctcgatcccgaggggataaaggaattgtgattaatgaatcttgccccccacctattgctgccacttcacctgttgttaggccaaccttcatgcgtcatgctacccaagttggagactctatgcgcagcatgcttaagcgcgctagagctattgcctcggatgatgctttggtcccttccatgtctgatgatgaaccaacggcgggtgctgctacgcgccccgccgagaacaatgagtctctacagttggaatgctcgaggttt

SEQ ID NO: 80406 - DNA, 712 bp, Cannabis sativa
taaccttagtatgtacttatagtaaccacacaaaagtagtcgaacaatttataattaattaatatcaggttagcatatgctaatttataattgattacatcctcccaagaaacctctctgccctttttttgtttattgtgctcctttgcacgttctggtgatatcatgatcatcccctcacttaatatatcacctctttatatagatttactcatttcataattatattaaattaccttcacttaatttaatttaccataacaattaacaatggtcatatacgtacctaacataaataatataaacggtagatgaactaattaaaatctgtttattatttgggacggtgattttaattttttattcatttttacgttattttaaaatatattttttttaaacttagtttggtacgtggattgtaaagtgaattgcgaattatattaggttacgatttgaattgcaacttaaattacaatctgattgcaattttagttgagttgcaagtatttaaaacaccatatatttataatttataaatagaaaaagaatactttaaaatgtataaataaacaaagaattattacgcatggcactattttttttataaaaaaattacatttttacgtttaaataattttttttacaattttacagtttttcataaaaaataataactacataaaagaaaaataacatgaaaataacattt

SEQ ID NO: 80407 - DNA, 2432 bp, Cannabis sativa
taatctcaaactctttaaataatttgattagaaatttccttaatctttagactcgtctcaactaaaacccactaagtgaaactcttacaccaaacacactacaccatgccccatatatatttctatattattagttgttttgaccaaaaaatggtaaattttttcttttgatcaaattatccaattaatattttttttagtgggttctttttttttcaagttcataatatctctctcttctacgtgattgcctttttacatagtatgtttttttgcatgcatagttgtgctgtcattccttaaacttgtgtgatacgtgttctcatgagctgtcttaattctcttaaaattaattttttaatgttataattaccttttcttaaactttattttgtcttatctgttttgattttgctatctgcggaatcgagatatgatttactcttgatattttctctattttacctcggcgtgtattaacctaagtatatccttagcctcttagaatggtgccgcccttggcctatctcagtactaggagtattcgtagtgcaggtggtgcaaattgtgactttttttcaaaccaaactacatatgcgatttatgtaatttttcaaactgcaaccgtaccgcaagatcttaaaactacaaaaatcacactgcaaaagtacagtgtggtgcggtgcgatacaatttaaacggtttatactatcatcattaatgaacatcataacaaaaatttaaaaattaatttataaagttttaacaatacgaaaaaaaaattcttattaaaattttaacatcataacatatatactaatcattaaatcattatattgaattgtctctaaaaaaaaataatgtgaattcatatattgcatgtatttgttcttatatgaaaaaggaataaaaattatatattataaaaattggtaactttgtaatatatattaaatttgaaccgtattattaaattcgaaactgcaaaccgcaacgtacagtttggaaaaaatacaaactgcaatcgcatcgtaaagaatttcaaactgtattttttttatacaatgatgcagtgtgaacattttaatgaacacacctactaagtacggtgtcgtctttgagctatcttagtacagtatcgtccttggcctatcccgatactgtttccaatgataccagccaggtatgttagctttcccttcaattttgtctttaccattaaacttcttataggcttttaggttatcccttctgctttttgggcttaaattttgttcgatttattgagcttctttacggggctttgagtttttaatccttatttatctatttaattcatttttttctccctccaaacattagttaagtattataataccaaagttatattctagtccattttctttaaaaaatataataagcatctcttcagctaagatcatgcatacataggggtaaattacttaaaaaaaatagttttaacttttttttggaggtatagatagacaattagaataaattatgtactcaaagcaaataataatagatggtgagaaacaaaatttataatgcttttcattgacacaaatgtaaccaataatagtaattagtttcaatcactaatctaaagccaaaatataattatttttttctattaaaatattgtgagtcctctgccttaataacaaagcaaatgcatgtgaccataatccaaccaacgaggataaacataacactattttagatcggttaggcacatactatattcaaagcaaacaagtacatggaaaccattgccagagtggtgatgccagaaacgggtctaaactacatttagaaacttgtttatatgagacagaagcataaatgatgtatctttaggttccattccaatagttggttggttatttaccttcaaccactacgcaatgctccttacatattgatcaagtgatgtattaaatagctcattcctacaaaatacttacaagagtaagaatgtaaatacaaatttccaaaaaaaaaattgtacaatggctttcttagttgtaaaataaaataaccttaaggcattgtcaaatctaaaaaaaaaactttttttgttagatctattcaagtaacaaaacatgagtagacgacagtttgacaagcctacaaaatggagtaagatagccaacaaatacaagcatatctattattgtataagtgtagttgattgctagtaattttaacaagatattggagaaataaaatcatgtcagtgtagaaaacaaatatatcgagatggcaagtgtgtatgtgttctcagttagtatcatcaagcttataaatggaagacataagttacctgattggggatccaggagaataaagagggctcttaacaacatattctacatacaagttgtaaatgtacttcaaggattccctaa

SEQ ID NO: 80408 - DNA, 1336 bp, Cannabis sativa
atatatatatatacataatatcaaagcaaataaattgatatacttactaaattatacttgtacttgtataatattatgtatatttatatttatattgatccatgattatcatgttattcgaatagtataattagttcgagtgaatattgatatatatacaggaagaaatatttttgttattaatgaatataaacatataaagtagtagaaagtatgcaatactatcgaataatattaatatcgagttcatttttatcaactattaaagtatatataacatcaaatgtttctttctttctttttcttattggtcccaaaagagtgttattgtttgttacagagaataattgtgaaaagaagacacattaaattatcacttccaattttttttttttaaataataataataatcatatgataaaagagtttctaaaattcgatcttgatgagccccctcttggtgatgggcacctaagctttctagttcctctccctaaaaaccaaaggttaaaattatgatttggatgcaccgaatgaatggatgtaaataggacagtaatacaagagaattatactactatgaatggatgttaatttgaggttaaaccccccgattattattccacttgcatttacttctttaagcttaaatttaatttggtggtaaaatcctccgaactaataaactgtacgctagcaaattaaggtatcaatctatttactacagttaactgccaacatggacttttatgtatgcatttttatacacatataattttctttttcttttttactaaataaataaaacaataataatatattattaataaaaaaatcttagcctcttccccaccctaaagcatgaaaagtccaaattttaactcaggtaaaaatttatttctctacacagtattatgaaatctattttagatctaaacactttgtctatatggttacaatactcatcatctaagccacaatgtaagtttacatgtacaataacaaaatatgtttggttaccgagaaaatgagaaagaacattgcaaagatagatcgaacatatggaatccttgatgcttgtaacgtccttgatctcgtacaaaatttttgggtaggaattgataacacaccaattgagttcgatgacaaagctttcgccgagttcacaacagccgtctttgtctttcttgtcatcctaaaaaaaaaaaaagagagagagagagaagaagagggagagatcgagaacaataaacaccgatggcccctttcaaatttggaacgcagatctcgtgagaaagagagaaagaaataactggagagggagagagagagagag

SEQ ID NO: 80409 - DNA, 1544 bp, Cannabis sativa
tctctctctctctctctctaatgatcttctcctcctcctcttcttcttcttttctcacactaatctacatcttttctttatatatgtatataaatataaatgtaaatgtaataagtataatcttttacatcacttttttaacacttttttactctctcaaaaaaattattctattattagcactcattttatatgttttttttttctcttttgtattttgttattactcacactcaaactacttcatacaatttttctttaattaatcacattttgtaaaacaatcttaattaatttttttttgcttttactaaaataaaattcttatacttacacactttttctcatatatataaatttaattttgacattctttccctttcttttaaaaaaattggcagcattcctactatctttttctttcttatatgattagtagaagtagtagtgtatttttagatattttataatttattcagagttaatctatgaatgttttgcatattgcaacgaggtcgatgccttgttatttttagttgctctgtaactgtcattttgttgttttatagttattctttagttggtgtttattttttctacaatcgtgttatagttgttgtagtacaattattttttagtttaagtgcatttgttatggtttatatgtttagtttattcctgacaatatttttgttgtgtatttttgtatttgttttgatattattatgttgtgttttagttgttttttagtgatttttagaatagttctttgttgtacaattattttaggctatttttatttatttatatgtatttgttatggtgtgtattttgagtttattcctgctaatttttataattgttttgttatttttatcttgtggttttgttgtttttaagtggttttagaatttttttttattgtacaattattttttagttaattttggatttatattcatttgttatgttgtatatttttagtttattcctattttttttcttgtatctctcttgcgttgtagatgtagatacatataattaattatttgtttgacatattttttttttcaaatacaatgaaaagtttttttttcgtttttttcttgacaccatgtgcactagtagatattacatatttaaattatattattatctagttaatttttgttgtttaattatatattcccccttatattatgtaccccattttgaatgataagattttattatttctactattattgtaaccaacctcttttatgtaatttttttttgaaaattttaaaaagtttgttggttctatacacttcaaaataagttctttattcttcaattaagtttgaataaaataaatagaaattctattctaatcaggtatgtaatccagcgcgaactctttgaattacttcatttccattaaagggttcgggttcgcacaagattacaccaagttttcgtatatacacttattccgtcctatgtttattttgtatttggcaaagtcctaatcaaagcaagcaaaggcttcttaaattcattca

SEQ ID NO: 80410 - DNA, 1485 bp, Cannabis sativa
tgtagtaataaaattggagaaaaaatataattatacaaacattgggtacttatgctgctaaaaataaacattgagattatgtcacttacaaacttaaaacttttggtacttatatcgctatttaccctataataatcaagacaaattgtatgtgatatctcaaagtttgcacacctgatgtggtacttacacgtggcataatccagccaactgttaaacatgacaaggatcttcgaggcagaagtgtgtctggcaggtcccatatgggggtggcatccataagctgtggatttccttccatgaagcatatggccgaaccatcgacatgctatctagagaagagaagggtgacaccatgcaagaataattccacagataatcctacaagaaaggtaagtcttgagaggggctcagcaaggtagtcaatatgctggcagaagaaacgatggtaggaatgttgaacaaggctacatgagccttttttcttcttcaacaagcttccataaatatctcaaacaaaatcttacaaacttggattcaaccaatttatccaaaaacaaaggagcttcaaaagatcaaaactataccttagaatatagggatattaactcattaatcactccttttgcggagccaattataacacccttccccctataaatagtgaaggcatttgtaaggggaagggacctaaaatcatactcatgcatctaacaccactttgttgaaagatattctttgtaaatactttgagagttatagcttgaattcagtttgtcttccttaatgatctggacgatattatctcacaatcaatacaactaaaactggagtatgtcattacccatatacaagggggtcgaacctctaaaattgatgtgtgttcttatgtacttgttattcctaactctttatgggtgattaatcagtgattatctgacttagagtcagttgttttttgtcaacatttttagtgctttcattgagagtagatacgttcttacaaagatcttatctcttttcaccttttagtcaccatggtcctgacaaggaggagcacttccacaaagccccaagattcgatgggtgtggatcctaatgtccaagttccacaaactggtgacaactcggccaaccctacccagtcaactcaggcaactccatctatagggttcagacttgaaggcccggtcaatgtcgggcaagatccaacaagtactgggcaagtcccggtcaatgttggacaacctgcccaaaggaccacagggattcttgtgacaaggcctacctcccaggtatatgttggagaaactagcttggggtcaatgtggacttgggagatgattttgagctggccaggctgaaagaggtcgtaggataagttcagggtcatacaaactgttgggttttatgccctaaataaaactcattacaatatgattagttatcaatttagaagtgaagtatgtttacatgtatgttaca

SEQ ID NO: 80411 - DNA, 735 bp, Cannabis sativa
  modified_base (44)..(45): a, c, t, g, unknown or other
gggacccgatacttaattgcaccaatagcgatattgacacgtannagggtgctaggcaccagtggtaccctttagcatttctctattattattgttggggcactgccgaaatattaaaaactatttatgtcttttacattaaaaaaaattgaaaatccaaaacaaaaaaaaaaggaaagaaagggatttagttatatgggctttaaaatctgggccgaataatgtgggtccacaaaagtggggcccagcccataaaaaagtgacaactgtaatgggtaaacccgcaatcaccgaccacccaatcctatccgacccaatctaacccaacccaaatcaattcctattcctcttattgcattccaacttaaccttcttttcatttttttttatgtaaatataattatttataattgaaattatattaaaaattcacgaatttaatgctataaattcgtgatccatattgtacaatttttttaaaaaaatatgagtcgtattgtgttatgctgtaaaaaaatataatttaggtcgtgttgtgctaatatttttaaaagataggttaggcaggcacgccccgtaggcctattattttcgtattgtgctcagattcgtatcgtgctttactcgtgatgaccaatttcttttaatgagtcaactcgttttcatattcgggctcaaattcgtgctttactttttcaaatctattttaacaattaatgagccaactactaaaat

SEQ ID NO: 80412 - DNA, 974 bp, Cannabis sativa
ttgaggaaatttgtccactgaaaagccaaagaaatcaaacaccatcaaggttacatacaaaagtgaagttggttcgagttgagcagactattaccatttgtgataccggcatccacatgaagaggagtgagtgtagccgtccatccagatagatatagctccaacaaatttagtacctttctcagatagtttacctagtcgtgcctgagaaatatcataaagcattatctttgtactctaattcaactaaacaaacaaaacccataacatatctaagaacaaagtttaaagctttaccataacaacagctgcaacagctacaacaaacgatagagcaccgggcaatatagtgtttggtaaataaggaacaaatgtggaccacataacctgcatttttttcaaaatcgaaacataatcaacttgaattcaacacagctattcaaaatcttaccaaaagactggatttttaatctcattgaattcaacacagctattcgaaatcttagttaaagactggaattttaatcaacttaaattcaacaaagctattcaaaaccttagtgaaagtctctgggtttttagtctcattgaattcaggtctgaatcaaactcaaatactcaaaaattcaaataattcgaatttaaattcaaactcctaaatagaatcgaaacataatcaacttgaattcaacacagctattcgaaatcctatttaaagactgcctttttagtctcattgaattcaacagagctactcgaaatcttagtaaaagactaaatttttaatctcattgaattcaagtctgaatcaaactaactcaaatactcaaaaatcaaaacaattcgaactcctaaatagaatcgaaacacaatcaactcgaattcaacacagccattcaaaatcttagtaaaagattggattttaatctcatctcttttctttctcagatttgcataatcaaactcaaatactc

SEQ ID NO: 80413 - DNA, 1542 bp, Cannabis sativa
  modified_base (792)..(802): a, c, t, g, unknown or other
aaaacacgtggcaagaaactgttatagcaaccaacagttaactaactacttcttgaactaactctgtattattgttatcaatggtaagctgaaggtttctttagattgaacttcttttgctgtgccaactgagaagcaacgctgtggtcgaaaaagtaaagccctgctaccatcacaccaggaataattgcaggtaatatgtatgcaggagaaacctttcccatatcctgtagttaagataatataatgttagaatatttataagctcacacgtttaaatttcttatgaaatatgaattaatgaatagttttttattgctgttagaatttgggaataagatgaatgaggttccatctcaaaaataattggcaattggaagagtagctcattcctcttatatattctattatatttccacacattagtaatgtgggattctctaacattctctcaagatggtggctattttatatgctcatcatcttggacaactcgatcataagcggctcttttttggctcactattcctgatcacaagtgcctcttttgctctactttttggatgggtattttcggatttttggtggctctcttttttttttgctcactattcccgaatcacaagttacatttttttgacttcttggctcttggatcagtttttttagatttttgatggctcctttttttgtgctctacttcgattgattattcttttgttagatagtatttttttttgtttttgctctgatagcatgttagaatatgggaataagatgaatgaggttccnnnnnnnnnnnaattggcaatgagaggagtagctcattcctcttatatattctattaattttcacacattaataatgtgagactctctaacaattaaaaaaagtgcttcaaaacctaaagaagaagatttagtaggttagtattgagctaccaaattgtattatctcaatttatcaatgtggtatattttcttctaacttatatgcaatatattgatatgatgttctatgaatttaatcatatgttttgttacttggataatagttcagtggcgtagagatgtagaatcccatgggagagggctgtggagccttctaggaactccaaagggaactttgcttggtatactgaaagacaaggctgtccacaccaataccaaggaaggaacacaataatctgcaatgaaacttctgaaccaacatgtagagtatatatagtaaataatgtttagattttgtaggaattaataccctacaccacagcaaaataaaccagtcaaagcaaggtcaaaattgacctttaaacccagtcaaacccacgtgtttgaccttctgcataggaaaccaaaaaacgacagctctttattaatgagctacaaatcgtttaaccccaaacagtaaccctaaataacaattgcacacataaataaatccctttttctttcaaacactcacaaccaccactagcaaaaccctagcagagaaataaaaggcccttcttcttcaatgttcttctctaaagaacatgaaga

SEQ ID NO: 80414 - DNA, 1299 bp, Cannabis sativa
aattcatagccgtcgaccccacacagaaatagaatctcaatgaaagtcttcatcaaacaaactccctaatttttagcattgcaagaaggcatggcaaataggtaaaatatatactagtttaaatccactaccctgtggcggcttttttattattttgattaaactaataagaatatggatcataacataaaataaagcattgcaaaaaccttgtgagtagtgactatgtataaattacctcacatttattatatctatactacatctcaaatttgcctattgtcaaagaaaaaaaatggctttctatagagtttcattgtcactcataatttgcatcttaggcatagtagtcatgctagagtcatgtaatggccaagactctcctcaagactaccttgcccttcacaacagggcccgcgcccaagtgggtgtcgggcctatgaggtgggacaacaccgtagcagcctatgcgcagaactatgccaaccaactggcttggggagactgcagtcttacccactctggtggaagttatggcgagaacttggccgggggaagaggtggcttccaattatccggggccgatgctgtgaggatgtgggtggatgaaaagagcatgtacgattacaactccaacacctgccttagtgacaacccttgggcttgccttcactatactcaagtggtgtggcgtgactctactcgcctaggttgtgctaaggttcattgtagtgttgaaggaatcattgttatttgcaactatgatcctcctggcaactatattggccagagaccttatggtgatctagctaaatccaccatctaattatctttcatgctatatgtgtgtgtttctgctctcttattatcctattattgaagttcatgataaaatgggatgtgttgcaatatgtaccaactcataatgtataataaaaaagaagtttcatcatcttgttattcctgtatattttatcatacaaaatgtacagccaacgactattgaagtttggagagtgtgtttgagatatattgagaaaaagtcaataatagtctctaactctaatcaattataggacatcatcacatccgtaccaagtagcaacattcgtaccatgtagccatattgtaagaaaaagtatcaaatttgaccaataatatatttggcacatgatcacagtacaccgagcaagatatatataattaatacacctctttttttttttttttatttaaacgtttatatattacaatcatgttttacttgggactcgaacccaagacctccaagacacacac

SEQ ID NO: 80415 - DNA, 799 bp, Cannabis sativa
cagaccaagacgcattcgtaagaaaaaccatacataaaagttaaaaaaagtaattttattacaaataaaagtaaaaaatcaataaactttatttaaactatatagtataacatcaaaaatagttcctaaataatgtgagactacttttaaaacatgcatcgttaaacattctttacaaaatgagaaagcctcacaaatgagtaaaaataaaataaaaatcatataaaatgatttggtttatactttgatttatataaatatatagatttggtcgttaaactgtctatatgcgttacacgttactcttaggagttaggaaacgaaatacacaggccaaaaaaaatcatttaccccaaaaacaaacaagtcattttttctctcaatcaataactcacaccatatcttacaacaatatatatagatgatgaatgagatgtgaagttctctattttataattatcaattcattaattcattaattaaatgaataataattatgtcggtataataataagtagtctgagaataaaaaaatcagtaaagaataaaataaaaccacataagcactacttcaataaagggtttttatttttgctgaaaaataaaaaaggaatgctaaagggatgttcaaggttataaaccccttatggcgtctatttagaaataattgatgccataaattacgcgtgtctcttatgacgccagttatttcaaaataatcgaaaataaaaccatgtccacacttcttcttcctcccatttcagccatctccttcatttttcaaactagagaaaacccc

SEQ ID NO: 80416 - DNA, 2514 bp, Cannabis sativa
gttttctgtctttggataggaaaagtgttaattttaatgggttcttgtatttgcatgtactgtatactttcatcgattacataaaataatatattagcatataacacgtgaataaagcaatataaacttttccttttattgctatcccaaaaaataaattaaaatgaaaagaagatgaaggttaaaaagaaaagcaaagagaacaaatgaaaggattaaggtgaagataccctatagaagaatctgctataagcatttcctttttaaaaaattaaaaataaaaagaatccactgaaatgagcataatgaatctccactcataggagtggccaagggaatttaaactttatgtttgtacaaatggggtatcaccaactttcacattactttacctctgctctaatccaataagtagtacataattaaatttaattaatatgtataagtaaggattcatatttcttgtatggggatggctccgcggaagccgctcctaatggaacgagaattttccgtctaaataaagaatgggacaagaataggaattatttattttcccgaatgttaaataaggcgggaacagagatcacactaattatctcaaagggcatccgtttagtattttattttatatttctaataatattttataatttgtaatttatgtttgcattttttttatattattatcatttttataatttttaagttgtgttttgaataataattagtttattgaataattaatttgtaactttaatttttatgtaatttaataaatttatatatagttaaatttttattaagggattccctgcctcctcgcttccaatatgattcttcgccccattctcgatgaaaaataagtgggggtagggatggggacggaagagcattttccgccaattcttcattccgtgtgcatccttaaggaaatcaatataagaaagttttaggaaaaataagtggctgagttgggatgagaatgaagcaagaaatgtcatgttttcctatctagcctataatttttatgtgtgctaattttaggctaattaggatatttatctctcatactttgatatgcactcttttgaacttttaaggtcgttaaaaattctatttgaattattgaaattattagatataagaatttttatctaactttagtaaagaaaatctaacatgaataaaaattttggtacatgtcaaaatttgaaaagcatgatttgatagatattaaagtctgggaagcataatttagtaacaattaccgaattactaaaattaaataaaattgtacaaaaatcattaaattcaacaatctcaataattcaagagaatttttaacgaacaacaaaattcaaaaaaacataatttattacatattaaaatttaaaagcaaaaatcttattaaatgagcaaatacacaaaccaactacgtattaaagaatgactattttttttaatgaaataaagaatgactatatactataataatttggacaaggacaagttttgaccccaaaatgtgtttggtaaatcatataataaaattttgcccacttaaaaagtcgtaaaagataataacaaattacaataacggcacactcattcttgtaaagactttgatatgatataaattgactatcgaggtattctgcccttaattatatattaatattattattattgttattattatcctgatttactgtgttttgaagccatgcttagcatcaaaaatgataaattaatccactaacagtttaaaaaaaattgaattagatgcttccaaatatatttgaccatgcacagctaatgccatgtgaaaatcacatgcataacaaaattagcatttcacccttcgagatgataagatgataactccaccttccaaaaataaataaaaaatcttccataaaaaaatacaaatagttatgtactttttttttggaagcttactttgaaatagttatgcaaatattgaacagagaaaaaagttaaagaaagtacttactgaattaacaagagctaggtaaggatttaaaagtgaaactaaaaggattttttttttttttttgttgagtattgcacaatattattacaatttacagtttagggtttgaactcatatttttttcttttttcctgctagccttagtggcttataactaaaaggatatagattatttagagtatctctaatggagatgcaaataaatacgaataaaaagttaaaatataactcatttaacaaaaaatagacttgatgggtttgagcttcgcgaagagtagacttggcctcatctacagccttttggtcatgttcccatagtgccttctccaccaagattttgtcactaagtacctctccttgctcctcaacctccttgaacttcttgagcaccttagtataataccaccttgagccacaacaacatatccttgatctattaaagtctttgatagggggccggcttcagcaacaataatctgtttattttgaacaccaca

SEQ ID NO: 80417 - DNA, 2723 bp, Cannabis sativa
cattcttaactaagatacgaccatagaccactgtaccacatgcacttagtaccaccatcgtactagtgtaggtagggtatgaaccgtaccccgagtactgttaagtgttataccacatacaccatgtaccttcccgtactagtgctagtaacaccatgatgtactcttcagacatcgtacactttaccaatgcactccgtaccgtaaccgtactagtgttgatagtctacaaatcacaaggagcatgcatatacattaaaacatacatacatttgcgtattcatatcaacatattatacgttgtacttaccttttttttgaattcaagtgagttggccgacctaaatagaaaatttcgtgctggatggatgccctaatcacacattaaaactgggtaaatcacacatcaaaaccctaatctaggaaacccgaacctacaacttaaggttctgttattactaatagggactaaaatatcctaagaggcagggaaacacccaactaaggcattgaagtggacatgaatcgagaaaatgagttgttcgaggaatctgcctaaacctattaaccgattttacaggccctggcaaaccagttaaccggtttgcaccaggtttccccaaacaattccaaacttgctcaaaacttttccaaatgccaccaaactttccagaacacttataatgagcttacacaatatattccaaccaacagaactcagaaaaacataccaaaacaaaaacataccatggatgaaccaagcttgagttttcaaactcaaacttgttcatccacaacctcaaaacccaaaaccaacaactagatccataattaaactcaaaataagattagaaaacaaattccaacacagccaaaccctaacaacccctatatctcaaagttgcatactcaaaccaaattcaaagcttctaaaacaaagagtaaaagttctaggggttacctttgcttcaaaatcacaagaatcttgctcaatactcagaaaatataaggttttggagatgatttccttctggttttgcctcagctgaaagagagaaagagagagttcaagaaatgtgtttttggttccaaaatgattttttgtctttattctccaaataaaaaattaattaattaaacattacttggttgaaaactcacataatggccagcttccattctcccaaacaaatacctaagccccttgacaaaatgaccaaaatgccctttttgcttaaacttaggctaacttaagcttaggggtaaaatggtcaaaaaccataaccctgcttaaactcggtattctatttcctccaatatacatcccactaagaaataagattctagacttatccatatgattaaactagtcatccatcacatttttcgttgtcgccaagtaaaaattataaaaataacataattcatatataatacaaataatactcctaaagttaaataaaatctccagaattaaaaaattataactctaatgcccatttctaataatgggactcacaattaattaaattcacaaataaccataaaatatcaataattagtgctaattgcctttactaattcatattataaaatgcggtcattacagaaattcctttattgcatcgtgctatttcaaggcctagaaagaattgtagactaccaagatctttgagcttgaagtgggaatcaagagtagatgtaaaatgttgcgattcttctagactgttagtggcaactataatgtcatttacatatattaacatggcatggaatatgcctgttttgtacctaatgaatagggagtgatcattgttagattgaatgaaattttgttgtagtaatgtggtgctaagcttggtatactttaagccataaagacttttctgcagtttgtaaactacattttttgggaaaggtcctgtaggtgtgtagccttgaggtaatttcatgtagacatcttcattgagatcaccatgaaaaaaggcattattgatttcatatggtggagatgccagtttttgagggaagcaagtgcaaataacaacttgagagtattaaatttagctattggggcatatattttgaaataatcgacaccctgttgctgagtgtagccttttgctactagtcaaactttgaaacgttctttagagccatccaggttgtatttgattctatacacccatttattactcatgacatgttgtcatggggggattagaacaacaatccaggtttcattagtttctagtgcttctgtttcaatgtccattgccttgttccatatttgttctttacaagcttgagcataggattttggttctattagatgagctgcaagaatggctgctcaaaattttggagacaatttatagtaagataagtaattggcaatggggtaagaggtacttggttcctgagtttggatatgaatagtataatcctacaaatatgcaggttttgttaatattctgccagttcttgtttgtggaacagatgttgatttagcaggtgttgttgagtcatttgtagtaggtgttgttggaggagaaacaacaagagtgtggtttgctgaaggggcaggttgtagttcatcagtagctgctgatttatttgtgacatttgtatggtgttattgatatagatgtggagaaaaaaaaatagtctatatgactgtgattgttgtgagtaccctggagaagagggaaaatagattcata

SEQ ID NO: 80418 - DNA, 757 bp, Cannabis sativa
acggtttgagaaattggaaaaacaacatgtgcagattagtttgaaaaaatggtcaaaaactgcaccagaactaacttttctccagctgaagtcttcaaaagggccagaagtaaccagcttttgaattttataaagagggttttagtctcttctttttatatatgcttaaagtttggttattataaaggtaattattttaaaatttatatgatctaggaattaattactcctatgtaaatttcataaaattgtaagcagattaaaaaataaataaataggccagaaaagcaatgtttgaacatatatcacaatttaagattcccatttaaaccctcaagtcctttacacaaaatatcttaagagagatatacaatatgtataagagaacatatatatatataatatgtacatgtgaaacatttcacgaaaacatttcatacataaaactaacaaaaaaccccatccctaaaacacaaaagatgatcatccatgcatgcatgtttcccattgatgaagatttgagcatatatattaaatattggatgatcatttcttcatcatctcacttcttcaagaacacatcagtaagaaccattttagtctgaagagaagccttcaacaacttcaaaccctgttcaattaaaacaagaacaataataacaatacatatacatatatatatataatataacaacaatagcacttatatataaacaaacctcattaatgccaaccgaaacagtcttctcctgaagag

SEQ ID NO: 80419 - DNA, 2466 bp, Cannabis sativa
aaaatccacaaatacatatattcagaaacaataataataataataatcaatctgagatcgaatcgcaaaccatttggaagtaaaaccccgaccaagaagcccgtccaacatctccgatcctcgccttcgtaggactcggtgacctttatcaccacagctcaagaaaaacaaataaataaactcaaaatgcaacaacctccattaacgaagctcgcattgccaaacccataaaaatcgagcagcttcaacgggaagaagaagaagaagaagaagaagaaaaacttaaactttactatttctcgacattttgcaaaactccactaatcaactataacagacagagagagaagctaaaacaatatttctctgacggcaatgcccttgtcctttccgaatacgagattgacactccagtccagagcgggtcctcgtattttaaacgttaccaggggtattttgggaaatctagtagaaaaaatgtcagccgtaggattaagtgggatggtcattgtgagagagagagagagagttttaagtcaaagtgggtgaaatgtggagggagttagatgaatggcatctgctgagctggatggaactcagtaccccataataatcaaataaatcaattgtttgggtctctatctaatctgatctaatctacttctctctaatctttaattggtttttattaaaactgattatttatttattattaaatctattttgcttctggcttagacaaagtagactaaagacccagaactgttttgtctgtttggacaagaaaatataactaccactactgcaactgaatttaccagaattctgtcctggaaaataaaattctcatatattttttaaaaatatttgaattctttgattctctttttctattaattctttatttgtttcttcttaaaaaagaataatgtttaatatttggatatggataatttactcggtttggtaaagtatcaaaattggaatgaagtgggagaaattgacttcagtttacttttgaggttgtggatatggttgtggtatatatttatggcatttacgcagttgattattgtgattttgccaattagtggggtagaaattaaaaatatttattgtcattttcgtaaagactttattaccattattatttttttgtatttatattaattgttgttattattggtggaaggttggtgatttatccattttgttttgattgacacaagaaaaatagtaaaaagactctaatttggagagtttgcttaaactttgaaactactagtagtggagaatggttgttgaaatatttaagtctataacacttttaatttttttttatatattttattttgttaatattgagggagtttcgatccaagattggaagacgtgtaacattaaaaagacccacattttttgttttttattttattttatatattatttgataaatatgtagacttggaacatactcattttccatatttatccattatgaagcatggtttgtaagcttatcttctgcaaaaagagttgatagtaaagttgataacaacattataataagatactaatcagtaatcatgttagggagacatttaattaattaattgcttacttaagaaaaagagcaccgctccatgagcaattttgcatagaatattggctgttaagtcattagtaaattatatataaaacgaacaaaagaaatttgatttgtccttttgtggggacataaagtgaggaacccatgttataatgttaaaaaaatgaaattggattaagaaagaaagccaaactgtaaatcctttgttccttttttaagactaagaaagcacgtagaatgactcagcaatcttcctggtactgagtcactgaaataaaaaagaaaaaaaaagtgtatgctcatgttgcatgtatatgtattatgcattatatctctatatataaacaagtaacaaagagaacatagaagagaaacaaacaaacacgtcacacatatgtataacattttgaactaaagcattattgagtattgttattggtattacttgtgcacaatattttttataagtagtcttctgccattggttaacaataatattcattggttaacaataatattaaggaaggtgctagatactaatagtgcattttagtaattctaagcattattagtatgggacactaaagatttatagtacttctatgacatggtattttataataagttagcggttctctataagatttattaaattaaataaataaaatctaatattaaattacattaatatgtattagtactctttaacatttttctagtagtgttatccttttccaactaagctcaaatcaagtatgacttgccattttttttttttttttttttcaaaaaaaagggaaaactttgcatttttcaaaaaaggaaaaaaagggaatgcattttaggaaagtcactca

SEQ ID NO: 80420 - DNA, 946 bp, Cannabis sativa
atatagattgtattattaatctctctagtaattatatatggcaccttacttttttctatggatcccctgttactcatcaaaagcatattacttggaaacttttacataatatttactataatgctgctaatcttccctggttagttattggagattttaacagttacctttcaaattctgataagtctgggggtagttctgctgacgaggcctctatggactgttttcataactttcttcatcagtttactatggcccctctttcctattctgggaataaatttacctggacaaataagactattcgtgaaagacttgattgggctgtagcctctgatttttggtacgatttttttcctgaacattccttgcatcatctaggcttctatgggtcagatcatagagttcttaagctagtcttaacctcttctaaccctcgagctaatcctacttctgttcataaacattttaggtttgagaatattgggttagaggatcccagtttctataccacggttgacactgcttggaaggaatggtctaattctcatcctactggtagcggtttccatagtttccttgctcagcaagacaattgtgtctctgctcttaagacttggaataagaaaagcaaccattcgtctcagtccagaatctagttgttgatgcaggaaatcaattacctgcaaaataaggatacacttactagggggataattttaaacttgcccagttgcaatctaggttagattctttgctttagaaggatgaaatctattggaagcaaagggctagagttcgatggcttaaggcaggtgatcgaaacactaaattttttcacaaacatgcctcttctcgtaggaaatctaatcgaatcaaatacctgaaaaatgatgagggggtagtggtgaacactcaagagggcattgctgagcttgtcatctct

SEQ ID NO: 80421 - DNA, 2630 bp, Cannabis sativa
aaagatggtaaaaataaaagaggactatataaaaagggtatagagtgtaatttcctctccaaaatatcacatattatttaatataggtccaataatattttttttctatatgctcacaaaatttcagggtcacctttattaataaagtacaaagattaaagaagaaaccaaagaagaagggatgaaaaagaacaaactcaaggaccttggttagtgtcacagagtcaatattttatttagaatcgtaccctatgatggtttgagtctcactcagccaaccaaaccaacacacccaaagataatgcacacactattgttgaatatagagaagtaaaagaaaagactcattaaattgattgaagaacacgactcttcgtatatagtacagagagttagttagactaaatcacttaactataacatgacagctaagcaactaatctaactaactttaattaactacttaacacccccctcaaactgagctgggataatgaaactaagcttagtttgtctcgtaacagcttgaatcgaggtgcagaaagagctttagttagtatgtctgcaacttggtcttgagcaggggtgtgcttcacatggagttgctgttgcataattctttcacgaacaaaatataaatcgagctcgatgtgtttggttcgtgagtgaagcacatgatttgcagacatgagaactgtactttgattgtcacaccatatggtagggacttatccaagccaacttcagcaagtaatgactgtaaccaaacaacctctgcagtggcattgggaaggctggaatattcatcatcaggatccgaggcccaatcagcatcacaaaaccctgtgagagtcatggtagaacagaatttcaagaggaggccatgatctagagttcattttagatacctaagtatctttttgaccacatatagatgggactcgaggggattatgcatgaactgagagaccttattcactgcataggcaaattatggtcgagttatcacagcatattgtaatgcaccaacaatgatgcgatattgcttgggatcagcaacaagatcactgtcataggctgaaaaattttcaccaccagtcataagagttgatagagagttagcacagtccattttggctctgcaaaacaattctgtgatatatttattttgacataaatgtaaaccaattgaaaactgatgtacttgaatgccaagaaaatagtcaagtgaaccaaggtcttttaatgcaaattgtgcatgtaaatctttgatgagagtagttaggacatttgttgagctacctgtaatgataatatcatccacataaaccaaaataaatgtggtatgacagtctgttattctagaaaagagagagtgatctgcccttgcataagtgaaaccaaacattttgagggcatttctaagtttatcaaaccaggaccttggtgcatgtttgagtccatagatttatttgtttagtttacacacaagatcaggggaatctttgtcaataaatccatgaggttgagtcatataaacctcttcatttaattccccatttaagaaagcattgttaacatcaaattgcttgattgtccatcctttggataaagcaattgtgagtatcactctaatggtagtaggtttaatgactcaactgaaagtttcagtgaagtcatgaccatattgttgcaaaaaatcctttgcaactaatcttgctttgaattgagctgttgaactatctgtgttttctttttccttgaagacccacttacaaccaatggctttttccctggaggaagaggaaccacgacccaagtcttgtttttctttaaagcatatatttcagtgttcatagtagagttccattggggagatttgagagcagatgccactgtgagaggagtggtagaagctatgagctctttaggcttgtatgtaccaaccttagcacaagttaccataggattattgttggtaactaaaggtggttagacatcttggttgatagcaggtgtgtcttgtattagaggagcaacaaagatgtcaggtgcagatgccagaagatgctcaattgaagagagggaagaattatcctgaggagcagcaggcatctgtgttgacgatggaatagcaggtaaagttgagccatcaaaagcaacattgtgagtaatgggatgttgttgttgtggttgaactgaagtgatagactgttgttgtggtggtgcagtaggatgctactgttgtggaatggattgaagtgcagcaggttgctgctgttgtggtgttgggtgaggagcaataagctgctgttgttgttgagatgtggaagcagcatttgtaatgttggtttggacacgaagctgttgttgagttgttgctggtgaaggtgggtgagatgcttgggaaacaagaggtgtgagaattggtgtcatttgggacacaaacacaaggagcagttgcattagtagagatattaaggaaaggaaaatgaaactcatcaaaaataacatctctagaaatataaattcttgccagaagaagcaaggcatttataacctttgtgtttcaaactatagccaataaaagtacatttttttgatctgaattcaagcttatgtttgttata

SEQ ID NO: 80422 - DNA, 1523 bp, Cannabis sativa
gtttggaaactctcgagccttaatcctcagcaaaacttgaatgcaaaactcgacaacaaggtcgaaattgatttaggttacttggctatgagttcggttctaattctcgaataatgtagagaagacttaaagttttgaatagttaaaaattttaaattaggggaaaagtggtaattggtagtcttgaagggtatttatactcaaagtggtaattcacgtgaaaggaaatagacgatccgcgatttagtctccaaaaacacaaattccatctaacagttggggagtgcagcagtcaaggcgtgtcaacacatttaataattcttggaatcaaggcgcagatcaatgatgaagatattactttttaattttcacgccaaaaagggaacaactgttaaagtaaaagttttctgaaaaaatactcctcgatagacgtgttcatctaccactaggtgattgcaacgcagatgtactacgatggtagtcaccttccatgatcaattaacgcttaaaaagtcatgatcttacttctaatcctccacatgtccacactaatggaatgatacaagcttccaccatatgtagcattctgaaagcttgggggtaaatattatccgtgtttctggccagggacatgtggaatccaagtcaacattaaaggtcgacgcactagtgagtcccaaagaagataatttgggccaagcccaagttatataagaccttctaggaacataccttacagatctcaacaaaagatcgtatcaagctacgtatctaatctgcctagtcatatatcatctccttcgtgggctggacttcacaagacaggccaagttatgtaattctgaataaactccccaataaatggaaaaagggaaataagtgtaattctctaaatactataaatacctaatgaatcctatggattaagggttgaattctcttacaatattttctctaccaaacttgagaacttatgttcattgtattcttcagttctaattatttacaattggttttccaaaaatctcggtaaataaatattagtaactgaattcggttgtagatatttatttatttaaataattaaatatgatttaattaaagatttttaactactataaatagaaacttgatttgagaaatcaaaacactctctgacactataatttcaggaattaagaggagaaaaaaaacagttttttctcttaatcattcttgctcatatgttgagaactcaacaagaaaaatatatacactttatcctaatagcccacactatttgttgagtgtggtggatcgatttaaaaaataatggtgtgagtccaattgtattatcctcatgatctggattaagggatacaacatacaagaagtttcatggataccttaatagtcttcaagaggtatatattctaaactagtattttatgttttgatttattgtatacacatgtagagatccattaggatatagtacaatgataattaacattacgaaactcttccagatcggaagagcgtcg

SEQ ID NO: 80423 - DNA, 582 bp, Cannabis sativa
attatatttttgttattcttccaattttagaattatatttggttgattttttcattgttaattcattttaaattagtttgattctccataataattaaaatttcccactagaagttctaacaatacactatattttaactctcattcatttttctatatgtgtgacaatagtacaatttacatgtcaaataatttaataaaaaaagtgtgaaagaaaaaagtaataagaagtattattcttcttatatattataatatgtttatatttttttttttgtctgaaaattatttttctttaacttggtaattattaagaatttatatatcttatagtcaaggttggtgtgtggtgcatatgttgcacaccatttaatttgcagatgtaataaagtgtttggtgtgtattagattcaaccataaggtctatgtatgaaaattaaagctagctacaagtcattttatttattattataattattgggaaattatatatatataaagtaaagagtgtcacctttatacccatttgtttatgtagtttatagtacataaccataactcagtttgtataataattaatac

SEQ ID NO: 80424 - DNA, 3071 bp, Cannabis sativa
ttggtatatttaaattaattttgtaaaaaaaaaataaaaatttaatgactttgaccaatcaagaattgtgacatggcaatttacttaacacttaacagcgagccaagtacctacaaaagttctgaattataacttagagttttttgcggcaaaaccttcccaactatcgtttcacttgcatttaacccttcaagctcaaagtttagcggtaaagtcctctaaactattaaactagtcgcaaatttaaggtgtcattcgattaacggtgactatgggatgcttatgtgtatactcttgcacacatgtcatgtttacattggtacatctaatattattatttaaaatttatttttaaaattaaataaaattataaaaataaaaataaatttttttaaaaaaattaaaaacattgtaaattttgaaataatttatatacttttaaaaaataatagtaggtgtaccaatataaatgtgacacatgtacaaaagtgtatacataagtagtttatattgacaattaacggtaaaaaatagatatcaccttaaatttacaagcagttcagtagtttggagtttatatatcgtcaaaatttgagcttagagagttaaatatgcaagttgagtgatatttaagagggttagttgtaaaaaaactcataaaacttatgttttattaccgctaaaaattaaatttagatatttatatttataattagaagttaaacttatatatttttactgcaaattactctttattactaacataattaaagagtttcttaacattgaatttgaatatttcaagcaattatcgttttgttttatgcattttattataactgtaacaccacatcgattgagtgtagagaggattcattgagttcgtgacttatattgtttggagagacttatacattttgaatatttaattaattatttctatataaaaatatatacattgtataataataatataatatgatataaagtgacatggctatatattgctaattatacaatattatttattcagttatttatcttctcacataatataatattatctttttctaattcaaattcaaatatactaaccatacaaatccaattaaaattagaattaattaagttattatatatatcaacaagaaagttcaacaaaaacacataatacaacaaactgattaaaatgatcatcattgatgaagaagaagatattctcatagtagatagcagtgcgaaacaaggtggtattgctcaaatgttcaaaaattgtttcatcagaggagtaaattacgaagagaatcgaataataaaaagagatgtactagaagaagaagactgtgcaatttgtttagaaagattattcgataatgaaccaataatgaacgaaaaggttgttgagtcgacgtcatgcatgcatgtgtttcacttgcattgtatcattaagtggactcaaatcaataaaacatgtccggtttgtcgacttaaaatacatcaattggatgtcatcacttgcggtgtctctcaaaaacttgttgatcagcgtgatattgtagagaataaagtttgaatgaatgagtttatattttttttagtttgtgttttaatctagttttgtaataaatatttttctgtattagaaaatatatttttttggttatgtatttttttttgtggaatttattttttcctttttttttctcactatatttaagtacctacaggctacgtaaaatttcacatgtaatgatcaatagcctactttaatttacatgttagttttaataattaacttttaataattaagaagtaataatctctttaattaaatgggttgttgctaaaataatagtcatcaacaaaatgaagcaaaactagctaaggtagaaatcacattaaaaggtaataattacatgaaaatcattagaaaactttctctttgaattagatcctacaaatttaaaaggtaattacatgaaaataaagagagaaaataaaataattcccaatactttagtcaatcaatctttaacttagacctcatttgaatctattggtcattgaagacactaaaaaaaatgtgggatcctatttttaaaaaaattatgtgtatttcttaaaaaataaaatatttttgagtttttgggttagatggactctagatatgagcctagcctgttttaacttaagttcggcctcgagaagagacccatttcataacaacgaattaatattagagcctaaaactagtcaaggattctcctttagaagaatagaaacttcatttaattcgaagttagtttttctcaagaaagttttgacgtttacagtgttgctcaacttatattttaaaaaacctattgaaccaaatatgggtggtagtgtgtctgatatatgaaaaaatatgagttgagtcgtgtagtgcaatgttatagggtaggtctcagggccgacccaagcattgggcagcttgggccattgcacaaggcccctacttttttattattttttttgaaagaaaaggcctattttttcttcttttttttccctattatatacacataataaaaaacttataattgaaaatttataaatgaatcttaaaaaaatgttagtaatagaattgtagttttaatgtacacaatcttttctttttaaaagagtccaattttaaaattttgcataaagctcctaaaatacttaggccgatccaattgtaagtttagtaattcgtattaaattttagtttacttattcattttcataaatatagactagtctatttgttttttatacaactacatatttttattatacatttaattagcaaactattaatgtttttttagttttaattacttttacataatttctcaataataattacggcttgttaggtgttatttttcatttttttttttggtttttttctttgttgtaataatggtatttatcacccttatcgtttgtaatatcggttttatgtcatttttgtaatctattttttttttttgcctaatttttgggctttgtcctgtttaactgttggttgttattcttctttttct

SEQ ID NO: 80425 - DNA, 1765 bp, Cannabis sativa
aaccacataaaaatacttgcattaaatttcttctaatcaatcaaaaacctctaattaattaattctctatcaataaaattaaacaacctttggacggtagctgtacataaggccataacttaagagagatgttacattggtagtactttctcaagtgttcactattccaatctcttggtacaagaactagcttcatgtttcatcgtactgaccaagcttatatgccactaatttcgtaacttcggttacttggtatggcccttcccaattaggttcaagcacacctgattcattgtctttagtgttaaggaatactcttttgagcaccatatcccacacaaagaattttcttgcctttacttttttattgaagtaccgagctactttttactaatgagcttgtagctttaagttttctaagtctcttccttcttcaatttcatcaagtgactctgttaggaggatgtggttggccacttaattgtacatcaatctcctgtgggacagaggctctaattctatgggcaaacatttcttcataactgtaggccatagcaaaagggggtttcctggtggtcatctgctcattagttttgtatgaccaaagtagatcgggtaattcttcaatccaatttcccttagctccttcaagtcatttcttagagtgtccttcagtgtcttattgactgattcgacctgtctgcttgtttgggggtgtgcgactactgagtagcttttttataatcccttgtgtcgtgtagaatttagtaaacatctagctgtgaaaatactttccattatctgaaacaattttttaaggaagtctctaccgaaataaaatgtttttaccataaaatccaaaactttcttggaggtgatagtttctagtggttcaacttccgtccacttggtaagataatcgacagctagaactgcatattggactccaccatttcctttaggcaactgctcgatcaggtctattccccatttggcgaagggccataggttcaacatttatatcaattcattgggcaatgcccgagggactttagaaaatgtttggcattttttacacttcttcacgtaggtctttcaatcttcaatcattgatggccagaagaaacctttccttagtattttcttaggtaaactttgcccccaatatgattaccacacacttcattgacctcagtcaagagttgtggaacttcttcatttgtaacacatcttagtagagccatgtggaaacctcttttgtatatcaaaccatccactatcaaatattgtgtagcctttctcattattttttgagcttcatttctgtgacttagaagtttaccagtgttaaggtgggctactattagagtcatccagtttggtgtgtcatccaatatcttaatttcttccatccaagtgaaactaggttcctttaaaaactaaattgggatcaaatttgctttatcaatgattgtgttgcttgccaactgtgcaagtgcattagcggtagcattctcttctctagaatttgcttgatggtatatcatttaaattgtgcaagaaagtctcgaattttactgaaatatgacatcatcttttctccttaagccatatattctcccagaatatgatttacaaccaatttggaatcactgtaaatctctaaatactcaccacgtacctactgagcaagtttgcgtctgacgataatgttgggttttgtgcctaaaacccatttcaatataatcagatttactaataaata

SEQ ID NO: 80426 - DNA, 824 bp, Cannabis sativa
tgtagtactaaactcttattgcatgtgttgcagcattagaaaactgtaagatatgaatttttactaggtgtaatttagtagttactcttctttatgggtcacaaaacaatcacaccttagagaataatcaacttattagtgagtatccaataaagaatatatacaaagagtcgcactcacttaaacaattagagacaatttcttttcaaatttcaactgtcacaatttgttttgagtccacttcatagatcaaatttagtgggctcaccttgactttgctacccttgtcatgcaacacactttttttttgaaagaatatattagtacgtaagtggtacctttgatgtttttgtcttatcaagcttatattcaatgttttctgtttattgtctaggaggaaaaagtaagagaagtaagctaaaaacacaataagaaaatattttaacacacattaacattcaatacaccatatacatgttttaaatttataacaacacaaactatatacaatattcttaatttattaagtatttcatcaacatcatactttaattgataacaataaataaataattttatacatggaaaattatatcacatgcatccatactaatccaaaatcataatatcatatgtagagatcgtaactcttatatcatactcatagaataactatgatactatgaaataagcatatcacaatcatatcatattatttatcatatcatgaccattacatacataactcggacctatactggccctacaatattcgggcacatttaaccctatcattgctatggaataaagtatctctacttcaa

SEQ ID NO: 80427 - DNA, 3096 bp, Cannabis sativa
  modified_base (3049)..(3054): a, c, t, g, unknown or other
ttaattgattaataaaagaggcatttttcaacttaccccatccacatttctatgctttttcaaaaaaattcacattttatcatatttaaatgtggattgtatgcttcaggtcaaatcctgcccaaatttgtgcctatacattttgcttagtggagctcaaattcgtgcccactttaagcttatatttgatcttcttcaaatgttctcattactttactaaatttattttgtagattaaattatagatatttcagtatgactttcaaaaataatttacacaaaaatattacacacctgtgtgatgaagattataataaaaatattacacacctgtgtgatgaagattataattcttattattttttaattagtgggactcatttaaagtaatataattggccgaaattttttgttacaaaagtcacaatgttttgggagaaaattgcattgtatacccactttgatttatttattttaatttttactttcattttcatattcattgggatataaccacttttatatacgatgttctcattatatcctttaaattaatataaatcatgtgttacacttaagtagaggggtgagggtatactaggcaactcaatcacaaaaataggtagattttaatgaaatataatatgagggtatttttaattaattgatgcaaaaaaatgtattcctcaatttatcccatgttttggtgcaaacaatgtacacctattattactctaaaaatatttactaataaacatttgatgttttaactcataaatgagagtgttttttttttttaaaaaaaaaaaagctcataaatgagagtttaatcattttgctaacttttgctaaacaaataattttacaataaagtatgatctacgtaaaatcccgtaataattaaaacattcttaagaatgtacataaaaaattactattgggatctcatttctgataaaaaaatacatatatactataatgttctaagaatgtcatctaacgataaaaatactagttacaccagttgatcttccatagatcacaactctccaggtttattcggtgaaatatggacaatcttcactagagctctcgaaccaccactgatcagttctactttctcaaatctacacataacaaagcaactctgagtcgatagactcggtaaaaaaatcatgcataacacaatcatatatctgacttgtaattgagcgtccatacacccaattaccataagtctactaaccgcatctaatgctaataagttgagatctgaacgtttttacctatagtaagattaaccataagaccaacctaagctcattactctaatcatactagtgttagtagcattagtccatactattcaatatttcccaacatattagatatcagtatcttagtacacctctatgtacacccatatcactatctctaatatgctagctacatgacaatatggtacatgtatatactaaatatgtgcatattgatagggtaatttaggtacattttataaagtattttaaatgtgtatttcaattgattatattcattttgagcaaaattatgcttgttttctacttgttttaagtttaaatggtaaaattcataacattaattgaaaataagaagaatgagatgaatataatgaatttatcataaaatttggagttctaagatataatgagtgaaaaattctgagttttggatgcttaacacgctctgtttgtgatcgaaaattaattttaaagcttcaagacaattattgactatgatgtgttcactttcaaaaaacatgtgaataaaagttctatagttctctttcatcttttcaaaacatcttaaatcgtccaattccgagtaatatcaaaagagttatggccaaaatattatcaatcatcacacccggaagctcgttgcccaaaaaacaagtacccagtccacgaaactgaaaaggctatgtcgtggcccgcctacttttagaggtccaatagggtttgtaaacctgagtttgaaaatttaagagggcttttgattatgcaacttgggaggcacaaaaattagagagaaaaaggagatttttcaagcacaactattgttcatcatcagttcttctgttatattattatttaatgttccaaatttgttatttgcaattatttagaataatgattatgagcttgttatcctattttttgcattatgacatgacatctagttagatgacacgtgtcctatatttctcgacctgggcagatggtttcattcctagcagcccacaaggattgatatgagcggattcaaattgcgtgggcaataggcatgacaggatgttcggatagagtcactgaaggacatccgaccaactcgattgtattatcaactcgtatgcaccaaccaaaaaatgtgagttggcaattttaacagtgatctatgatatctataaagtttgcatgacacgaagtaatccttaattttgtgggattgattcgtatcttcagagaataaaagaaatcaacctgaacttgcccaattattgtaattgtggaaacatatttgtttctcattttatgtatcatagattaagggaaactatttcaatgtaaggagcccctataaacagtggactcacctcattgtttgaggggaggaattgaattagagagagaacactcaagagaaaaatagtaatctaagagagaattactcagagatatattgtaagagctttagagagagaatactttattatttgtctcacaagtcaatacaacctaaaggggagtagctattaccatgacacggggtcgaacctttagaaattctagtgtgttctttatttacagtctttactatttgtatcacaagtcaatatatatattttaggaaaatttacaaaaatattaaaatttgggttaacttttacaaaaatactgttacacggaaaagttttcaaaaatactgtgtttttattaaaacactaataaaatacaaaacagcagtagaacaacaaaaaaatatcagtagaacaccagtgaaaacttannnnnntatactgcagtatgaaacttaaaaaaaatacagtaaaaaagt

SEQ ID NO: 80428 - DNA, 1805 bp, Cannabis sativa
  modified_base (187)..(188): a, c, t, g, unknown or other
tttaaagaatttttttttttacatttttacgatttttcatagaaataacacgaaaataacaaaaaaattatacataaaagcaacatgaaataacataaaaaaaatagcatacagattataaaaaattaacaagagtacaacctaaaacaccgtattttctgtaaataaaataaaaaaaaatcgtaannatatttaaaatttcataaaattatattatttttttttttttatatatttgtgaaataataaaaaaaattaagtccatgttttataatattataggattcatttactaattactaacatttacgtgctgcctattttcaaatcatgtccagtactacatatgtaatcatatgtgtgaactgtgaagtctttgaatatgtaaaaccatgtccacgtgtttcacacttttttattttttaaataaaatcgtagtattgtatataccaatattataatactacattgaattgttcaaaacaaaatatatatattataatagatttgttagcaaaaaaaaaaaaaaaaattatagacatttccttttatacgtcaactttatgttgtttatctatttagttttaaaaataaatattatgaaattatatttcctcaaaatattgaccaatatcacaagatctaagtgtttgacctaaattaagagctaattagtatcataaacttaaatacagcattaaaaatacaagatgatcaatacaagtatagtatatatagatcacttgaatctttttctcttaaaatacctctcactaataaaataattagtatttatggactttataactaggttcttggtagttgatatatagtacgttattgccaactaactgttgtcgaatgttacataaaattcctttggaattcaaatgaagagatttataattaagagaaacgtagtttattaatttggtgaggtagccataactataaccaccaactatattgaaattgagatctccgtttctaataatatctccacttaatgattaaggatatgatcgagtgttaatatattatttatatatatgtgtgtttttattatatattattattgataattacaacatataataaatcctttcacaaaaaagtagtacaatatatgaccaatttgagggaaacataaggttgttcgagttgtgaaattgaaggaaagtatatttaattctaaagtacaaccattgaaacgattgggttataatttggctgttaaatccatcgatctctaatcaatatttgttagttataacttattacagtgtatctttttttaatgattaattaatatagtttgaactgccctattatatatataggtagttgaaatccggtttatagtaaaattgactgtatattttattttttatttttaatatacatgcatataaataatctcttgaaagagacaaaaataatagataaggaaggggccggggcaagaaatattggatggtctatttattagcaccaacatttaaaacaatctcaacaaacatttgttggattccactgaaaaatagtcttagcagacgtgaaatgtgtgccaagttaatttaagggaaatataaaacttgtttgctgatcaatatataaattataaatataaattttttttttaatatttcttatataatactttggatactttaattaaatatagtatacaatttttaacgttgttcatgatatatatatctaccagataaatgttacttatcaagtcaagtatgttaattttattttagtttttaatttttttttaatattataattttaaaatt

SEQ ID NO: 80429 - DNA, 2191 bp, Cannabis sativa
tagaaagaattaaaacaatactgaaattcacacctttatgtgaatttctactaaagttggggggtctcctaaaacagaattgcagtcatgtcatttcattcaaacaatcagtgttcaagattactagtggaatctatgccagtgtattacatgtaatcaaattcatttatttcttatatttccaagtgtcacactagatatgcatagtgtcacaatttcttgagccttgtgattcaactaagatatattctaaaactcacttaacatatgttatatttatttgtgtttatcaagcctaaaaaaatttgcttttgatctaaaccattctagccttgcctagaattggatttgatcatcaaattctgtttccattcttctcaattctctcaaataagcatagccccattctaaatgagtcagtattcagttatgttaagtaatctaaagtgagtagaagttcttcccatttccaaaacctctattctaaaccaaattagaattccaagtgagtatatggatttgtttcatgcattgacaaaaaccaaaatgaagtctctgcacccattaatcttaaaatacaaaacacctgaatttcatatatatgacaatatatatgattggaaattcgctctatacaaaaattatattcctaaatgtcgttcattttcatttcttaatatttccaaaattcactttgctgcatgttctgcaaaaatttcaaaacttgcatatctaataactaccaaaatttcagcaaaagaataactaactaccaaaatttgatgggaaccctaaatgggttctctcaatatatctggagaaactgttattagaacactttgaaatccctaattacatcaaataaatccccactaacaatccctatataagatgaacaagcataaacagagtaataatgcgacgaaattcaaactttttgaaacaaaatactcacaaattgtaatactttaagcaactcaataacttcgataaaaaaaaaaaaaaaaaatgataaggaagattttgtcagtgtcaatgattgatgaggaaattgacctgaagcggttcatgattttgggagaaaatatccttattaatcccattaccctccattatctgactcttcttcccttgtagactaatcgaagtgtatgagcaatagcatcagttgattttggtctttttcttttcttttcttctcgtttctgtattaattacagaataattaaataggaaataattataatggaaaaaaaaaaaaaaaaaacttcaaatttttgaaataataaataaatcatttaaaaaaaataataaataaataaataaaatatgatgtcaagtaagggaagaagaaaagtaaatggagaattacgcattaattcgaaacgtttttagtaaaatcctcattttttttaaagaaataacgtatacagcttccaagaagtgctttttaagaaataacagcgtttttcatttttactgaagagtggttttcattcttgagaatagtggtagaaagtattcgcgttgtgggtggtgcggttttaactattttttttaaatcaattcgcacatgtggtatttttaatttctcaaaactaaaaaactgtaaaaaccacaccgcaaaaaatggtgtggtttggtttctgcgatttctgtaatttggactattaccaaataattaaactatcacaaatacaataaagcttgagcaacacatgttaaaaatatcataaggcttgaaaataaatataaaaaaaaaatcaagtttcaacaatacaataattagtgggtttcgggttgggtcttcacatattggacctaaatatatataaaagttggtatttttatatgcagtgcggtgcggtacggtttgaaccacttattaacaatttaaaaccacaaacagtaccgcaccacgcggtttaggaaaaattcaaactacaaccgtaccgcaaagaatttcaaaccgcattttttttacaatgcggtgctgtgcgaacggtttgagcggtttgataaacatccttactccgaatcctagcaagatttttcttcttttttagccttagtcggagaaaggttgtaagattccagtacagtcttctgattgactctaagataactgatcccattttgtgtacgtaagtgaaagacagaggttaccgcttttaagtcatacaaggttggt

SEQ ID NO: 80430 - DNA, 2384 bp, Cannabis sativa
aaacatatcttttttcagtaataccattttctagtcttaagttttaaaatgttaattattttatctatttaataattatgataaattgtcaaataaaattcccatttaacttatttattaattagactttccaaagtctcttaattaaaaaataaatcctgaatttaattttttttctaaaatttacccttgcttaatggaactcatagtcttacttagaattattgattaactaaaagttattacttgagtctacaagacaacattatcttaggtagtgtggggaccatgggtctatataatcaagctcccaataagtagttccgtaataaactgagtaaattctctattttattaattcctcctgactgtactatagattcagagttgtactcttaattacatagaacactctattcaccaagaatagatacgttattaattatacattatctaaataatcaatgatcctctatagatgatttacattgagtacggactaaaattaccatttgaactttaaatttattttatccttaaaatacttagcttcttataaataatatttaagtaaactaatataattactgaaataagagctcttctatttatgtctgttagctaagctctaaggaaatcactatttcacttctaagtaattatagaagctttagatttgatttctataattagaactcccactcaattgcactacagtgttcccaagatgtaagtattaggtcgatcctactggttaactgtaaagaacaagtcaaagaacacatgtaatatatttaagacaaaatctaaccatctaaggattaagatctttgatataagatcaactaagtcatatttacttagaaaagatattacagtaagtttacgatatcttttctactatgaatatcggtctagtccaatgtataacaattacatctgatactagtttactttactaatgccttgagaaagacattctacttatctaagtgtaagcaaaacccatcgcttattatcacatcagtataaatccagtgcattgataaatcatgagactaaatatttgaagcataatgatcataattatttttcactatgtagaaaacataataatcatgcttatccatatgtttagaatttaatagaatttatatattaaaactataatcatgaatatatcatgtgaactaggtaatataaaatttgacttctatatcattcattgataagctaataagattatattgagatatgttatatttagggcataaaattccaacatataattactctcaaaaaaggttaaagaatcactacacccccaagggtgtcaaattagtttggaggtatatactactacccctaccgcgaagctaacttatctaccaaagggtaatggattattctaaagggtctacccttacccccaacactcctatggtccaagtatcacattctacctacataagacaatgtgtcatcctagtatatagactacataatattcaagagcaagtgaaatgggtcttaggggtacaccccgaggtagtgactactaccactcgaatagagttgaacgaccgtgtcacatcccaggaagtaccctcaccataaccagctcattcaacattcaaattgcgcaataagctcaatggtggttacaaattcacagaaaatagtgggatattatcacgagaattagactacaaccacctctaaaagccaagaagatggttgagatactttcgtaacagtcacatctctagaagagagaaacattgactattcccctatataaggggtcaaacatgacctaggaaggaaaggaaaaattcataacttagagagtagaaactctacccaatttaattcttgcactcaagagcatgttcttgactttacgactccgattaataaaacacaagtggagtaggctaataccaacacttgcggtcgaacctctttaaattttggtgttctttatttttacttattatgattttgctttaattgctcattaattacgacttcgcgtcaattggctaaaaatcttgtgaacaatgggttagagagagaggggttgtcacatgtaagatctgccttttcagatttttttatgcatatatataataaataagggtcatgtctagcaatattggtagactcgctctgaataccgcgtccagctttgttcgacatagaaacgacaccaatttttttttttaaaaaataataaataataataataataataataatttatcacatcccctcccatttttcatgtccaatattgttgggaaaatgaaatttttttcatgtctatcattgctggacatgaaatctctccaaaacttgttcattctaataatatttttgtt

SEQ ID NO: 80431 - DNA, 2746 bp, Cannabis sativa
atatttaattaacattaaataatttaattttaaaaactaattaatttaaaataaccgattcaattcatatttatgtggattgaattgaatttgaactattgcacgaattgaattggatccaaaatataaattcgcacttagcgtagacatttacattataagcaaaatagtgcgaactgaaccaaatgaacaccctactcccttgtcatttacttctggttctaccttgcacacaggtaattcttactaagttaagcaagaaatgtgagaagaaaagctaaggaaccagtatcttcattaagccttacaactaactcttataactcctccctccatattactttgtggaaattcaatggcaagaatttttaccaataatcatgatggtccaaatcgtcattagtgggaaacatggaacaacctatgagaaacttctttcttttaatttttcttcaatttagtaatactataaatatatatatgtaatcaccaataaagattcttctttcttttaacttttctcttatctcaaagccatttttaaggaattgagggatttttcaaattttaagatcaaaagtgaaaagaaggaagtggttttggttcaactgtggaccttatatttcaggttggtcccagtctaaggatgtgtcttcaaaattattttctaaccgctgaaatctactttgagagagtctgctcatcacagcaagacctgaaacacaaatgccaatttttgatcagaaagagttggattaaaagcataattattcttttgactctaaagattttcatgttttagaagttttttaacaaagagattcacaagaacatgatgagaacacaaacaaaatccaagagagaattgaattgacaccaaagaattttcagggaatataaagattaaataaaacaaaacaaaaaatttatgtgttgtttcatgaattgtggttgcagtataattagatatgtaccttcaactattctgtaaagagctgaccaccaattatcgcttggaacctcaaaacggtttagtgcttcatctatatcttgctcgtatttcccctccaaaactccttgcagtgttacgactgcatcctttgttttcaagaggatattgctcttatcttcaatatcagattgttgaagatcattctgtgaaggagctagagaaacagttagcgcgtactgagcagcagccttccattgggacgaggctagccatcgcctctggtttatcaactgcttgtgctctaaatcacttcctgtcatggtcgatttttctcctaatactaagctacgtaagtagtcagcattggcaggccctgtactttgaaccattctagagaatgaactttcttcgttcgataacagtttctcgggggaatcatactcaagaagctggaaggtaacatttagaatccactgttagaaaacgatatatttgtacaaccaaacataatttcttgcaagcaggcattatcttttgactactagaaaaatgaacattacaataagaaaatgatgagtttgagaaaacacaaaggtttccatgtacctgaccagcatcaagaacaagaatccgatcactatcaattatggtatttaatctgtgagcaataatcaacatagtgcaggatttaaattcttcgcgaattgttttctggataagagcatcagtaccaacatcaacagctgaagttgcttcatcaagaacaagtatcttcgatcttcgtagcaatgccctagcaaggcttattaattgcctttgtcctacactgaaattctctcctccttcaagaacctagacacgagcagaagaagacaggttatcttccattccatttaacaagttccatctttcttttcttaaacaataaggtattgagcacaaagatacttcataagcttcaaaaggatgacaaacgacacgcaatgtgatcaaccacattgctgtttcatgcttattattttgtttatacgcattcaaatttcaagatatcatgtggctatcacatttattcttggtaagcatttatttccaagaaataatacatctgactgttctaagcattctttacagtaaagaagtgaaagacaacacttttaacatatcactgtaactatcttgaatgcagaaaagaagaaagtaatcatcatcttcaatattgtaaattagggtatgtgtatgggtatacctctgcatccagaccgaaagggtttcttctaatgacatccttaagatgcgctctctctaatgcctcccaaagatcagcatcattatgctcacaaaacggatcaagattaaatcttaccgttcctggaaagatgaatttaccattagaatgacacgctttcaacaaattctacataccaggcgtacaaacacaacaacacatttaggataaaaacccaggattgattgattttacattgcatacctgaaaaaaggatgggagattgtggtatgatactaagaatttttcgcaaatctgtcagtccaagcttacaaatatcacaaccatcaattaagattcttcctttttccatttcaactatccggaataatacattaagcatgctagattttcctgcaccagttcttccaactattccaagcttttccgttggagaaatttcgaaggataacccatgcaaaactggaggaagtccaggcctataacgcataacaacactctcaaacttaatagatcccgatgatggccaccctggtgggggtcggttg

SEQ ID NO: 80432 - DNA, 1903 bp, Cannabis sativa
ggattattgctcatgagattctcgactcattcaagaagaaaaagggaaagatggggtttgcgggtcttaaactggatatgtctaaagcctacgatcgtatggaatggaagttccttgaggtggttctcgaggctttcgggttttgtggaaaatttcgaggtttggtgatgaaatgtatttcctcagtttctttctctgtgctgctgaatggtggtccgctaaaacagttctgcccgtctcgaggcctccgacaaggtgatccgctatctccttatctgttcatcatcggtagtgaggttttatcccgtctcctctttcgggctgaaggggcgggcatgatccacgggttcaaagtatgcccacagagccccccggtctctcatttaatgtatgcggacgatactttcctgttctgcaaagctcgggtggaagaggttatggtgatccaagattgtctccaaaaatattgttcttggtcggggcaagttctgaatattgctaagtctgcatctattttctcgggcaacaccagttttgaagtgagagattctatccaatctcttctggggtttcgttccctcactccggcggataagttccttggtaacccgatttctttctctaagaattccagccgtgactttcaatttgtggtggacaaggtgatggctagattggaaggatggaggagtaagcttctgtctcaggcgggaagaacgacccttattaaatcggtggctgctagtgttcctctgtacactatgtctacttttctcctccccgggatggttactgatgagcttgataaaattgttcggaaattctggtgggttggttgctctgaaaagaaccgtttcttggcgctgactaattgggactcgatttgcaaaccaaaggagcatggtggcctcggaatcaaaagatttgctgatttaaaccttgccttgatttcgaagctgggttggattattgccaatggtgatgagagactctggtgtagaatctttcgggccaaatattgtaagcgaggtgacactttttggaatatggactatccttgtgtggcgtccaaagcagctcggggtatcttaatgtcgagggagcttattcgaaatgaatcttgttggctcgtggcgaatgggaaaagtattgatttgtggtcttctccttggatcccgtggcttaattggaacgagtacatagctgccttcaatccaagaattcattggccaaaagtgtgttggttgcacgactttttttgtgaagaaactgggaggtttcgggatgagcttgctgagtggtttattccccatcttggacaacatcttggccgtttaaagatccttcatcatgctgaccaagaccgtttaatttggcgtgatgcgactgatggttctttctcggtgaaacaggcgtatctttccttgattaagcctaggttgggattggttaatcccctctggagtaagatttggaaggccccgctccaagaacgggtaaagttcttcctgtggaaggtcggaatgaacatcctcccttgtgggactcgcattcaggctatttttggaaccaccaggcgctgtgttctgtgtaatgatgctgaagattctttgcttcatctcttctttcactgcccgttcgcgcgtgcgtgttggttcagcagccactattgtctccatagtgatcaggtactcctaaattcctctgctgatattgtttcttggattcttcatcccccgtcaggtgttgtgcccacccgtttggatgcggtgcggttcactcagtttgcggccttgctttgttactcgctgtgggaaacgagaaaccgtgcttttcatgatggctctttgccccggccgatggatgttttggctaaaactgtgaaacttgtagaggagtttcg

SEQ ID NO: 80433 - DNA, 2127 bp, Cannabis sativa
attattgtgcccctgaacttttcatcccgttaaaaatagtccctaaactatttacagtattgtaaattagtctttctgtcaagttttatcacacgtgtcaaacaaacaaaatgatgacatgacttcttagccaattgtcatatcagtgccatgttaaagccacatatgtaattaatttttaaaaaataatttaaaatttttttaatttaattttacgtaattttcttaatgattaattaatttttattttaatgattttttaaaatacctattttttaacgataaattatacacatgttgctgatatgtagcagcagtcatgtcattattttatttatcacgtgcaacaaaaattgactgaatgaccagtttagaatattataaattgtttaggaactatttgtaatgggttgaaaagtttaatgataaaataatatatatgtcatacttaaaaatcttaattagcttatatttaaatttgtagattatttatttattgtttaagcattaaatgctctatttttcagtaatttttctagttgagtcatgaccatgtttgtattaatattgacaaatataaaacatgtagaaagatttaggctttagctatacatatataatatttttttcatttcttaaacattaagtttgtcttattaaatatagatatccacaatgggtagcatgtccttcaaacttctatttacattttagcttctaataaaatgcgatgctttcgaattatttaaatatatatatatatataaatatagatgcacatgccatttttctctcctattatgctttacttcatatagtagtggtgagttgaaaaacacaattcttctcctataagtttctttatatatgtatatatcatttcttagctcatatatatattaatttagcagctctccatcttgatgattgcatattctgttacacctgaattattacattcaatgaatgagaaaattagtaatagaagaaaaggaattatatgtacacacaaaaaataacaataaatgaggaaagagaactgaggaaaaaaagatgtaacaccaagagcaacacgtgaataacgacaaacaaaagtagtaattataagtaacgagacactattattaaaccgcatcaaaaaaatgcaaatggtaaattggtaattggtaattggtagtatatttattcttcttatgaagcacatgttctttcactaagaagttcgaatattatagtactgtccaaactttctgcaacatgatgggtcctccaaactccaaagtgatcaccgtctcaaaagataggtaatagaaatagaattaatttgtgtttataaaatataaatcttaattatttctcgtccacttggtaccacttttatatcataacgcacacaaaaatatatgtatatatattttaatttgtttgttcaaacacgtcagaaacatctacaaatatatgctcgtcaaacagtcaaaaacagagggtcccattcatttggtttggctttcaaaataaaaatatatatattattattcgttaattgggcgtgttcccacttttgttaacactttcttttttcttgatccaaccttaaatcaaaatgaacaatgaaaggaggagtcttcatcatcagcctaataattaaagaaaaagtacatgatttgttacgtatatatatattagaagaaaaaatacatatctttgtatccttatcatattattagaggaattatctaaaataacttatttttaatttatttgaatatatttcaatattcttatttatactatacatgttttgttttctttttttttttcttcttttttcccattttttatattctttttctctttttctttctctctttattatttgcctctcttctcttaaattttaaaaataatttctatcactctattactatgatgatcctaaaaaaaataccattgtaatctactttttaatgttaacatttaaagatgtggaaaatatatattttttactatttccaaaaaaatcatttagtcactagtatattgattagttactattttataatttttttaaaaaatatttgttaacatttattttagaattttgttaactgaattatattatattat

SEQ ID NO: 80434 - DNA, 1112 bp, Cannabis sativa
tttccatggagaagaaaaagagaacggttcgaaagtcagtttatagattgcttgatcttgattccatctatggtgtgcaagacagaaaaggagaggaaggaaatttgggttccatcttggagcagaatttgatagtagaagaaactattgcggaggaaatttgtatgagcaatagtcgacaaactcaacatgaatcggagttccttactcctccggttagcacgagttgggtcaaagaagtggagctagagcaagaagaggataaagaacaagatctattaatctaggaatctgctaagaatctctagaattcttttgctaaagagaaaaagatttatcgtgatttgaaactgacctacaccgaatctctgataaaaatggattaaggattgctctagtggatcatgacgaagtcaaagaacaagttgtggcttctaactctgctattatttgtatgattcttggtgcaaatccacctatgcatggctatatttgagggtttcatcaagcgaatttgggggcatcttgggatagctcggattgttagaatgtccatgggtttgatcatggttaaatttaatgatgaggcaaccaaggatgtgttggaagtaggggtgatcaaatttgataggaaaccgatcatagttaggccctggtctgctgatttgaactttttaaaattagtcagatcaattcctctatggatttgacttcatgacctaaggctcctgggggagcaaaagccttagtgccttagtactgtagggaagcctattgttgacgcgattttcataaactgatctaagaagatcattaatataaagaggactgcaatgaattaatttgagtaaatgaaaccaaaataaataaaatggacaacaaggatttataatacttcaccccatgtcgtgatggtaatgggactacgtctacttttgcttttattgattagatctaacacaccagagttatgttttcaagagtgtgtggacaataatacaacaaaaaatttctaggtgaaatctcaatcgagacttatgaatacaagactcatgggagactcaatattcacaaatctaatcagttttaggttgtaaggttcttgggaacaa

SEQ ID NO: 80435 - DNA, 1018 bp, Cannabis sativa
ttttttttttttttgatagttttaatattaatttttatatttgacaagatacgttgtatttatttaaaatattatgtaaattttcgagaaattaaaaaaaattaacgtgtcgaagataaagttcaaatatttattgtacacgtacttcttttattttaaacgtgtctaaaatagaatatttgagctatgctttatttattgtaaattatttcaaatttttcaaaaattttacaacttaaaatactttaaataactacaatatatatcattattatataataaattgaatttgcaactatttatatatcaaaaaatacaaaaggggaatacacttctttttaaagagtgcaccgtgaaaacactcaataacttcataatcaattttcaatttcaatgttcatggaagacatttcaaatagttagggatgtatctttttaaagaaaaaaatgttaagaatatttccaacactcaacgacagagttagaggtaggtggttttagtacatgtggaaaataaaaaaagacactcttatgctaattctatataaatatatgagtcatatataaatgattattgaataattacattaaaaatataattatgatgatttttttttttataacatgctataacatattgctaatcggtaaaaatttataaatttagacttaaattaattataataaactgtatatttaaaatatttgataagatcttaacctttataactattaatatttaagaattattacatagaaaatataaattgacactttatttacaaaaatacttctataaggtgtagacaacattttatatcttttatatgattttaaatttttaattaccaaaataccacttacactatcacttacacaatcagacaatggttgctccgtagttgtgcggtggttgcatcagacgatggttgcagggtggttggccgaaggttgcatcaaacgaaggtttcaatcaaatgaaagtttctgggtagttgcattagacggaggtttcaat

SEQ ID NO: 80436 - DNA, 945 bp, Cannabis sativa
aagaagaaaaagaaatctaaaacttttatgttttgacattttccaaaatctgatcagaacatagtcaaatttaagcttgaagtttcagctttatttttttgctgaattttacctattctatagattgttgttttccgaaatttgatcaatttatacattccaagtgtgaaacttgaaaccaaagaaaacaagcgtaattctattccaaataaaataataaagaatgaaaaccactataaaaagtgacccaaaacgtatgctaaaaatagcctaacaaaccccttcccccaaattcttccaaaaattgaagtatttgaagggttttttaatattttggaggctgggataaattgaaaggataactagggagtgattaaactctccttctggtaaaaaaagtcacctctgctgtagtataattctccaacaaaattgttctaactaaatattctatccaatttagtatacaccctatctttctcttcttgtttattattccaagtaaagaaagagacattatatttgatgtcttctaatccacaattcgtaacacaagactgaaaatgaatcatataattaatattccttctataatacaacatcttggaggtattcaacacagcgttgaagtcacctctaatatttcatggaatttacataccattagaaatagtttccatgtctctccaaactaactctctacctttattatcattagcagcataaaccatagttaagaaaaaggaatctcctctttttggctttaccacacagtgaatcaattgactagttcctctcttaggtggcgtttggctgaaaggaatgaaaatataggaataggaatgagaatgagataggaatcagaatagaatgaaataaaatttaaaatacataaaaaaaatcattaaatttttttctattgttatattggaatggtctttcctt

SEQ ID NO: 80437 - DNA, 786 bp, Cannabis sativa
tgttcacacattcacagatttcatactcaataaataaacaaaatagtttatattattaaaattataaatttacaaattcctaaattgaaatagatgataaaaaaaataaatgttaaataatagcaaaacgacttattttatttgtaaaaaaataataattatattttacgttttatttaaactaaacagttttttttaagaaaaaaatttgtgttatttttggtaataattataataagattgttatatatatacattgtataagtttttataattattttttgctgtatatattttattagtatttctagtatacatatgaaaaaaattccttcaattttttttaataaaatcacacttaatatagtgtttattcaatgtccaaaaaataatataaaaattgattgaaatttcctattttttttaaaacaaaaaactaaaaatatcggttttttttttttaaaaaaaaaaaaaaaaagtataaacactgttatttactatttttactttgtataaaatatttgaaatttttaggtagatgtattatttttgctcctaattaggagcatttaataaagtgtattttgtttttaaaaaggaagaaaatagaaatagacataattaattacttaaaaataaactattttgtaatcattaatccatcaaaattaatatatgaagggaatttgaaaaataagtatttaaaaaccaatggagcattgagagataattaaaaaaattgattaatataaaaacccactttcttgcaccaatattgaatacata

SEQ ID NO: 80438 - DNA, 1884 bp, Cannabis sativa
cggtatttttaacattacataatcacaatcgcaacctaaaacataaaaaagcattttagattcaacttatatgagagaataataacatgaactaattacaataaaaaactattcatctctatcctacatgtaatctaattaatcattacactaaagttaatattatatctataaatattattttttttacaaatatatatcataactaactaaattacatatacatttttctccgtttttttttaaaaggggcgactaccccacctcacctatatgcgggtccgcccctgaatatactactaaaatagacggtactctccacacaaacaatgaacatggaaaagctataacataacaaacacaaacaaaaaacaattatttaaatagtaatttgtgacgtaaatacttaagtttaactctcggttataaattaatatttaagtttattttttgacggtaataatactaagtgatatttctagatattcctaagtaactgactgtgaagtgtcaagtcattatccacatattatttatcttcaattgatagttaaactttagggcaattattctatatacaatttttttaaaaaaatttacagtttgagttgctctagtagtttttatgtgggttttggttcctccgttgattgttatgtaggtttctatgtggatttttataaaaatataaaaaaacttttttgtaaaaaaaaaaaaaaaaccataaattttatgctgcaaattactcttatacccctgccttattttgttttttctttaaattgcacatgtagagaatgcaaccaataatgaaacaatcttcatagttcatcattgtgtggtcaaaaaaaaaaaaataagtctccaaattctttcactgtttcactctcttcactcaaactagtcacgtaactctacaacacacaccaaacaaaatgtgagcttttgatcattcatatttttcattttgttgatttttttgggttgttttctttctaattttcatgtttggatgagtagggaaaatggtttgttgaaggaaaatggattgaagccaatggactctgagcaactcagagaatatggacacaagatggtagatttcattgctgattactacaaatccattgagaatttcccagttctcagccaagttcaggtttttattcactctctctctctctcattttctcatgctaaaaatctcaacttgttcttactagttttttcttttctgtaataatggcagcctgggtatttacatgaactaataccagattctgctccaatacaccctgattctatacaacatgtttttgatggtgaaattctccatctgggtttttccaattttagttttttatttactttttgttatctaaaacatagcagagatttatgttcaagaatcaatttttattctgacattgcagacatacagaatcaaatattacctggggtgactcattggcagagccctagtttctttgcatactatcctgccaatagtagcattgctggatttattggggagatgcttagttctggtcttagcattgtgggttttagttggattgcttctcctgcagccactgaacttgaatcaattgtccttgattggcttgcaaaaatgttgaaacttcctaaggagtttctttcatcaggtaaagcttaaaagaattaggttgcgtttggttgggggtaatgaaatggaacagaatggaaatgttattctatttctttgttcggttacattttaaagtattagaatatcaatattcagatgaaatgacttttccaccattccaatttaagaagaagggtaaatatcattttagacactgtgttttgcaaaagttaccgattggatcctctgttttgtta

SEQ ID NO: 80439 - DNA, 951 bp, Cannabis sativa
aaaaaaaaaaaaaactactctctctaaaatatatagaaaatccttgaaagtttaatagctactattatcatgtgcagtatctaaagtagacatatatttttacaaattgtgaaccactttttttttatctttactccaacttaaattctcaatttttttttatcttatatatataataacttaagcagttagtttgaatcatattcaatatatttctatatgagttgaacatcattcttaatatatattatttgtattagagtttgtgagaatttagacaagaacagagaaaaaggaattgagtgttctttattaattaaattaaaagattacaaaaagaattattatatatatgaacaagaataacaacttcctaactaactcaactaaaacactcaactaattgtgtagttagttaatagtattaactaactatataactaaccaacacccttaacaacctcctcaaactaagtgtggttttagaaacgacacacaatttgtctctaagctctaaaaatctggtgctcgagatcgactttgttagacagtcagcaatctaagcagtagcagggacatgtttgccatgaatgtgctgctgtagaactatacctcggacaaagtataaatcaatcttgatatgctttgtacgagcatgaagtataggatttgtagcaaggagagatgagctttggttgtcacaccaagcagagggaacaactacttgaggattgtgcagctcatgaaggagagactgaacccatgttacttcagcaacaacatttgcaagactacaaaactctgcttcaaacgatgatatgctaatagtgaattgcttctgagatttccaatgtacaagattgccaccaaaatagatgtagtagctagaggttgagcatttatcatctgaattagatgcccaatatgcatcgcaaaacacatcaagggaaa

SEQ ID NO: 80440 - DNA, 853 bp, Cannabis sativa
acatgaaaactacatgtatacataaatgacttctaatcttttattgataacaaatcagattagattgaaattgatttttatttagggcataaaatcccaacaaataaagtatcattgcttccttcagctctcaatgaaagtacctaaatatttattgagatttttagaaaatgaattacttaacataataactaaggaacaatcaaaagaatcaaatcaaagagaacactcaaagtttttatgtggttggagcgttaaagagctttagtccacgagtctattttattatctattaggccagaaaagcaaaaaggattacaatgagtatatatgctctattctattctcaagtttttgagttaagaattttcaacccattacatgaaggactccttgtgtatttcactctaattgagtcctcacaaataatatagtacttcgacttattatatgaagcccagctgattaggcattgactttatgctgacttggcaggttgatcacagtgctagttattcgtgtcatgtcctttgattgtggataatcaattttgtatttatttttttattatcaattatgtagtttcctattttaacttgatattattctttgtctgagatccgtggaaggtaacttccttattctatgtgggttgggaaatggaaaactactactgtctttcaaatacatgttgatgggtctttccggttacacgaagcttgaactctagatatggagtatgctttgcagaggttctactagacgtgcaatgagattgccttcctgcaagggtagcttggaattgggcttggcccaattcttggcatttagagaccactgatgagctttaatt

SEQ ID NO: 80441 - DNA, 1079 bp, Cannabis sativa
aaaaaagaaaaactctaaacattaattaccagccaaaattacaacatcgaaaccaatatttatataactgttttcaagatcattaacatacgtatactaattcaaatgttgagaattttataactattaggtggcatttggttgtaggtaatgaaatggaatggaaaggaaacaattttcattccatttggttgcatattaaagtgttggaatgtcattcaatggaatgacctttcaaccattttcgtggaataacaattttattttgaaatggaaggaaagatcattccagtgctcgatgagaaaaaattcaataattttttcataaatttttgtatgcattttaaattttattcctttccatttctactcccgttcctattcccattcctatgttttcattcattccaaccaaacgccaatttttctctcattctctttgtagaacattataatctcttcaataagacattttgctgtgaatatattgaccactttacgagaccactcgttatcaaaatgaaactacaataactggaagaaaaaaaagttctcattattacaattagataaaaataatataaaactaaaagaagaacaattattcacaaaattatggtttctagtactgtccttctcaagtgataggaaaattataaatgcaaatgaagaatgataaatttacatcagagtcataccaattaccaattggatgctgttcctcataatctaaatcatggtcctttgaatggccaaactaaatttgtatttcagaatgacaattattccatgcttgaaatagtagaaaattaacaaaatgagttgcttctttgcacacaatgacacaaattaatcaaagagtattatagcagatagaagagttatagtgcaatttaacatgtttatgtatcacaacctgtaatatcactaagaatgctaaatatatatttcacttctcatcactttatatgttactaaatcatgatatgaggtaatacatggaagaacaaaaacaaatgattctttctaaaaatcattgttgatgaaggtttattaaaaagttggattgcttaagtcag

SEQ ID NO: 80442 - DNA, 2102 bp, Cannabis sativa
atttcttatgcagttggagtagtaagttgatatatgcagcacccaaagaagccgcatttggaagtagtacgacgaatactgaggtatgtcaaagatactattaactatgatctcttctataagaaaggtgatgaggttaagatcgttggctactgtgatgttgattatgttggagatcatgatacctgatgataaactactgggtattgtatttaaacttggatttggagtagtgtcttgatgtagcaaaaggcaaccaatagtgtctttgtcaaccacagaagtagagtatagagcagcaacaatggcagctcaagaaagtacgtggttgatgcaactaaggaaggatttacacaaatctacagattctgcagtgccactttattgtgataatcagtctgctatccgtctagtagagaatccagtgttttatgctcgaacaaagcatgtggaggtgcattaccattttctcagagagaaagtacttggggaagaattagagatgcaccaagtgaagagcgaagatcaagtagcaaaggactcaacacaacgagatttcagaagctgagagaccaactcagtatgaagagtcagtgttgagggggagtcttaaaagattaacacctactctataagtatctataattttgatattttttttttgaaggaagaaaatcattttgataaaattagagaatcatctagaattatataaaattaatattcacaagaagtttcaagaaagttttagatttgacaatttgctagaacattctagcacattgattcacccccttgagtggtataaataggggagtaggtcttttggtggtgtgtggtgagttgagtgataattttagtgcacaaataaatgtaatctaagtattctgaagagtgtcccaaaagtgtgagttatatacaagagtgttgtaaatgtgtctagtattaaaataagagtgtaagtatttggtgtagtgtaaagtgtttaagtcttggtgtaattatttttaggataataaagtaattacgtattcacgtgttgtgttgtcctacaggttatacaaacaattgatacattgcttgtggttgtggtaatttagagcatttctaataaagtgctaaaaatatagtgtattggtatattttagcatacttatgaaaaatgcttcctctaatgatattgtaaaaattgtgctaaatttagcacatgctaaaagttagtttaaatttggtacaatatatagcatcgtgtaactttaagtctacaataaatgttactttttcatttactataataccactacactaattattgtgttttattgacttttactaaactttatattatttatttaccatattaccattataaataataaaacaataaaaaataataatttttatatatttttttgaagcataattataaataatgggccaaatattaacacattttttttggcaaaatttaatttttttttttaaatattccattcaacatgattttatatagcggtgttcgcggtgcgggtggtgcgatttttgaccatttttcaaaccaacttgcacttgcggtttttcaaatttcccaaattgcaccagcactacgaactaaaaaatcgcataaatcgcaccgtaaaaaatgatgcggtgcggtgcgatttttgcgatttctgtggtttggactatcactaaataattaaactatcacaaataaaaacaaagcttgagcaacacttgtcaaaaatatcataagtcttgaaaataaatatgaaaaaaaataagtttcaacaatacaataattagtgggctttgagttgaacattaacatattgaacctaaataaatataaaaattgatatttttataatgtgtggtgcagtgcaacagtttgaaccgcatattaacaatttaaaactgcaaactgcactgcaccacgcagtttaaaaaaaattcaaaccatgaccgtacgggaaagaattttaaaccgtattttttttgtggtacagtgcgagtagtttgaaaaatttgagcagtttgataaacactcctaattttatataaagttgcaacgaaaaactaaaaaaaaaaaagcaaaaaaa

SEQ ID NO: 80443 - DNA, 1126 bp, Cannabis sativa
tatttaccctaataacaataataactatttataaatcaattataaattataataataataattattttttatatcatataactattattaaaaaaatatataaaataattaaaactataaaatacaaatatattttagtatttagcttatcgaatataataaaaatgtaaaaatatagaacgtcaatttaagcccatataagataacaggttggtctatttaagaaaaacgggctggcctaaataaagtacaacaagaaattattggactttttgggccacgaaaagcatatcctataaaattattccacggcatgacatagtccatatttttctatagcctgacacaatattcatattttaaaaagcccaaaacatataggtcgagaagcacaacaaacacgtatttataacttaatatacaagtacgtgttacaaaaaatctaaatccatcccgctaaataaagaaggaaaaaaaaaaatttacccattcactaggttggtcaaatgaatccatccaaactgatccaccaatatttgtatttttttttaaattaattttatattttaattaattgtaataataaaacaaatatagtagaaattcaaaaattaaatcaattaggttattcgtataatttgtaatctgtaactccaactaatctgggccaaattatttgaaattgaacaaaaaaaaatctagtgtaagtaatttggtcaatctggacagttaaacaaataaaaggaaaattagactttgcaggaatggagccagccaactatatcaagtgaggctaaattattttttttttttgttaataaaagagtcaatatagaatgtgcatatggcatgtaactctgttaaaatatgtgttataatcatatatatcttatttttactaataatatatgtttaaaaaattgttaataaaaatgatgtttagacaaagacatagtgtggtatgggttgctaattaagccaaatgaatttatagctagctagcaatcaactgttagttttgacaattaaaataatttttaggaaattagttcaattacatataattgtgttcaatattaatatatatatatagtaatttatgatatgaattcaaatgagtatggca

SEQ ID NO: 80444 - DNA, 1303 bp, Cannabis sativa
ggctaaatgagggagatagatgttctaaattcttcatgacctcgcacaataatccgacgtaggaaaaacttcatacaatgcatcaaggatgctgaaaaagggcattggatacgagatcagaaggaaatcgctgactgttttctaaaaaacttccatgatctctttaggaaagatccaacctgtcgcactccacatcttaatgatctattccccaaatccattactcctgaagaaaacttgatgctaaatgctatcccaaactcggaggaggtgattgcggcaatatctgaaatggggaaggataaagctccaggaccagatggactcccggcaagcttttattctcatcattgggatacaatcaacagtgacctccaagaaatggtaattcacttcttcacccatactgagcttccttatttcataaacgacactgcaattgttctcatcccgaagaaggacacccctgtttacacaaaagactaccggccaatcgctctatgcaatgtggcctataaagtaatatccaagatcattgccacaaggatgcggggaattcttccaaaactgatatcgccaacacaagttgcgtttgttaaaggaagatgcatagcaaagaacacaatgatcgcaagagaggtagttcactcaatgaagaagaaaaaaggaaagaggggcttcatgatgatcaagattgacatggaaaaggcttatgataaactagattgggatttcattattgtcgttcttgatcaaatgggtttctccaaaccttttacgagttggataagggcttgtatatccaccaaggaaatcaagttacttctcaatggctcaattgaagggagagtcaaacctgagcggggtctacggcaaggcgatcctttatccccaacgctattcatcacaacggcggagacgctctcaagactcattttcattaaggagaagtcgggtgcaatcaaaggtttcaagatgggaagaaatggaactgcagtgaaccatttaatgttcgcggatgatatcattttattcgggcaagcaacgctcaagggggcaaaaacgtttaaggattgtctttctaaatattgtctatggtctgtccaatccataaatgctcagaagtcatctattcacttctcgaaaggggtctgccgtggaaaaattcaagcgataacacaattcttaggcatgaaaagaatgccaaccgatgcaatctatttgggtatccccttattcaaggccacaagacgatcagaatttctttataaactggtgtgtttttagtgaattattatccttt

SEQ ID NO: 80445 - DNA, 870 bp, Cannabis sativa
cttgtaattatatcaaattctcgtgtggaccattgtaaatattaaatattcatgccatatccatatgaatgacttatgcataaataaaagattttttcacaaaaatttactaaaaattttaaacaaaaaaattataaaaaaaagttaatatagaaaaaaaaaaaatatatatatatttttaccttttgaatttttttatttacaaaaacatctctttagtaaaaataatatactatttttagttgttttatagtttatttataattgtattaaaattgtcgttagattatgtttttggtcattttaattgttttataatttatttatagttttcgtgaggttgttttttactttttactaagaaaaatatatttttataactatagtttatttatacttagtaaatgtgtaaataaaacattaaaaaaatatatttttaaaaattctcctatatcaaaattcaaatgatgatatgatttttttattttttattttttaaaaaaaatggttgtaattttaggacaagttaacattattttatttttcgaaagaatgcctctttggttaaaaggaaaatttaatttcaagtgagaaaaaaaatagaaaaaaaactagtggctgaataacaaaaaattaatcttgaccgaatgtaagatatataaataaatggaaaatatattacaagagctattttttttttttttttgaaaaggaatattacaagagctagttgaaagcaagaatattaactttttgacaaagtaaaacaagaaatttaaatgagagtaatttgaggctataatattttctaagttacagtaattacctgaaaaagaaaaattaccctgtatactgtttttttaacttttt

SEQ ID NO: 80446 - DNA, 901 bp, Cannabis sativa
atatgtatatattaatattaatatcgtgatgaccaaattcagtgaatgataacttctctattattcacatgatatatacactagtcacaataaggaaaaaaaaaacatttagaaataaaatgcagcatatatataatttagtgacatttggcacatggaaattaatataacatatattatgtatatcccaccaaaatgatctcactaatagattgtattactcttttaacactttgaatgtcattagaattttagaaaagatggtattgatttttttttttttttcaaacatcactaattaattcatatataatttgtagaattttaaaaaatagcactcattaattcaaaagtattttataaggacattgatgaattgtaaatcactatatatatatggcttattgcatcattgataagtgtcactagatgatttattatatttatgaaggtttaatttgctgatgcagagcataaaaaagaggagattaagaaaaaaaaattggattcaaaattttcaattgcaattgaaatattggagaattggtactatgaccaaaattttgagccctataagaaacttgctacaacaagaccaagcaacaagaaatagagagaataagttgttatttgctcgagtgcttttgaaagtgaaattgagtcaacacttgcctcatgagattgaatttgtgatggttgatcagaaaatgaaaatggcttttcattatgattggaggcctatcctttgtgaaaaatacaaaggttatagacacatgatagaggactccaagaaaggtcactacaaaaaagactatttttagtgacaactttttagtcacaacaaaaaaaatttgtaactaaatgtgacttttagtcacaacaaaaaaagttacttgtgact

SEQ ID NO: 80447 - DNA, 1549 bp, Cannabis sativa
taacactccccctcaagatggagatgtaatgctcattaatcccatcttgtccttcaagttgttaaaccgatttggaaataaagctttagtaaaaatgtcagcaagttgtccttttgaagagacatgactggtttttatgatgccttgttgaaacttttgacgaactagatgacaatctatttcgatgtgtttagtcctctcgtggaaaacgggattagctgctatgtgttgagcagccttattgtcacaatgaagtatggcaggaccaatatgttcaacttttagctccttaaggatggacaaaagccacacaagttcacaagttgtgttggccattgccttatattcagcctcagcagaggatctcgaaatggtttgttgtttcttacttttccaagaaattagagagtctccaagaaaaatacaaaaccctgtagtagattttcgagtatcagggcaagctgcccaatccgcatcactaaaagccttgagcttaacttttgatgttgcaggaaaaataattccctgtctaggacaattcttaatatactgtagcactctttcagctgcctttaggtgtctagctttaggaatggccaagaattggctcaatctattcacggaaaaagaaatatccggccttgtgatggtaaggtattgaagtttccctattattcttctaaacaactttggatcagtaagcttgtctcccttctcatcttgacccaacttaagattggcttccataggtgtagtggcaggcttgcaacctaaatgactaagatcttcaagaacttacaaggcgtgaggtctttgagatataaaaatccctttggcagatctagaaatctccaatcctaggaagtatttgagatttcctaggtctttgagtctaaatctgtcatttaattttgtcttcaaggtttctaactcatctaagttgttgctggccaatatcacatcatcaacatagataagaagaatgatgaaagtggccccaacatgtctcataaaaagagaatgatcggttgttgagtgatgaaagccttcttccattaggacactagaaaacttttcaaaccattgtcttaaagcttgctttaaaccatacaaggccttgttgagtttacaaaccgcatttggtggaatctcccccttagcactataccctggaggtaaagtcatatacacatcttcatgtaagtcaccatgtaaaaagcattatttacatctagttggtgaaggtaccaaccattaatggcaacaagggctaaaataagtttgactgtaactagtttagtgacaggagcaaaagtgtcggtgtaatctatcccttcttgttgattgtatccttttgcaacaagccgaaccttaaaccttttaacagacccatcagcattaaacttgattttatacacccatttgcatccaataacatagcaaccatctagtaatgtgaccactgtccaagtgttgtttttctcaagagcatcaatttcacaatccatagctctatcccattcaggaatgcctttggcctgactaaaaa

SEQ ID NO: 80448 - DNA, 953 bp, Cannabis sativa
gatatatgttgaaatgaattaatagaaagtttagattattttatttcattatagatattggtagataaacctagaaacttaggaatcacacacatcaatctcttccttcctttcttcctttatccccttcgaacctagagccagcagctacaagggaggttttcttcatcaagttcttcaattcctagctaaattagctaatcctaagtgctattcaaagctttgaggtaatttttttcttttcttatggatttcttatggaggagtgaatgtgttgaagatgtactgttggagtttgtggcctctaatggcagaaagaacctgcaggtttccacaataggtaattgtgatgatcgagtttggtggccaacttgtgcgagaagacaacaggagtgaacgaagaaccactagaaccagtggctattctagctggttgtagaggaagagttcgtgaggaatccatggaagttcaacgaagatggagacaaatgattattcaacaatgaaatttgaatgatgaatgagaaccatgttgtgctctgataccatgttaaacgaaatgaattgacaagaattaactctcaataattacgaaagaggatgatacagtttatatagttacaagattaggcagaaaatgaaaaagacaaaattaacctcctgactgacttaactaacaaaacagaattaacaaccaactaaatgtaaaagacaataactaacagcaaactatccaatactctataatactggaaatatttctatgactcaatatacatcaataaagttaaatataaacatagaatattgaacctcaatacaaaccaacaaaattaaattagattacatatttcttttcacatacttatattatataaaagagagaatttttatttattaaaataaacattacaaatagccagagttgtatgctagaatagattgtataagca

SEQ ID NO: 80449 - DNA, 1043 bp, Cannabis sativa
tgttggaaattttttgtttgaccaacactttttaaataaacaattaatacaatagtgcaaattggtatttttgaaaaataacaaatttacacctttgttgcagcccaatgtcaaaaacatcacaagaagcccatttacatcaaaggaaccacaaggttcggcccaatatagaatgagcccaagagagactttctctctccaatcaacactttgcaacctatgcttttctatctattcggtcaaagaaagagtcaaacaatgactcttaattcccttcaaattttggcccaacaagagagacttttcactgaattaatggtccagcccaagaagaccaataaaccctaaatgtcttaaccctagatatataaagaaatgaaggtaatgtctttaaccctaaaactttctacacacttcggctgccactccttttccctcaaaaatttaaaatttttcaaacactcttcttcttcctcacataagcagccgcacaaataaactagggttagggtttctttagtttttcttcttcttcttttcttcttttacagctgcaccttgatagggttttctagggttcttaaatgttctatttttcttcaagcttcttcctcttctctactctaatggcagcaacaaaatgggtaaggtttttctatttcttcttcttctgcttacaacagctaagattttatggttcttctaatatttttcttttctttcttgctacaggttctaaggttagggttctttaaaatatttctctgcttctttatagcctctacccgaacaaagaacaacccaaaaaaccacaaagcttctacccgaaactaaacctagaaaactcactcactcaaaaccgaaccccaaaaaaacctctcagaatctctttggccgaaacacatcaaatccgaaaagcaagaacataaacacatacacaaatacataccagaaaaataataagagtgagatgagagaatgcaaacagtgattaaagtagatgacaccaaaactttgatctcggagttcgcccaaaacaaccg

SEQ ID NO: 80450 - DNA, 1086 bp, Cannabis sativa
gttggagagagtggtgtgcaagtggtggtgagggagagagaggcagagtggtgtacgagtggtggtgagggagagagagatgggcgaggttgcctaagtgttggagagaagattgttgagaaaggaatcaaaggacaaggcatgcacgtagaaaggtatgaaacaaagtacgaccacttcttcagcgtgacctggtgacaagagggtacaagtagttgaggaacttcatctgcatttcctgacgtcccaacaacaggtactctacaaccacaaatcctgcaactcgagaccataacacctgacaatggtagaaggcgcaagaccaccttctacatctacaactcgcagccacatatagccaacttgtcccttagggaccacaagtgtatctcaggctattaaagcctataaatatatcccattctaatatgtgagagggggttagaaaattattgtgagacttaacctaaagaaatatacacttttatctttttctataacaactctacaactttctttaagttttcatatttttgtgtcttcattctcattccaaggcttatgtgtgagttttgatttttcagctttaagttagtttactgtcaacaactacgttgttgatactattagggttctagaggaagagatatttttgttggactgtatatatgtttaagaagccgacccaatgtattcttgtaatattttttttttctatagaaaaaaaaaatctattttttcttggtccataatgtgtaaatgttccaacttctaagagaaaatactttgaaattttttcatggcaatttctattttatctctgttttacgtcagggctgtctcaagctagtgaggggcctaggacgaaatttaaaactaaatttttttgtttttctatataattaattttgatatattattattttgatattaaattaactaagaatacttctaatgaaatattaaatttataatacattactatatattaacactaatttttatataaaaaaaaataattatggtatgttgaaaatagtattaaatatatatataatagtataccttttttttttttaaaaaaaa

SEQ ID NO: 80451 - DNA, 1510 bp, Cannabis sativa
cggaccagacccaaaacttcccccaaactcgagacacaggactcaacctaggagctgaaacctaggaactgactaccaggacaaaactttgaacccaaacccaaaccaagaccgagatatgaatctagacctaaggctttgtcctgacccatagtcagtatttgaattttggacccgaacccagatccgtaccaagactcgaacccaaacccgaactgcgatccagacttgatctcagactcggaattggaatcggaccaggaataggatgagaacccagacctgggactataataggaccaaaacctaaaccaaaacttagaccaaaacacatataagtacttgaaccaagaccgggacctggacccagatcaagacccaaacctaaaaattggggccaaacccaagacccaagaaccaaactcaaacttgggacccaaaacataaactcagactaggatgggaccccaacccaattcgagacctggacttggagaggaacctgagacatgaatccgaaccgaaacacaaacttggacctggagtgagacctaggagccaaacatagatgggacctagacctaggaattggtccccaaaaccgggactcgaacttgggcctcagaacttggattgtgattcggggctcgaccctagacccaaacctggacgtaggacccacctcgagacttgggatctgggactcgatacttggactcgacccgtacctcgtgacttaaaactagaactgaaacaagaagcggatcgggacccaagaataggacgaggacctagacccaaaattgtaatcagactaggacccagactcaaacacagacccacactcggattctgtgtctgagttcgggttcgggtctgggtctggattggggtctgagtcctggtccgagtttgggtccgggtttgggtccaggtttggatcctgatctgggtctgggttcgggtccaggtccgagtttgggtccctggtgcgggtccatgtttgggtttgggtcaagatgtctatccagatctaggtctcgagtttcgatctcggtctgggtctgggtccgagtcaaagttcgtatccagatcctaatctaggaccgagtttgtgtgtgggatcgggtcccagatttaggtccgggtcaaggcctgagttcctgtctcagtttgggtctggggctaggtcgaagttcagttttaagtctgggtccgggtccttgtcaggttatagtttcgggtcctgggtctaggtctgggttcaggtttgggtcctggtccgggttcgtaacctaatctgagtcccctatccagacacctactatgggtctgttccagccctgtttcccaaatctcgagtccagatctagatccttgtcacaggtcctggtctggttctggtttaggtcccaggtctgagtttggattcaagatcgagaatggggtttggttctaggtcctggccccagtttgcgtcccgagtctggttccatgtttgggtctgagt

SEQ ID NO: 80452 - DNA, 1107 bp, Cannabis sativa
  modified_base (1051)..(1051): a, c, t, g, unknown or other
aatgtagatttctttgataatttttcaccattcattagaataatatccattagagttttaatttcacaaattaatatacacaatttagtttttgcaccaaatgaatgttaattgtgtttaggttactgctttgatgaaaatgttttttgaaaaattcaactggccacaagggactgttggaacattttatgaatagttactgtcgcattgttttggaacacttatttgtaagggtatatatattggaggtttgagtaattgggtttgggaccaagtggtacccacttttgtggaagaggggaggagttacacaaaggcttacttgaacaccacatgtgtgcctcgccgccgtccgatttatccaattcgagtcgagttgagctagctggttcgagtgtgcaccttattttttgggaaaaaattatttattaaatattatttaaaataacttttaaacttgtttaattaattggtaaactaagacgttttctacttagcttttttagcgcacaatccagctcttccacaatttagaaaaaaaaaatgactttattcttgatttatttttttgtgttctctatataatgcgataaggctaacgagtttttttagagtatttttagatatagtattcgacgattttctatagtgtagtagggtccaatacaatggtttgactgagaaattaaaacacgaaaaaaataagggagattttcaattatatacgttaatttgtaaataattataaaaatatctttgacctaaataatccttataaaatactgtccttactcctctgtgcttataccgaaatcaatgtttgatagtttaacctttaagtttttttgtcttttcctataatcctgatccaatcgtttttattttcaattatttcctataatctcaatcgtttttttgtgtcctgtattcatctatttttattttaaaattatttgtctcctcattcttattttgttcataagtgctgtgtctgattgtctctatcttttacatctcacgactttgtatttttttttttattattttattntattttatttatttttaaaaaattatctactacctttaactaaaaaagtcactcat

SEQ ID NO: 80453 - DNA, 1088 bp, Cannabis sativa
gaaggaatgagggaactagcagcaaactggagattgagcactgatttaggctttgtttggagttgtaggtcaactgttagttgtgggggaatggtgggcgttacttgttcggcgccaatagctcgatggagccgagaaacatgaaaaacggggtgaatttgggcgtggtcaggaagttgaagcttgtaagccacagaaccaatgcgttgaatgataggaaatggcccattataacgaactgagagcttttcgttggaacgttttgcaagagaacgttggcggtatggtctgagcttgagatataccatgtctccaaccgaaaattccaacagtcgtcgcttggtgtgtggttggagcttcattttgtgttgggctcaaataagacgcattcgaagatcatcgaagatggcatcactagaatccaacaagtcatccacggaagacactatggcactccctttcttgtagggtataagagcaggagggtctctaccatatagagccttaaagggggtacttttgagagatgaatgatatgaagtattgtaggagtactcggccaagccatccattttgaccattggttgggctgctggtatgtgaagcagcgtagatatgtttcgaggcaacgatttagcacttcagattgtccatcagtttgtggatgataagcggtgcttctcttcaaagtagtgccttgtagtttgaagaggtggcgccaaaagaggatgaggaagagtctgtccctatctgatattattgattgaggaacaccatgtaacctcacaatttccttcttaaagacatcaaccactataggggcagaaaatggatgcctgagtttgataaagtgggcatacttagaaaggcgatcaacaactacgaggatcgtatcccatccgtcagaccttggaagcccttcaataaaatccatagtgacctcatcccatacttgagccggaagtgctaagggttggagtaggccgactggagatgtggtgagcagcttgttttcttagcagatggaccaagtgagggcgtccccgtcgagcccgatgacagccgtttcaagcatgagtggttcggag

SEQ ID NO: 80454 - DNA, 1546 bp, Cannabis sativa
  modified_base (1482)..(1482): a, c, t, g, unknown or other
aagcttgagttcttaaactcaaaacttgctcaaacaacaccacaacccacaaatctagctcaaattatcctaattatccataatttaacttcaaaatataaatacaaacactacttacaatcacataaccctaactctaggaaaacatgcttgaacttaactataaacataagataatcaaagagaagagctaagaggggttataccttgaattagatcactaaaaccttgctaattactctgatttgcagcaaaaaaatcccaattgttgttgattccttgggggttcgaaaaagagagagaaacaaatggtttctcttgatttttcttatttctttctattttctaaaattcataaaaataaatgataaaccaaagtcattactcacatagtggccaaatgccatactaaagatcagccacctcacccaagacaaaaatgacaaaaaaactcttctccaaaacgcttaactagtaaagtgatataggggtaaaatagtcatttcaaaaacttcgggtattcccgacattctcaatgtctaactaggttgcccaactactactaaaaatactaaatgtgattctaatagcaaaacgtcgcgttccaatattgtcagacacaaaatatgcaaaaatataaaattttatatatcgcataaataatacaccttgaattcaaataaatcttcatgaaatgataaattctaattaatattctagttttataattaaaccctaattatctactaattctaaataaaagttaagaggtctttacactaaaacatcaattaaagaaaaagcacaaataaaaaatccaaaaaatcagtaaaagtacatagtcggaaaagaagacttactggttttggaatttgaagtcgacactgaagagtatctcacaggaaattgactgcaccaaaggtctagtatatatcaggctcttttccttaaaaaatggtggtgataacaaataaatattggaaaaataatgaaggcgtagacacaaagagaagaagtagagagttttggtgctctttggtctttatgctaaaatggtgaaaagtgatagtaatgaggaagaaatgttttaacttatatgagagatgggaaaacttgcaagaactatttaatcgtactaattaaagatctacggttattaacttatgagggcagttgaaaggactaatgcgacgactatttaaattttcttggtaatacgaaattccaaataacgtgtatttagagtaaaattttcaaggagagacttcaaaaattcctttgagactagaagtacttttgagggagcaatttttatacctatttttcgaccaataaatgaaaagatatagttacacaacacgtgtaaagaataattaatgacttataaataataagagccagttagccgaataatgaaatgataaaacgaaattaagcacaacaatgttatcgctaacatactgttgcccctgattttgcccnatatacgtggaccaaccagataaggacacgtggatcaagcaattcagaatatttgctaagtctt

SEQ ID NO: 80455 - DNA, 901 bp, Cannabis sativa
aatatatatatataatttttttatgcattttaaattttattctatttatttttaaccatgttataattgatcttgattcatgagtactaaaaaaatattatttttaatgtatttaacactatttactaattcttgttttagaaaaaaaaactattaattagcagcaatgtttaatatttctaaatatatgtaatgtaagacgagattttgttatattaggtgttcttacttataatacctctgattttgtttaagaaaacatattgttgtctaaattgtttgttatgggccaattttaccttttggtattagtgattaaagtttcacattaagctaatatttgataattttttatgacggttaatattaatttttatttttagaaatatcataatgttatcgagttgtccattggagaatttgtgttttgacttggtcggtggtattgtaaattttcgagtattaaagttagagttattggaataaaaattttgaaattttggccacttcaaatgatatggttgttttgttgaagaagacatttttagcatataagttttttcttatttattaataactctaagtctcattagaaatagcttttaataattttattagttgttaattgtatttatattttatgcattttggaatgtttagagaaaatgaaacaagaatattgttgacttaagaatggaagataaagcttttcagtaatttaagtagaatgtgtagaatgtgtggcaattttaataacgttggatataattttttttcaaaatttgttatatatatagttttattaggagatattcttttttttagaaatctagaattattaattgttagagaatatagtaagtattctatctagttcttaagaaatgtctctctctaatct

SEQ ID NO: 80456 - DNA, 1390 bp, Cannabis sativa
taaaattttgccttctacgaatgatggtagaagcgtgaaaaaactttgtattgtcatctccgaactaaagccaattctcacaagatttttgctttcatattctatccatcctcccctccatctccatgatctccaactgaatctctgcttcaatttcaaccaaagcatctgttattggtttgttctgtacatcagctagccttcgatgtaattcttttaacttgcgatcacaaaatccaaagacctccgtattccatttcttaagatctcgtttagtgtatattaattcctttgaagaagacacccagcagtgttctgtcgcaccccatccacgagttcccaattaccttctcacaatcaggtctagaagtcaaaagttccaaaaaacagaagggataccgaagcttaggcccctcaccccacgcacgaaggaggataggggcataatctgacccaatgattgggaatttttccacacaagccttcgggaattcagtgcaccacaacacactcgcaaccaccctatccagcctcttcctgattcttttacaagcagatcttgagttttgccaagtagtcattccgcttccacaccctaggtccactccacctatttcaaacagaaaatttgccaagaactcgccctccttatgatcaaagtttcttccaccttccttctctgtttcctctagggtagcattaagatcccccataagaacccaatggtcttgacaatcagccaccctctcagtcagccagttccagaagtcttttttttagcatgatatggcgtaccatggacacagtatatacaccatttggagtaccccaacgcctcataaactccaattttgaagccggttttgaaactttccataagttggaaattgatgcctcttttccaagccacgcagaatccccctgaagtgcctatcgcaggaatacaacaaacattcaagagacccaatctattcatcacactcctcatccaaacttcgtcaactttagtttcagacaaaaatagaatatccgcatcacagtcgcgaataagaccccgaggggttctctctgccgcaggctgttgaagcccacggcagttccatgctagacacctcatgatgacggtgggggcatgatcacggccgcctcctcgccatttccaaaattttgagcgaactccacattgacttcgatacaattagctagccactcatttaaatcacctgaattaggctgaactgaagatgccttattgccacatgttttccttccacttctagttttgacccctgaaccttgctgtgacagtcagtagtcccgtcatccgtaaggggacgttacaaatggtattagagccttgacccaaccggatgtgtggtcgacgaggacg

SEQ ID NO: 80457 - DNA, 1401 bp, Cannabis sativa
aaaaaaaatcaaaaataaaatttgaaactaccaataggtacaatccaatagtatctctatataaaaatttgtggacctaaaaggatgtatatccattaaaaaaaattgtggacttaatattatttcttttaggttgcagcctcctttgaccatagtcacatcacacatgtctcattaattgcactaagaaaaacaatttgtataattaattattaaaaagatcatatgatgggataattattatgtgtatatatactaaataatcattatcctccacaatcatgatccatctttatttaactttttcctttgaattaaatatttcatgacatcatctgaaagaaaagttacatgccataacatttaactttttaaaataaattccttacgctatagactgtagtactattatactatatgctcttttggacgtgtcacaatcaaactttcaactaattaataaacttttgattccaaaaaaaaaaaaatgtaatttaacatttcgaactcttatctaacatgttacatttcccatgctgcatactaaaaaaacatataaatttgtttattcaaattattgcatgggcgaattcagtggtgaaaccaggcaaaaatgaaaagaggggccaagttaatttttttcttgttattttttctcttttagtatatagctatcatttaggatttcaaataaaaataataatatcatgtacagttgagaaaaaaaaaacatcatgtacacacacaggaatcacacaaaaatttgaaacaagtaattatttttattttttggaattacttatcacactaatataaaaaaaaaaataccactatacaatggttacaacaaataaaaaaagaccacaaatgagttctcaattcaatattgaatttgattttttttcctgtttcatcacgttcttcttagtacaagtacaacaaacattatcttctttctaataactaaatttaaaagcattttagcacccgtagtacttaacactttttataagtagcgtcttatgattgattagttagtgatatcttttaaaaattattttctaaattatatgagacttcatacttaatttaattattttgaatcaattatatatataaaaaaataaaacccaaaaatattagaggatgcaggtcaccccatagccttatatgtagattccccattggaattaaaataatattcaactcacttaataaagtttgaatttttattgggttattgagtttgtattttttgtatatttagaattttagatccggtttgtaactattaatttttaaacacttgctgaatatataatatatcacagcattgttgtaagctttgagaccatataatatacttttgacattttttttataataatcactttcatgaat

SEQ ID NO: 80458 - DNA, 977 bp, Cannabis sativa
tgaaagattgtccaactaaactttatgaaatattcacatcttcaacaatagaatctaaacactttagaaagtacgtttgcacttataacaataattttgttttcacctcctttggggctaaaaataataaaactttaagcaaaagaaataaaggaatatacacatttagggtacaaggataggtttatcattattaatgaatttcttccatatgaaagctcaccgtcttttctacagttgtacttctatgatacagagcatgagataaaaaactaaatcaaatatatcatcaaaaatgaatccaataatagttgcacaacttataaaaattataaatatgaattcttattctttattctttcaaagtttaagaactaatcctaatttataaaattacataatccatatacaatccaatgtaggattagatcaaagaatatacaacacttcctttacttcacaagtaggagtagtatggatttatgataactttgttagagaaacaacagatcgtgagattgttgtatatagccattcaagaattagtcataaagtacagtattattatggttgttacaatccattacaatatctattataatttccctttggagaaataggatggcatgagaaaattaatcgagttgataaaaatagaaatcaatcttctcatgatagtggatcagttattgatccatctagagccacttttaccgaacaattattacaaaaagagaaaaacttaactaacaagaataaaaaagggttgcttgtttcttatagagaatactactgttataagttgcaaattcgaacaaacgacaatgggatcctacttcatgtagatcggctcttacagcgatatgttatagatatgtatgttaaacttaaaacatctagactagatttcttttgcaataaacaagaccaaattagttgtgaactatatcaaggtgcaattgatagtatacaaatat

SEQ ID NO: 80459 - DNA, 1501 bp, Cannabis sativa
tcaatcttcatgatgcatctagcagaattgttcttcctggtgtagcctttaagaagatcttggaaaattaggatgttatgctccagcaatctattcttgataaatgctccctggttgctatgaataaggcttgggaggacttccgaaagtcttgaacatatcattttagagatacacttatataaagtgttgcagcaagcaattggtctgtagtccttggcacccttcgggtctttaaccttagggattagggagataaccgtttcattcatatctgaaggtaaccaaccagtttgaaagaaacccaacatagctctcgaaatgtcatccccaatttcaggccataggtgcttgaaaaaatcagatccaaacccatccattcgtgggctcttcaaggaatgaataccaaataaggctcttttaacatcactctttgagaacggagcaatgagtctaatttgttgctcaagagacattttgttgccgtacaccaagctatcatgatcaatctcagaagtagcagtacttcggcttcctataaaacttttaaaatgggtaacaaagcgataaattacctttggataatcatctttaaccttgtctccgatggtgaaagtggtgatcctattctccagtctccttttcctcatgctagcgtggaagtaggtcgaattctcatcattgcattggatccatgtaatctttgattgttgcttaagatggctgaagtaactaggttgcagctgaagcaaattgttgtagcagcatttttcttcttcctgtaaccttctgtcagttggttggtatgcaagagcctcttgagctttgcaaaactcatgttttgctaggttgtaatccgccactatatctccaacaacttccttattgaacttttttagaacatgtttaaccctgagcaggtttttgacaatatccgagaggctccccagattagtattccacttagcaatgacagtttctttgtacccgctatgaagcttccaatggttgcagaaacgaaaaggtttaaattcgaatttgctaatctcctgattctttaacacgcaatagctatgatccgagatccaatcccatataaagcaagcttcagcattagggaattccattagccaaccattgttgatgaagacacggtctaatttagagaaaattctatccccttcctcatgtttgtttgaccacgtatagtgagccccagagctaacgagttcttcaacttggcctaaagagaaccagttttgagcatcttccaactctttagtcttcactaccttgcctcctattcggtcttgatagctaaaagccgaattaaagtccccaagaatgatccaaggatcactaattttccccaaatcagcaagttgcttccaatgctcttttctttcaacaagagaattgcttccatagaccactgtggtgaagaaagctttgttttgcccacaaacttttattctacaatgcaccatctgttgcaattcag

SEQ ID NO: 80460 - DNA, 849 bp, Cannabis sativa
gaggagagggtttctcaagttcatggtcgacttaagaatcgatcaaaagctagtggccggattttatttgaacatttcgagggatagaaaggagtggatacaattcaagtatcataagcttccgaccatttgttttaactgcggaatggtaggccatttattcaaatgtgaaaaacctacagaatttgctttccctcctattggcaaagcagttccgttgtatggggcgtggataaaggcaggggttcctattcgcagctgtttcgactcagctttaccacagctacgaagaggaagaccggagatcaatagaccgacgagagctccgatgagttcaaagatggacaagggcaagaaagtcatttcggctaatgataatgacccttctatggttgcagaccatggtacaatgcagcagattaacgttggggaagtgggaagcaatgaggcagcagcaatcttagaagggaaaattctgaagcttaagaaagttggtggaaaccaaagtttagatggttgctcctatttgagaaatactagtacgatgcatggagagaaaaggggactcagacctcgggcccaccccatgaacagaattaacaatgacaaaagagatgaaggagtgatcatgagttttatggctgatatagggcccactagagaccaaatggtagaaataccacatgaagaggtatgtaagtctagaaagccccattcttttcctgagcccactttagtagaatggcccattaacaaaggccttgttgaggtggtaaatgagataatggacccttccaagggagtgaatgcttcggcccatcagactatcacctgtaatgatattacctt

SEQ ID NO: 80461 - DNA, 782 bp, Cannabis sativa
tctcatcattcacatttatgttcaacaatattagagtactttgtaatgaaaaaataaataaatgctcttgtttttgtttggacctaaaaaattggttatgagtattgtgttttttattaatatcatttaattcaatcaaggtagtagggcccctaattaattttagagagacttcaataaaatcttaaaagtgttaaatttagaaaaataccattttttatataattattctaaaattatcatattattttaatgcaggcttttgggaaagaaagtgaaacttgagataataaagaagacatctcatgtaccccaatctgaaaaccctgcactcttcaatagtatagtcaacaatttcttgtgtgagtcaaaataattaattaaatatatatttttttaatttgtggtgataaaataaatataattatttgtcttattgggaccttgtatttatttgggttggattaaagttttgtataattgcttagttaattatatatttctatccttcaataacaacatatataatcgaattcagtaaattatattgtatatttactttattttatttattttattttttacatttatttttatactctttaagatataatcacttttataaatgatgttcctattagcaaggtcggccctaaaatttagtgagccataaaaaataaaaattattttggacccttatttaaaaaaatgtggtattttaatatcagtaaaaaaaattatataattttaaaagattttttttttttggcccctgggctagg

SEQ ID NO: 80462 - DNA, 1266 bp, Cannabis sativa
tttggcaacaatcgtaaagaatctaatttagatgaactttggtatgcagtgcttggcaggacttggtaatactcatcttaatcagcacaatatgctatttcttcttctttgagcagctactggtatagcatttctctctgaaagtcttaacttttttttcttctccgaaaaagtgtttactcaaaagaagggatgaattatgactagtctggtttggacatcgaatattgtaaccattctagttttgcatcttctatgttagcaagcaaaacatgagttgattctatgtctccacattttacagatccatgacatgagaagtcaagcaattattgtttcagctccatttgcttttacactaggcattttgggatccctttttgcaattatcctaggtaatcaagcttaatgaaataatcttttaagcctcacttatttctggtatcttcctgcattgtctcactatttcacatgtttgtttaacagcaattaaggaatatatatggacatatgcagctcttgagtttgcccttgttgccatcatagttcacttattttacactctggttagtactatttttcgagtaataatttatatgcaaaccacttatgtagtcttgaatttattttttctctcctacaagtattgataaccacattttgttttttgtatttttaacagcttcatctcaacgctatatatgcattattactggcttcaattatgggttttgggatagcaatgggggtgaactcattgtatattaagtattttgcgtggagggttagttctggtgcaaacactaatccagctgctgaaaacactaatccagtttagatgaaattcaagcacaatccaaattagtggttatgtagttgaaccattgattatgagaattattatacttaatcatgtaagctaaagctatgccgttttaccaagtaaagcagtgagattttttttttatatattaatcagagttaagcttgtacatgagaaacgacaaatcatataaagtgaataatgttagaaaaaagtcattttcaatcaaatattactatttaatttatacgttagaaatttcttacttgcaattattcaaaaagatgatttacttgagcattttggaaagggaaaagaaaaactattatttatgcaaaaacctatttttacaacaaagacgaaggggaaaacaatacaaggcattacacactaaaacatatacaatatatgcactaagaaaaagagggcattgatgcaaagaa

SEQ ID NO: 80463 - DNA, 599 bp, Cannabis sativa
taatttattttattttattgttagttatgtgaaagaaatatattttttaataaatattaaataatttaatatgaaaaagtaactattccaaaatagtcaatccaattcgtacttttactaattggatcggattcaaaatataaaacccagacttaatgtagatcagatgcactatgagtattagagtctcgttaagagtttattatggttagattggttattctgttagagttagttgtggttaggttagtgattctattattcctttttaattaagctgagctagatgtaacgaaccccttggttcttaagccttgtataaatactctgctatttaataataattaaacttttaatttctaatatggtatcaattgcataaattttttaccatttttttcatggctagaacaagagctactggattaagaactctggccaaactccaatgccgcacaactcatccactataccagatgctccttcataaattcctctgacttctgctaccacatgagacattcccactcaataaatcatcgctccaacttgccctgctcatgaatatagtccttacttcttgaactctgatgataacc

SEQ ID NO: 80464 - DNA, 1320 bp, Cannabis sativa
aagttttggtaattgtataaaagattgtgattaaatctattgaaaaaataaaaaatatatatatatatatatatatattagttttggagtttttattacattttctttaaaaccatttcatttctttattattacaaaattttaaaatatttatctttttataaatatattaattaattttttaaaaaatttattttttagaaaatttaaaaccattttgtgttctcattttttcaaacaaaaaagaaagaaaaactaatactatttagattttttctcccaaactataacatatacattttgtgccctttaaatttttaaacctattaaaaatggtccgtgaattattcacagtattataaaataatcagattttatcccacatgacaaacagaatgatgacgtgattgtctaaactattatcacatcagcattacatgtgtaattattttaaaaaaaaatattgttgtaatagaaagtaattatgccattgttgtaagtctcaacaactatactgacttaaggattagagttcattaatatttgaaccacttaaaagtcttatttctttaacttttaaagttcttggaaaatttacacaaggtgttatttttttaatttctttttacatttttatggtgttctataaaaacaataagaaaattgtatgaaagtagcatgaaaacaacatgcaaatgttataatattttatgtggactaatataattaagtgttactcactcagtgtcggtattaacatataatgataactatataatcaataatacatgatattactactgggtcataatgatatagaaataacgtactaacacgcttgatgcccatggacatgctcttaaacatttttggtgagcctattgggccaagataattaattctcacattgggcatgttggccaaattggtcaataattccttataaaagggttgtactactctttttttgtaattaaggtattatagatggtgtcactatggtgttgagagaatagaagagttcattacacctaagttttcttgtgttttctctatgtgtatatcaaaagggtttataaaatcaacaataattcatatatagctcttgaaaattcaatatcaaaagataaatgaggtatctttacttattgtaaaattaatgctatgaaattaaatgtttgattttggatgataggagcatgttttgttgttgattgttattgctaatagcatgtttattgtgcagtaaattcaacacataatttaaaaataatatataaataaccaaataacaaactacttgaaactaattcaaataat

SEQ ID NO: 80465 - DNA, 1251 bp, Cannabis sativa
  modified_base (693)..(709): a, c, t, g, unknown or other
  modified_base (843)..(846): a, c, t, g, unknown or other
gacatggacccagacccaaaactgtaaccggaccaggatccagactcggacacaaacccaccctgggattgggtccaaaacactgacctaaacgcagtccagaacctagtccagaacctagacctttactaggaccgtgatctggaccccaacccgaacttgaaaaaagacctggactcagaccaggacccgaacccagactcaaaccttaacccttactctgacctaaactcggacccaaatttgggatccaaacccgaacctgaacttggacctagaccgggacctaggatccgaacctagatgggagacctaggccccaaacccaaacttggagtaagaatccggacctagatcggggacctggacccaaaactcgacccagactcgagacacaggacccgaccttggacctgcaacccaggacctaactaccgagacacaaccctgaacctgaacccaagcaaaactttggacccgacgtaagatctgagacctgaactaaaataagacttagatccaagaccaggatccgaatcttaaccaaaggctttgacttgactcgtagttagtgtttgaatccaggacccagacctggatccgtacctgttgaccgaggttttcggcaaccaatataataataatatttgcaaaagctataaggaattaatgagagagatttttacgtggttnnnnnnnnnnnnnnnnntagtccacgagtctgtgtatttaggagagtatttattacagagaatgttcttggtggttttcctctctagttcttatgaaacccagaattctcgacacatgccttaatgagtttgggggtatttatagtgtttnnnnggggtgatccctagaattgaggtacatgtatttctgtaattttcagtagaggcagacattcccaatggatacatcataggaaatgcatggtctaatccctaggctttttagggattttatggacgtagtcctttatccttcttgactgatgtgattcctcataatgtagtcgtcactaggctcattaatcatagcataacagctgcatagagggggttgcgccgtaagacttttaagacatatggcagtttcaatacgcctcctcccatgcggcattaaatgcgaggtgactgttcaaataggatttgacacctcccaaagactctttgttgcaactttgctctctgggagtatgtgaaactcacaggccctctctgggaggcatgttagtgttgggttttatgc

SEQ ID NO: 80466 - DNA, 2015 bp, Cannabis sativa
aaaataacattctatttaggcagagtagcaaccattaaccaaagggtaattaagtaataatcaaagagtggactctacttaagtggggacatagtattgattttgcttaaggcaaaaaagtcatactcacaaaaagttgggctgtctcagactgtggctgctctctctagtgcgctttcttctacgcattaacaatggaggtagtgaagccatgggaggatgttgaacctgagacagaggaactcctgtctctgaaaacaagactgccacgtcagcacattgattctgctgttactactaccaatgatgacaacgctgatgagtcttccatggagaagaatgtcaatggaaattcaaataatgggatttcccatgaaggaaatggaggaggtaatatcagtaacacataaaaattctctctttatttgttttgtaatcttcttctcagttgggttttctgggttttgaagattagtcaagtgaggaaattccaactccaatggtggggtttggttggggttgagattttaatctgagttcagactttagtactggctaaaagaatttattttttttcatgggtttcactttcatctatattcttttgttcacagctcattttattggctggaagaatcaatttagtagtagagacaatctgtctttacaatgaaaaaaaatgaaaagagaatgtttttgttttactttaaggttctgttcagtgtttattacaagattcgtcaaaagtttagggacctacatcagtcctttaaagtttattttgtgtacttaaaaactaattcagtcctgtatttttttttttattattatttgtggtgaattattgtctcaagttttatatccaattattttgtttccatcccaacttgctagaaattatctttttgagagtatcttcacatgtaccatgtcctgttccatggctaaagctgagattttttatttatttttggttaaattcttggttgattgactttaaaaatggtttcagacactaaatccttaaatgggaatcatggcttagaagatgatgttgttgatatgaccatgtcaacgggaaatccagttgatcaaatactggaatttgaagcaaatgatgacttaaaccttccattaagtgttgcatcaagccatgaaatagtgagtaaggacatgatgactagttctaatccttacgaagagggaaatgaaatccatttttctcgaaatgatgggactaagactcaacatgttgaagttgacttgaaagacaaaggtgttgaagccaagttaagagagaaaactactgaagaattgagggaattgtatcttgcgaaattatgcgaggagaaaccgggtcctcatgagttctattgtcctaactgtaagacctgcattacaaaggttcttgttcgcgatagagaggtggaaatcagaccttctactccagcaccaccgcgttctaatcgagttcaatcatctagatgcacatcttgcttgagtttccttctcattcctgcaggtatactctttggtactctgaattctagctgtgttgtttattttagaattcataacatgattataaattatgatgatgatgataaaatggaacaggtataattcatattgaatagggttaaaaatccaatatatttgaactgatctgatttttttatattcagggtccttaaaaaggttgtagctttaaccattgctttcaatttcacaggttggttcatcccaaaatggtctaatgctgcagataatgattctgatgaaggtaactaattttgattctttcaacaaaaatagtgcagagttttataattagcaatttgcaaagacttcatatagaatactgaatgaatatagctgcaaaaactttttcagtttggatctaatcataatcaaaaactcgagtttttaacaaaaatgaaatcaccaattatagttcttatcataaggcttcatttatcaatggagtaaagaaagctttttcttctttaatttct

SEQ ID NO: 80467 - DNA, 967 bp, Cannabis sativa
gaggaaagtccaaacacaaaaaacccacattccaaatctttgttttgggtcagaaattttaagtactccatcaccacacccagaagcctctgcaacaaaattcttcaatacgacacaagaatggaccaaacgacaatcaataaacaaaacacgaccccaaatctgtactgggcatgtaatagtttctttaatttttctttccacactacttataggaaccaaaatattatatagtatagtaatttgtatacaaaaatatagaaaataaaatgtagcatgagatagattcttactcctaaaataaaaacaaaagaagatagatttattagattcttacatggttgagattgagaatggagcttactgataaaattgatataatagggcgatgaaattgagagtgtgtgagaatcagtaatgagtcttggtaatatataaagaagaatattattgtccggaaaagaagtacatatatatatatatggccaatggggaatttggagttaatatattataagtgacaaagaagattttgttgttgtaacttgtgttttctagggtgtaatgttgtttgactaaaaatggactgggagtaggaagataagatatgattggttgtggtgtcaaaagcaaaaatatgatgatgatttggtgttggaaaaaaaatctaataaatttatttggaatatcaaatttccaaaagtttttcctttttctttttagaaaaaaaaatgttaagggaagatttttttttttgtctaattaattttaaaaatagcgtgacctaattaatatatttagatatctacaaattcttccaattattaatttcttaaatatctattctatctatataaagtgtggatactaacggaatttttgatttcatggtattttttaattttttacgttaattttaacagaatatattattatttaacagaatattttttttattaattttata

SEQ ID NO: 80468 - DNA, 2125 bp, Cannabis sativa
ccttctccatcaaacgaactataaattcattgtcagtttttatcccacgggattgtaagaagggtccaacatatgtaatggaccttatgttagactcaataagttttacctcaaacgtaatgttagggttctgaggcatagccataatatgaaaattgagatcacttggtggaaaagcaacggtggctcaaggtaaaaataatggtcttgctaaggttatttttactgaactaggcgattcaggccaggccgctcctcgcagataatggcatctaccctcaataatttcatttatacattgcctatacgagttgatgtctattcttggctagcccagagggaatgttttctatttttttcgtcatttatcgtaagtatggattgaggtttataagtctggggtttaaaaataatggcttgaaattggggattatcaagttctataaggtctgtgtgttcgtaatcttgttcaaaatgaggcattatcttgattaaaagaaaaaatgcctcaaaattttggaaaacgcaaaacgtaaaaacttagggcctataaatcagttgaccctaatttctaacattaagttgttaaaaaccatataaagacaatcccattcaagaaattgacgataaatatatatatggaaaaaaaataagagaagaataaatagtcaaagaacaatagtggaaatatacttactgggttgctagaagaaaagaagccttgaagaattcttcactgagaacttcttatgccaggggtctggttcgtaacgattccaggtgtgagaggaaaaagtggcagaaactccaaagaagaatgtgaaagataaagagagcatgcacttttagagagcatgacaaggaggttgttgatcctatatccagataatggtaatcgttcaaatcataatgatgatcgatcgaatagatgagaactattgggaaaagaagggtcagaataataaatgccagaatgatattttttctcaaaatattgaaccacaaaaataaagcatgcattttctattaaaatggaaaatatgatcaaaccctctatttaagtaagaattcctttttaatcttaaaaatcactttctagggggtgattgttatgcatgtatttcaagcaagtaatatggttacgacacgtatgaagaagctagaaaatcaatcagctcgaattatgataaaaataaatatgttcaataaactcacctcggagaatgcaattggtagaaatattcgaactcattctttcaaagataaggacaagtcgcaaataacaactaccattttataagaccagcaaggtgaataaccaacatagaaagtccatatcgagatacatagagtatacaatagaatgacagtaagttggaaagggtagataatgagttctttaagagttagcagctcattgactcacatacttatgagtatgttgaaagactaagggatatacaccaaaggtgattcatttcgcacatgatgacagtacctcgcatagatatattctccctcaacatcacagaagaacgcgcgaagcatttcctaaaattacacttaggcataaaaagtaacctcaattaatgtaaagcttcagaatggccttctggtgaacaagttgaatggccttctgatcatagtgtgcacatcactcacctcacctatggtcatggctctctcatgagattttcttttagaaatttgttttcctcttccaacaagaccatagtctctcacgaattggcattttttctttatcaaatcaccatgggtgcttccattaatttggcttcattcatcctggagcaaattgtatcttatcatcaaggtaaaaattcactcataagcttatttttcctaatctaatatataagattctttactctcaaaagaatgttgtccgtctcaatgagacttgtgagcctccccttattggtataatttttcaaccatcaaagtactttgaaggagcttttcctaaacgtcagaaggccaatattgttgccaatgttctgttatattattttataatataataagtgtggattaaaatgtggtaatatatattattatgtgaataatatatattaagtgtttggtaaatgaattgtgtaacata

SEQ ID NO: 80469 - DNA, 1441 bp, Cannabis sativa
ttttttttttttttcagttttactgtttgagttgttctggtagttgctatgcgagttgctatatagatttgaattgcgatttaggttgctccattggttgctatgtgagttgctatgcagattttcgtaaaaaaaaaaacaaactgttttgagatataaaaataaaaaaacccataataaaaaattacacgttccaagtatgtatcaacatggaagaggaggaagattatggtattgttagggtttgtgttctaaaagaatctaattacaagataatatattattaaatatatgaagtacaagtatattatcaatgaatatgttaattgttaaaaaataattaataaatattaaaaaatttcctattcatataggatgtgtaagatcttgttagattacaagaaaattaaaatcatactatatgaataaaactaatcggtagtgtattaaaatataaaatctttaatatggtattaccaggaacggtttactaagcactaattagtagtggcatgtgattttgatttggatcacatatgtagatcgacatttagcaaagatactgtatataatttgattatgcatgactagatcaatataaacaaatatcttttaccaatgtgtcgtttatcataaaacaattatttatatcacaaagatgatcattagtagatctatctaaatcctgagtattcttaaaattatgtttgtgtttattagattctttatttactcattaaagtttctcaagagatgattcttataatttctgttttggaaacttaataatatagatgactgagtacatgttatacaataagtggaatccagactttctaaaaagatcgaatatagttcccttaaagtgttaattcttagagtgaattcagttgggccaaaatctataattgaattatagattaattgttcattatgaatcaacgatacttaaggattcaagagataaataggatggaaaaacattaattttgactaactctaattatgaaataataaattgaaggatgaactagttatattgattatatcattggcctacaagaaataactctataagtataattttatactatttaagagtgcaatttcacatttatagtagagtaataatgaaattaataaacttcaatatttattgatgagattaatggtaatctcgagtttattagagcttaaaaatataggtccatggtccctaaattgttgggattcatgtcctaaataaaatataatttcaatttaatcttattataatcaataaagttcagaaatcatattttgactttatctattatttagttcatatgtttatttacgtgattatacgtttaatatataatctctattaaatcctgaacatattgttattcataattatagtgacatcatcacagtggaaaaataattgcgattatatgct

SEQ ID NO: 80470 - DNA, 1857 bp, Cannabis sativa
taaatacataccaggaatttatagtagtttaccctcatgttgcgatggtaatggggctgcgtttactttttatttttattgattagatctgacacaccagagttatattctcaagagtgtggataaaaatatagcaaaggatttctaagtaaaatcttaatcgagatttatgaatataagattcatgggagacttaatattcataaatctgatttaaattagtggttgtaagattcttggtaataataaaccaataaaatgtaaagaaatgtgtgtatcaatggtgttttgaggtctagtgtcgactaagtatggtgttttgtaacaggctgaaaaatttaggaaaacaatgataaatatgtcatagttcgagaggcaaaaatcttaaatagtcttaatactatcatgataaataatattacattaatttcaaaatataacattttttttatatgtttgtatatatattagtctctaggtaaaattacaaattttactctaacatataacaatattttttccgtcattaattttgaatcttataactaattaatatttatttagttacaatagcattagttagaacacggtatagttaaaatagctaaaaggtcaattatttaactacgaggtaaaaaaaattataaaaaaatgtaattctatcaaatgagctattatttttatttattttttttatgtttgttctgatactatgttaaaatttaagataatgtgaatgaggttccatctcaaaatcaattgataacggaaggagtagcccatcaatcttatatattctattgtctttccacacattaataatgtaaaactctctaacaccgtttgaaatttaagaagtagcgattaataatattttataataattattaaattataatacgtagatcttaattaatgttataattttttattgtaattttcaaagtatttatataataagaaaaaatattttttttaataaaaatgaattattcaacatctaataattaatgtaaggttattaactaacattaacacaaaatattcaaaagttgattgggaccggccataggaagggggattatatgttttggatgaattgagattaccagtatatgcagctcctagtgttgatttgtcttctttttgtttgtctccttagtcttctagtttttatttgtggcactcttgccttggttatgtttcacagtctcctttaaactttttagcttctaaaggaactttaggaaatttgcaacctcataatatttttaattgtagtggatgtaaacttacaaaatttactgctttacatttcaataaaagtacaacttgttctttgtaccatttgattttgtacactctgatatgtgggaaccctttcctgttgttagaaaagagaattctcggtactgtgtttcttttatttatgatcacactcgtttttgttagtttttcttatgaaacatcgttctgactttttatagtatttatgatcgtttttggacttatgtaaaaactcaacatgatgttgtaatgttttagatgtgatcaagatggtgagtatactttaaataaatttattgattcacttaccttagatggcactgtgtatcaaacttcttctactgatacacctaaacaaaatggtatggctgaaaaaaagtataggcacattattgaaattgctcgttctcttttttgtggtcatcttctattccttgttagttttggggggaggcagttctaactgcaattcacctaatttatatgattctgtcttctatcatttaggtttgtatccttttgaaaaactatatggttgtattcttgattaatcttctttaagagtctttg

SEQ ID NO: 80471 - DNA, 799 bp, Cannabis sativa
  modified_base (557)..(586): a, c, t, g, unknown or other
ttttttctaatttttattttgatatgtaaaacaaagcattaaaaaaaatctacatgtatacatgtatgactttttttttatttaatttaatttttcttacatataactaattaaagatattaatttttatcatgagacatgtgtctttcttgaagatatttcattgttttcaaaaaaaagttaattattttatgttatatattacgatttaaataaaaaaatttattaaattaaataatttgatttacatatatttttacaatatataatgaaaaatataaaaaaaaatttactttttttaaaataatttataataataggatagggtccataaaaaataaaatattataaaatttagatattttaaattaaaaattaattaaaaaaatagattaaaaaaattaaaatagtgtgataactaatttttttaaaattgtaacactctaaaatcttttaaaaccactctatttattttccttttttactttttatttttcctgttatcaacattttcaaattaataattaatatcaaataaaatattaataataataatnnnnnnnnnnnnnnnnnnnnnnnnnnnnnnaataataataataataacaaattaagtaaataatttactctacaaaaagtcaaagaaataattttaaaattgattagttttgataataataataatgtaaagtcctttttttgccaagttagttgacaaaatattttttcttttatggtaagattcttttgcatacatacctgaattcttaccttgtggtttcggttttagttgctcttttct

SEQ ID NO: 80472 - DNA, 1591 bp, Cannabis sativa
ttactttattgatattgaataatttggattacattgaaatagaattttatttagggcataaaacacaacaccctctatctcttctttgggtcgagtttcacccgcaaagaagaagaaacaaaattactatcatcctagagggtccttccggaggtgactaatctcctgaagctcctacaaattattaagctccggatgcgattaatataacacgttccgtatggccacgtattttgagaaactgccacatggctaattcctaaagtgccacgtattttgagaaaatcccaagcaataagtactaaatttgtcgcttttattctagattatatatatacatatatgtattcaaagtattaatcatcaagcatcatttaatgttaatgaaattctaagttaacaattttatcacttacactttgacttcattagcatttaaccccgaaaatttaaattttggccgtaatatccccaaaactcatttttttgttagcgattagctgtttctatccaaaattctctgttaaatgccatatttgactatctacgtgtacactcttgtacacgtgtcaaatttactttggtccatctaaaatacttatttcaaaaaaataaataaataattattaaacataaaaaataaagtaataaataattattaaaagaaaaattatcagattgtcaccttcgctatcttcctcaccttctctcctctcgcccttttcactctcgcttgctttatgctctagacacgacgtcagtcttcccatcaccagcgtacgacatgcactgcacgaagagaacgaccaccctctgaaacctccacctgtgcaagccttgcctgactcgagtcgacaacgaggcgaatggttcaatcaaagtcgtggctcgcaaaacctttaatccattttccagcgtgattctggcaccgtttggatagtggatggtacggttgagctcgtgaggtctaggagaacaaaacccctgaatggatcgggcttgaagatcgtcagaattgggtgttgacgttcgtcgacatccatggagtttcgagatgttggtggcttcaagacctcctctcgactaacagtctccaatttttattctccattgcatgggcttcccgatcccatggttcactacccctttcatcactattgaacttgggcaaccaccttgcctgtggttcaatggcgatgcttcattttgagtatccagatttcattctaaactttgaaattattattaggcaatccaaatttgaatatggaaaatataatgatggtgcttgtaatgagggtggttcggtggcgatagtgagggtggttcggtggtgatcatgtagtggttgtgctaccacaggagaaagtgaaagagaagaagttgagtgaaagtaaactctttttataatttaaaataacattttttaaagttaatttaattttttaatttttaaacaataatattataaagaccaatgtaattttgacacttgtacttgtacaagagtgtacatgtggatagccgaacattacatttattaagaaaacttagatgaaaagctaactgcatgtttgacattattactaaa

SEQ ID NO: 80473 - DNA, 2726 bp, Cannabis sativa
  modified_base (32)..(37): a, c, t, g, unknown or other
  modified_base (300)..(304): a, c, t, g, unknown or other
gtcccagataaaacatgttgtaatatataaannnnnnaataaaaaaaaaaaaaaagaactcacgagataatgcgatcgagacaaagtttattgaaatttgaacctgtgataaaaaaagatgtattataagttcttaccaatataccaaaagactattttaattgtataaattagcttttatgattttatttaaatataagaagtgatataaaaagaaattagtattgcacattttattatagtagaattaacaaatacatcctaaacattgattctaatacttaacataagaattttatnnnnntattttaagtaaaacaacaaaataaaacacaaataatttaataaaaaaagtgcataacatgaatttagtatacaaaatagttggcaaaaataaataagaaataaattaagaaacttaattacgtccctaaatcaagaaaaataaaaaggaaaactaagtaggttttctcttgtcagtgtaaatttatctcacaaaatcagagatatgatcgagatttgcatgcttgaatatttaggaaaataattaatatctttgaagatattctagttgcatttactaatatggtcggttcatgcgagttgactgcaaaatagatgttggccgtatagtgtaacatacctcgttcggatattccaactttataaaaccagttgtaatcatcaatttctctagatggtacaccataaaacaaattacccgttcatattacgaaattctctccacgtgtcacccaaatagatatcacgttaccctgtctaaaaattaggataatacattgtaaccaataatgtaactagctattatcactacaaattactcttataaatgttacacttccacacatagacttgagtagtgacaagccagcccacatatttttgctgctcttatttcattttcactcacatattatttcatctatctctttctcatttttttgagttcgaataatcttattaatcggacaaaagtgagaagaaaagcaacttgagaaagagagaaagtaatgaaattacctattatataataataactctatgtatacgaataataatcatcacaaataattaacaaaaataatcacttgtgagttatcaattataactaaaaattataaatcaaatagcatagatagaattaacttcagtctcagaatccgagtgatgatgatgacaatggtgtgatcctccaacccttttctccttcttcctcactttaccaaaacgcttagacttaacaacataataagtcatggtgccaagcacacccaccatcgtcacacccccaagaatcgcagcgcacctattgcatcgaccaaccactatatacgccgaagaaataaaggccactgaggtacacaccgaggccaaccacatcaacttgtttatcacttcaatcactcttctctcggccttggtctcccctctaaccaccgtgatttgtactaacacaacagccaatgacgtgaacaatgcaattgcattgaatatgaagaatatcttaaacgacgtggtgttcaccatcaccgccattccagagtcgtcgtcgcctctagggacggtgaagatagcggcgaaagccaccgttgcaaagaggaaaaccacaactgtgactgagtggcgttgttgattcctgccctgtgcagtttgcgaagctctttggcacgtttttgttggtttttcgggtttgttctagctggatgtgtacgtcctttttgatctgtgtcactgtttttcttagctcgtctcgcggttggttgagctatttggcttttacgccgccatatcgagctagagtttcctttattagtgatgtttcttcgcatagtgtaagagttttgtgctctcttgttagggcgtctacgtttgtatccgggagggataacaactcactcattatctgcaaacacattacattatatataatcattattaattaattaggtgatgtaaatatcagaattaatatttatattcttagaaactatttagaaatgtgatatattagaatatattatttcacatagattaaatgtaaaaagtaaaagtactgagcaatatataagaacatggtatacactctcatcaccaattaattttgagatgaaaccctaatatggtatcagagtccgctaacgaattttcaatccacacctatccagataattagcaaatagtatgacttgtgataaggtaatttaagattggtgagtaaaaatagccaccatcttaagatattggagaatattgtcccacatagattaataatgtaaaattaaaaatattaagccatatataagaacatcaattaattacacatacttatcaaaaactatcttaatggaaagtcataacctagctaccttcttattctagtggcaacatgctctatggttttacttacttttggatcatagtctaataattattaataaacactcatttaatttcgagtggtgtgtaaatttacatgtagagctatgaggtactatatgttttatttatagtaattgatgtaattaagtattaagttttatatcttttctattattaagtttgtggatgcttaattaatcactccaatgaaaatgaaaaaagagtagaaaatattatacctttatgacctttgactggcggcaatatgcaacggatcaaagcccgaacgattcttgatggaaatgccccctttactaacatattgc

SEQ ID NO: 80474 - DNA, 1004 bp, Cannabis sativa
aatgagtgaggaccactgttgtcgggcctgctcctcacattatattttttcaggagaaaaattaaaaaaaaaaccatgaaacaaaaaaggtttttaattcctagcaaaaatacaaacaaacgaacaaagtatttaatttctttaattgtttggattcaattaatttgtaatagcttgccttaggttcaaacgttttgcataagagtttgtactgttgataggttgacaatacagagtccctccctcccatataggctcttttaacttgaaagcccaacctataaattttgtgtctagacaagggaacagtattataatgttcatttattaaacacatttgtattctattacagttttaatcattattagattattactaagagctcaaatttgagatcaaccttatcatttcatgtaagattatttcatcatatccaaatgattttttgttagataactggtgtgtcggtctctcctctaccctatttttggtatggaaaaaaaataataaagaaaaatggaaaatgacacattaaaaatatgtaaccacaacatttttcttttttactctaaactgataagaaaaataaataaaataaaatatcagaaacaactaacatttaacattttctttttctttttttttttttaaagcatttaattctttcttacattcataattttttaagagaattactaaaaagcaccactggtgcctccctactcggtgtcatactgttattggtgtaattaagtatcgggtcctatataacttaagaaaataaattttaagtaatatagctaaacaatcatgagacgccacttatggaaagtgctggacaccactggtgtttaataacaatgctctttttttaatattaagataatacctttacaggaaactaaggtgatgtttggttggagataatgaaattgaatggaatggaaagaaaataatttttattccattcgtttgtttggttgcattttaaagtgttggaatg

SEQ ID NO: 80475 - DNA, 1452 bp, Cannabis sativa
ttctaaaaaattgatcacttcaataagacaaatttcctccacttcctcaaccaacaaagacaacgatgacctcaaggtggaaaggaagaaaaagctagaagatcaagttatatgtcgtggatacattctcaatactctatctgtgatctttacaacaccatggagtctctgatagatttggaatgctttagggtacaaatgcaaaacaaagaatgaaagtttagataaattccttatttgaaagtttgtcaaggtaggggtacaaagttcattcttgatcaaaatagatgaaattgtaagttaatgttattgagcttaaagaatagaaagttgagatctctgaagcattgtcattgccaaattgccctaaagttggaatggttgtaggaagaaactccatagggaagaagataaaatcacatgattcgaaaggcaagtttagtgaaactaatgaaactaatgaaaggaagttttagaagaagccctatgacggaaaaaaaaaaggttttcgagaaattgtttcttttgaggaaaactagatcatcatcaaaacaaatgtcgttataagaatacaaaagagtaaaccctaaccaggccaatgttgttcaaggaaaagttgaagaggttgttcaatggtgatgaaaatgcaaagtgcatgaccatctgaacaattggtagctcaaatatggtggtgctattgtaatgataagaacttgacctaatcttacaaagttgaaaaggatggtcaaacaaacctcatggaaaatcatgacactccaaatgagattagagaaggaattgcggagatcaacttcactttggatacgaagtttctttaaataatgttttccatgtacccaaatttagaaagaatcttgtatccactagttttatgtgtaagaatgggttgaagattgtatttgagggcaataattgtattgtatcaaagaatggggtcattgtagggaaagggtattcttgtaaaggcatgtacaaactagtattgatcgtgaaattgtgaattttgcttatattgtttggcatgctgattagcacacttaatatttagatctttgaaatacatgtctaagtatggtttggaaaaaggtacaatactaatgaatctagtcaaaccctcaaggctatattagtagcaaaaggtttaaaaaaaacaatgaatggattacttcaatatatatgctctagttgctggattcacatccattagaggctatttactatagcatctagttagttacaactttcaagtgcatcaaaatcaaatgaatgttagattgagtttttgatcttgatttgaagatttatatgaagcaacccaaagggtttgtattgctcaaaaagaagagaattagtcaagtagctctatgggttaaattaagcaccaaaacaatgtcatgagaaatgtgattcaattattttatctcatggttt

SEQ ID NO: 80476 - DNA, 727 bp, Cannabis sativa
  modified_base (26)..(57): a, c, t, g, unknown or other
tttaaaaaatattttcacttttctannnnnnnnnnnnnnnnnnnnnnnnnnnnnnnnttaccaaacgccacctaaattttataattgggtggagaggaagtaactcgatcaagaaagagaggaagatcctatattccataatattacacttcagatgctggagaggcatatatcgacgagagagaggaacaagatgcattggtagctgattattaattaaatagttaagtagtaattttattaaataatattataagctgctgctgcatgcatgtctaaagagaccattcagccacgtacgtcaaatatatattgcataaataaagagtacatatgtgatcattattacttataaaacaaacaaaattaatatacatggatcttattattaattatctatatattttattcttcgattgttgtttattaagaagggcattcaaatcaagcattttacagttctatgtgtaaatacactgaggtcaggatctagaagcatttaatctgtagtgcgtagtgtaggtgtagctagttgttcatttaattattagtatatgacaaattattaaaaaatgagattagtatagtagtaaatagtataaataaatggatatacagtaaaacctctatattcaagaatatatttgagactaagaaaattatattttaattgagagattataattatatagaggtacactaggaaaaaaaattaaaacaccaataa

SEQ ID NO: 80477 - DNA, 2860 bp, Cannabis sativa
ttatttaggacacaaagcccaacaccttctggctagaacacagttacttgactcaaaaccccaatccactcctatgtgttccaccacaaaactctcagcaacaacatacactctcatggaaaacccaacacactacagaagtgtcattggtgccttgcagtacctcaccatgtcaaggcttgatattgcctttccaataagcaaattaagtcaatatatacaagctcctacatttgaacattggggagcatgtaaaagagttctcagatatcttgctggttcaatagactctggactggttttcaaacctgctaacagatttgatattcacagcttcactgatgcagattggacagggtgctttgatgataaaaaatcaacatcaggctattgcattttctttggaggtattttaattagtcgatgctataagaagcaaactgttgttactagatcgaacacagagtctgagtatagagcccttgctctagccactgtaaaaaaaataatgtggatccaatctcttctctctgaaatctgcatcaactcaccacaacctctaattctctggtgtgacaacttgagagcaggatccttagcctccaaccctgtgtttcatgctcgaactaaatatattgaggtggatcttcattttgttcgagatagagtagtatccaagcaacttgacaaaagatatgtagagacagaaaatcaaatagcagacctatttattaaacctcttccaacaatgtcatttcagttttttcttaggaagttaacacttggttttcaccagtgtcacttgaagggggctattaaaatagaaaatggttaagcaacaggttgttgttattgctggttttgcttttcttagctatactattcttgagttagttagaggttgttagaagttagttaaagtttttcttcaggttttttgtattggctctccatatataaatgtcaagttaggccaactattttcagttgagtaatattatccatctttcatcttcttcttctctctcccccattgtttctttctaactcaagctcgagtactagaaatgtagtactcttacactataaaagtacgaattggattgattactttctaatgttgaattatttaatatttgttaaaacaatattcttttttcatataattaacaacaatataaaataaattatttttgttttatgtctccacaacaaattaacacccctaatataccttaaagtatcaaaactaagcttttttagtgtgggctttttaggtataaatatcaccacttaaagagcatgatactaaaaaatggtccaagattaaaaacatcattgataaataacatttgccaaaatgtagctcctcacaaaattaagaaaaggagactaccaaatagtactagcaatcaaagctgtaaaaattttagttggcgtatttggtaaagatgataaaattaattatgtgtgatattttttaactaaggttgacattttgttttggtatgaaaagtttaaatcagattgtgttatacttgttaaataaatatagagtttttttatttaatttataatgattgactttttctgtttaaggaaagtatttatatttattgtttctcaaaaaaactaattttttagtcaagaaaccgtgtacaagtgtgcttttaatgtatattttattttcttatttatataagaaaattttgttgaaaatctatctaggtatagtgaatctgtttgaacggattaaccgtctgtttgaacagattatgactttgttttttgggaatattttttatttattgtttgattatttctttacttgtaaagcacgacctatggtatattaattgagaatatattgttacttagattttgtggttttatatagaaagaataaaatattttattatgtaataaatactatacctatatatagtatttctttgtaattgatttattttattcattttctaatatgatctcattaatctctccagctaggttttgttatttccaaggaaaattttgtcggttttgatggagtctagattcataatactgactagctaaattaggatttcgtctacacactttccatatctgttcaaatagaattttgtcatttaatgaatttttgtaaggaaacttattaatattttctctttgtattcataccttttgagctccattttgagtgtcatttatcattataaataagatttaaaccaccagcaaaatgttgaactctcccatttcttaatttcttatatttttagaagagagtgtttctcttgcaaaggatagttgttttgttattccttggtgagtttttgtgtctttgtaattatttttatgtgaagtaaattccaaagtgaagaacataaagaataaccttcaggagaaggttcatccaagtcttacttcaggaggaaggaagcacctctatcttcgcgagaagatttctacaagtcataatttgggaggaagcaagcaccgctatcttcgcgataagatttctacaagtcttgcatcgggaggaagcaagcactactatcttcgagacaagatttttacaagtattgcatcgagagaaagcaagcaccactatcttcgggagaagatttagaggaagcaaccactgctatctttgggagaagatttctacaaatcttgcatgggaggaagcaagcactgctacctttgggagatgatttctataagtcttgcatcgggaagaaacaagcattcatcacataatttgaacgaagttcaccttggtgttttaaggagattcattcagtaaagaggagtacatcaagcttacggcaaaatcattagagagagtctatgt

SEQ ID NO: 80478 - DNA, 765 bp, Cannabis sativa
aaattcaacctaattttcataatctcataataaaaatataacaaaaatctaacttaataagcaaaagtcttaataaacaagtccaatacatcaaatgcaaaatgagctgaagataaacaaattcaaagaaaattatgaaaactaaatcaaagaaataaacttaattaaatagaataaataataaaaaattggttttgacctaccaccatgagatcttgaaatgaaatgaaatgatatttcagggtcaagagagagattgactttcctatttgcgtgggtttgactttgacatggacacaaatggtaaaaaataaaaaatgtatattttacatctgaaactaataaaactaaaactaaaaagttttctaatttagtgttggtagtcagagaccatgtgaatgcttgctcaccataaacatagcaatcaaagttagggtattaaccttattggaacatcaaaaaaagtcctcaaaaaacaccaccttggtaagtcactgtcttatatgttcagattttgttgcttataagttatgcttacttacacacacatatatatatgtatagatgtagaccattgagggagaaaaatgggtgtaaatggaaaaacagaagaggaacaattactattacatgacaccttatcttcttcatcatcattagatgagtctacccatcttctgaaaagaacaggtagtactattattattattattattatcatcatcttcttcttcttcgtcgtgttgttcttgttctgcaaatatt

SEQ ID NO: 80479 - DNA, 2404 bp, Cannabis sativa
  modified_base (2367)..(2378): a, c, t, g, unknown or other
tgacttatttaattagtaaatctgataatattaaaataagttttatttagtgcagacaacccaacagttctcttatcatagatcaaaaaattatagagatcattaagatttatgattatgatcttataaagattttagtaaaatttttgtcacatggctgtaaaattaggaatagcattaaaaactattaaatatatatgttgtgacaataaatcaatcatgttgtatattagtaacaatatgagctctacaaggtcaaaggcacattgactctgagttatttgttattgaaataaacttcaaaataataagaggaaaaactatatttttagatctagatcactaaggatatactacttcaggcttttcaggagcttattgctcaaatatgaatgtgacattatttaagattgtattggtttagtgacagtttgtattttcgatgttctatcaagctgatatatttgtggtttaatgctttgtattttcagtctttacttgctaaacaggcaactcacttatttaatcatcctaactctatagatgctaaatttatgaagggattctattatgtcaatggtcctttgcttgatgacgaagagacaaaacatgcttcttttctttgaaagagcattttttggggtcgtgacctttagaaaaaaggttttcgttggcttgtatgtgatactataaagattcgtgacaatgcatggattacaaaggaccacgttggtcgaacctactcttttaagggtggtctaatcttccgttggttagtgatctcaaacttgagtttggtggatgaaattcctctcttatttaggatatgtttgattctattcctttctctttgtttgatagaaagatagtcttatttgccacttttttgataatggtatgtatattgttaagagtggttattggagtactgtttcgagcttgggttggggccaagaatcagtttcttctgaaacttctcgattatggaagcttctttggggccttaatatccctccatagataaaaaatattatttgagaagcatgcttgaattttttttcgtcttctggaaacttgactcatcatggccttaatgcttctaaggtatgtcccatatgctttcaaaataatgagactactattcatgcactttggttatgctcccctgttaaggcaatttgtctgaatgggttgttaaaggtcttgattcgtaaacgatatgcttctagcttctatgaactcatgtaattaggttgtatgaatatcttgagcaaacaagaattaatgggaggatttcattgttcatacataagtagtttatggtgaaacttaactggataatactttaaatttgatacagttcagtggtttagagaattttactgctaacatttaaatttggaggattaaatgcaaataaaataataattgggaaagtttagccactaaaaattccaaaacaaattaataatatgagtgatcaatgaatgtaatattccttaacacaaaaaaagtaatattgacgataaaagtatctctttaaacttttaaaaggaaaaaacttatttgatataaataactcaaaatgttgtgaagagttcatccatatatatagtaaccaaatataaataaaaacatatatacacgacatttctaacattaattttttttaaaataatggaaacattaatcaatggagaattattacatgttgatctgatggtacgtggcacctaccacctttttaaatatatgtgttttaacctttaataatattaagtaatttcatttagcaacaaagtgtacaatatttatctaactatatgttaatatattatttaattaagtaataataattattacataatgtagtaaatttctgtgatatgtataaaaatgatgtgtgatttggtatgcttagtttatttgaaagggcctttaatatatatagattggtttgtgaccccatcatcacccaaagtcaggtaatattgtgatgatgagattgggatctacattacattcactgaggtaggcacgaggtgtagtgaatctaagtttgggagtgacctaatttttgtcaaacttgtaatgacaaacaactgctgtgtgacctgatttcatgcaaacttgacaaattagcttcgaattagagtccactctaccttgaattcttgacattgtcattagatgcacctcggccataaggctgagatggtcaaaaattcccaattcttgatgctccataggtaagattggcgtgcatctcaagagtagtaagatcaaatgcaacattaatttactacaaaaaattgctacttttagtgacaacttcttagtcataatataatttttttgtgactaaannnnnnnnnnnntcacaacaaaatattacttgtgacta

SEQ ID NO: 80480 - DNA, 680 bp, Cannabis sativa
ctctgaagcaattcttgaggatttattagagcaagaagaaatctattggcaccaacgatctcgggtggattggttgtctgcgggtgaccgtaacactaaatttttccatgctaaagcttcagcaaggaaatctaataactccatcaaatttttggttaatgaaggaggccatcgggtaacttctaaatctggtatgttggctgctatccatgattatttctcctccatttttactgcttcaactttggatgaagaggcgctggctgctactttaaatgtcattcccacttcagtcacggctgatatgaaccatgagcttatcaaacctttcactgagaccgaggttgagttagctttacattcaatggctcctgacacaagcccgggtatagatggaatgtctcccatgttctaccagcataattggggatactgttggtggtttaataactgatgctgtgttaagtgttttgaataatggtgctgatgccacaggtctcaaccgaacactcatcactcttataccaaagattaaaaaaccgcaacgacttacagattaccgcccaatcagcctatgtaatgtggtttctaagcttatcaccaaagtgctcgtcaaccggttcaaacatgttcttccatctgttatctctgatacacaaagtgctttcttgcccaaccga

SEQ ID NO: 80481 - DNA, 1695 bp, Cannabis sativa
aacattattcaatggatcacaccgaaccttgggctggaaaacacctatccgaatcttccccaatctgactctcactcgaaaatcctctatcttaacattaataacaaacatcccacgtctcttctcctcttcaaacctcttaatgaatctggaccgttcattggaatctccaaagtaaagctctctctttccagcaaagttgtacagcatagtagtagtggtcttacggccttggtagaacacttcccatttagaatgaacgtaattgttttcttgatcagaagcaacaacgaccatgtcgtagaaaaatcccatcatcttgttagggttttggattgcaacatcaaagttgagatcgtaatgaagagtatcgtttgtagtggtgaagttgaactgggcaagagaggcctcgccaatttggatcttcattttgtgtgggttgactatgatccagaagaagaggagggctaggccgatgacgatggatatggtgattatgatcttgatgatccagcttattattaggcaacaacacaagcatccggcggaggccggaccggatgtggtcatactgaaatttggaataataattttgattattctgaataataatgggatggaattaacatgttttgtccataaataagtttatatatcaaggaggttgattctcgcaatctatatgttttttttaatgaagttgcctgccgtgattaacaagagatgactcatgtaaagataagtgtttaatgttatgcaattaattataaaataatgaagggattatatgtgaattaagagccatgtgttattcattataatatgaaattttcagtagagactttctaaataattctatttaatttataggaattaaagaggaataccatgtatgtatatgagaaatatactaaaatttactagtggtagtgtccagctttcattcctacaaattacactattcacgtcggtcaacgctattattcatagtgagttttatataatttaatgtaataatttttaaggaatattattaatcaatcatatcacaagtcacacgtctaaaaaatgttagactattaatagtaatatactatagaattgggcattgaagaaggttgtagtatttacaaattatgagtttaataatgattcatttgaccaaatatgtttgatatgttgtggtggttgaccattgacaactgattaaatttattttgtatatgttagctagtgtattgaagcaagcatatatacgtaataatgagcaagcatatagcccgcgggttgtttataatttttttgaattatataagagaaaatatgttgttaatattactaaaattgaaattgtatatctagaattataatttaaatttaaaattgatatattttaaagtatatgataaaaaattatttaataataattgaacaataaaattatctaatatattatgatacttacattatacaatgtatatatgttatgtataattgtacatatatatatagtttgctaaaattactcattaaataataaaaaatatatatgtatcgtttattcaacactcttgcatatattatctcataatacattatttttatatcctaattattcaaagtatttgtcatcactaaaatataataataattagaacatgattattcaactcttcaagtttttttttttttttg

SEQ ID NO: 80482 - DNA, 821 bp, Cannabis sativa
  modified_base (109)..(109): a, c, t, g, unknown or other
ctataaatagtgatctaacctcaccatgagggggattgaaaaaaattgcttcagagagagaatagtgatcgaagagagttactgagagatcaattgtaagagcattcanagaggaagaacactttgttccttctcttaagttaatataatacaatgggagtaggctattaccacactcacagggtcgaacctctttaaaattttgtattcttttttaacttatcatttttgttctcttttaattatattgttaatcacttattaattgacttcttgtggttggctacaagagaggtcaacaaagcccaaattgttacttagcttgctgtctcagatgaaggctgcgcaccaagtgcctgctaggtgcaggctggggtctggccgaccatgtgcatgtagggtctagtcggccgtgttcttgccatggtttggcagaccatgttcctgctagggtctagccgaccatgtccctgctaggatctggcaggtcatgtcctgttcttgccagggtttggtaggtcatgttcttgccaactttggcaagtgttggccatccttagtaggtgttggccagcttttgtacatctttccttgtaaatgtgagcctttcatggtcgaacagaccttttttgtatgacaataaccttttggccgaccagtctgtgcttcaacattgtctagccgtacaagcgtctcctggctggcctatgtactccccttggccagcaagacatggttgtacaacttcttgaagaatttcttagctcttccgtcttctttcatgacggttctgccatgtcttgtaaggagaatttttcctg

SEQ ID NO: 80483 - DNA, 906 bp, Cannabis sativa
cctacacatctccaaaaatcgtaaaatttcatggggacaaagccaagaccgttgtgcatcacatttctattggacgagttgatagaaaaagtagtttttatgcattaacaatcatttaaatggaaatagtaaaaatctcacattcctgatagtgatacccctctgtgaaatgtggctcagacccatcttgaaatattttttgccactagtcacaataaatttgtgctactaagacctgaatatgaaaattagtttcgtgttatagagaataaaaataacaattttgttaaactaatatacaatagcatattactttacttttcacacttacatatttcaatcaaaattaataaagaaaccatgtggtaaattaaatactcatatatgattgaaattaatgagaaagagtgctttccttagaaaaaacctctaagcacattgttgtacaccttgactcctcaatttagtcctactcctaatgaaataataggtaaaaaaattgaaaggaaattgagcatttgcttacaatctcaatttcttcaattgaaaaaaagagtattagagacaataataaaataatagtgttagtttatagcttttgacataaagagatctcgaagtgtaaatagaagaatgagaaaagtagctaaaatattaatcaatcataaaattatgcaaaaagtttagaaaaattgatcaaacaacaatttgctaacaaagaagttggaacaaagcaaatatgatgacataatagagtaattaattcggatatttgagaaacatggtatatgggatcatttgttaaagcaagaaaagaatgaagcatggaaataaatcctttagaaaaagaaatataaacaacatttgcatattttttttacggttttgcttgagaaaaagtagagg

SEQ ID NO: 80484 - DNA, 1760 bp, Cannabis sativa
tcttaggtacttctttgtttgttaactttttgttggttgggggagttagtttgggattctttttcatttacaagaaaagggtcacaaggtctcaacgtgacaaagaagtttctcgtctcaacttaaggtgtttcacttacaaatatctcaccgacgcaacagatgacttcaaggaagaagtaggaagaggttcttttggcattgtctacaaaggaactttgaaagacactaatgagcaagttgcagtcaagaagcttgatcgagcttttcaagacagcgaaaaggaattcaaagctgaagtgaatgtgattggccatatacatcataagaatcttgttcgattggttggatattgtgaagagggggagcaaagactactagtgtatgagttcatgaggaatagagctctagcaggatttcttttcggtgacataagaccaagttggaaccaaagaatcgaaatagccatgggagttgctagaggacttttatacttacatgaaaagtgtagtacttagatcatccactgcgatataaagcctcaaaacattcttctcgacgagtcatacaatgctcgaatcgcagactttggattagcaaagctattgttgatgaaccagagtcatactaacactaacattagagggacaaagggatatgtggcaccagaatggtacagcaacatgccaatcacatttaaagtagatgtgtataactttggagtgttactacttgagattatctgttgtaggagaaatgttgatattgaaattggtgatgaagaagaagcaattttagtgtattgggcttatgattgttacaaagaaggaagaatggatgtattggttggaaatgacatggagatcattcaagacatgaatagcttggaaagggttttgagagttgcaatttggtgcattcaagaagactcttctctaagaccttcaatgaagaaggttatgttaatgcttgaaggtattgctcaagttcctgctccaccaaatccttttgtgtttggtcccaataattcaagcttcatttgattcccttgtttaatgatcattatgattgtatgtattttattttaataagttcatagtttctaatggtatgaaatgttgtgctatgtctctgtaaaatcccttttgacaatttagttgtcaataattttttaatcaatgtcttctatttataattgcgctttttcttttaaaaaacttgtcatacaatataagaaattaaagttgcctaaatttgcaagctgaaaatttttcaaagatggaaaactaaatgaggtgaatttaacttcaagacagtcaaacatactgcgttgactactactcatgtatcaagtaaggaatagaagccgataaagaagctcataattatctccttaactttattctcaaatgcaaaagctaacaatttatctaaggggccacacaaagaactttcataacatggctttctaacctcaaacctagtgataactgaatcgcccatgaaagcggtgttgcaaataattgtccacataattggctgttaaattaaaatcagggaaatagacagtgggaactgaataccacgtgagtttccaacgctttgaaagaatgcttgtccagaccacatccttatttggaagaaacaataagatgtgtttaatggttgtattaggtagtttcgaaattctgtcctcccgatcttcaaccatcatgatcggtgatgatgatgtttagctctcttttcttttcttttttttt

SEQ ID NO: 80485 - DNA, 1055 bp, Cannabis sativa
ccatcaatcaaagaactccaagacacaacatccctctcctccatcaattcaaacactccctgcgccgagttcacatcgccacatttcgcgtacccatcaaccatagaattccacgaaactaaatttctcttaaacatattatcaaacaccttacgtgcataagtaatatccctacaagaagcatacatatgaatcattgaattcccaataaacctatctgattcaaacccatgtttggatatgtgaccatgaacagccacaccaagttctagcttcatcaatgaagccgcagccttagcaagaaaagggtacgttaaatgatcaggcgagaacccacctctcaacatttggatgaaaaccgatatagaccggtttggattacggctcttggagtaacctcttataacggtattccaatcaaacgttgagggattagagagttgcaatgataagaatcgataggagtaatcagcattaggggaatcaaaaatagcggagaaagataagatttttgaggaatattggtcttgttggtagaggccaaaagtgagtaacagagcatgaatttgcttaagttcagacatggattgacatctgtctaaaaggggtaggagggttttcgccatttttggtcagtttcaacattaaaggaaggatttttattgttagtgatatgatattgatttgaggtaaacaaaattaaggaatttgagaaagagaagagagaatggaagaagaataatgaaacagaaaaagagaagatggagaagtgatgataccgacctatatgagtgttgagtgactgtgtgataagccggagagtagagatggtgaacggagtagccgtcgttgagggttgatatactttcttcacaattgaatatagcttctcacaaattttgattgatttaattaagagtttttacactagtgaaaatttcaatttttttttatttaagactgaaattcttttcaaaaatatttgttttttcttccaaaaaaaaaattatggatatattgatgcacccttatctgttttagcatcggaaataatt

SEQ ID NO: 80486 - DNA, 1290 bp, Cannabis sativa
ttgttcatcatctggctgcttcggagtcatcgccccattctccttgacacctccgggggagtgaatgccaaaaggcggtcatttaaatatgagaatatgtgggctcgtgacccccgttgtttttgggttgttaaagaagcttggtcaagacacctccatgccaatccaatgaccaatttctacagaaaggttaaagccacaagtagaaaactcaaacagtggaataaatctcaattttgtcacctcaaaaatcaggttcaagaggccacttttaacttgaagttcgccgaatgtcatcacccagataatgtcaccgagattgaagatgcgaagaataagttatcggaagcactacttagagaagagattcattggaaacaaaaatcgcgagtccaatggatggccgaaggagacaaatgtactaagttctttatggcttccacgatagttcggagacgaagaaactttatccagagtattaaaccgggtcctggggaagattggattagtgaccaggaccagattgcagcttgctttctcaaaaagtttgaagagctcttcaaaaagagctcaagttgcgatctttccatacttgccaccttattccagccagagatcacggacgtcgacagcaggtggcttaatactatcccggatagagatgaaatctcttctgcccttgcagaaatgggcaaagacaaagctccaggccccgatggtctccccccaagttttttcaatcaccattgggacacggtacaggctgatctgattgagatggtcatacacttcttcagaacttgtgaactccccaagttcataaacgacacatcctttgtccttgtgccaaagaaagatggccccgctttcaccaatgactacagaccaattgcgctatgcaatgtggcctataagatcatctccaagacaattgcaaacagattgagaggatttctacctcaaattatatcacagaaccaggctgcgtttgtaaaagggagacatattgctgaaaatacaatgttggccaaggaaattgtgcactctatgaaccgacgaagagggaaaaggggcttcatgatgatcaagattgacatggagaaggcttacgacaaggtagattgggatttcattgtctcggtgttaacccacttcggctttcctgataagtttgttcaatggatcaaaacttgtctttcggtggaagaaatcaagctgctacttaatggggctacggtcggacaattcaaacctgaaagaggtctcagacaaggtgaccccttgtcgcca

SEQ ID NO: 80487 - DNA, 1493 bp, Cannabis sativa
ttacaaaaaatggtgccttatgtaattattccatatttataatatctttatattttttatgaaaaatcttgtacaactatctaacatcatcatcaagttcttctaattttataactaaaccacctaaattttaattgaatccttgttaagaaacagcgtctacccaaatgagaaagtcacaacatttttcaacatacatttaaaataaaaacaacaaaaaatctaaaatgaagtaaaagttacaaattctaattgaaacaaattcagaactatttcttaaaaaaaaataataataataattgattaccttgtatctaggaagggttgttcaaaaaaatttacaaaccgccaaactcaaataaattgcccaaaccaaaccaaacaaaaaacacaactcgaataactttacgaaaaatttaaaccgcccaataaatatattggacgggttgcatattattctattccacccaaataacccgaataaaccgaataaactaatttacatattttttactaaaattatctataatataatatataattacgtttaacagttaaactattttacatttaaagtttaaattttatagtgtttaatttgaaatttagaatttataattgataattttgattatattaaaatataaaagttaaaatttagaatttacctatgactgtattttttttaaaaataaaaaatattgtttaatactttaatgtttattcaatttatatttgatttttaagattaatttaaattataaccgttttaatcttgaaaggcatatattataagtttattttttttgaattaattatttaaatacaaaaaactaacaataaaaaaaataaaaaataaaaattggtttaaacaggttaacccgactaaattgacaaaaatcaatgagcaagttacacttttttttattttttattgaacgggctacaattaaatatttgcagccgacatttatattaaattggtaaaaatacattataacctgaccaaaccgaccaatatccacctctatttagaacatcgataaaactttcaaccttgatagtctttagttcaagatgtgtgtataatcgccacttgctcacaaataagattattactctaatcttgaacttcatcatttttttactaggtaatgatttgcttgaagaagaaaatgaagacataatttttactgaaaatcggggacaatttgaatgacacaaaaccaagatcaattctagaatttttttttttttttttttgaaaatggttgcaagttgcagaaaattgagagagagattagagtttgaaggatgaagaatatgttaaattttcttgattatgaactatccaaatacacattaaatactaattatcattactcataattattaaccaagatctatattttatttagagcatcacaaaacaaagataaacatacatacctcccattgatgatccatcaatgtgatccatattagagcatcca

SEQ ID NO: 80488 - DNA, 3685 bp, Cannabis sativa
atgctagttagggtgttacacttctgggcctgtctacgtagagcatcctcagttcattgcccatcgtcactcaacactagttcctccatgtcaacaaataaaggccgcttactgccggtgacagtgctcacaaactcttcctcattaggttgggaacataacatggagtacattgtcaactaaataaagaaacaaatatcatattagatggaaattaaaatgaaataaatatgactaaatgaaaagtgtaaaaaacatacatttctagcaaataatcttataaattcatccttttcgagcgttgccctgtccttaccctcccagttgatcattcatagaaagtgatgtgacatcctcactggatattcattacccagctccaagattgcctcatatgcccaacattgtaaagctgcagtatagccatatgatgagtacttcgcctccttctaataagcttctttctcaaccctcttatgcattcaattcttcacctatataaagtctttgttgcaagtttcaattaacttgttgaacgaaatctttctccataaatagtcatagaaaaattcaaggttgtcaaacattcttatcacaaaagagggaacgatagtcttctcctccttactagtgagtgtgcccataacaaataaggccatccctaacttgtaaacatcatcaggttttgtgaaactctcaaaatctctacacagttggccaaagctgatggatagattaccattgaagtactccataatcaattggtttgaatttcctttctcttcaatttcttttttagtaggtttgggtaacaagttcaaccccgtcaccaaagcatattcaatttgggtgaatcctcatctcttcttcacaacataaaagtggaccttatcttccttctcggattttatcttgtgcagcaataactgatggatcaatgccccagaaaattgtaatggttgtctctaaaagaattgtttgaaaggggattccttcaccttatccaataatttgaattcctcaaatttttccttaatctttggatagtaaaaactaccaccacgtcattactttactatttgttttggttatgagttgaagcaaaaatcatttagcatctgttactaagtaaagcaaaaaataagactatttgtgtctacggttatagcgtcagttacacaaaccgacgcaaattctttatatgtcacttaaaaactgaagtaaaaggtcatttttgtagtagtgttagccattttcatttttagagaaccagagtaaaaatttcctctaatttactctcaaatcttcaaagaaaagctattggaaagtccatccccaataccctccgagaaaatctagaaggcttcgaatagtgggtaagttatttctcccttcactttatgcaatatttattgaatgtatgcattatttcttgattttctttatgcaaaattatctgtttttgaactgaacatagaatagatgacatcaaggcttgtaactttaactagcatttgtttaggccttttgattctctaattgcatatcatttttgacctaaaatcattcatactcacccattcgtgggattctaaagatttctagatatcctttgagattttgaacttctagtttgggaattctattcttgaatgaaatcccttctttttgtctttaattggcttggttagcatattaaatctgtttgtcaactttccatccgtccaagactcttcttgtctcccatcttttagtagatgaaccccagtgatttctgaggaggcaagccccatatcgaccaagatctactccagcttttgtatgaagatcaccctcaacaccgtccaggttcatcttcgtccaatgaccatctttcaaactctatctctaaagatggggaagtaagtagtgaacacatagagtctctacagcccgagctgcaacatcactagtaccctgaccaaatacatggagaagggtatggacgtttcattagggagttaaagaaggattagaggggctatcttcctgcatcttgaatgtataaggtccaacacggggttgctgaaacattgctcaaagctcatccagctctatctgctaagggagttgatgttgctaaatttgtcgtgactattgcaagacacactactgaattaaagcctctgtccaagcatataatgatgacaaagacaatgtagatcatgaggaaagcttctgaaactgacccacacttttcttagatatttactatagctagtgtggaacgagctagacttctaaccgaggaaggagaaattattgatggggacattgaggtccaataagtggaggaccagggccaggtccgtcttgctactcctcccaagactgagggagaaggagaagaggaaaaaaaggaagtttgggtacttccctttggcaatttcaatgagaatagagaacctgtctttgaggacgttgaagtcctggtagcttgttgggactatgtcaaagaggaatatatcaaggctcgacctataaacaaccgaggtccgaagggtgcttaatggatctcaccaccatctgtccttactttcaagagattgtctaatctttacaaggaaggtcttcttaagaaagttcaggcctttcttcctagtccctgacagctggcgacaaatcctagaggtggatttttgagttgttgggacctcatggcaagcagggtgttatgctacctttacatccttactttaaagaaatagtaaactattactacatctgtccaacccagctcactcttaagggtataaagtacatgtttgccgtagtcgtgttatacgttttgcaaggatggggtcagccgtctacccatgacaccaattggttgttcgacttgaagtgcagccctaagcaaaatcgacttgggtatttttttacttctctgagattgaagaaaagtggttgtctggcattatggacatggatgtttccaaaaactggtggatatatagaggactattactttttaaaggacatagggaccaactgtactagctttcatcacattccttcttactgccgacctcctttcatcttgaaacttaggatgagagctcaaaaaatacttcaactttctaaagaggctcgaaacatttcactcttggccactgaggccaattttattaagtgcgggctttatccctctatcaaagtctatgaggcagagcaagtgatcgatagggtcacgcccgagcaggaagctcccaagaacaagaagaaaaggaaggctgcccaaggtgaccaagtatctattgagcgacctattaagatatgagatgatcctaaagaagttgctcgtccttccatccaggtggaaggaaagggaaaggatgttgtggttgaggaagaggaaaggactcttctgatgataatgctccttcattgcttgttcgcgagggtgctctcgttcacgtccaggatagactattttattttttttacttggccatgttttccttgcttgattatgtttcctaacaaacattctttctttttatgcagatatgtcgtagagggtattacgtactcttaagaagaggtcgggttatgcctccagccaaaagtctctaaccaaatgtttgaagatggatgatactttgccaaagagcattgttctgagcaccaaagctccccaagttac

SEQ ID NO: 80489 - DNA, 1340 bp, Cannabis sativa
ttttaataactatatataaaatatgagttatttctctcgttgctaattgttttcatcacattctgaaagattttgtattagaggtggataatcaattagcattgatttcataaaatttatcctacctttattgaattaaattataccatgaaaacttttaaattaatttatttgttagtgatggatccattctcgtatatcccttttatacatattcttataataattaggtaatagtaatacaatatccacttctttataaatcacacatacaattttctactactttgaatttaaaactcgagataaaataacaagaatcatagaaagtgggaaagtaggaaatttggctaagcttcacaaccatacaaactctacatcaaaatgaatggaggaaaggaaaaattaaagtgagaagcctacgtggatgccatcattcattcgtggcatccacatcagcaaaatgatcaacccaaaaaagtgtggtatagtatattcacaacaaacttacagccatttcattatcaaaaaagaaaaaactcaacaatcatagtattttttttagtttagaacaccaagacttaccacaattgagttatcgttgtctaaaatttttattccaagcattttttttttaagttgtttgaagctttttctacaatggtgtacgcaatacaaaagccttgaaactcatacaagaatatttagtggttttcattagtgattttttgaaaagtaagagagaattaaaaattgtgatcaagaattttaactctcataatgcttatttatacagtaggaatcgtcgattaaataattaattgtctttaagttcagaatcaattatttactttgtaagtaatttatgattttattttcactgtaccaagtgacatgttttcatgtaactcaaggtgaaatcctaaaatattttattgttagttaattttttaaaattgtctaattcgaagaaatcacccaaatcaaaccaaatatactgacgaaaaatgcaacctgaataacctaaacgaaaaatcaaacctcccaatcaatatattaggtggattgaaaatatttcaacccgcccaatacaaatagatttatatattgtaagaaccaataatttttgtagtgacaaattaggtccagttgcatttagaattcatggtgttatgtctggagtttatactgttagtgatagtccacatcagtaagatattttgggtatttaattgcccagctgtctacttcgagtttatttattaagctaggtataaataccttttattgttactattttgactaacctttatgatcggagattagggcttcgttttttt

SEQ ID NO: 80490 - DNA, 3398 bp, Cannabis sativa
  modified_base (317)..(321): a, c, t, g, unknown or other
cttattttactttcatatatattatagaaaatcaataaccaattatagaacaacattttatcgtggtgctaagtactcataacaatgctcatttacaaaatattataattgaaacatactttttatagtttataggggtacattgtagaattacattcgaaatcatgcgccaattgtaggagcattaattactgggcacccatagtgcttaatacttattttataattaataggggatcatgtagcagagatccttttcccatccttcaaccatttaagtcaatcatgggactacatgtcttttttttttttttttnnnnnagcgtttatatattacaaccatactcgaatccaggacctccaaaacacacacccacctatggccacttgagctaacctcaagtggttgggactacatgtcagttatagggctttatacctcaaccaatcttaatttagtcatcggtattccacctcaaaggttcccatcacacaaacaacaggactttcaacaagcttagccttcaaagggcaagctttagtgctcccaatacagagattgaagtgagtttcgaacttttgaagatgaataaagataatccctatcactatacaagacatgtttattgactaacactcttgtaaagtttaatatacacctagccactcaatataattcccactttgttttacttaataaatattggagttccgttacaaataagtgaatttacattatacaaatttgaaagagagggggcaagtgttggtgagacttggaaggaagaagagtgagcgagtgagtgagtgagtgaatatggccacagaaacgtctgaaggagaagaagaagtgaagatcactggaggaaatcaagtgcttctcgttgatgatgatctcagagaaatgggtaaggaggctgcttggagtgtcagttcttgcaagaccggcaatggcgtctcatctctccgcgacgacaatctcgatacttattggcagttactactcttccttcctttctttcttcaatttacaaatccctattgttgcttatgctaattttttttgtttgcagatcggatggagctcagcctcacttcgtaaacattcaatttcagaagaaagtaaagcttcaagtatgtatgaatgaatgaaatgaagtattaatcatctaattcatttcgttcaaaccctattttttttggtttatgatcctttttctgttttagcttgttgttatatatgtggatttcaagctagatgagagttatacgcctggtaagatatgtatacgagctggagatgggtttcacaatttgaaggtagcactagccctagcttagccttttttgtggttttatctcagtaccaaaactcttgattttgttgttaatgatcttttctataacctaattttgttttggggaaaatgtttaggagattaagactgtggagcttgataagccaactggttgggtttatatatcattgtctgggaatgaagcaaggtaagctctaatagttttttctagttcttcttaattagaacatggtttagagtttagacacaaagagatgatatctgtgttatccttatctgttgattactatcacttttgtctgatacttccttagtttatgttttcccaagagaatgagttatttttcttgatggttgagacttgggtgtgatttcaagtaactgtgtgttgtactattttgtttgtattatttcaagggaagaacatttcgaggattgaagttttggtgtaaagggataaaaaaaattctgtccattaagctagatagcacaattacaaggtcaaaatttaaacatcattgtgaacttgagaagtaaagtacctagttttttttcttcttaaaagtcttgggcatttctgaattgcttgttgtagctagatttccattcaagaaaattctcaaatgtaagcaagaacacattccttaaaaattatttggtggtctgtattaacacggtatcaccatgtaatctaaccttgaaaattactggatctctctttctccagggtactgagacgaaagttaattaacacaaagatttctttcttaagcaatttgatataacaatttatatttcctttagttctgaatcaagttttgtacctatattgtgaacagggaaacttttgtcaacactttcatgttgcaaatttctgtgttgtctaatcaccttaatgggagggatactcatctccgccaaatcaaaatttacgggcctcgaccgtgcgttctctttgcacattcttgctcatcaaagtttcatactaattctgcaagtaatttttttcccttgaaatttctctgcaggaatcctattcctcatcagccatttcagtttacatctcgtgagttcaccacctattccattataagatgatgcagcatatgaaaaatggattgagccaggagcataatctgtgaagcatataggatttagaatactgcaagattctaatacattgccaccgtgtgaaatttttgttttgtttttcacctaattcatcttgaatgggttttgatagaggtgtgttacacaatcaatgtttatatctcagctaatagtttgacaagtgaaggaagtgttataggaattaaactttatgtttgcctagctctcccaatgaatattagtctacacaagtggttttcaaagtcaagagaatggactaaatttatgactattattagttttctccttcatatttatggacagattgacttataaagattattgagacagcacaactaaaatggctttaacaatgatgtgataaagttgaaaaggaaatctgtaacgaaagtaattatcttttattagatttgttgagcaagtgatggcaacatgagatcagattccagggttaaataacaaaattgtggtccaaatcttcaaccagatagggctgaactcggccaatttttcacccaaactgaagattttggtagtaaagatatgtaatgtaatgaacttataacagatgagcagagcacttaaaagttacaggtccagaatagtgcatgtttgaaacagtaaaagattcaattggaatcaccacattataaataaatacccttaagttacatccaaatttcagttaatacagataatgcaacatacaattcctaacatatgataaagatgcagaggtattcaagggcaaattttgatcaaagtatgagtgagagatctctagccaacccgagctttcattcacacgccggtttagtgtcaaagctactcaaacagattgaaaaggcttggaatgcagagagtggataacgataatccattgtgaatatgtcttttccgatctttccaaattgcaggatcaccctctcttgctctgcctctgatatg

SEQ ID NO: 80491 - DNA, 1701 bp, Cannabis sativa
atttgaagatatttctttatattttctttttttatataagaaatcgtataataatttgtttttttttttttagaattgtttagatttatctatgtaaatttattattcttttaaacaaatatttttataaaaaaaattatcactaattcaacacaaccgcacgcgaagcgcggcctgttcactagtatatatataaaggagaagtataagacggtgatgtgacagtctaaaatttcttcaattaacattatttgctttctccttcattctctcattttttttaatgttttaattatatttttattttattttctaaaaatctctatatatatataaaggagaagtataaggcgatgacgtgtcagtctaaaatttcttcaattaacattatttactttctccttcattctctcatttttttaattttttaattatatttttataaatatacccactaatcatcattaacgtgtccaactacttataaatataaattttttattttaaaaaattaaaatatctaaattttcatgagtcttttatacatcacttatataatttttgctataaatctcaaacacaactcaagaaaatacactctaaatcaaataaaaccatatttttttttttttatcaatctcatttaatttctctctcggcctatctccttctttttctattttttttcattttttatttttcatcttttgagattgtggttagcaattataatataaatctaccaagaacactcatacatatactcaaagaaagaatgatcaacaaaaggagttttcaaaaaaaaaatgatcaacaaaaagaagaattggtttgacattccttttaacatcacttattctttcatattatctttatgcatgctatattatttctctctattattatttgtataaatttatcaattattaattactcaatgtgtctactatttatcttacatgaaaatctaatgcatgcaataataagaaaaaatttaatttctaagtttaagaagttattgagtgaaaattatttgtactaaatatttattattagcttttatttgtatttaaaaaatttaattaattatcaatcatctttatattatagcattttcatattatttttatattatatatagatgttattggatgcttatgtgtgtagaaaattgagattgttaaaaatatttataagaaaaaagcatcgaagttaacaatctctctttatatataaaaatatataaagatgagatataaaagagtgacataacgcttttaaaaaaaatagtatatataaattttttttttattatttatctattttctaattttttattaatttctttctatatttacaaacaaaaatatttctacacctaaacctaattatctattatttttaaaatattataaaaatctattttttttaatagattgagtatattataaagtttggtttttcattatataaacattgacacataagagaataaagtttagaaaaaaaattaatgaagatgaggtaaatatgtaagtgagatacaatgatgacaataattttaaatgtagttgcgattacaaataagatacggcgatgataataattttagggataattacataaggtacaattttttgtaaaaaacttacaattttacgtttaaagaattttttttttttacatttttactgttttcca

SEQ ID NO: 80492 - DNA, 737 bp, Cannabis sativa
  modified_base (26)..(37): a, c, t, g, unknown or other
agggtccaatctgtaacttttgcaannnnnnnnnnnnaaaatggtatttaccctttataatataataaaatttcgttaattatccacaaaacatttaaacccggtgctagatcacttaggtgtggtaggactacgcttagagctaacctagcttaagaacccctgaaaaaatttcttttttaaaaatgcacataattttttttactgattttaaaaatattaaatttttttaatttaaagcccacaatgttttgtttcttatagttcactaaaatttagagtcgtctctgaaagcataactatgccgaattgaacattttaagtagcgctctataattactagtttgtagtttattatacctatcatcaaatttaaataatatagcacatataattttgacacaggcttatcttttaaaaaaaaattaaactaatcatttttatttaagatgaatctcacctatgacttattgttatttattgtgtgctaaacttacgtgtaatttatatatgcaaatatcattattcttagatggggtttagctggaggtaataaaatgaaatgaaaaataaaggaaacaatttacattctatttcatattggttgcatttcaaagtatttaaatgacattctaatagaatgatctttccaacattatagtggaataactattccattttataaaggaaagaaagaacattccaatataaagaaaaaaaaaatcaataattttttt

SEQ ID NO: 80493 - DNA, 2579 bp, Cannabis sativa
ttttcaaaagaggcggctttgatggagcaataccattatcaattaatatatgtgggaattatatggttatagcttgatcagttcagtaagtaaagagaggaaatatttgtaggttaatatattaattaatatactaggtattattaacatgcaatgcatgtttattaaaagttgtattagatgtgttattatttaattattaatttaaagaataataacaataataacattaaatctcatataatttaattatattttttaaatttatttataaaaaaattatatcaaactagttttattaaataataagcaaataatgttaaatattttaaataatataactaataaatttattataaagtatgattaattaattaaactaacgttcaaattcaaatttaaattaagttctatacataaaaaataattatttaattttgttatatttttaaattaaatttaaatatttaattttttaaaaaataattaattgattaatttagtgttagtcggtaattttaacggataaataaaaaaaacaccgttaaactaattactaaactgtttaacagaattaggtgttgccctaacagattgaaattatataagaatataatatatagaaaggtgaaatactacatacataattagttgttatatatcaaagtataaagtctattcaacgtggtttacattagctagtagagatacacaaaagtgacctacagagctcctggaaagagaggatttggcttcagaaaatgagaaagtatacatatatgtatatatatatttatagtgaaaagtttcttttagcgatgatcgatcgtgtgctcacttttggaatcactacttaataacatgcgggatagagagatatatatataaagggcatagcaatgatcgaacaagacaaattgctatagtgctatgcctattggggttgtaacttgtaagtagtatagtaatagtagtagtagtaggggtccagccacccaatgtacaaaaaaataaattaattaattaattgcctttaaatctatataccaaataatacaaacatactgtatatgactatatgagtagtatagtataccattatataaaaataattaggacgtacatgtggatgatttgatctgtacttagaaaaataagtaacacttttcatgctagctaatcatatatatatatatgaaatgaatagtataatagtggtggcagaggtcgttgaagttggttctaatgcgatctgacgagaggagagtggtgttctttggcacacgctgaaaggcctgcatgtcttgcccttttcacctatacatacgtaataataaagtagtcatcacatcatggatactactcatcagaacatcacgagcacttcttttatttgcaatttacacttacagtaatattgcctccacttctgcctctacatatattattaattatcaatattaatattattcattacccaaaatatatttgatatgattttagtaaatgacttatgtttgtatttgagaaatttcaaaagctgttaaggaaagtaatttttcacattcacgttttcttataaatttttttatttgaagtattggaaaatcatattaatacgtaagagtaatctaaaatatgttaaaaaatgtgcattcttaacattcccttcaaatacaaattcaataaaattaacatattattaattaataattttaatttttttcatcacaacaatatttaccaaaaaagtgagactaattatttataattattatgacaatgattaaataataaatttatgttgttattgtagtactagatccatgcatggtcggtttaggaattaaaagctaggtggtgactagtgtccatttaaagttattgatattggtcctccaatagattttttttttcgaaagatcctccgatgggttacttttatgtatatttatgtttatatatatataaatttatatttataaataacgggacattgtaaaatatccaattttattacatttttttttttttaataatttgttgatctaccactaataccacaataacctagtttattttaagagtttagacagaaaataaatatagaagataaaattaggggaatatgttagtaaaaatacatacacttgacccatggccacataactaaatcgttttttgaaaaataataaaaagaatgttaaactgaatgggatatttgcaattatttttataatatagaaaaaaaatttgcgttaaaaataaattcaatgggcaaaattaattgtcatagctcaaggaagaaaaccatatttattcttattttaagtagtctcacaactaattcattttattagtattttttttttggtgaatcttggtgaatggactatttctctataaaaaagaagggtaaatggcggcaaaactttcaaaattttcattttagtttcacttaaccccaaaacctaaatttgggcggcaaaatccccaaaactcatgttctgttagcaatttaacacttccgtccattttaggtgttaagtgtcatgttggactagacacagtgtacacgt

SEQ ID NO: 80494 - DNA, 1063 bp, Cannabis sativa
agtaaagattttctatgaaatagtagaagagaagaacatcataatcataaacttagataaatttttagctcttatcaaaagtattgtatacaattaattggataagataatagttacatctactatggaatttgagtttatgaataatggtaagtcaaaacatacgtatcgcacacataataccatcttacacaactacattaattaagagttatctctcttaactatgtgaagtcaaataataatattgtgaatttgttaactaaaggattaaatagagaattgatagttcgttgaaaaatcatggagaggatgaaactaaagctcttgaatgaatagtgaacacaatgtagttggttggtgatcccaatatctaggttcaagtaggacaaaatttgtaaaagttgcttgtgaagaaaatgttaagttatgtttttaatgatttgtatgtgttgaaatattgtgcagagtatgtgggtactttcaaagttcaattaagaaattgcttacatgagagggaatatgggtcaattatataggaattgaataggttagggctcaattcctaggaaatctcttaattaggaaattttttaggaccacaacaaacataaaagtgagacttaaaagtatgtcaagagaaattcttgtgtgtgacatatcattgtttacaagaatgataggaaacaattcaaatacatcgtggttattgatcaataaagtaaagatgtttacacaagatggttcaaagggtaacacctatctatcttgtgcaggtttcaaacgttaaactctatcacatcacacttgaggaactgttagaaaattaaatgaaattagttccacattgtttgtgggtgtttttcttacaaatgtaaggctataagtacacctcaatgataccataacaaatgttttatatcgaactcaattgatggttaatgacctaaatgctacgtgcgagtattgtcttgcaatataaaatgatattttacttaaaatctaaagttgtcgaggacattcgcaataatatttggtgttaactatattcatcatgttaact

SEQ ID NO: 80495 - DNA, 2419 bp, Cannabis sativa
aaatggtacacaaaaggaatatcactaattgacccaattttgtacaattatatatacacagtgctgcttgctgttctcagtgatgccaccagaaatagttggtgaaaagatagagcttgaaaacatttatgaagctgttaatgttatactctctttgcaggtaaaaatttctttgcatacaagaataattgtatctctatgacattgtaaattgtcatccatacttcttagaaaacgcatttagatatatacaatgattatgctcaaccaaaaataagaaagaattaattgatcaattcatcatatataacattaattggcagagtaaaaatggtggcataacagcttgggagccagcaaaaggacaagcatggttggaagtaaggaacatttataataaattaattaatatatatgatgtttttacttacatatatatttaatattttttctaatataattattttaatgcagatatttaatcctactgaattttttgaggacgctgtggttgagcatgaatatatagaatgcactggatcagcaatccaagctctagttttgttcaagaaattacatccacaacataggcaaaaagaaattgaaattttcataaaaaaggcttgtcaatttattgaagacacacaaatggctgacggctcatggtaattatacaaccttcatgtatcatatcatcaattatatatacatttactttttcataagaaaaattaatggtaactacagttgacatataaatgtatataatatatatttatataggtatggaaattggggaatttgcttcacatatggtgcatggtttgctctgggaggattgtgtgctgctggcaagagttatagtaatagtgaaactatacgtaaaggagttgaatttttacttaaaatccaaaaagaggatggtggttggggtgagagctatctttcatgcccaaataaggtaatctatttggcccaaattaataagttaatccatatatactcatttttctgtcttggttgatttagacacttaataaataacaaagtaactttgtttactttatatgctgattatgtacgtataggcatatgtagctctggaaggaaatagatcaaatttggtgcatacttcatgggccatgatgggtttaattcatactggtcaacaagaacgagatccaactcctcttcacaaggcagcaaaattaataatcaattctcaattggaaagtggtgattttccacaacaagaaataactggagtcttcagtaaaaactgtatgctacattatgcaacatatagaaatatttacccattatgggctctagctgaatatcgtagacaagttccattataatttatctttgttatacctaaattagtcttcttctaagaaagaaaatattatatacattaatatatataataattggtgagaatatttatagtgtttcattgaggtacaatttctaaataaagtgtcaaattttattgtaaatctttgttactaatttttttgagttagtttgccacatttgattaaatattcaaccaaatttaatatatattttcttattttgtgttattttaaactaggaactaattcgggttttgtacggtttttacaataattgtaatatttttaagttgttaaatatttgtaccaaatgagttataatctatatacaaacatacaaatataaaggaaaacacaaaaggaatttaggtggcatcttagattttttcattgtattttcaaaaattttgtgagatttattttgttttaaaaaaaattactacatatacaaacttaaagtcccacatggtttagaaatcattaaggtgtgactactacaataatgggctttagaggccctatttttgttggaaattaaaataaagaactacataggattgttaatctgatgaagagttgtaaaccccttatgacattattttttggaaataactgacatcatagagtgtgctcctatgtcgtcggttatttctaaataatcgatgccataagggatttataaccctcctcagcccttcgtctacttcattcgatcggccaaccagaaacctccaaactagagaaaccccaaaccttcttcaccaaccaactcgttaatcaccccctatttcacaattttttcaccattttaactcatttttttgtttaaaatcttttattttccataacctcacatgtttccttgtatttaagtgtaaattgagggtagaggtagtgattgtggtggttaaaccttcgacccccagttttattggagaaaatattgaatctcgacgtccattaaggtataaatctaatttttactaatttcagtaatgtatattgttttatttttgattttgtaaattttatgagagtttttctatattattaagatt

SEQ ID NO: 80496 - DNA, 2430 bp, Cannabis sativa
tatactattgtattccctcccaaaacactaccctcaatacaaagactcaattacccttttatttaatatatgctagcacaccccactaatcctaggtcctaacagaaggtcttgaaattttttccctttttggttttgcggcttcttaatactgcatagagtattcagattctcatatttcattttatcaggataatagtttcaaaacctcatcttcagtcgatgtgcattctcaagccacttcctttgagaaattggccaaatctgaagttgttcagaacatttctctaaaagggaatttagagaaagtgaagtttgattatgaggtcggtctttttgtaattttgcctgtttcggctgagtctgctggattgcttccaaatcgaaagggtaaatttcttttgctgactactaagcttaaattttattgttatcatctttgttcttgtggtttcaattttagcagagtccttttgcctttttaaggaattaaaagtctttaagcctttattatttaacagaaattctttaatgtttttgcaccacttgttttgttaagtgtaaatttcaacttttgtatggagaaaaataggaatactttgaaatttctatagtatttcctccaatatctgctctagcctcatttagttagaaatacatattagtttttgttttgaaacaatgacattgttttcatatgcttgcttttgtttttattgaagaaatttctcatttagttagaaatacatttcggtttttgttttgaaacaatgacattgttttcatatgcttgcttttatttttattgaagaaatttctcatttagttatagtttgtctaccttttctgcttctacttttagctctttttagagttattcaacccacaaaatttaaaagcataaataaatagttaaatttagtataaagtacacacataaattcatttcatcttgtatttatcttaattaaattttgtaatgctgtaaatttgttgattcttatacatgcatgttaattaagttggtgaatgtgaattcagagaataatataaaaggatcagacattatgttggaagcagaagttgaagtagaagttgctcatcatgccaaagacttcttttcccagccacaaaatcaactgccctaaattcaatcagaaagcaacatgttttattatgactaaaagtgaagttttttgtagtgagcataagcaacatagcaataaaaaatagatggataattcatcattataattattaataatctttaatcggaccatccctttaattatgtatggacattgtagatgtaaatgtagaccccatactttcctatatatatattataattatgactttatactatagccaaaatgaccataatactcctcttatacctaatcaaccaacatggacaaaatgaaattaaattataataataaataacagcaaggttaaaatggtgaagagactgctaagtacaaactgaagcctatataagaagcctttgtcaaatgcgctctcatcacaaaatcaagtatatatatatatttttaagtgttgaggttgagatcattaattacttactagaagaagaagagaccatggaaagttacacaaggagcagaaccataacgatcagcggtagaaacttgtcgtcgagaattcctagtcgtccgatcccaaagagagggcaagtaaagatggggatagttgtcggattagctcactctgtagcttcagttttctctcctggccgtcgatgacgagattctgattatatatatatatatggggttcaggagttgtttctgtacaaattacgtactctcttttttctttttcttttcttaaatcatgtatgagatcgacgctcccatgtacagtgatctttgcggtatgtattaatggagtttattatatatataattccttgtttattctcattattagttaaacttttggcctccaatttagtttttgtgtttctacatatacatggatatttacatgaaataatcatctgaacaattaagaaaaattagaattttcattagaagttatgaatgttaatagctagatggctaatgttataaagcaactccagtgtttttttttttaaagtaaattataactaaaatgattgaaaagatattttaagagtcattcttatttttgtctatttcattctaacttcttatgctagctaagttattttaataattttattaccaattaatttcttttttgttcgtttcataccaaaaaatttaataattttttttttgagaaataagaatcaatacattaaatcccaacaattacatcaccaattagaatttcccaatttcgtataccaatcccctttccacccacaaacttgttgattatttattccatataccctgttacaaatcaaatctatccgta

SEQ ID NO: 80497 - DNA, 1150 bp, Cannabis sativa
ttacccgcagaaatttgggttgtgagggtttaatgaaaccaaaacgaaaatattagggagttttgccgccatttacccttttatttataatttctcccaaaataaattattaataaaagtactagccaatgtaaagagttgtactaactcacataacaattttttcaattagtgaacgcagcttataaaaattagttatactcgataatgtttccaaccaattagaaagtcacatagtcccaaacaaacatatatattataaagattaattcactatgctttttctctttaaacctagtactcactaattaatctttaatattattacaattaatgtttttttaatattgctatttctcattgaagctacaattaatattgcagtactattgttatatatttgaaaagaagaagaactagaagacaatattaggagcatatatatgtgttcatatacgcagctaaaagtagtagcatgtagcataagtagggtccaacagttattgaaacttgcgaacaaaacatgcaatatacttatatatatatatatatatttatataagtcattgcccattggcaatacactgtgacactgtactactgctcagtctgcttaattaattgattcgtgtggctgtgggagatgaattgcacattcattccaaaactatgccttaaatagcacatattcatataacaatctaaattgccattttcgaaacccttggaaaaaaagaagaaagaaaatagagggtaaaaagggtttttcccttattttttgacaaattgaaaggtttctttccttctgatcaaaaatcctcacaaagatattcacacccattatttttaacagtattatctcttcatcaagaaaagaaagagcattgctataagtcactaatagtgtaaagtacttttacaacatgtcgcgttgcgattggttaacgatactctctaaaagttattatattaaattatatgagactcgatacttagttggaccaatagcgatattaacacataagagggtactagacaccaccgctgccctttagcatttctcaaaaaaaaaaaaaaaaaacataacaaaataaagcttagtaatgatgtagaggctaccggagattaggtagttaactaggtagccaaa

SEQ ID NO: 80498 - DNA, 1641 bp, Cannabis sativa
aaaaaaaaaaaaaaaactccaaactagacagtacctttacatatccataaacttctaaaagattacaaactctaaggagtttgcctatcaaaaaagatgtaacaaaaaaagagtttgttagttaacatgttacatataaaaggtttggtagcattacatataaaaatttctaaaaagagcactactatcaacatctactcgtcggcatcatcatccttaactggcgccctcccaggatgttcagaggaagatatatatcaatttacttgctttgccatgccatgcacaaacaactcgatacaaactttgttccatagaaacttcacatccaaaagatttagaatatcttcaatcaaactatgagcaaagtatttagagtacttgaatatgaatataccacaatcactgcaataaatagaaacaaggaatcaataaaaaacaaaaaagtatatcaacaaaagttaagcaattaataaaaaaacataacaactataacaaaaaccaaactaatgaataattgcctaagagtttgttgtggcagaccttgaactacaaaggtatcaaggggatcatactcatgcttccctttgaacaatcccatagacttgtgaatatatcattcggttgacctcgcttttagccaacgatagtgagtcaattaataaccgattaagagtataattaaaatagagcaaaaacaataaagtaataaagaacaccaaattttaaagaggttcgaccccatgagtgcggtaatagcctacttcccttgagttgtattaacttaagagaaagaacgaagtgtttttctctctaaaagctcttacaatgaatctctgagtaattctcttagatctctctctctctgaagcgattctttccatccctttcatagtgaggctaagtcactatttatagggccttaattcatgagggaacatctgcatctcaaagtatttaagatgtgataagggatcctctttccccgtatatatcttctaggttggcatcttgaattttgggggtaattcaaggacttcaatctctaggtggaagggtgattcgcatgctcggtccagctcgagatcagtgagttttggaccgctcaggccttgtaccatatttttcagttgattcaattgtgctagcacaaatggatgaactggttcagcctgttgaccgacatgtgtcacgttaggatctctttgacctggatcctagataaggatacctagttggatagctgatgggacatactattcatctaggccttttcttctatttaagtcagtcttaaggtcatgcgcaacacctaacctattaaatatcgaggtaccaggtggtctcagcctctaacttgtttggccggtaggttggctagagatttcaatagagataaggttattaggagtaactccacccaaagggcagtcaggaaggatctggccgtctactgtttggcccacaggttgacctgtggatgtggattggatggctaaccattgcgcgtttaggcagaatgcccagcagcatactcttctgtaccgcccagagggatactagatgcggtagctggctgttgactggcaacttggtaggccctccttatcagtaaggtggcctgcctcgtgcgatcatcaa

SEQ ID NO: 80499 - DNA, 1914 bp, Cannabis sativa
acatgtaaaacctctatgaaacagagtgcttttcaatcgatcattccaggccctaggcgcttgcttcaagccataaatggctttatgcaacttgcatacatgattgggatagaggggatcttcaaaccccgggggttgcaccataaacactgtttcttgtaatgtcccatttaagaaggcattggagacatcaagttgtttgatgtcccaatgataggaaactgcaagtgtgagtataattcgaactgtagcaggccgaactacaggactaaaggtttcttggaaatcaattccaggtgtttgatgaaaacccttagccactaaccttgatttacacctatccaagctgccatcagcattcaatttaactctgtgaacccacttatttcccacaagattcatgttggattgatatggtacaagtgtccaagtaccattgcgtttgagagcatagtattcctctgtcatagatgcattccatttgggatcagcaagggcttgttttaaggttttttgctcggttgggagaagggattcaggaaggggatgtttagtggcagtgtaggctttgggtttgtgtatgccgaccttagctcttgtggtcatgggatgtgtgttggtgatggaaggggatggggaaatgatattggtactggatataggtgcatcatgaggttcagttgctgggatagtagctgagacagcaggaatagcagtctgctgagccaaggaattaatttctggtgtgagagttgcagtagggagtgatctgcagccttggtcacagggagtggtattgggcagtggctcagacatggaaaaatttggagcattagtatttaatggaggagtagtaaagaatatagcagtaggtaaatgagaagtgtgattggggagtacctgagttgttgcaggctgcaataatgctgggaactcctcttcattaaagactacatttcgtgaaatgtagactcggcctgaggtgttctcacacagatagcctttgtgctgcatagagtacccaatgaatgtgcatttctcagatcttgctgtcattttatgggaatgatacggcctcaagtatggatagcaagtacatccaaaggtttttaaaaaaccataatcgggggacttgtgaaataagcattcatatggggataaattgtccaagactggtgtaggtaatcgattgattacaaaagtagcatgttgaaatgcataccaccagtaggaaagatgtaaacccgattgtgccaacagagtcataccagtttcatttatatgtctatgcttacgttctgcccttccattttgctcatgatcatgtggacatgggtgttgaaagtggactccattgttggccaaaaatgaggcaagagacctgtactctccaccccagtcagattgaaccgacttaatggggaggttgaaatgtttttcaactaatttcttgaattggaggaatgtagggtaggcctgggattttaatgtgaggggaaaaatccatgtaaacctactaaagtcatccaaaaaatgtatatggtatctaaagccttctttggagggaacatgtgaaggtccccataaatccgtatggattaattccaaaggtaaggaggctctactagttgatattgggtatggcagtctttgactctttccaaccttacaggcatcacaaaattttaaagtttttaaggtgcctgtgtgattgatgtgggacaaaactttagctaaggttttggggccaggatggcctaatcgtgagtgccaggtattgacatcatgggaagcatttatgtgaaaaactttagtgatacaagtggaattggaattatcaaaaagatttttattactgttcaaatcagtacatgaggaggagactgtatgattagtctctttattacaattgga

SEQ ID NO: 80500 - DNA, 2676 bp, Cannabis sativa
  modified_base (2125)..(2127): a, c, t, g, unknown or other
  modified_base (2350)..(2350): a, c, t, g, unknown or other
atccaatgtttgacggtcggttgtgattggatcggtcggttgtcattggattggatcgatttatgcacacccctagttgagagggtttagccgcaaaaaaaaatcaatataatatttaacttcactacttttattttttaatcattatttgaaaggattgaatttattcaaaaagcatattacacgaagggagctgtttaggtatcaaaacgtccaaaaactatgcttaaaaaggcataaaaacaaccaaataatgagccaaaacaaacaagcttattaggcataaaaataaaataaaaccccacaatttattttgattgtctattcgtactagttgggacgttttatattatattattaaagatttgagttgatattatggcgagaataataataattaggagtgataaatttgcgaagcatttcatcagcttcaaacttggccatgtcttcctcattcaagttaacataagcttcaattccatcaccatcacttgtgtcaaacaaagcaatgattttatcaaaactccaagcacctgtgctagaccaatcaggcttaccccaaccaaaatcaatttcataaaaatggaatcgactcaaacttgtaacctgaaattcaatcacctcacctcccctcttctctatactttctgagttttgttggatcttactcaattcatcctcttctcccatttgaagtttacgaatatactctttgttcatcttcttaactccttctcttatcttcttcacaagcccactagtaatggaagcttccccattaatactcgaggccggaatttgtgtgcctgcgtacactaagaagtttccaaatgagttttcagccaagggtggattcatccttggatgaagattcacagtgtgcaaaatggtataaaccctttcttttttcggctttgttattttcgacactgcagcctcatacctacttattatgaaagtagataaagtctcaacacgagaaggtcgaatattattttctttgtcccaatacattgctcttaaggcctcaatagcgaaaccattgaaaacaaaaatctttgatatgacaccctttttcatgacatcagtctttatgtcaatcaaggattggggtgtaggaggaaacaaagtcgccgagacaaactcaggttgaagcgattttggtaacatggtggtggttccatctcgagccatcatcgcccaagttttgataaacctcatccatgataaagcgtcggcaatcttatcagaaaagttgataccaactacgattcctccacactcgaacatgttaagttgaaccccgaatagaatttgatgagcatcatcactttcatcgtgacgagacatgaaagggcaaaagatgcagttcttgagctattggattggacaaaacttgggaaagtcgcccattcacttgagctttcacaaagggaacgccttcgtcgttgcaatggatgagttgtgcatgcttatcgagtcgtccagctaaagggtagtaatgtgttaagatggctgataaggacctttttagaatgttggctggatcaatattggttgtactacttttcattttgtaataaaacaccaatgggtcatagaatatgggagatgattggtcaagtaatgacagtttgtaatgctcaagatttttaggagttggataagatggcttgataatctcaacagagattgcttcaacttcaatattcatcatctttattttaagaatggtttatcaaaaacaatgcgatatttgtgagtgtgtgatctcttcaatttggcctcttatatttatagcgtttttcttttttgaaaaataaatataaaaaactacttcatatgatacccatgttttacacaaacttcaatataaaatattttattaatttttaaataccatttctctaatcactagtttcaatataggttggagagtatgcatgtgtataggttatggaacattgttattacgtgcctcatcatcttttataagtagtgctatttaattggttagcgatatttttaaaaaataattattttaaagggtaaataactgcataagtacttaaagttttaagtttgtaagcggcataaactcaatatttatttttagcggcannngtactcaatgtttgtaaaactgtaattttcttccagttttgtcagtacagactctattttgaatttattaagagaacatttggaagtaactgatactatatatttctatttagacccgaagatcaaaaatttaggccttatatgtgccctgtttaagacaatatcgaagtctgtactgacaaaattagagaaaaattaaagttttacaaacattgagtacttntgccgctaaaaataaacattggatttatgccacttacaaatataaaactttaggtacttatgtcactatttactcaaataataataataaaaagaagagagagagagagagagagagaatagactattcttcttccatgtaccattagagctcgttttgtttgtatgtgctttagcccacaaattcatatacaaaacacaatagtattccaatttgagatttcaaattgaatggtggaaaactgtaagaaagtgacaattgtgtctaaaggtcacgtattcttttttatagtttatattaggtttataaaaattgatcatacaatt

SEQ ID NO: 80501 - DNA, 1668 bp, Cannabis sativa
taggtactaaacttggatgaacagatgagaaaaaaaaattaaaataagaatatacacacataaaataaaaaaaaaaaaaatgcattgcatataattgaaggaagttattcagcaatttagtgaaaattttatactgaataaattctctcaattttaaacaaaatgtttatgtatgtgttgaaattaagaaccttaatttccattcaatactttcactatgagaggtatttaaatgagaatgtagtttttatttcttttatttggcaagagaaataagaatggggttgagaggcagttagaaccttgtggctcctttgtcaaaaataagatctataaaggactgcaagggtctaccaatcacagatattcatattcagttgacaggatatatttttcttgttgaatgaggttatccactcctgaatttaaggaaacaataaatacaacatgaactagacccaaacgaaaccattttggttgaacagttaaagaatttagttagtcaaataaaattagaatagtggtgactaacatgaaaaggtaacaatcatttcacaactagagtcagccatgaactaattactaaactgacataatatcaactaaatacaagaaatcatgtacaataactgataattataatggagcactctttcaacatgtgtggagtaagtgaataacacgtggcattatgctatttgtcattggcataaaaataaagtaaaaaaattggtaggagatggaatttatggcttgaaaacaaatataaataggtgttggtgcctcactctactaccacctctaaaaaaccaatttgcattcctaaatagaataaccattaattttcatgcaaaaatatctaacttgttgcgaaacctatttcccccatcaattgttaagcaagagccctctaatttagaggatgttctgcctaatgagtatccaactctgtacccccaatatagaattttgccgagttctaaatctccctccccaataacaccaacttcaaacatttgcaagaaagaaccagattcacctcacccccacaaataacaccaacttcaaccatatacaagaatgaaccagaatcacccacatctgactcctttgtggaaaaggaatcgagttctccaaccttaccgtgagttaggaaatatggaaaaatgaaatctccaaggaaaggcaagtgtaaatcttacctcgctaagtaggctgacaatgtgaaactgaagttcctccgtcgcaatgtgtccacaaaatctgaaaacctccactgtgctgcacttaattgtagaacagttgtattcaagattcgtcagctcctagatcagctaagcattattcttaatggaatacagagggttgttggagacatctttgtgcaggatgcccatgccaaagaacccaacaaagtgataactattgactaagaaatgcctaagataaataaaaagggctatagtacttaaaaattttgggtatagatattggcaatgcaagttgggtttagataatatttatatgtatatatatagagagagagaatatctgtaaaagtaagctttatactgtatagaaatgtatagaagatcatatatgttgagtgatataaaatataaaataacaagacctacgtacctcagtcgattctccatttcttttaat

SEQ ID NO: 80502 - DNA, 722 bp, Cannabis sativa
tgttttttatggtaagtcttctgcgtttcaagtaaaaatttccttttttaatgtttttaaaatttaaatatttattaaactaattggaatcaggaaagtgctataagacttgccaagctacataattgatttctgcatatgagcttaattagcatttatttctaactaataaacattttaggaaacttttgtagcagcaataataatttttaaaagcttgtatgttggattgaatatttggattaaatcatatttatttcggtaaattatttattttattgcatatctattcttaattttcaaaaatattgctatacttattgtaaaatttaataaagtctgattttttctttatttatttccaatatttattcattatatttagtagatttctgtatgattttcgagctagaataaagaaccctgctttgtgtgttcagattgtgagatgaacgtgaaaagcttagtactaaacagtttaacgactttccaagctgcaagtcattgcttgtctcttccttaagctaatattttctatagttttttaaagcattgttgttcaactattttttttgttccctggtttctattcttaaaaagtagtaaaaaggtcattaaatgtgacacgctatcttcgggagaaaatttctacgacacttggttcgggaggtagaaagcactcatcaagatcagaaaaggagttcttgttctttgtgtttcat

SEQ ID NO: 80503 - DNA, 2899 bp, Cannabis sativa
tatacaaaatggtcgggatctcgctttttaaaactttcttacatgtttaaaataaactttacaactttatcatacaacaactacaaaataaaatccccagtattgccaaggctgaagtctccaggtcgcaccatcttgacatgtacaatcatcctcaagctctagactcattgttgctatgccttagcctttcttttatatacaaatacaagcaataactatgaatcgacatactcagtaagaaaagcatataacatacaatatattaccgacttgtatttaggcgcatatacacttatctgcaaggcttaacagatgattaagaacattcttaacaaaggtacgacctctgtaccacatgcactacgtaccgctactgtactagtgttagtagggtttgaatcataccccgagtaccactgagtgttgtaccacacgcactacgtacctaattgtactagtattagtaacaccgaattgtaccattaaacatcatatgctgtaccacatgcacttagtattgctactatactagtgttggtagcatatgaatcatataaatagcatgcatataatacacatacacatatacatatacattctatgctactctacctcattttcaaatttaagtgtctcggtcgacctacgtagaaaattacatgctgaacggaggcccttaattttcaatttgaacctcctagctaagttcctagaaggggtgttcataaagtagccgatccaatctaatctgcatgatccaatccacaaagtatgaatatccacacttgtgcggattggactggattgaaaaattcaaaatctgcagttgtgcatgttggatattgattaacatgtaaaagtaaccgatccaattcgatcaacacttatttataaaaaatattaaaaaattatatatataaataacattttaatgtgaagaaaattataatttaaaagtttaatacatataatacaattatatttaaatacttaatagatcaaatatatatatttcattcttatatataattttttttctacatacaattataaacaatattaaacatttctttttacatacaattttttttcttcctttgaaattttttatttactttattttagtttgttcttggagacataaaataacaataatttattttcttttgttgctagctatgtgaaaaaaaatattttttttacaaaaatattaaataatttaatattaaaaagtaaccaatcctaaataactgatccaattcgcacttttgcggattggatttgaattattatacggattggatccaaaaaatgaaatccgtacttagtgcggatcatatgtactatgagcaaaatagcccagattggatttgatgaacacccctagttcctagctaatctgaagatgatgctctaaaatctccttgattcctcttgttttacttagggctgaagggtatggtgatagaggattatgggtgtatgtgttttgtttttaagtctatcttaaacttaatgaaataaagatagagctaattagttttattccactaaagaattcagaataaaatagattgttctacaaatatccactaaaatctaataaaatctctttaggcaaaataccatttttgtcccttactttacccttacgcaaccttaaggcttggaggtaaaatagtctgataccataaccccgcctaatcccgatattccaaatagcacttgtgatttgccccacttgataaaaggttctaaacaaatcttctgtgactctactggccaaatggtcacattttccatcgttactgaacaaaaatcgtaaaaagataaatttcacatattgcatatataatatgcttagaatttgataaaatctccaaaaaaaattgagaaattataactctaatgtctatttcttgaaaataggatccacaatatatataatcacaaaatgcaaataattaatgttaattgcttctctaatccatattctaagtatacggtcatgacattattattttaaaataataaatgtttatttaactatttattttaatctatatattttaataatgaaaattactttttttaagttggtcttaaattaattaaaaattaatttttaactttaatttagttttcaagattaatttttaaaatctatatataaaaaaaataatgtttataatttcaaaattaaataaaaaataatatagtaaatacctaaaaatatcttatttaaagtagttctaaaataattaaatttttaacataaataatttttaaaaagttaattaaataataaattaagtatcctgaactaatcatcttaatttgaaagatatcccaatttaagttgatctaaaattaactaattttcaaattaaatatattttcaaagaatattcgaataactatttttcttgaaaaatctactcagttattaattcgttagttgattcaaaattaattttcaacttaaatatattttctacgaaaaattcaaataattaagtatgtagaaaaatctaattagttataacttctttatttaattacatatcataaaaatacatatagtttatcatcaattaatttcattatactaaatgtatttttttaaattaatttcaaaataatctgatgaaaaataaatttcatatatcttgaaaattaattatgttaatcaattttaattaggttaaactaatataataagcctaatacttaaggcaaatggatcttcatagttggggttactcatgtaagtaagtgcttcgttctgtatgttgtacctactgctaataaccctctaactctcacacaaggcccaaaaaagaggaatctaaccttaattaaacaattgttattaattgaataagtccaatactaa

SEQ ID NO: 80504 - DNA, 2037 bp, Cannabis sativa
aatgtaaatggaaaagcagaacataccatttaatatagaagatatcttgtttgagagcacattcctcgtagtcagaccaaaaatcgtagcagtatccaaaattgttggttcctcttcagtcagatgaaaaaaaaaagtatatatataaatttatatatattaacaatgtaagatattttctgacagcaaacataatccacgttatacaaattccaccttcttaggccgttcttaacttcacagaagtgaaaccccaaaagaaaaattaaacagaatttaattcttgtttaagttatacagccataccattatctaggacgggtgccactttcggagttgaaagagcaaaagcaggttgatattcttgaggagggttttcttcttctgatgaagtagaatgtgaaagtatcttaacgctcttctcagagaggactctggaaatgagggagtcgggactaggagagtggaccgagaagacgaagtgtttgagagctgggtcgtcgacgacgagggaggtggtagaagtagaggtagaggtagaagaagaagaagaagaaggtttaggtggtttaactttcgctttggtttttgcagcggtccggaagagagagctgaggtgtttggtcttggaggcgggcatttgaatttcccttctcatctccatatcttcattgctctaataacctttactttaccgtctttgctttttttaattattattattatttcttaaaaatatttttgattttgtgttttgcatttcattaagcatgttattttattaaatgacaaattaaaccatgtatttttaaaaaatatactagtgatttgagctaattttttgtcaaaataaaacttaataataatctcatatagatgtgttgtaataaaactagttacattttctacatatattcgtgctagaatttgtattcatattggttattgttattctaatttttacccacttgacgtgataattacatgtggttttattcaactgactcttggcataacgtggagctttcgggcaagagtaggtcgggcagttcccacataagggtttttttctttttttttttttttgataagtagttcccacataaggttgttattaaagaaatgcatattaccttccaagaagcatctggccggactaccaatatgatggccagagaaagggaaaatcaacataccatgcaagattgcatctcgtcagaaagataagtctcaaagagagcctagtcaggctatcaacacctggccagggaaatagactcagaaagttcgggcaagaccaaacaggcttcgatttcttccttaacaaactccacgaatatctcaaccaacatcttacaaatacgtgtttaactcttcagctcaaaagtataggagtttcaaacagattgtaactacgccctagaatagagggatatttactttttgttgctacatttaaggagctaattgtaacaatcttctccctataaatagttaatgaattcatagggggaagggacttgaaattattatctcgactctaagagtacttttgtgaaaaatattctctgtaagcatcttgagagttgtagctagaattcactttgtcttctttattgatctgcgcaacattatctcaatatcaatacaacaaaaaggagcgtaggtcattactaatatctaaggggtcgaacctctataatcctggtgttctttttatttacttattatttctaactctatactggtgattaattagcatttattagactctgagtcagttggcaaattctctagtcagcattttagtgctttcattgagagcttcaaaatcccatgaagatctcatcatttccttcctaataatcaccatggttctaacaaggataagtgcatccaccaaaccccaagatctgatggttgtggaccccaatgttcaagttccatccattgttgaaaactcggccaatcctgtccggccacctcgggcaagcacatcaacagggtcccaagccgaaggcccaacaaataccgggc

SEQ ID NO: 80505 - DNA, 3462 bp, Cannabis sativa
acacttacaaccaaaggttttgaaagtggagtactcgggtttagtgtgaaacagtgtttccaagggagtggactgctgcaataagggagtaggaagtctattgtgcaagtatacagtagttctaaaggcttcatcccaaaatttaagtggtagggaggcttgtgcaagaagagcaaggccattctccacaatgtgcctatgctttctctcagcaaggccattttgttgatgagttgttggacaagggtgcctatgatgaataccacattcagcaaggtagttggtaaaggatctaaactctcctccccaatcggtttggagagttttaatggttttaccaagctgtaattcagcttcagccttaaagtgttggaaggttttaagggcatcagacttgttcttgagaaggtaaagccaagtgaacctagaataggcatcaacaaagtggatataatatttatagccattaaaagatggtgtatgtgatggtccccaaagatctgagaccaccaactgtaggggttcagaaataatagattgagatgcctttgagaaaagaaatttatggattttaccaagacagcaggcagagcaaacagaaaattcagattctttatttacaccagaaatgttacaagatttcaatacgttttggactaccttctctgaaggatggaccaacctattgtgccatagagtaaattcatttggtacattgttgttacacttaaagaaatttgatactttgaaagtagaaccatttagtgtagcaacaaaggtacatttagaacttggttgatcatggctgctggaagaaacatttctggtttgctgttcactttgttgctggaagtcttgggaaatcagagaggaaatggggcttgagtggacaggtccaagttggattggtatataggccattcttgtgcatccccatcagcaaaatagaatgactcattttgtccttaacataacacaaatcagcatgaaactcaaaatacacattattatcctttgcaaatttggcaacactaatgagattctttgtaatttcagggacatgaagcaagttattaagaactaaagaatgagatgcatgctgaggtgtaaaataagattgacaattatgctttattgacaaacctgtaccatctccaacatgcatttgatcttgtcctccataatcatagcaatttgctagattttgagcttgaggggtacagtggttggtggctcccgagtctggataccagttgggatcacttgaactgttgttggtcgtgagattagcttgaggtttctgtaatccagcaccttgagaactggttcctggttgagctcctgagaaagacttgtcaaaacggtaataacagttgtgtgcaatgtgaccaaaatgcaagcacaactgacactgcaccttattgttcaaactcatagcagatctactagattgattgaaggggatattacctttgccaccaaagttctctgttcgattaaaatttctacctgatgcttgattaaacagccctgagttgccattttattgtgtgtttcctctcccatattgttgttaaaatcttctccaggcaagattggcttcgatcaaaggatccataccaagatcttgatcattcgaaataaggttcgcactaagatcgatttccttccccgacttttcgattcttgattccgaagcaagaaggagagcctcgatttctccgacggtgtactgctcagttcgagtattagtggatatgacgaacgtatcatattcactaggaagccctttgaaaatcgccgccacatgatcacgatcgctcagaacttctcctacagaggctaggagatcgacggtctgtttcaccttcaaaagatagtcattgaggctgagatttcctttcttcaggttctgcaatttagtcctaaactccagaatctttgatgatacttgcagagtgaaatgtttctctaaagttgcccaaatttgttgtgatgaatcgcaccctaccattcgcgtgagaagaccttctgtcatcgatgacagcaaccaagaaactaagagttgatcttgaactttccagctgatgtaatcttaattgactctgccttgtgttcgatcttctggagtgaggaattcagctggaggtggatccttgataaacttcagtaaccgattacctttgatcgcagcaaggacctgttgcttccacaaaagaaaattttggtcattcaaacgaattaaaatgctatgattgaagtaaacaggttcttgagatcgaggttgagttgcttgaactccattaacaccagaggtgtttaagtttccaccagcagctcccagagtagccatatttgcattgagcggagggaagtgctctgataccatgttaaacctccgatcattgagctgtaacaccatgaaacatgaagaacaaagttgcagaaaaagagagatgaaggaagaagaaagagcagagaaaagatcagtgaaagaatggagaaagaaagagttatctcattgatctaatcaatgtacagccttatatacaagagtcataacagaactctaaccaaaaccaaataacagaaagccaaactgaaataacagaaaaataacaaaccaacaaaacaaactaacagctaatcaacagaactaactgctaacaatttgattggtcttaacagattccacttattgtatagcatattctcatccatccatgttattaagtttccaaaatagaaattgtaagtatcatctcatgagaaactttaacgagtgaatcaaagaacttaatgaacacaaacatgagttcatgaatactaagaatttagatagatctacttatgggcatcattatgatataaattactcttgtttgataaataacatgttgatgaaggatgtttatttatatcatcctagtcatgcataatcaaattatacatagtatctttattaaatgtatatccacatatatgatctgaatcaaaatcacatgtcactactatttagtgcttggtaaaccgtatttagtaattttgtattaaatattttatattttaatatactaataactagttttattcacatggtatgatcttaattctcttttactcttacaagattatacactctctatatgaataaggagttttcttatatttattaattaattttcattaattaagatattcatttataatgtatttgtatttatatatttagtaatatattattcattaattacttactttcaaggtataaatctaaacatgacatataatagttcttatactattattaaaaaaatggtttgcatgattttctttcaaaccatgtaaaatttctaacccaactttatcgtataattaatgatccacattcatgaataaactacatatccattcatcatatataacatatatataaatatataaaattacttaacacagtat

SEQ ID NO: 80506 - DNA, 3574 bp, Cannabis sativa
tgtacaactacaacacacaataatataatttccaagaatcgacaatgaacattagaacctgcgaattcatatttatatataaccgcaatctctcaagagaaggagaacttaacatttgacaacgacaaaatctttagtaatggaaaactatatgaatgagaagtatccaactttacgccattcaactccaaaatagtcaaatatcttgcattgcctagtgttttgggtaagcagtagtagtcaaaactgtaaattcttcttgagaattcaggaaaattttgtatagtatagaatagcaacttgtcaagttagatgaatttcacaccataattgacctgttgctgatttccttttgctctgaaaaagcaaaatgttttaaaagcatacaaagcacacaatagtagccttggaacacaatgatatattccaagaacaattcttggatttctcatgaagttccaagtttcaattcagcaacttaggaaacaccatcatatatgctaataaacttcatatatgaataaaaataaatcttccaacagtaaataaatagtgcaatatcagcaagttcacaagcaaaaatttatcattcttgtgtaaagtagtaaaattcattaataaagctactaatcatgataacaatctcaaaacagactaaagtaacgaaagagagtcatatccatattcataatcagcatatgcagtattgtaaagaaactaaaatatgacctttttattaatagacaatgtttctaaacaaggtgcaatcaccatcaaggcatccttcaagtctgactctttcccgagctcatcagtaataactctgagatgcttccatttgagcaaaggatcacgactacatatattcctcaagttttctggccagatgagactacatagattcttcaaattttcaggacagatgagagccttcatatgcacatttacgaaaacatatagattaatatatagagtaacaatatgaagttgaaataacaccacataattatgtaaatcaaatatataatacaagtaatgaacataccttgtatgtgctgacatgcaatgttacagtattccatgagcaactgagattcacaagaaaaatcagcatattgacaaaccattctgcgtcataatctatctgtgtctcgcgaattataatcttcccatttaatggactagatgacttcattgatattctaaaattaagatctccttcataacaaatgtatgctaattttggagcagattcaattgtaacaaccttcatctcaccaccatcatacaagtaatcaaaattctcaaaatggaaacatttcaagtgttggctcgagattttaaagtcctcagacttcagtgtattgcagtagctcaaagtcaaattctcaattagaggaaaattcgaaatgagagcttcaaatgacgacggttgatggatgctaccgtaaaatttagttaatgacaaatttctaattttcttgcaagaagagacaataatttggtcaaaggaaactccacatagtaccaaagattcaagatttatggcatcaacatgaatatgagtcaaatcatcctcaaatgattcataaacaagttccatgaacttgaggctcaaactctccaagcgaacacgaagaaaaccgaatctatgatcaattaaccgcaatttctcaattgaaaggcaacccaacaaaaatttaactaccacatccttcgagtcctttactgaattatctgaatatgaaacatctttcaatgtcaaagttttcaaacatggaaaactatatgaatgagaagtatccaactttaccccattcaactccaaaatagtcaaatatcttgcattgtctaacattttaggtacacagtaaaaatcatagctgccatcatcacacactccaatcacagcaagacttatttcgttgaccttattctcaacagcaaaacctaaccatttatccacgagatcgaccttactactttgataatgatcaatcacatcaagcttaaaactagtcatgactgaatcagcgaaaaaatacacgcctctcttgcggttcttcaaatatttatggagataattataaaacttatcaacatcaccactattaaaatcggaaaaaacgaaagagagtgtgggaactgaataccagatgaatttccaacgctttgaaagaatacatgtacgaaccacatcttcagttgggagaaaagacataatatgatgaattactgcatcaggaagtctcgaaattctgtcgttttcatcaacacccaccaatgatgatggtggtggtggttgtggttgtggtggtcgtggtggtcgcggtggtggtgattgtggtggtactggtagtggtagtggtagtggtggtggtgttcttttagaccttttcatcgcctcaagaagacgacctctttttctcatgttcgtaatcctttgctcaacaatggaagaagggattgagatttagggctcaacaatggtgaagtgacgaaggagaagagaagctttggatggtttgatttggggtctccatttctgtttggaactgtaacaggaaattaaagtgggccattgggcttatttactgaggcccaaataaagatgaaagcccaaatatctttagggataattagatgaaacataaatttttataaaaaaattggaatttgtaaatcaaatttccaacttttttaactttttattatggggtaaattttttttcaaaaataatgtgtaagttttatattgtgtacagtgttaagtttttactaatatttcacggttgttttttatttgttccactgttgttttaattattctatttcgttattttacggctattttacaaaaagacagtatttttgtaaaaaattctgtgtgacagtaaaattataaatttttgcctaaaatctagtatttatgtaaaaacccctaaaaattagaggtttaacataaatattgaatttggggtaaatattacaaatatactgccacgaagaatttacaaaaatactgccctggcccatttttttttcttttatactgtacggacaaaaaaattgaactaggatgcctccgccttccaatccaacgaatagaaccacaaaaaactcagaaaacaaccataaattccagcgatatgaacaaaaaaaagtgaaattgacaacaaaacaacagcaaacagattcatcaaaaccaaaaatcaacgaataaaaaaagttagaaacttaaacccaactaaattcttttaaatacaaaattaaaaataatgctcaaacatagatctggaaatcaaaaataaaaatgatgtgtagcttctgaaattggtttttatatacatgtgtgattgaagtaaatgcatattaatatacataatttcttaaaaaataatgctgattagaagttaaaatagaattttaaaatatccaaagtttttctagagtcattcttggttaattacatgcaatttattataaatcaaagaaatagataaaatttggacacccaaataatagctgaaacactgaaacaaaaagatctagcgtcaatggttttttagagttg

SEQ ID NO: 80507 - DNA, 2502 bp, Cannabis sativa
atagcaaagtttgaattgagtatgattatatttgtatttttagtgttgataattgttatttgaggtttatggttttcaagtggttggttgatttacaattgggtgtatgacaatgtagttcctagaatcatttttgataaggagcatagaggaaaaatggctccaaacttgtaagctcactatagcaaaataggaatttagctgcgttgggtgttaatccttgaagttgtgtgtgctttgtattttgtgaagattcgcatcactatagagtgggatatgtggactaggttcctgttcctagttaattgaatactctggttctgctggagttttagtgcttatcagtgtttctgactttctagagcaaaagaaagaagacagaagaataaatagctaataatagatgaagtatattagattaatcgaaacatatgcagaaaattagtggtttaaataatcccttcatattgtggtaaaatgggttggaaataactagtggagttatttacatattagatcagtatatgagtctctcgacttacaatgcactgatgtttggtgtgaaaggaaatcgagctcatccatttgattttacctgagggttttatttgggaatggggattgtgggatgctgcataaggcatgacaacaatagccaaaattaggggaagtttttttttttcctccctcttatggttttccttccaccttggctgagagagtaggtttgtcataatctattaatcttgtttctttgttggtgctgctgatgtcatgaaccttcatgatggtcttaagtgtttgttccagaggtttctcgacctactctttatataataaattttcagtttagttcgccaccatgctagaaagattcctaaggaggttctaccccgtggaaacggtgtttaatggaaatttagctttagctggtcatgacttatgaccaagaaacgagcaattttgcatggttgacgaatataatttaaacatatgacagcgtaagtgtaatatacgaaagcttcatttaatccagtgtggaccctttatgtactggttcttacttagatggaatcatttgttacatgcatgaacttcaatgtccatgctgcctactggatgttacatccgtgtaatccaatccatgtattgcagttatagcatttggtaagactgaagaatgctatcatgctaaacccttcatctataacttgtaagagatagttctaagtcatgagcttatgcaataccaacggataatttgttgaaatcatgttgccttgtgtgatttatgacgtgatttgtaacatttgctcaaactacaaccgatttttctccttaaaagattattctgtttatctgttcatgttttctgatttgcagcattaccatcatatactttgcaaaggaggaatcaaactgcaagtttgttccacaatttcctgatgcatttatgcctttgacaatctcctttcaaaaaggaagtggccagaaatttcgccagccttgtggaactggcatagactttggcttctttgagttggatgacctgtcaaaagcatcaccaaaagaagacgtatttcctctcgtgatatgtgctgaaacacgcccaccacctcattcagatggacatgtaaatggtacattgcaagatgcatcaccaaatatgcagatcactcaagctgtgcttgagaaaagaaatacagagtccttccaagtcaaagtaattagacaaatactatgggttgatggaatccgctatgagctacgggatatatttggaatagcaaactcatcggcagaaggctttaaggacactgatgggaaggagtgtgtaatttgcatgacggaacctaaagatacctttgtcttaccttgtcgacatatggtaagttcctctttgattatttttaagctattgaatgttaataatcaaatttgaaaagagttactacaaattagtggttttgcaactgtagcagcttgtagattactttcgagaatagagatcagaaagtctcaagctttttatgctcaatcaatcttttaatactggattgttttaataaagttgaatcctgtgcttgagcttgcgtcatctgatcatgtttttaccctctattgtcctctattggatgccttgtgtgatttctgctagttctccaagtactcttggtccttaattaatcaatgttccactgatatgacgtgttctcttttttttgcagtgtatgtgcagtgactgtgcgaaagagttaagacttcagacaaataaatgcccgatatgccgccaaccaatcgaggaacttgtaggaatcaaaataaacaacgatgaccaatgatagaactatttctctctaatacgaatttcattttgtggtatgatttccccaccccacccccaaaaaggaaaaaaaaacttgtgtgcagcttcaccctttttttctttattgtatattacctctaacttttctttgatatcatatggcatgcaaattccat

SEQ ID NO: 80508 - DNA, 3264 bp, Cannabis sativa
tatatatatatatatatactcgtcggaatttacgtaatgtatttagttcaaaaaatatctacttaatattttttatatccaaaaaaaaaatgtgtaaaaccattatacataaacataatatatattaatgactaaaaaagaggacaaaagcaagtggaatgaggagatgtgcaagtgggtttgttaattttgataatacaatttttgttgtgttcccacttatagagagagaaaactatccaacattataggagctacaaatacatagctaggagtatatcgatcttcttagttgataatttgaaaagaaaaaaaaaatgctaattaaaacacagtggcatgcaaatggcaagtgccaaactgtaatgactaaattaattattatttagtaggataatgatatgtaattgagatctcaacgcaataataatatataattaggacagtttttaaaatgaagacacagctctaaagctaaatgagtaagtaagtagtacacatcgattcgtttcaacatgcatgacagtagctagtgacattgacagcagcacacacactattttcttttctcctaaataaaacaaaatgaaatgaaaaacataataataataggcaaaacacacacacacacaaaagtagtttaagatagtgaaaaagaaaagagtgagttgtaattggtaattaccaattaagtaggtgattacgtcataggaataaaaaagaaggaggttttaattgattatttgggtgtgtgattttgtgtgtcagtttttgagaatcagtatctcacctgctactttaaattaaaacaaactctttctagctatatagctatagtagctagctagtggtacgtactctactcatgaatcatcatcaaataaacccaacacccatttttcatgtgacctcattctcttcctcattttcatataactccattacatttcattttttttttatcaaaaaaaaattcaatacaatctttttcttaaaaaaaaatatattatgtaataaattaaacatacaaatatattatatttgtatattgagtaaatttcattttcaacactatcttgcaaaagtaatatattaattgaactcttttttttttttttttttgttaaattatagttccaaatttatattttttaaataataaaaaatagtattatatgtttaattttaatcattataaaactttaataagctgatctaaaaatatgttatagttttattgtttaaatttcttggggtagtttgtctcatgtagttcattttctttaatagttcatggtttgacaagcataccctttagttaaacgaggaggttcatgcacgtgcagcttgcgaatatctgcatcgcaaattcatgtgtaattcttatcattacgtcaaaaaaagtgttatgaccagttttgttatattttttgcatttactagtttagaaaactaatattgagtcggttatattagaaagttagaagttttttttgtttttatattttcaagcagtttttttaaaaatttatatagaaactcacatagaaactaccagaacaactatcagagcaatctaaacagtaaattttttcaaaaaaagttaaaaataatatatagggtaattaaaaattaaatttgatgaaaaatgagttcataataggagaattatctcatataatattttttagctcttttttttctttcaaatttacagtttaattttttaaagtggtttttccaatagtttttgtgtgagttactatacaatttgttattgtgatttaggttgcgccgctagttgtaaagagtttcgatataaaattttataaaaatacaaaaaaaattattttgaagtgaaaatgaaaaaaaaaacccattataagatgatcaataacttttacaaaatataaactttaaaattataacatttacctttatttatactacaaccatgtttagttatatattattattactcacgaaggcacctgtggactaggggcattagtccttcaaaaaacattatatacttttttaaattttacttagtattataataaataattacttaaaaatataattttaatatataataaaattataaatatatttttttatttcatattattatcaatagttctatattataaaataataattatatgtaattatttttacttcgccccaagaaaatatatattattttctcataatttgcttctccactctaaattccctctcatttaaaattgtaaaagtaaacttaaaactgtacaattaaggaacaaagaaactatacacttttcgtgtacgtgtaacagtttgcttgataaaaatgtacttaaccatgcataatttggtttgttaaattaatggctgatataatagatttttatttcgagtaagtaatgatgattttttttttggtctggaagtgttacgaatttagctatgatgaactaaataccaactctgtattgtaataaagaatttaataatatagctattaccatcctaagtaagctactacaattattacataggcctatgatcctatgaatcgaccatatataaatatatagcttgaataaaaaatggccaaccatgcataaaagtcttctttcaataattaatattttacgtgcgtacgctatatatatatatatatatatggccttaaataataaataatatataagtgactgtatgaaaaaattcatagatcgatatatcgactggaaaaattaaaccatttccacgtatagggaaaaagaaaattataaattgggaatatactatgatcatatattgaagtattcaaatatcatgataagtgtataattacttatttggtactatactttcacatcttatttacttatttttagtactgaaccatcaatattattaattctttgacttttatgttacgatatcattatttgaatcattttgattttatttatattctattcttcttatagggctatttattctattttatatccatttttttttatatttaatcaagggtaatatattataattaattaataagtgtccaactcctacttctattaattaattaatgggatcatataggcctagcttagggtaataattaagttaggttcctaattataaattaatttgtctataattataagagtatacatggtttatttaattatatatagggtatctacagcatcagctagatattaacaattttttttctttttctgaagattaaaaaagagt

SEQ ID NO: 80509 - DNA, 847 bp, Cannabis sativa
tctataatataatatagtgtggtcaaatatgggaattaatgaaactatagataggattcaaaaaaccataagaaaacataatagaatcaatgggttgatcattttctagctagctagcacaaatatgcacagatgtcatttcttcatgccataccacactacattacatcctcaaattattcatgatgtttaaaatgtctccctatcacattacgaaaaatgactcaagaataaatgtctaaaagaaggaaaacaaaaatgaattatgtatttctatatataaatataaaaaaatgaattatatatattaggtaaattttgtatcattttataaatataaacaaatgtttgatgatgatttataatcatttactaaataacaacatttgtatatattttttctctttggtttaatatatattctgttatccaaaaatttcactactttttcaaatgttaaattcattaaagtaaataacatatattttgtagtctgaacttcttataccttattaatgttatatacattaagattgatagaaataaatagttacaaaattttagtactcaattttttctatataaaacaactttgaaatatatattatttatttatttatttaataggaatggaaactttattagcaagaagcttcaactattacaatagataataattcagttcgagcattattcttagtgaaaatacaaaatggataaaaacaagaagtacgaacgatgctatgaacagctttgtttacagaacgtttaacaaaatgaatctcaataaattttaaagaatttacaatatagtatttatttaaatttaaaaaatattataaattat

SEQ ID NO: 80510 - DNA, 1835 bp, Cannabis sativa
gtagaggtgtggagccacactgtaaccccccctctccctttttgtccattaaaaaaaaccattttgaatgcagaggatgacaactccaaccaacgaccaaaaaataaaaaattattgttggagtcaaaggtggtatgaattatatttgtgcctgcactctgcaggagtatgagttttatttttctagtttttttcccctgaagtttattgggatatttatttatattgtttatacgtacgggatagattattatattattttttagaaaagaattattataaattaaaaatatatatataaaaaaaatctgaaaattataactaaaaacagaattttatttgtttctccatatttatctctattttatttattcaaaatcaacctacaaaaaataataattatcagtaaatatcttccaagaaaaaattaatttaaatttcaaatatgtaaataaagagaaatatatatatattttttttttttttaaaaaaaaaaaaaacttttagaagagctgcgaaggaaagagtgatcaatttcttctttttttgcttaaattgatttttattgtttgccgtacaagtttttgaagttgcttataactctcgtctttgaagtttaagggagtgatcatgacgaagaagttagagataccagatttgaatgaacttcccaaaaacgttgaagtggaagaagatcatcagcaactaacaacaaagtttactagtctacacaagaaggcgcaaaggaaaccctaatgataattacttatattcaccaccaaataagtggataaaagtaatttcagcagagacgaccaaaccagctgttgatgtgataagcacttcaataaaagttgaagctaatagctccaccaccgcatgcagcagctgccacatagattttgaatcttcagcacgccatagccacaaccacaacctcagcctcagcctcgagtgtgcctcacattataagtgtagatatatataagattcatgttgacacgttgtatgtatatactatcattaattagtaataaaatgtgtacacgttagagactgtcagttattttaggtcaacctattagtattactatctgcaattgttattttttagttacatattttaggtcaacctatttagtttatgtttataaattaaggttttggatgactgtttatcatctgcttagttcttatttctttctcttgtaacgagattttttaattaattgatttttttttttttttctaaataactcaaaatacattaaaatgatagaattttggtgagtgcattgggactcacctcccaaaatcggagaaaacccacctagccaaagtaatgaggtttctattctttacataaatggatagaaaaagatagattgatgcggaccaaaaattttgggggaaaaactttaaatcttaagcatgtagaagatttaatgaaaaaaatcaattttcatttagttgcattttaaaatatagtttattatcatccaataaatgacttttttattattttggtcgaaagctaagagattcattaataaatagcatcacctaagatagagttttgaatacatgatgtgtagccaagccaccagatcttactattagtagtttttaaagtaaaattgacaagagaatcagccactttaacatatctgaaacaaaaactaaaactcacaagaataaacttagtacataaattcctaattaatgtcgttaagaattaaacccaaagaagaatctaaaactagagaatgattgagtttatgaaccaagctttaacaatttgattccagctgaatatggagaatatcgaactagat

SEQ ID NO: 80511 - DNA, 1402 bp, Cannabis sativa
  modified_base (26)..(61): a, c, t, g, unknown or other
ataatatcttaaccaagatcaatatnnnnnnnnnnnnnnnnnnnnnnnnnnnnnnnnnnnntagcatactttgccaatgttctggtctagtgggggaaccacttcttcctcttcctttatcaacacaacttcctgccgtcaggcactttcttgtctggacctccaggagtgacaacgaccgacaaaggatcaacaaccacttggtcaggggtgtgcgtggagtccagcatggcaaagagatcatccatgggtttagatgtaaaaaataggaaaatgtggagaggaaaagtcaaacataagaaatgcaccaagtgtaaacataaaggcatagcaaacaaggaaggctagtcctaccccgatgtcatatatttgtccttgaaaattcataaattaaagagctggtgttgtcatctccgaaaatctctctgagggaagaaaacaacttgaagttacgtagcaatagtgattcaataagataggaattgggagattagaactcattttagatcagcccaggaagccactcatgtttgaaaaataaatatccttttatctattgccccaccgagtatggggcattcagaacctagatatcctcaagtcaaagccgactggccatgagtgagagtattcttgaaatgaaggaacatattaaaaatttaacaggggcttacggacaccaaatgtaattgctccaggggtcctggagttggccaccagaaagggaaaacgtggcccgtggctatagactttttccttgtcttctcctagtttgtcttgtcagaagaactttgaaggtgggcgtaatggttctcctgctcctttttgtacctgtacatgttgtacttatcctcatctattgctatgatctttggccagagcttcttctctactctcgaaatcctagcattgggacatgataccttggataagttgaagtcctcaattgtttgatggcttaggatgagtttagccttacggccattgaaggtagtcaccaagtcacccacgttcaactccctcctcataaccagcgaatactttgacatgatttaaaaatagttgagtgggagccattttgtgcaaaggggggattcgagcccaattagtcaagatgtctgggcattcgaaggctttgaaccctgatgaaaggaaaaatctatgatggtattccgtgacattcttttgggagtagaagggaacaagagtttcattggctggatgggcttgcagcttataaaacccatccttgtacttgtcaccctttttgggtatagataatagttcataaaaatacaaaattttgttggctttggagtgggccaacccctggcagcatagaaaaagaaaaggcctgagagcaggcggtaagctagaaaattagttgatacgaggctagtcc

SEQ ID NO: 80512 - DNA, 998 bp, Cannabis sativa
  modified_base (610)..(613): a, c, t, g, unknown or other
cctcttctgagggtcagccctgaccaaaaacagtagttgttcctaccttggtgccaaaaaatgtactcattaatgtgcaaagaagtgaacaaatttggcgcattacaattcttgtgctaaatttggcacaatgattcaagatttgcataaccataaatgcacaactatattatttacttttatacccttttattattttattagtatatttagctataacattaattatgaactctttatatttttttttattattttacataataaaattaatggtacagttactatttttatatactttaataaaaatattaaatttcgatcaatttttgttattgtgcattggagtataatactaaaaatcgatgtaaatatatcagaattttttttataataaatataacataatttttacattttccactgtagtctaaaaactattaattacttcctacctaatacatattattagaggcaacaattattacccttattattcaagggatacttacataacacacttattttttgtaaaaaaatttcatttttacatttaatgaattttttgttacatttttatggtttcccgtaaaaacaacacgaaaacaannnnaaaactacataaaaataacatctaaataacatcaaaacaacaacaaaaaatagcatacagataacaaaaaatcaacaataaaataatatgaatacaatataaaaagaccgtattttctgtaaataaaattaaaaaattcgtaaaaatatttaaaattctgtgaaaccgtatgtttttttattgtttttgtgtatttgtgaaattatcccattattcaatttggaattttgatggcccattaacagtaacacttgtcgctagtgttctcgctaatattagtggacgacactataggctccatagaggatatgaacaacaaaattattttaaataaataggtttattatattaattatttgtagtataaatattgatattaaataaa

SEQ ID NO: 80513 - DNA, 1365 bp, Cannabis sativa
aaggtttggtccctcagctctacagtgggcgagaagtacaaagaggatttctggaagttaactttttgcccagtggccctttcgtacacatccaaaaccactttgatgacattacaagagttaatggaagcttgacagaaaggaaaactgtcatccgcaaaaagaaggtgggagatggtcggggccctccttgctactttaatgccaggaagggacttattcgctctttctgtcgcaggagagaagagaaaccttctgcacagagaaggaaaaggtagggcgagagagggtcaccctagcggattcctctagaaggggccccactatttagtgacacgcagagaagtgcgggtcactaaagagttgggagtgatttttagtgacatgcataattagactctaaacattaatattagtctcatgtaatgagagtcactaataatatggagtgtcactaaagagtaaaacttaatttttttttttatttttattaatttagaaaatgctagtatatagtgacacaccaaacgcgaatctataaatatgtccccacgcatttagcgtgtcactatatcataattcttttttttttaaaaaaaaaatatagctctaattaataagtaaataaagaaaataaaaaaaattttgataataataaattcctagttattctcgccagtgtttgaaaaagggacagtctccaggcttgtcattaatgacttaataattaaaaaaaattataaataaaaaaacttaagaaagaacatgtaataaaaaattgggttgtataatatactcgttaatgcatctttcctttttaaatttttgaaatcattttgactaaattaaatattaatttcattaaaaatttatataaaaatataattctgacaataaaataaataaagtaatttttttttatatattcaaaccctaaaactcagctatctcctcaaaccctattcatcttctttcctaaaaaaaaaacatttcagtcgctgtctctttctctctatttatctttcgtatgaagcctggaccaagcaaactgcgtacatccgacgaccaaaggaccaagttctagtcattggtatctctccctctctatctctttctgtcgtacgtgcgagcctttcccagccaaacggcctcattccggcaaccacacacagacccacacgaatccagaaacaagatccatgccccccaaaatgtctaggtccgagccattatctctcgtcagaactgtcgtgcctccttgcagcgattaatggtagtcgttgtttgctcgtctatttgatggtagtcctcttcatcaaaggcaaatgcagcggacgtgagaagcggtcggtgctcgcctgagtc

SEQ ID NO: 80514 - DNA, 1427 bp, Cannabis sativa
ttacaaaaaatggtgccttatgtaattattctttctttttaagggtgtgcattgtagaagtatttacaattttttttctttctaatatggtaaatttaaagaataaatattataataataattaatcaatcataaaaattattatgtagtgtgataaataaagaaaatgtaaatttattgcatgttaaatttattccaaccaaaattgatataatttgacacatgcgctaaatttgaaatatatttttcataaccctatttatttggtgtttttcttagatgtgctataatgcactcctcttatgtttgaaaaaaaatctgttcttcccaatttactgtccctgcttgtccaattatttaacatatggaaagttatatgtatgtgcattgttatttaagttctatgatcaattaattagtgatattttttaaaaattattttatcaagttatataagacatgatatttaattatactaatagcaatagcagtataacattaaagaatatactagacactaataataccttttagcagttttctatatttataccccacaaacttataataactacactccaaacatataaacatatttgaaagggtaaatactattttaaattatgtgttttgtaaaagttatatattagaccatctattttattaaatgataaaatagacactgtattttctaaaatggtacaaataggaccttgaactaattttttgtcaaaataaaacttaataataatctaacctacatgttttatgataaaactagttaaattttcagcatttattcgtgttaattaataattccttttatattatttttatattctctttttgaataatttagtgacctctaataagaaaagttgctaatatttattgaaaggcatactaatagagtcatataggaattgtggtaaaaaaaatagtattatttgattaattaattgtacaattagatatatttaaaaccttaattttatatgtctgtgttcataatatttaatctctaagtttcactatatatcaaaacaaaaatattgcaaaagtatttaaataaaaaaaattgcatgtaagacaccttatttgaattttttttttaataaatagctaactttccttattaggggtcactaaaggaattaattagttattagtattaaataataaagtgacacctaataaaaaaaatgtcaggatgtagagacatttttagtgactctacctaacactttttcaattttttttttaggtggtcatgactatttttttttcctagcaaaaaagaaaatactatttttttaatattatacattgcatctatcacaaatataaatataaaaagttataattatgtccatgttgttataaatagtattaattatgtggatgtccaaatcttttatttattacca

SEQ ID NO: 80515 - DNA, 3360 bp, Cannabis sativa
  modified_base (457)..(459): a, c, t, g, unknown or other
catataactctaataaaaaagtgataataaaagtataatatcttataattttatttcatacgtatccttttaaaattattacatagaaaatataaattacaacatttatactttttatgtaattttaattatcaaaataccacttacactatcacttacacaatcagatgatagttgttgcgtagttgcacagtagttgcatcagacgaaggtttcaatcaaatgatagttgtagggtggttggttgaaagttgcatcagacaaaagtttaaccgaagtttgcatcagacaggtttcaatcagacaaaataatattttcatgtacataactctatctgcatgtctctttataatttaatatgaacaaattcaccattagaaatttagaaaacaacaaaaatacattatgataaacattttattatagtattgatgtaatttttttggattatacttnnnttggattgtttgggaactccagttcaactttttgagatctatatttcatggatctgaaaattaaagtcagtacattaggtttatgcaaattaaattgaatttttggttgaattttagttttgaagtcgtttttctacactttttttttttatgaatttgaaacaaccactgttttgattgattctgatcgtcttctcaagtgaagtcgccagaattaatggtggttctctttctagttgaattttcgtttcggttgcgttgggttgctgcgtggttgcgcgatagttgcccaggatgcatgaatcctgggttgaaagtgtgtgtaagtggtatttgtgtaatttttttttatttgggctgtatatttgtttatttggccagctggaagtacttttgtaatattgttactttttttggttaaaactgaaaaaagccctatttttttagctgtgaagtgtcaattaaatatgttaagtgtcaatttagaaacatgtgacgatatatttatttagcttatttaatacgtagtctaataatatgtcgtcacgtatttctaagttgacacttgatggccaaaaaagggtacgattgtaacagaatcataagttaaggtatttttgccgacaattttttattagggttatatgtgtaacaattataaatactgagcgagtttcgccacaaatgttcccaaaaaaataataaaaataatttttcgcataaatacctaagtttaacacatgattgcatataaatattttagtaagtacatggtcgttaagtatccatggcaatccctaattagtcaattcattaaaattttattttttatttaaaaattaatttaaatatatcaataacaaaataacatcagataataatttgaaaaaattgatctcttagcaataccattagatcctaccatcttatccttttttagctagtaggaggttttagtatgtctcacaggttcatcctcatgctcccaggtcgctccaaaacgaactagtccaagattttctcggaaaatttgtgcgacatgaacctgggctgaaaaaggcaactccacataatcattatatggcactgagaacgtagtatcatatatacctttgtcgtgtcacaccctccataccccactaataatatccttaattagcagaagtaaccttaccaccagaagtatcattggtcctcccctgtgtattggtagccggagatgatctaagatgttcacccccaccaggccaccactctatcagtctgttcctgagccaaaatcattcttctctaacagagcaaaaccatttttaagtcgagacccatcccaaagccattggccgaagagaggaacacttgaaacagaacatagagagtagtttgtatttgaaataggccacaatattttttcttgccattaccttcaagcgacacaccagtgatcaaaggaagtcgaatattgatgcgagacctgaatcttaggaacgagtttagcaatatccccttctttctaaccttatcaaccttgacaattttcttaattttcaaggagaactccatgcaccttattagggacactgttctgggttgttattaggttgttactgtctgtttcagggtagttagaaagttgttataagttgttatcagctccttctcttttctttcttttctactactctgatgtgtataaatatagcagctcttgtactcagaacagttgatgaatacaacaaacactttcaatctctttctctgcctttcagtctcattttctctcttctctgtttcttcttctttctctatctttctccattgttttctctctggtgttaagctatgagtagaagaactaacaatcctaatatggtatcagagctcgaattcccccccccctcaatgcaaacatggagactgttggagcttcgaatcactccaatccaccgaatctgggaaatacagccaactcctaccctgcttctcgaggaaatcgcactcgtgcgacagatgagttctctcctgtatatttttctcataatctctctgttaaactcaacgatcacaacttcttgctctggaaacagcaggttcttgcggccatccgtggcaatcggctgcttaaattcattcaagatgtagctcctcctccacaatttctgtcggatgaagatcgggcatcaaagacctataatccggagtttcttgattgggatgtccaggaccagctgctggtttcatggattctctcttcaatgtccgaaagcctattaacaagaatggttggttgtcatacagctcgccagatctggtccactcttgagaaacatttcacacttcaagtttcttccaaaattcttgaattccgaactaagttgcaaaatctcaagaaaggcactcaaccgttgaacgattacttactcaaagttaagcaacatgtcgacttactcgcctcagttggtgaagttttaagtgaccgtgatcacatcgcagccatcttcaaaggtcttccgagtgcctatgacacctttgtcatatctaccaatacaagaatcgaagggtatactgttggagagattgaagcattgcttcttgcttcggaatcaagaatagaaaagacagatcaagaatcggaattacatgtcaatgtggctgtttctgatactgaccaacaatctgaagccaatgttgtgtatcaaaatcgattcaaagctggttttccacctggtttccctcccagacctccgctgcaatttggtactttttccccaaatttttcacattccagaggcaactctcgaggagcttcactttaccatccaactggctttgttccacggggatatcagtatccgttcactcagtataaccactctccaaatccccaggctcatcgtagcagca

SEQ ID NO: 80516 - DNA, 1771 bp, Cannabis sativa
accaatgcctccattttcaccaataagtttcaaaaggttttctataccaaaatttacaacttcaaatcaggcaagtgattcaagtgaaaactgttgattgagtgacttctttcaacttacaatcgtttactatctagacctgactcaatatatatcaatatataaaaccaaaactgatcatgattttaccaactagcatagacaggagggttgtctacaccaagaattcatgctttttagtaggaaaataatttaagtgaataaaaagtctccagtttaacaagacaataaatagaaaatacctgacagttacagccataacactgtccccaggagcaatcaagttataggcataccacaaatcgtcggaatcaacagctaccatctgcaacatcaccaatataaggatttacagaagaaatttataaatatatataatattcttaatagcaataatgaaaaacaacgaaccttgacgcttccaggtccgtttcggacaaagtccttgcggacgattttcatggttgtttcggagatttgatgaagactttctttttcttttttgagcaagcgatgtggagttaagttttttttttttttttgtcagatgtggagttgaagattaagctaaaattgataattttaattattattatggggttttttatttttacactttaaaatatttttttttgtatttttacaaaattctacataaaaattcttattacaactagctctgcaacttaaattgcaacaaaaaatcctatagattccctattgtaactagcagtgcaaccactctagaaacccaaacagtaatttaaaaaaaaaattataaaaatagtatatggggtaattcctcaacaacttttaaataatttcagaggtaagttgaaaaatgcctcttttattaatctattaaccaaatttacctctaatttttttttaattgaaacatactttttcacatggagagtatcttgaagttaaagaggcaaaattggtacaatatttaaaaaaataggtaaaagtaatagactttaaaaaagatggtataaatagaagagtacaatataaaaaaagtatagagtctaatttcctcataattttattgatacgaaaaacaacaattaggaggaaatgacaacataaatgaaatcaaacatccatctccatatggagtaaaaatgccaattttaattgggattatttcacaaatacacaaaataacaaaagattataaagacgattatacgaaattttaaatatttttataatgtttgtgattttattacagaaaatataattttttaatatatttttatgttgtactcttgttaatttactgtttattttttgttatttgtatattatttttttttattgttttgatgttattttttttattatttttatgaagtattcttattatttttataaaacaccttaaaaatatatatataaaaatatatatatttctataatcttctataacttaaataaaggccacaatattttgagtttcttcttattaaattacatctataccctttttaaagatacatataacaatacaaacaaattacaaaatattttggttttttctctcattgaactacacatatattatattgaagttatagatgcaagtttatattccaatatttttttccattatatttaatgttgaccgagattttcggcaactactaaaatatgattataatattgaactgtaagaaagcgagagaaggatttttacgtggtt

SEQ ID NO: 80517 - DNA, 2040 bp, Cannabis sativa
tctctctctcattccattgctctcattccactgctctctctctctctctcataaggaaaaagtcgatataccaccaccaccgctgccaagataccctctctccgtcactctccagacttctctccaacactctctctgtttgcttttggcggcagcgctaccttctcgaagctttcacaactatagtaagcctttacaaaattttatatatctgataaatttgatagctctgctagggctagtggtactactactaacccacctttccaatggtagaactagttattgtggaagctattctgttttaagggatttcaattgtgtaaatggttggactattaaaatcggattgagttgaattgttttcagttaatgctttgaaagctaagcgttgtcatgatttatatttaggataatctgttattagaaatgtcattttaatttgtaaaggtttttctaatattcagtttatacattgttctaagttgactaatattcagtttctaatgagcataaggtctgcagagtaatctggctaccctcattttattactctattgaatctatccattaatgacatttctttggcactctttttccaaataaaagtttttagccaagacaagatttaaaaaataaaaatccttatatttatttttaacggagagatgggctactgttattgaccaatgatttttttagcaattggagagagaatgaactccgaccatggcttttcaatcttatggttctgatctaactgaaaatagagtattgagtagtatgaaattatgaatttgagaccttaaataagttacgtttactgagaaacataaatatttcagagattaatagctaagatagattggaatagctcgccattcacaactaggtttcgtcaatttagaggaaaggtctgcaagtggaatggacctgtgagcattggccaatgtgcctataataccccgggaaacaggtggacttcccctgtttacaagcaattgagcaatgttcagaaagtttagttggattgggtgaaaaataagcacgtgatatacgattactgcaaagatactaaaaggttcaatggtgagatgccacaagaatgttcaaagcaacaattttaagtaaggtgtgacacatgataatgatttagtatgctgcctgaatgaagttttcactttctcatatgcatgaaaatgaaaaggaaaaatggaaacaacacacagaaaatagaaacatcaagcatttaaatactttgcagaacctgcagtgctatgcaaagctttgataaagcattagcaatgaatgtgttgcttctagtatttcattcattatcaaaaattgcttcatatctttaaacattccatacccaaagccaaatataaagaaaaaaaaatcattttattaatatcccatgaaaatttcataatgtaaatatttatccaattttatacaaagaaacattcagaaaactccctcaatttgaataattatatagtttcctcggcattaatgaatgatctctatcttatttaatttgatacaaaatctttaaaacaagtacaattactaacacccccaccatgctccgacggttcgaccactctattcctgacccgaagcgcattgcttcctccttttccctaaggcatttttctgaacaatccacagaatactaaatttgaataaccttaaaaatgtcatcatcaatatgttatagataactgagagatataacaaggaataaaacattggcatggccagtaatgctacttttacaattacttattttggataaagcttttgatgaaagagcatgttttcagaatataaatatatttatacacagttactccataagcaattaaattgatgttgtttcaagtttcaacaactaataaattttctgagcctcaagattgttgttctacttctaatgatatgacctacaatataataagactatgttttaaaagggaaattttaatttttggccttaataatacaagtcatatcaaaatttatacccttccttaa

SEQ ID NO: 80518 - DNA, 732 bp, Cannabis sativa
aacaaactaagtgactttagtcattatatcaatcaatgttggtatttagtcattttcaattattggacatgttaataagacgcacaaacacatgtacagtcattttcagtgttgctataatataatatacaccaccaaacacatatacataatacatgtacatgtacagttgactttacgaaaaaaacacgtgtacagttgtacacaaagtaaataaaaatgaaataatagtaatattggccaataatatatacacaagaacatataaaattttgttcttagtacgtataagcatacaaaaaaattggtcttttttaattatttgatagattaagttagtctaaacaaaccatgcaaataggacaaacatccacttataaagaaaaatatttggaaaaaataaaaaactactcaactaattatcaaatctctttcttgcttatgtatgaaaaaattgatcattttgttggaatgtacaatacaaaatatttaatctcaaacgtaaactcaagtggaagatttgattaaatagttgactttctaatctaagtcttattagtttggccttaacacattaagaattgattccagtctttcaggtaatcatatttttgaatatgaacatttcttttgtacttcttgttacagtatgtaactcatatgatatgaactaatttaataaaagggttattgcagatataagataatgggagatgaacaatcacaatcaca

SEQ ID NO: 80519 - DNA, 1698 bp, Cannabis sativa
  modified_base (134)..(138): a, c, t, g, unknown or other
acttacaaaaatactaaaatttagattaatttttactaaactattgtcaaacggaaatcttttccaaaatactgtatttttataaaacaatagtggaacacaaaacaaaacaactaaaaataacagtggaacannnnnaaaacaaccgtaaaacaacagtaaaaacttaacacaatatacagtataaaacttacatatactatgtttgaaaaaaattctgcccaagagtataaaagtaaaaaagttatagattgaggtgtaattatttctactaaatacgtgcaaagagtaaagaggctaacttctccttgtgttgtttaaggcccataaaagccttatttttcataaatgggcccattcaaagcccaaatccaaatacaacacaaccaaagctagggtttcacagctatataaacacacgctagggtttttgccaaatctagagagagagagagagaacagaagagagaggcacagagcgaaaatggtgaaattcttgaagcaaaacaaggccgtaatcgtcctccaaggacgttacgctggacgcaaagccgtcatcatccgtaacttcgacgacggaactcgcgatcgtccctacggacactgtttggtcgccggaatcaacaagtacccaagcaaggttatccgtaaagattcagctaagaaaaccgctaagaagtcacgagtgaaagccttcgtgaagctcgttaactaccagcacttgatgccgactcgttacacactcgatgttgatctcaaggatgttgttaacgttgatgttcttcaatctaaggataagaaggtcacggctttgaaggaggcgaagaagcgtttcgaggaaaggttcaaaactggaaagaaccgatggtttttcaccaagctcaggttttaaatcaatgtatggaaatggaagattatgagagaacaaaatttggtttttagatttttgggtatttttctaaacgaatgtttttgtttcttgctcttttttttaatggatatttttgagttaaaaaatacttattattaggttctattttgatcttaattatgttgttttgtgttaagttgatgaaattaattttggtatttatatcatatttgtgctagggtttgtggatctgctcagtttattttagcttaattaattttgaaggttgaaaaatcctttttttgataatgggtttgcattttgttacatttctaagtatttgtttcatttattggttcttagttgatatgtatgagattatgttttagatatgtatgtgtatttatagtaatctttagaaaacaatttggattaatgattgaaatctatgtatactattatgcatattttgtgcttgtttgagtttgaattagtgtgaattatagtgattcttagtttatcgaaaaagtttgtattttgttgttttgtaatgattgaatacaagaattgtttgttaaaacatgtgtgagaacatatatatatgtataaatatattatgtatagatattttgttcactaatacagagatgaaaacaatatatagtaatatactttttttgttgcctgtttgaatatgaactggtgtgaattatagtgattcttattatgaatacaacagttatttgttcatacataatgtgagaacacatatatatttatatgtatactacgtgtatatatattgaaaatgtgtgttcattttgttt

SEQ ID NO: 80520 - DNA, 694 bp, Cannabis sativa
taagtgatctaattaatgattgattaaccttaatatattaattaagacaatatgcacttttaattgaagattatataaaggctagagaaagctcaaatcccaagagctcagtgggaaattgagtgatcacaaattggcatgcatatagtactatatattattatataagtaagatttttttgtagtgagtgtacgttttattatgaattgggtagtttattaaaggggtctttaattattaagtagcttccattatcaaagctattgaccagtgaattcagtgcagcccggcccacaagagacttatatataattatatatttgatcatcatatatatgcaataaatagtaaaagagagatctatcaatactttactcttgaattattgctgaaattaagtgattaaagatcctacatctactactggtgtatatactattacagtattattacactatatatattgctcttactgaaaatttcttcacctaattaaaaaccacattaacctacctaacttggacccttggatctctctctccataacaagcataaaagcaatattatggtacaaaaagacgggagaaaaaataaaaatatggcagtgtcagtctaactaccatgttcatatgttccttcaagtctctttagaggccaagaaggacacatccttttccgaggggtctttacaca

SEQ ID NO: 80521 - DNA, 2394 bp, Cannabis sativa
agcaattataaaaaatgatgttataagattaagttaaataaactaaactctaaacttgaaaattttcattttgttaaatgataaatgaatattttattttactaaatacaattaattttgtcagatgtagattgagtgattaataagatttgttttgacaaaaaataattaagagtattatttaacatgttcaaatttattatttaactagaaagatgatttacaaattcaaaatagtatttaccattttttatatggccagatgtaatcaaatgtttaacaagaactcacaggagacactggagacactggcctattactcactgaccccaaaaatcaagaactgtgtaactctgttcttgtcaatagaaactcaatggagatttgggaaattttagttaccaacacaagtatggaaaaagggagatgttggtttcttcaagggaatcaattaccaacttttgtagaggaaggtttcatctctctttgttgaaagatggcaattttgttcttaatagcataaatttgtcacctggatttaccaatcataattgatcactacacaagtgataatactaataatgaaatgtttatgttgagtggggcagagaaaacttctattgtagactacttttatagagcaactcttgattttaatggtgtttttagagcatatatatatcgtcaccccaagaatccagataatatttccatgcaaatatttcacagtggttataatacaatatgtaaattgaatgtagataagaggccaggttatataactacttttattgagcatcttcttaaaagactttgggtttaaattctcacagttttgttctaggacatcttcaaaaggtctcatatcaatagagatagatatgcccatctttatatactaatgattcttcttattcctagccaatgtagaattttttcgatttggttagattatgtgaagagggagatcaaagactactggtgtatgagtatgagatgagttcatgagcattaatgaaactctagcaagattgttttaagtgacatgagattgagaccaagttggaaccagagagaacccacaagactttttttcttacatgaagagtgcaacactcattgtgatataaagtcacaaaagatatacttgactttggataggcaaaggttttgttaatcaaccagttatgtcatactaatttctaccattggaggagcaaagaattatattgttgttgctcttgaatggagaaaatgcactatagattgcaaatgaaacttttgtagataaaagtatttttagccaaataagatcttccaaagttaaagttaggccaactctaatagtgaaacttaaatttagtgttaaactaacactaaaaatgtgtaattttagtaataaatttgttttatatttcaaccacaacattaaaaatatattctttattatgaaaattttgtaatattttgagaaattaggaaaaatttaacacgtcaaaataggatttaaacaatttatttcataggtgtataaaataggagaatcttgcatgtaacagaatatttaaatcttatttttagtatgttaaattttttcgaatcctcaaaattttataagatatacacgttatagttatttaaaacaacttgctttaaatacttcttgatttttgaaatactatttgtaattataaattattttaaattttttaaaatttgataagatgttaaataaaatatatttttttgcaatcgaagaaaaatttgtaatatttgactgaagatgaaaacgacagaaaagagactaaaacgacaagaattttccacaaacgcggtttcgagacttttgaagagtcttcacttgtcttcttcttcttattcaaaaccaaagaaaccatttttttattttctcagtaaccaaacacaccaatcaatggcttcaatctacaattgccacgaatgcggaaccgatctcaacctaaggaccgtccatatgtacccaccggaagtctacttcgaggccggtaacaagggtacactctcgttctcgacagtggacgctaccaagttcaaattcgtaaaagaggacaagattcgaccttttttcgaaaccctagattattgggggattcagagaaagaggacgaagatcaaatgttccaattgtgggaagcttgtgggttacatctacgatgatggcgttcctttgagtgatcaccctggtcaatttcactttggtcctagtcaggtcattcctagggctcctcgttacaggttcaaaaccaaagcccttcgaattacctctgaaaattagggcttttctttttttcctctaatttcattcttgaattttatgtatgtgtgtatatatatacatatatctgtgaaaagtaa

SEQ ID NO: 80522 - DNA, 2093 bp, Cannabis sativa
caaattgttttggaaatatttattagagtttttttatatttatactttaaattagttttttttttttttttacaaaaaatctacataataacttatatggtaactaatagagcaactaaatttatatagcaatttatataaaaacaaccaaaacaactatcgaaataattcaaactgtaaattaaaaaaaataaaaaacataatatatataataatttcctttatttattttttatttgtttaggaaaggattttggaaaaattaatgtgtataaaaatagaaaagtgtgtatataaataaatagcattatttcaaaaattaattatttgccacaaaagtattaatagcggctagttattttatgactatgttttgttttgtatgtataatccaacttctaaaatacacatatgatatgtatatgaactatgtatagtaaaaatacaatgtgcacaataattttttcttcttttgaaatttgtgcacaataatttgaaatgatactttttatagtaacaaaatatatggaaggaaaaaaaaaagcatacttatgctttgtcaaagaaagctttggcttgttggaatgggataaccttagttgttcatcctaattgttttgttggacttgccaatttcgttgtagtttctctttggttaataaatgacttcccttaaagaaaaaggagaaattaatttaaaatcattactatttatatcccatacaaatattttatatataatttttattttataattataggataaataaccatgtaacaaaatttttaagtttgtaagcaacataaataatcaatatatatttataaatctataattttgttccagtttcatcaatataaactccgttttgaatttattaaaaaaaaatacttgaaagtaactaatatttctgtttcgactcaataatctaaaattttatcattatatgtgtcatgtttaaaaaaataataacaaaataattaaaaaaaaaaattacaattttataaactacttttgctgttaaaaataaacattaaatttatacgaattaaattttatattagtcactctattttttttaattatattagtcactctattttttacattcatgtgtatcaagttgtccattataatttttttttttaaaagaataatagtttgtgagagaatttgtaagaagtttcgtagaaattagccaggcctcctacaatatattaccccaaaaattaatattggttttatgcatataatctacaaattggtctaaaaataggaatttcattcgtttgtctttgccaatgttacccaattttccatgtccctttcgtcccactaaaatttactatatattatatattatgttatgttatgccgtgtttggttgagaaaaacataaaataaaattttataaataatgattatataaaaaaaatatttttttatatttaagatttttaatggaacaaaaccttttctttttttcttttagcatgtggtggaataatttttcttctttagatcgatttcgatttctatttcattcttattatttttatcatcatttaatttatttctgtttttattactttcaactaaattgctcttaagtttatttttaaggagctaaactctttcaaatggcctagtcatcaaattaaaataacaagaaaaataaataaataataataataataatacacaaatttatgtgaaaaattattcacaaaaaaatcacatagaagagaaaacctacctactacacgggacgattactagccttaagaaaaaaaaatatataaaatatattctcattcacaatatttttttaattttaaaacgaagagatttaatttaagatagtacacacaacacaaattgtattggtgattatactcatcactaaatttattgtttagccatatattctttataaattaatagctcaatattcccaaataatttcatggaagacatttaatgatgatcatatactattatactctatattaattaagtcgtgcacatggatatataaatgaatattataataaaaggaaatttcatgaaaattattaaattaaattaaatt

SEQ ID NO: 80523 - DNA, 2026 bp, Cannabis sativa
atctacttcctaagatggttatgctataaactaattgtattgcttgagttttttgagttttttgttaccaatttactcgttggtctaactcatacttacattttaggaatctggtagtttaattgagtgggagcgttaaccatagatatggagtcacgaggaattaatgagttagaaaatctactcagtaaatttcaaatcaacttattgggagcttgatttcataggtccatgatccccataatgcctgtgataatatcatcttgatgactcaattgattaatttatttaatcaattgaaattcaaaaactaactatgtcaagtttgagaatttttactaagattgagctaaattgagaagataagagagattacaatttatttcttaattatgaaactttgtgtgttaaattaataaatatattttaattatattttaattgataattatttataattattaaattaaaattagtatttaaataattttaaatcaaattaaataataaattggaaaaagatagatttatattcaagactttatttaaaataaaatggcaaaaatcataatgggtctccattgagtgggtttcgagcatagctatttgtttatcaagatttttagaaactagttaattataagcttaagaaataaataaaacagtaagtaagttagacaagtggttttacgtgatttgtgcattaatgatccctagtccaccagtcaatgtatttgccttttagggttgtataatgtatcacaagtggtttttacaataaaccctaacactggttctcttggtttcttttggagaagaagaaagcttagagattttttagcaaagtttcggctattaattttctaacccccttcgtatgtaaattcaggggtattcataggttgaattgagtatggacatgtctatgacccgcctaggatttttgcagaaagcccactattagggtaaaatatatgtaaagaactgattgttgggcccccaagaacgtttttgctcgtgtggagaggcagctagctagataatgaggaccattgttcgtacaggacacgtgtcggcaaaaggtttcaccttgagaagaaggcggctaaatagactgttaggaaaaaggtacgtttagatgtggggtgcatgcactaccatagtctaacacaggggacaagatctaattctgtgttagaagagctataatcgtcgttagagcgttctgggtctctcttcatggtagacgtcttgctttctctaagcaattggtgtccgtgttcaaatcttcgagcgccctctagatttctcctggacatatgttgagcttggtcttctctaggtcctagggagatgataaggcctccgagtctcacatggaggtatgttgtgggacaaatctctgagtagctcacgtgcttagtcttttcctaaacttaattagtgattgtttaacccggtactcctcattttatgccccacattctttgtccaaaaacacaaataatatttaccccaagctttcaggactcttgggtggcagaagcttggagccttcttctgaatcattgacactctcgtcttgtcatagttaagtactgaagtgctccaatggtgctttgatactttgtggaatcatctagaggggtttcaaaatggagggataacttggtgttggaacacattggtgtcgactgaggcttggaatctgccacatgttggtgtgaattagaagatcttggatgtatttggtttgactataatgaataccgacaaagtctctaatcactttaaaaccatggaagtaatgaataggtctaagaactttcaaagaaaacttgttgtggagctttgagatgacaattgcacatcgtcttcaccggttattaaaatatcattcacatagactagaagccgaagtaattttctatttgacttggtggaaaataggcttgaatctgacttagaatcgagaaaactccacagatgctgagaggatttgagcatgtcaaactagactcttggg

SEQ ID NO: 80524 - DNA, 801 bp, Cannabis sativa
atatatatatgtgtataatgtatgtatatattgcaataagaatttctcaaatttcatttgatcacaattatggtggatgtcttgggtgatgactggtatttttgactatattatattgatatatctagagatgctgagttggaggaagatgctgcatcatttataggacctgcaccacctgctatggtcgctgaagcagcttcagcaaatgaagcagaacgatttgaagaggtatcatagtagcttattattgatcaaactttacagcatggtcatatatctttttgtgcttttactgttgcttgcgtgtttatttggattcatgtgtacatatgaatgattgtcttcatgtatgtctgcacagatgaacttaactttttggttcatgtgtaaatacgaatgattctttttatgtacgtttgtatggatgaatttatatagcttttatatctctactctgctcatgtatgtactgaagcttacaatctgttttgttcatacttcatatattacaatctgttgtaaactgtctttcttattattcttctttatccacattttgcctttttgtttatgaagttacaattgttacttatagattgtaatgtttgcaactttgtatgcatcttatttgttgcatcatcggtaaattttaggttcaacacatttttttgctactcgcttgtgtgattgtgtactggatttcctggaaatttattatgaatgcaataacttgtaacttcttgtgttgtcttatcaggtaacaagaattatgaatgtggaggctgattgcccatacga

SEQ ID NO: 80525 - DNA, 1100 bp, Cannabis sativa
cataatattaagcattaataagttgtactatatataaaaagtaaaatgggttacctgtgacattcttgcaaatattgtagttggttcctaagtgttgatgcctccctttgccaaaactagcaagtaacttaattaattaaagaacataatttgcacaagctatgaataatacatatatatatatatatatatatatatatatttaaagatataattgaaatatataaataccaagagcctagcttaattaattctatacaatataatattagtactacttcacaaaagaatttgtatcaatataggttatatatacatatatcataaataatattacctttacttctgaagcaggattcaataattgattatgttcctctttcattttgttgtaacgctcaataacacatttcatgctataaaaagcaaaaaaataaaaaataaaaaattacaagttcacgattagatttgatcatatatatatatggtgacttttgatcttatattatgtaactttgatgatgtaatttatgcgaagtcaaaaagataaaattaattaatagatcaatatgcatgcataaaatcatgtctctaattatgacctaatagttatttaaaataataacaaagatctcattctcataagtataagaaaaatgcactagtcttttttgtttctttctttctatacgttgtattaattaaatcttgacagaaacatttttatctagatttgcttatatatttatatatatatatatatatccttgcttatttgtatcaacattaattgagattcattcaaaagctaaaaaataatataaagaaaaaaaaaacattgagattcattgatatatatagctaatcatgtgcatttacctgtttctactttcaattgtataaaaaacataacacagatttttgttccaaaaatgcaaaaataataaatgaatgacaaagaaaaagagaagagataaaaaaaagctcataaagataaataaataaattaataaatttagaaattaatgacaaccttctaggtaaggtacttaaactgagtgttacaagtcatgtttaaggattgtatttttttttttttt

SEQ ID NO: 80526 - DNA, 769 bp, Cannabis sativa
aattctataggcctacaccgggaataatcttgggcagaaggaacatgatggaccgttaagggagacttaccggatccggatgtgctcgcatcaggagccccagtgttggagaccgagagaagcatcttaggtcgagaaggcatctgttctttccccgcttctattcggaggtcctccctgtggcagcttgagccttgatgtaggttaactcctgttccctcctacagaggtacttctggtatcggtcctccgccgaggcaataatgtccgcccggagtgccttttcagcatccagggtacgaatgtttgggcagaggaccttggagaggttgaagtcgtccacggattggctccctgagatgagcttggcctttcggcaattctccgttgtgaccaagtcccccacgttaagaccatttttgtcataagtggagaaaaccttagcatgctagaggaaaagttgggtaggagcagtgtggtgcagtggagggatcttgacccactctgtgagaagctcagggcgatccacggcttggaagccggaagagaagaataagcggtggtggtactccttaacattttctgaaaattgtaatggaccgaaccctcattagtaggatgggtccggagagtgaaaaaaaccgtctttaaacttatcccccttcttagggacaaatacaagttcaaaaaagtataaaatctcagtcgggctaggtgaagcccagcctcgggctacataaaaagaaaataagcctgagagtaggcggta

SEQ ID NO: 80527 - DNA, 896 bp, Cannabis sativa
  modified_base (28)..(28): a, c, t, g, unknown or other
aaatgtttaaaattccgtaaaaccgtanttttgttatttttgtgcatttgtgaaattaacccaacattttattcgagtttaaatgtgtacatgaattcttgagttttaggcaaaaaaagctagaaaaatgtatatatctatatatttatataaatataaaatgtaaagcggtgacctaacagtttaaaattacttaaagtaatttataaattttttaagagaaaaaaatacattaatataataaatatttgattaaataattaatctatatacatgatttaatatattgaatttaaaattaaaatttataattttacgaaatttcaatatgaaacccttttaataaatatctaacaactcacctatatgtgagattaatgttatatgtatacttaattatatttttaatttttatttgagttaggtatacttttaattgtataatgtgtccaagaaaaacaaagactctgatttatagcacttctgctagcattactaaactaccaataatcagtggaataacagggaggaaatggtatgccaccaagagcagctaggatccaatgaatatgctgaaagaaatgcatcctcatgaactactattagatcaggtaaactcaatcgaatcttgcaaaatagttgtatataagattgatttttctgaagtggagtgatgatcaatgttcttacatgttttagtagtactgttgtaggaatttggcttggtgaaatcccaaatttaccctacaccactcaagaaaagagtcaaaacgacagggacaaatctgtcccagaaaaatcaatttaaacctcagtcaacgaccaaagaaccctggtcgtttagcctacacgacaatggaaacttgtcgttcttcactcacacgacaaatcgttta

SEQ ID NO: 80528 - DNA, 2244 bp, Cannabis sativa
ttgataactaatcagattgtaacgagttttatttagggcataaaacccaacacctagcgcccaggttgacacttgtgattaggccctatgcccaggttgacattttgtcgatctgggctgtgtctgattaaattcaacaaaaagtgctttgggtatcttcactattattaggaataacgaagattcaagtaaacttggagagaaaactacaaacttgagtccctggaaacagggcccaacgcctaggttgacctggtgttggcccagcgccgaagttgacaatcaacctgggatgtttccttcaattgcttaaatgtcaaatctgatgcgaccattgaatctgacatgatcaaaatggaggaagagatcctgtctcaagttcagaagccttggaagtatcaaaaatagattcctgaatgctcagttaaaaggccctaacgcccatgtcaacaaatgacctagtttgctgggttctgcttgttcgaatctgatgtcgtttcgaccgtccatcaaatttttcacaagtgcaatgatccatgaagtcagataaatcaattgcacaacttcaatttttggcaaattgactcacacagaaatcgaaagttttaagtttcgtttttgcaaaacaacaacatctctaagaacgtgtgaccagcttcatcaaagcctataaaaggactaaagggtgtcaaacgaccacttaggcatctcaaagtacttcccttggacgtttttacacttatacatcgtccaagttgatgtcatctacctgggcactgagatttcaacctgggcgttggatgtcaacttgggcgctgggacctgaactgccttcagtataacggtcataactcactcaattttatccgattgatgcaatttaacttgcattctgaagttatttaagtgctccatcaagtcatgtctcacaccctagtcgaaattttgaaattatcgtcatcaaaatttactcctaagggagttataaaaataagctctgggtaactcgcaacgggttctgtcatgcaccaaaaataagctatcaccaccagaagttaatttttaccgttaaatcatcatcaacagtggaaaacactttacttgtattttttttttcttatttttgtgggcctcgttcatctataaaagaaaaactcccttaactcatttttcacattcaaaaaactacccacaaagtcaaaacttctctctctagaattcaaagcttctgatacttaaacaattgatgtaattaccattttataagaaataaaaatttgaagtaaatatagccccaatgctatcacgccaatctaacaaatgaatatagcgtagaagtctaatttaaattttgaatcaacaatgctaatctccattaaaaaaaattctcatgtcatagtaatattgcagttgattttgtttaagatgaaataatattttagttgaccacaaattagaatctaaacaatagtgtcaattcatgttattgttgacttggtcaaaatttagttacgtcttcatgttatttattatcattacaaaaaaaaaaaatttagatacaactcatgcatgaggagagaaagactatattattattataggtagtggagcaagcagccgttgaaaaatctttaaagctattccactaaccattattattattttttaaaaaatataataccaattaatgttccaaaaaataagtattgtaccaaaaaaaaagaacaagagtaataataagtcggtgactttaaggtatattatttggtgtatttatttttgagttttgtcttacattatattcaactactttaaatttgatcaatcatcaaaatgagatcaagttttccacttaataatcattatcactcttctatttttttcttttttccaccaccaccgaccaatttttttcccatcaatttggggtaacaaaaaagaaaaaaaaaaaagaaaattgcaggtaccttgaacaatatattaattaaagtgacttacaaacatgataaaagagtaaatataaaaatattttttaaaattatattttataaaacggttttattttttaattttttaactaagaaaaattacttttaatttttttaaaatattttgtttcttaatcgatattttggactctaccccgacccaaattcaaatcttgacctggatttggactttgacctggattcaaatctcaaactggaccccggatctaaaccgaacccaaaccccacatccaga

SEQ ID NO: 80529 - DNA, 1220 bp, Cannabis sativa
acacagtattttttaaaaaaaattatcccacaataaatacaccaaaataattaatagcctaacccgtacaagaaaagcataactgaacttatataatatggtatgattgtttactatgacaaaatattacaattaaaattctaccccacaataaatagtattgtcgacggttttctagtgtcgagaaaaatatttttcgatatttttccactgacgcttattctatccagttttgcgacagtcgaattagcgtcggtcttagagaacgacaagaatactatacccgactattaaaaacattcagaaaatcctagttttttagtaataagagcttgtgatatggggccgcgtcgcaactcacaaggcaagcctgactggggtgggttgaagctcgagacatgcttagcattaggcataggcgggctaagctcacgcttagggcccacttagcctaagggcccaaaagaatgtctcttttttaaatatacacacagtttttactgattttaaaaacaccacatttttttttaaataagggcctattttttttttctatgacccactaaaattagggttatgccttggctccaaatttggtctctggcgttgtttgtagacacggtctgattgaggggggtttggatgatctggtagggggtctggtcgagtcaaggagtgtcaggggaggggggttcgatcaaagggagcttcaatcaatgagggaggatgggcgtgggctaggctagcactcgatcgggctcgggggttctcactcttcaagcacgggggagggtgggtttagctttaggttttagtttttagtgtaaatgtattgtaataaaaacataaaatatatattttagaaaaaaaaaaaaagggaaagggttgcctgagtatgtgtaaaatacacacccggactccttgttggtactgattgggttcaacccgatctgcccgcaatgaacaggtttttgtacaaatttgggttacacgggtcgaatccgaacgagttgattgggatttgggtcaaatttgatcaaaatattcaaccaatatttgtctcgcacaattatgactcttgttgagttttgtcctataatttttttttgttgatccaaaatttgtttagtatttgtattgcaacaatacctgtaacacatagttacatttacaaatgaacaaaatataactaaaatgagatatttacaacaatttgtata

SEQ ID NO: 80530 - DNA, 674 bp, Cannabis sativa
ctagcataaaatttagtatacatgactcgtatgtagcttttttttagtatagctatatatattgaggtaattgtaattaactttaaaacaagagaaagactacaaacagtattccagttacaaagctaatgaagagaattaaactcttcaaactaattcttatctaatcgcaatgcatctctagtataattatgggtacttccattatcattctcggaatattataaagaggtactactaatatatattgtttgttctaaattaatatatattttaataactgttataaacattcatcatctcatattgaatggtttctaatagcgatactgtttgataaatgacttagaaaaaaaatattgttagataaatgttattggcaatgtaaaatatataggtattgactagctcttttatcggcagtggtggacctagaatttaaagtgaggggtgcgtaattttttttttttgtaaaaggagggagggcataaataaatttaaaaataaaaatataaagtgtagttagtgggatttgaatttttaccctctaacatattagcatctaccttaaccattacaccaagcttactattatatctataaatttaattttttaatacaaatatatgttgtaattaattaaaatgcatatacatttttttccgatttttttt

SEQ ID NO: 80531 - DNA, 1829 bp, Cannabis sativa
ttttttttccttaactaaactactacatatataattaaattaaggtacaacaaataattattaaataaaaaagaagtattactaatagtagatagtgttttggtactgattacgatgaagacaattacattaaaatttaacgtttctcaacatttatacttatcttgttgtttttagtttgtcgtaatgtctgatgttattctcctctcatcgaacaaagttattgtcgttttagtttctatatagcctcgttgttcgtaaattttcgtcgttttccaattatatatggtttcccttggtccatttccttacgtacgagttgtggtgtactattgttttcgcaactcatttcccaattttgtattgtttttcccacttctgacactctttcagttttatcttttccaccaaggtaacatcgttttcctctaaataaataaaattaaattaaaaatttacctcgtttatcttaatttgttgcaattgtcggttctttcattatttttcgaaatattttcaacataaagattaatttttgttgtaaataaatatataaatttaatattattgttaagtgtgaagtaatttgataatttttaattaatttaaattattaaatttttattttttttaaaaaaataaatttaaatatactaataaaaaatgatattttataatgatttaatatttaatagtgaaatagttacaaaaatataacttagctattattaccattaaaaattaaacttagaaatttatgtacaactaagacttaaacttaaatatttatgtcgtaaattactaaaaatacagtaataatcttttttaagaaaaattcaatatagtgaccataattaaaagaagagtgctaccatttatcttattacaatctatttgttaatttttgagcctaaaaatacatactcctagtaataatattattcttgtattttttttttaaaaacaaaaatttaaacaatttaccataatcctagtaataataagtttgaaatttttttaacatacctgttagactaaaatatcaaaaattttattttcagtaatataaactattctgaatttttcagattatattataatcataacaatatttcgacacccccaccgtccacgcagattatattataattatactattctgaatttttcagattatataactataaaagtattgaaaaaaatatttcgacatataattttgagtatgaaaattgattaaataattgtaatagatggttgtaattaattatcattctaattaaaatttatgattttgtttatatatcttaaagaagattttggtatagtaaaaataattaaaaaaaagtgcttaatataaaatttattgttgtttcctccttataattaattgtattattgttgttttctattatcatccctttcacaaagttttagtatgagaaatttgaaattttatgcttatattaggggaaaattttttccttaaacctcatataccctatattggtaagatgggataatatttttgttaatttccacattaccccctcattcaaatccttctctctttcccttctttctctctttctctctctgtctcgcgaacccccaccccgtccacgcacgcacaccggactttgacggagactgcccacaccgtccacgctggccacccccaccgtccacgcaggccgcccacacccgaccgccccaaccctcaattttctttttcaattttttctttcaatttttgatgcttaaattcatgaaatagattaatatgttgcaattttacgcaaaattctgttagttagagttagatttag

SEQ ID NO: 80532 - DNA, 2889 bp, Cannabis sativa
ccacgaaccaagcgtcggtggagggccctctctctcttctccgcattctaagctatacgagacagaggcacgtcatcatccaagttaggaacttatccatctctaggacaagctccctttacagctagggcttccacaactctaggagcagggaggtacaaacaatacttctagaagttggccacattggccaacctgagtatgtttctcatctccactgaaggagacaggatgtggtttgcccaatccctcatctgtaatgtggggatagagcgtttgaaaaatgacattagctagaactcataatgtccaatcctttaaatgccccaagcaacaaagtattacttggcatacccactaactttcaacatggatgggttattagtgtcacctaattactgatggccaacctagctaaagtagatgtacccaatcctattctgctttggagcaaacttcagatcaaaataatatctaatctgataaggagtgggctgaggccagcctagctccttgtacaaaactaacatcacagaaaggtactttatactttttggggagattgtgttgggcacattttaaaataagcggcgatgtctttgaattaagagtcaagcggcaacactgcccctgctcaacatgacactccgatcaagacacccaacctaggggaaatcgatgcaccctttgatctctgggatgtatctcacaatggacacccctcacaaaatcactagtaagtaccttgctaaaagcatcaatagagagagtagaagtaggagaaacccagttgtctccttgttgtctagcatctaaaatctcaggctcaaaagattgaatcaagacatgatacacgcttaacactgaaggctcaccaagcctgttcaataggctattatcattatcataagtgcccaaagggcagttggagaggacaatgcaagttctataactccttttcttgataggtatgacctcctcaacttcagactcagtatcaagactcttagcccatttattgacctcatgcacctttgtctggtcaacctgtggatttacatcaacatgagattgagtagcctcctctacaactctgactcggcctcttgaggctaccctgacaacatggggatcacatggtggtactctacggcatgtttgtttcatcctagccataatcacaagatgactaggagacctacacagctgtcacctcccctatccaacactcttaaccacctgcatagaagaaataagaagagttgagaaacttggaaaagctacaaacatattctagtaaccagtactcaagggtaccttccaggtaaatcacagtgtgcaaggtcgaatatcgaccaagtaccgccttaagtacactcacttagaaatataaggagtcctaagttatacacttgactataatggactcactaccaagtctcatatagagtatccaaggggaagcacgcataagaatccaatggtacatgcctccaaggctgtcacaagaccctagtcaaggtcaactgatcgtaaaaaactggttgcttgctaggaaacttggccttggccggccaaggttcccatgccttagaggtcggccaaaccccataaccaagcctagggctaaccaggaacccaatttctaggcataggctgacaaatctattgggtatgtccccttggccggcaagaccccatggtgccatccttggctgacaaggtcttaaacaagtcctccttagccgacaaggatttgtacggatccggatatgtcttttttcaagaactctaatacgttctttgtgttcttcgtgactcaaagagccaagaatcacaatgaaggtcacatttagatcttttttgttttaaaataacacattacatattgtaaggctgtcatgaaaatcaaaataccaaaaagataataatctaacgtgggaatcaaaagacattcaaagcaaagaaaatgttcatgcattcatggaataatcaactaaatcaagtgaaatattaggaatagaaagcttacccacaataagaaatcgttgatgacgaagatgggaagcttggattgtcgaaatggtgcaaaaatcctaagagaatgatccttatgtgggtcaaccctatagagagaaggaggatcttcttcaaaagttaatttctagtgagagagtgaaaagtaaaagagtgaagacggtttcccaccaaaagcacttaaatagtatatgtgggaccactccttcacttgtttcacatacacagcaaagagacatataaaagcagttagtgtactctaatagatgagatcagatagtcaaggaaaagtatgtcaaaaggctaaaaatgcagcaacttcaatttagcaaaggctacatcaattctaacaacctaactggtaagtccctatccgtatagacgtctgcacagggacttgggaggaaatgttatcccaatttttgcccacctagcgtggcattgcttacgtggacaaaattagtaccatgtggtaatacagctcaccaatgaggaggtcaagtcagtaactcagccaataaggaccccgacactcaaacgagacataaagtgatagactagcttcattagaggagcaagccggcaatccttgatcggtcttatgactagccaacctccggatagcaaaatgctagctagcttgcttcctacaagtgcctcgctggcgaggaacagacttggtaggatcctctacacagttttacacatggagtacaagttggtctgtgaattaggccctaacaatccaataaactagctagaaaatatctatctttaagggcattttaatcttttgtatttaataaatttaaaatacaaatatataaggatttcaattgtaaattagggttt

SEQ ID NO: 80533 - DNA, 2439 bp, Cannabis sativa
caaagagaatgatgtcatctacaagcattagatgagtaattattggcccattcctaggtatcttgaatctggtaattgccccttctcagatttcgccattatcagtctcgataggacattaattgcaatataaacaaagctggagacagcgggtctccttgtcgtagaccacacgacggctttatgtatccatgaaccgctccattgatgagcaagcccatcttatcaatttcaatgcatttcctaacccagtttatgaatggattactgaatgccaaactgccaaggactgaagagatgaacccccaatccatttcgccatatgctttttccatatccaattttatcaacatataacccttcttccctttcttttttatcatttagtgaacaatctcccttgccacagcagtgttctcggtaatgagccgacccttgacaaacgctgattgggcatggaatatgatggaaggtagaagtggcttcaaccacatagcaagaatcttagagatacatttgtatgctacattgcatagggcaataggtctatagtcattcacaccactaggacaatcctttttcggaattagcacaatatgtattattaatgtagcatggcagttccagatcggagaagaaatatcttaccatattaataagatgccttttagttgcatcccagtgttgagtatagaaccccattggcatcccatcagacccgatggccttgtcgtttcccatggatcgcaagctaccttcaatttgttcattagaggggatggagcttaagaatgtattgtcagtttctgtcacactaaccccttgtggccagttaaggtccgttatagagaaagttacaagagaaagtgctattgaatttgtccacaaatagattggcaatggaagttgggtcccttacccattcattcttttcattttttatggcttgaataaaattctttctccttcagactacagtggaggccataaaaaatttggtgcatctatccccctccttgaacaggtgtaggctgtcttcgcagtcgttcccacgtaggcaccttaagacttaaaagcaccaaataataatgtttattggtttatatataaaaccttataccagtggtaccttatcctattctaccacactacgtacgacttcaaactagaattcattttaattagggcattgctattaggcaccagtagtgtctagcagcactttcttctcaacatcatgtcgtgttacaattggctagcgatactttctaaaagctactatattaaattatatgggactcgatacttaccaatagcgatattgatacataatgataccctttagcatttctctattaattaaaacaacgaaatgaccttataataaggttttataatcaatcaatgtacgtagtaataattaaggtttgaattgttgtattctataacaattaacgggacacatcgattcccatccccatctactaatttatttgtttttccaatatcttcttgtattagaatcctacgtacgtgacaattaaataacaatattattgtgggaaaagcaagagagagagggcaaaggtattgggctgcacaaaagtcaaatgttcttctagctaatagtgtattgctattctttaaaaattattacattaaattatttatcttacacttaaaaaggttaaaaggtagttagacaagtagcattttagtaattctcttaataatataatatttctaattatgatatatatacgtaaaagtcaaagaagtcaacaaagttcacctatacacatatataatggcccgtggatttcatattaaaccatcatatattaatttatatctattcccttggattggaatggtctaattcagaattaattagctacgtacccacctcatgaaatatccatatggacactataaatacatgacataccttcttttctttgctagaacacaaattaataacacttcctttcataatcatttgtgtttatctctctcaaccatatatatcttttttatatatttttctgtgtccaaagtaaaaaagaaaatggagtttaataagcatgagaaacaactatatactctagttggttttctggtgctctttcctgtattatgtgcatcaacgtttacagcctcaagagccacctattatggcaccccggatggctatggtactccaagtatgtatattatatatagtcatattgtaacacatgtatatgtatttttattacctatgtatataataacatatagtaatgattcttctgtatctttaatttattaggtggagcttgtggatttggcgaatatggaaggactgtcaataatggctatgtatcagctgtttctagggcactctacaaggatggtgctggttgtggtgcatgttatcaggtgaatattgtatctgtt

SEQ ID NO: 80534 - DNA, 796 bp, Cannabis sativa
agagggaaaacgcaccttcaaaagggtcatctggtcttggtaaatcgagccagtcataggaattaacatataatgaaccataaataagcttgctcaacacagtcattccaggatgattatggagaggtatgatcgaagaaggtggcatgcagaaaattcctatctgagaaaatatcagaaacatcaaagaagttcggtgaaactttaactttatgtcaatggtcatctttaattctacttgaactatataagttggatgttctactagtatcaaaacctgacttaatatttttcctggattgcttttaaaaaccaaccaatatatatttgtaaccagcaatcagtggttccttttttttggttgaaagtcacaattcacttaaagtcaatgcttacagagaagctgtcatcctcatgcaaatgcaagtatttgattggtggcagtgattgatgacggccattacgttcaggcaaagtacctggccagttacgtaccaattgtgcctcctgttctagacctacatcagaaggctttattttttctgaaaaatacaattataagtatcattaaaacagtgaaaactagtagtagagtgatgaccccatgagaagcatgtaactgtgacaaagattaaatataagacatttcatgagccataaatacttgtagcctaaaattctagataagtagaaatgtcgaaggagaatgtgtagaaatcttgtatatcaagtaggcaaagtttacagtgtttaagaaaccaaaaacaaaatcatttgacttgtggaccaatacaca

SEQ ID NO: 80535 - DNA, 1242 bp, Cannabis sativa
  modified_base (882)..(891): a, c, t, g, unknown or other
aaaaattattaatatacactcaataatattgttaacttaattaccacacacaaacaatgatcatattatgtaaaataatcaatttattttcatagcaaaaaatacataatattttcataattattattaggttaattcaaacaccaaaaaaggctttgattggatttttggtcttcttggcctcatctgcagtgacataaaattgaatatattttctactatcaaaagggtaattatatagtaatggatgttcttcatccacaaattcttgaggaacttcaatttctccatctgtgaatgtaaacattcccattgaatatctctcaccatctccggaaaacttcacttgatggtaacaagctcgtattctatcgttgctccaaacctgacatgaaaacaaatcggtcgatgggaaaaagaaatccaaaagattttatttttcatgtttggattgaattgataaattaaaaattctattttagaataattaaaaattttaagtgtggtgtaattttatgaaatttagatcaaattacaaatttacaaaaatattttccttcaatattgctatttcttcctcattaaatttttctttagtaaattttaaggtccaaacaaaattttaatgtcaaaagtggtgaattaaatttgaaagtttaattgaattgataggttaataaatgactaattgtctaattaagaatagaattttgaatactttatcacataaaaacttaagtttaactctcagttgcaaataaatatttaagttataattcgagaatttctgcaggtacttagtcgttaagtattaagtaaattgccacgtaacaatttctcattagttaagattattaaatttttttttattttttatttaannnnnnnnnnaaatatactaataaaaaataacacgtgaacaataacttgacacttaacggttagatacttacggaaattccatagatataatttaagtaatattaaagtcaataattaaacttgagtatttatctataaccaaaaagttaaacttacgtatcacattctactttatttattttttcatacatttatatatatatatacatatataaaagtggtatgaaaaaatttaccaattattagaatattatgtattacctgttatattctttgatataatataatatagattaaaatatttaaatgtgacaaattatatattaatatgagattaatatatattatgtgttggaagtt

SEQ ID NO: 80536 - DNA, 3541 bp, Cannabis sativa
  modified_base (2245)..(2248): a, c, t, g, unknown or other
cgttgactgtaaagtcttaggcaaggaatcaatgtacgaactggtacttagagtattaacgagaaaccatatgtcgctaagggataatagcaaggcaccaaagaagaatagcacatacctcagcttgcaataagcagactaagtataaaagtcaaaccggctcggaacacaagaatgcgagacgaccatctcgctatgaggaaactttctatagtttcatccaactaacggaagcgagactcacaaccctgacaagtcagcaaattttcttatatccgcaatcgacgcaagacacatcttgtcgatctttgaaagaagagtggttccagctcgccattgggatcactacaatcaagtttatgtcgagacatctccagaattaataattaaagacgtgtttaatacacgatatttctgacccaataaaggaaaatcacaactgtattgtatgactttcaaaatcatgcaccgcgtttacattttgtaatatgtaatcagatcccacaatttaaggaataatagttgtaattacattttggtcagctttgtaattaactgccgctatgcaattagtggaaggcaatctcaaaaaaaggatggaaagaactcttacacaagaggtcctaaaataatatactcagaaatctgaataacattgactcatggactttatgcagaattttaactgcaaaattacgtataaattcggtgttcatatttttatttttctataatttttattatttctatgttgaatcataatcgtgatgttcaaatttagttaacaaaaatctgcattaacaataaaaacaaaacaaaaccgttgagagggtgatcactatggaagattgaacaaataaagttaattaacccaacgtatcaaccttttttagttaaagccaaaaactaattaacattatattgtcatgtctagtaaagtactctagctagcttgcaaaatctttgtttcgatgcaattataataaagatcgatcaaagattacaaataactttttatttttttcttctttttccttttgacaaattaaaaatcatttcaatgggacatataaacaaacactacctaaccaaagatttcagataatatattaattgctgtattatcaataataataatgcttcaaaaataaataattaataaacatataattaagcgcatgcatgcatgcatataatttgatgttgacgtttatggttagttacactaattattatgattgattttgattatatataaatattaaagctagaaattaaagaattaatttactaattaaaaaaagtactattattactattattatgggttcaactcattaggaaaaaccacaatgctcgtgtggctatgttttcttttcttttttttgactgtataatgattatatatatgttcgacacataatttaaatttttcttggccatagatagtacacataatatatatataggttaattaatcacacaatatatacaataggttaactatatagtctataaaagaagtttgtatataatatataatacaatataattggtatgtaggacagcataatatagataggattattacttaaatgttgggaaaaaatacctttcaaatcgtattcgttagggtttctttatcaaatatttaacaagactactacaattctctaattaattgatgattagaacatgtgaaaaatatttggattattatggccaattaataatttaattaatgttgcagcttatgctctacaatgcttactttactttttttttttttatttctaaatcgactatttttgcttttaaatatctatattaatccatccatctcataccataagtcataatattaatgaaagataatagaataagaaaaatgacaatgagatcaaacaaataataataataatctatatataaaaaaattgtcagctgtgtcctctataatggaaaaatgggaatggaattttataattactaaaaaaaaatgaatccattttggaggtgtttgatacatcaaaatcatacaactttataaatatatattatatatattactaattaggcaatatagacaacaattaacaaataaatcatttggacttattgtaattgggcccgttaatgggccctactccatgtccactcacaatcccgagttcgccgcatgggatttaggctctaataataactaactataggaatccctttcgataataataataataataannnnaataataataataattaagaaaaaaagttataggaatcaaaacttcataatcctataaggaatcagtttatttaccaaagaaaaatcaaaccataaaaagtcacaaacagcataataaattcacaaaataatgatgaaacattaatataaataattgtaaaataaaacaatatttttcttaggactacgtagtctattctcaaaataaaatctacctagcttcacattctaaattgtcaaaccaacccatacaaagatcctttatcatgtcaacaaaattaaaatatttggcgaaaaaatgaatttacaattcccatatttttattatataaaaaatgtctattatatcgacctagaaataataataaataaataaaacttgattttaataatttttattttacataaaatttgcatctttaattgtattaagttttttaattttttttttcttccaattcatatttttataaaatatacctattaaataaaataaattatatttaaaatattatgacaaaaatattaaaataaaaatttatatgtaacattcttataaaaaaaataaatatatatacatggtttagaaaaaaatatgaaaacataatcaaagtaagtattgaattaacataaaataatgtgaggaaattcaaaaaaaaaaaatattaagattaatttttaaaaattatttaagtttatttttttcaataatagaatgtatttatcatattttgaggtacaaatagaaatctcctaaacaaaattggttcatttatattaaaataccatatcaccttccaaggaaaaaccttctaaatgggtacacaaaaataaatttcaagcatttattccatgtactaaaaaataaatgaacatataattacatcatatcaattccaaacaactagtataaatatttcactttctttccaaaaataataataactaaaatacttcattcaatggtataatttcttatcctacaaatataaaagaatgaaaatatttgaaatttctttttattttcatctatcaaatattcttctaaaaattcttagcatgatattggctagctaagattacatactaattaatagtcatatgtgtatattatatatgtacaaaagcattatgaataatgtaaaataaataaagaagataataaagagataaaagaggaacttaatgagaattttttagtgctttattttaatagaatgatcctttatttatgcaaataagtgagtcatagactaaaaaattaaggagaaaaataataattacaattaatat

SEQ ID NO: 80537 - DNA, 2093 bp, Cannabis sativa
ttatgtaattattccaataaaattggtgtttacagaactctctctctctaaatctctgattacaactcataactctaattaacataattttatagagcttaatatatatagctagcaataccagctaactaacattaacagaaaaataaaagaaagggaaaaagaaaataaaacagttacaatgaactgactcaacacagaatagattgttcatgtgtatattatttgtttaaataatttaattatttaaatattagaaattaattttaaaatgatttaagatgacaaaaattatatattattatagctaattaagctatataaaagtagtttatattatataacatcatatatagaaacaaaattataaattatataccatataagggtgatgagatctacatttttggtacaattcatgaatagtatctttatattattataatcgttttgttgttttttcattttttgaattagaaaaattcattttacatgttttaaaaaatatttcttaataaaatttacatccctaattaatttatataattaaatattattattttcagtttttaccaaaatactattccttttatttacctctgtctcttcctattcctcactgtctttctcgcaccactgagaccatccacacccaagcaccgagaacaccaaccaccaccaccactgaacctcctctcctccaccattgaaccccctcatctatccaaaaacctagacgaaacacagaggcccaaaaccctgacctccataacactcgagcgttgaaaaaaaccaaaggccccaaacctccgtctccaatatctttgccgacaagcgccgtccataccgagaaggcgacctcgtctccaagcccgactagaagcccaccaaattttgccttcatcttcgtcttcgtgtttatttattttttattggatttgtgtttgtttgagaccttagatggttgtggttatggtattttctgagagaaagaacatttgtatagcgaaactttgggaaacatttttagtgagtttggagaaacactttagtttagtgaatttaggaaaacactttaagagatattattagtaaaaaatctgtatctgtaatttgtatatttcctacttaatttaataatatcaattgcctctaggcaaattgtcaaaccatgtaccgtataaatttattgctatttttagctatttattgttttcacgcacaacaacaaagaggaaaaaaagatagttaagaatagattatcactatcttttcaagtacaactatactattaaatcttctattttttttattttaatgtaaaacaccataattttagataaactagaaaaaaactacataattttattcaaaaaagaagaaaaaaactataatttgaaattaattaagcaatattaagtagtcatttaagtaaaaaagtcttcaacatagatccacaagtaggtgggtgaaagaaaaacatatggcctccatcagcaacctcatgataattaatccatggcaatttgttggaaagaaatcttgtgatttggtaaggaatgatcttatcttggtaaccttgccaaagatgaactgagccttcattgtttgggaatggattagcaatgtctaatggatcaaactcccatcttctatatgtcaccaataaatctcttatcactgattcataagcaccttgttgttcaatcttctcctgaacaattcatatataaaaattatatttaaggacaaaataataataataataaactagagaagtattacttaaattttgagtttgtagatagtatagattcaataatttttttattaggattttttcccttgaattttgacattaccaaattatgccccctaaacttttctaatcactaaaaattctccctgaactatattaagattgttattagatttaaagacttttgtttaatttcattcaattgtattaaaactgtgattgtccatgtactatatattatatatgcttttcaaaactttgatatctaccaaatcatctctctctcgaattttgacatgtaccaaatcatgctccttgaactttcatccatgtt

SEQ ID NO: 80538 - DNA, 1782 bp, Cannabis sativa
catagagtgggtttgatcgggttcggctgtttagagaatttcgagtttaggtttgaaccgggtagaatgtgttccacccaatacactaaaaaaattaaattaagagtctctgctaaaaaatagtatttcttaaactaatttaagttattttttattcattaaaatattaaatttttatctgagtcaaccaaagtagttaacttattttattaagctcttttaaaaaaagctattaaaattggttttgctaggtgtgttcaccaaattgctcacaccacacaaatcatccgcaccgcaccatatctcataaaaaacttagtttgaaatcttttacggtgcatttgtagtttgtattttcacaaaattgcacgatatagtacaatttgcacttgaattttatagttatggatcaaaccgcatcgcatcatatattataaagttactaatttttataatatgatttttattgttcttcataaaagaataaatatatataatatatgtgtacattacattaattttattataatccacaccgtattttcacagtgtggatttttacagttttattatatgagaaattacaaaactccatatgcggtttggtttgaaaaaatagtcacaacccgcaaaaagagttacaacttgcaccatccttattgcgaacacccctaagaccatctctaatgggagatgtaaaagttaatctatatttggtacaaataatagttgtgtgacatttttacataaacttttactattatactctaatgtataaatttaaatcttgacggaaaatttaatatgttatttaatgttcatatgataatttattaataatataaaataataaaaatcatacaaaagtaaatttaaaatttaataataaaataataataattatgaaagtcatttaatacaaataaacatactaactaaactttaataataaaatattaaaaatgacataatagcaaatataaaactatgtgatgtaaattttacattatattatatgatgatctaaatttggatcactttttattatgtgaaatatttacatcacaatttagcagactattggagtagacttttgacaaagtgaattatattttacatttgcatttccatttataagatgctataatttttgctaaaaatcactaaagtttatttgttaccaaatcaaggttaaaagtacttttgaaactttagagtctatttggctgtatttttcagtttttatttttagaattttatttttaaaagtgagaatagaaaacaagttttgtcatttttaaaatttaaatggtgattgacataaatttgttaaaactatttttggattttttcttactgagaaaatgaatattttaatgccgtaccgacatgaacccaatttaccccacacccaacttgaacctggacctacctcgaacccggacccaaacccaaacacgaacaccagaccccagacccgaacctcgaattcagaccccgactcgaactccaaaccttaaccacgaacatgaacttgaacccgaactcaaatccaaaacctaggactaggtccaaggtccttagtcaggtttgggtttggggtttggagtctaggtcggggtttcaaattcgagttcggatcgaggtctgcaatttgggttggggtcagggtcggggtccgggtccaagttcgggtctggggtcagggtttgagtttggggtccaagtccaggtttagagtcagggtctgagtccaggttcgggtctcaggtccaggtcccg

SEQ ID NO: 80539 - DNA, 1105 bp, Cannabis sativa
tactctacgcgccggtaaaaagtcttttaccgaccaagcttcccagataagctttgccggcgcagttgtgcgccgacaaagctttgccggcgcagttagtatactttttgcgccggcaaaagtgggttttcttgtagtgaattaaaatttttagtcacggactttttagccacaatcttgccccaataaatttttgtgactaaaacttttaatcacaatatttttttacttttagtcataatttttggtgtgactaaaatttaaattttttgtaatgctaatattgttgcccctaaaaagttctttatcttgtggtgatttatacaattctcaaatatgattgtggtgttagagtaataagcattagagcactcaccatttgatatgtattattcttgtggtggtttgttttttccagtttagaaatgaaattgtggatgaaatctaaaaaaattatttattttcataccctttaatgtcggtcttaaagggacgcatttggaaaaaaaataatttatacctttagcgtcagtcttaaagggatggatttaagaaaaaaataatttaaacattttaacgtcagtttgtaacattcacatattatttaattgtgtcataagcaatactattaatttttgacttttggattcgtagcatacacattggtcttaggaaccgaaaacaattaaaaatataaatgtgagtttaaaatgagcgcatattcatctttttctactatacaacgttgatcgatccctcctgtggcgaattttgttgttgatagcaaccgtacaagatggtttcactaggaggagttcacgagtgcatggtctttagtttcagggaagaattattaaaatatcaactcaagtctaacatctaaaaatttggcaacaattatctttaatataccgtgttcaggttgtacacatattttcataaaccgcctaaaccgaataactcgcttaaacccaactgaaaaaaccgtcaaaaacgaatcgaaaaacccgacaaaaaaaaaaaccgcacaatctgtatattgggcgggttgaaaataaagtaacccgcccaattaaaccgactcaacccgaaataacccgaataa

SEQ ID NO: 80540 - DNA, 1487 bp, Cannabis sativa
tcccaaccaaacgcctcctaagttgcttgttatacccattattcactcacttaaaaaaaaaaaaggttaacaagtatttacattttgttgttaaattttagcttattttgaatttgatctgatgtttatgcttagaaattagattttggtgaggaaataaatactaagaaaaatatagaggaaaaaaaaggtttagagaataaaaaaagaatcaatttttcatgtttggtatgaaattttttgttagaagtttttgtttccatgccaactatgacactttttttatcctacattttcttttcctcacaaaaattcaacttccaaagggtaagtgaatttttggttaaacttcaaaattcactcattaaaattaaataacaaaataaccgaacaatatattagattcagttgaatatttgttaccattgaaactccaattttggcattctaagttaaactattgactcattaaaatgatcttaactcaaaaaataataataataattcatgattcaaatgctttcagaggtcaaggttccactggcagtacttggagcagagtttgaccatccagagattgtcaaacaattcgagaaagtcttaagaagaaaaccaaaggtacgatattatttttacttttcttctttcttgtctccttaatcatgacaagaaattttcttcattaatggtgtttcattttgtatatagatcaagtcttttgtgaagatatatcctggagttcgacatggatggactataagatataatattacagacacatatactattaagaaggcagatgaggctcaccatgacttgatacagtggttcagtaaatatgttaaatgaatatttttgtaataggaacatcaaatgttcttttgctaaaactactaaaaaccaagtacttgatatctcccaataatagctacaacttacaagtgatttatgtatccatatttttatttcaaagacttggtttggtagtttcatgaatgttaatgtgaagtttatacttattggatggtgttgaggaatgatccctgtaatcacagtcagacacaaaaacaaaaccaaaaagaactaaaaaggaaagcaatagatcaatcaaacacaattataatgtgattgttcctattccaaggcaatgcagcagcagtggccttagcccaatctaatgtctcataagtgactacaccctcaaagtctctccaagcatcattttactcgattacaagaatgtttcacaactctttctctctacaactcactctgtggttgttggtacattaagattacatctctaagttaatcaggtttagggatatttatagggaatacaagagaagagtgataaggataaagattctaaaagaatgagtctttgtactgatgtgttagttatatctggtttagactaacaaatgagtctccaatccgagtagatcgatctgaggggtttaagtttgctaaagtcacaaatatta

SEQ ID NO: 80541 - DNA, 1455 bp, Cannabis sativa
  modified_base (385)..(386): a, c, t, g, unknown or other
  modified_base (418)..(418): a, c, t, g, unknown or other
  modified_base (622)..(628): a, c, t, g, unknown or other
catcctcctttctttggattaattggatggcatgaagacaatccgattcaacactaaattgccggtatttcctttgtattcccagccgaagcccttccttaatggctaccaattcagcatgtaacggcgataccagctgctgcaaagaagtagcagtagcaacctgaacagctcccacatagtcacggcacacacaccccatactcgattctataatgactttgaagtctaaatttttatatataagcacgtcatcttttcataaaaaaaatgtgcttataaaacaaactaaaatttaacaggaatatttacaaaaaaattatcttaatatttaaagattatttcacaaatacctaaaaatataaaaaaaaaattacaaaaatanngtttcacgaaatttaaatatttttacgatttnttttattttatttacagaaaatgcggttttttttatgttgtactcttattaatttgttgttgattttttgttatttatatgttatttttgttattgttttgatattattttcatgttacttttatatagttttcttattgttttcgtgttgttttatagaaaatcgtaaaaatatatatataaaaaaaaaaaaaattaaacgtnnnnnnntaatttttttacaaaaaaaaaaatagtgtcttacgtaattatccttaatatttatagttgttacacatttaacactaattagggatgggcatttaatccaagttaacatttttctactcatccgatccaacccaattttaaattcaatccaatcagattcaattactaattagactggattggttttttaattagatatctaattacaaacctagttttaaatattaacttaaaaataaatatcacattttatttaagtttaatactccataaaaatatcatcgttacaagtataatgtaactaaaaatttaaaataattaaaacaataacattactaaataataaaataaaacaaaacattataaaattaaatacataaaataactaagtggtacaaattaaaaaaaaaaataggtactaaaaatatattaatatatatatttattgtattgttttttattatataaatcaatataataatttttataatgtatataaatgtaattgaatttgatcagtgtttaattagattttactgatccaattcatttagaatcttacttttatcatctaatataatttaattgtaattggatatttgatttttttttttaaataaattggataagatcagtttagttcgattcggcaaaagtaatataaatattaaaatatttttactgtgattttttttattagagcaacaaatttagttataaatatctcaatttaatataatttttgagttagtttttttaacataaataaatttttgttcaaagaaaaaaaaaaataaatgatcaagtgtaagtgggtgggtggccac

SEQ ID NO: 80542 - DNA, 4567 bp, Cannabis sativa
catagcattacaccatttctcttcctttagagcagcctttacattactaggttcttgagaaactaagaatgctttgggcttatatatcccagactttgctcaagtttgcatgctatgattgttaatgtggggaccaggtgtaggatgttgcaaggatgcacttgagcttgggacaatggtttcagtgttgctggtagatatgggttcaggttgttgaggcatgtttgtagtggaaacaactggaggtactggtatatctgaggtagaatgagaattgagagaattctcattgtgaaccatatcagaaagagccacaacagtagcagcaggagcatgattttcaacagatgcagagggaatagaaaatagagactcgacagtatatgggagagaatttagtggaatagcactggaaatgtgagactcagaatcatatgcagaagcatctgttgaaattgatgcataaggaaaatttaattcatcaaaaataacatctctcgagatgtacaatctaccatttatgtctaaacatttatagcctttgtggttaaggctatatcccaagaaagtgcaaggtgaggatctgaaatccaatttgtgtctattatatggcctgatatttgggtaacaaaggcaaccaaatactttcagattagcatattcaggtttagtttggaacaaaatctcaatgggtgagagttgatgaagaactggggttggcaatctattatgtaggtagacagcacacctaaaagcctcatcccaaaattttagcggcatagaggcttgagcaagcaaacttaacccatgttcaacaatttgcctatgctttctttcaactaacccattttgttcatgagttgttggacatgggtgtctatgaacaattcctgcttgtttaagtggttcagaaaagttcctatattccccaccccaatcgaattggaacaccttaattttctttcctaattgcagttcagtttcagttttgaaatgcagaaaagtctttaatgcctcgaattttgttttgagtaaatagatccaagtgaacctactaaaggcatctacaaaattcgtgtaatacttataaccattgtgagacaatgtgtgtgaaagaccccataaatcagatacaataagttgcaatggttcagaatattcagtgtgagaaaactttggaaaaggcattttatgaatcttgcctaaacagcaagctttgcatacactgggattggttttattacatgtgatgttacaagaatgcaaaacagatttgaccacattatgagaaggatggccaagtctgttgtgccaaagatcatacacagaatcaacagatctattacagtgagtactgagcctaatgtaggtgcaactggttcactagtgcgaagtaaggcagactttttgttggatgggtgaatttctgaactgacagagagtgtagaggagggtagaatcttgaagtgggtgggatcaaaagtatacaagccattgtggagagtcccagtcaataggatttccttggtaacctggtccttaacatagaaagcatcaacatgaaactcaaagagaacattgttatcaagagaaaatttagacacacttagcaaattcttagtaatctcaggaacatgtaataaattcttaagaagtaaaggcttatcatacttattagaagcaacacaagtgttaccataatgttgaatggactgttccatttcccacaaagatttgctcttgaccattgtattctgctgtagttgtgagattatgcagatcgggagtacaatggtttgttgctccagaatcgggataccaattactatcctcagcaggtgtagtttgagtcaagtgagcctgcattgatgaagtttgaacaggtgtagcaactcctgtaaaacttttatcaaatcaataaaagcaatcgattacagtatgaccgagctcaaagctggcattgaggcctgttctgattctgagctggtttcccccctcttgtgccacgatttgagcctcttccaaggttgtagtaggattgtgaacctcgagagaagttaccagtataaggtgcacgattagaaggattattggaaaaatttggaggaggaaaactaggataagagggataaaactgacctctttgcgatacaggatgtctgaagttcatgtgaaaatgtgcaagatttgcttcatgttgcagaaatgcttcaggggatactggtgttgagtcatcagcagcaagattaacagacttctccatttctttgtatgattttttattcttgactctgaggctagaagcagagcttcaatttcaccaactaagtattcttcaattcaagtatttgaagatatgataaatgtatcatatacactcagtaatcctttgaagattgctgcaatgtgatcacgagctgtcaaagtctccccaaccgaagccaacagatctacatgttgcttcacttttaacagatattatcttaaaggagttacaaaaactttatatacaagccaagaacaaaacaaaaaacagttagaaggaaaactaactaactgacaacagatgtaactaactctaacagaaaccagcttagtctcctttacaaatactgtggtattatttcttagatctccaatcaacattcagttaattagttagtctttaactaacttaactgtcaaaaaatacagcttacatattggatccttggctaattatataataagaactactcatcttattttttaaagagaatagaaagaagatgaagatgaataacaagagagacacaacacagtcgagagagaagttagagagtgagaaatgaagagggatatttgagagagagagagagagagagagctggaattgggaaattgcattgagcaacattgtcgattatgttggctcgggttagtgagttaatgattgttgagggattacaccatggatgagtacttactgtgattatttacttatagctcttaagattaatatctctaattctcaatatgaataaagattcgtggcaatactttgaaactggagtatgaccaagttcacattgaacttagggtcggaaccagtataattatcctatgttgttatggttggaagctatctagattcatctgtgttatttttctggcttaatgtgtttgctaattttttgttcttgatttatttgttttgatttaacatttgtttgtttaaatgtgatcttgaagctagaattatagaagataattcctatgtcttaaagctaaatttcctataaattagagcttgattcttcaatcatcaagggggattcaaagatcaattaatttttcaccaagaactcatcaagaattcatcgaggaattttataagaacacagagtgaaggaggatgtcaatggctaggttcaaactagagaatttcgatagatcaactgattttgcactatgacgagagagtttgaagggtatacttgtgcaccaaaaggtggcaaaggtactcggagatgaaaaattgctgactgagaagaggccagagaaaatggcaaaaatggaggagatggcatactacaccatcatcatgtacctgcccaattaagctagaagaaatctaatccaagaaaagcctgcaaaaggattgtggaacaaactagagcaactgtatatggcaccatcaatctcaagaaaaattaatcttcttaaaatatcatacaggtttagaatgaactcttctctttccttataatattgacaaatttaatgaaataattgttggtttagctaacattgatcataagatacacgaagaaagtcaagcaatcatattgctcagatcattgccaatggcatatcaagaagtaaaagtagcaatcaagtatggcagggatgtgatctcgttggagggtgttgatgcggtatcaaagtcaaaggactttgaattgcaactcaagaaggagactaggaaagaagaagcctatcttgcaagaggaagaagtccaaagagagaatcatcaaggaaataggcaggtaccgtccagatcgaagtcaaagatcaaagacaatcaacaatgttaccaatgtggaaagattgaccacattaaatgattttgcagtcaattgaagacgcaatccgatttcagatcaaactacgatgacaagagatgcaacaaaaaccagattcaatactcaaaatctaatgatcatggaaatcaaagaaaagactctacagttgtggttgagagcagtggatcagatggaagttcatatggggattattttctatttcaaaaaatattaactaaagagtggatccttgattcaggatgcacttatcatatgtgttccaacctagaacccttctttgattataaagaaaccaataatggttgtagagtactaatgggtagtgatgtttcttgtagggttgttggaattggtaaggtggctataaggcaattcaatggtaaagtgaagattctacataatgtgaggcatattccagaattgaggaggactctgatatcacttggaacgttggaaaatgaaggttatggctataagtcct

SEQ ID NO: 80543 - DNA, 957 bp, Cannabis sativa
ctggcccgggacctgacagtgggagcgagtcaccagtggaatcgacgccggccggtggcagcgcgtgcgttaagggaagtaagatgggtatgatggtaattttgggaggagtagcagcagtacttcttttctaaaagaataactaaataaattgaataataataatggagcaccgttgtgaggtgtggagattaaattgatgtagatttaaatatttatttgtgtattctttttcttatttagaaacatattgttcttgttttctgttgtaatttttttttttttggtatatttttatggattcttgggggtctccatttgtgatatgtgagggtttttggtggtctagttcatatgattatgtttttctttttagcattttgactttagccaaataagtgagacttgattattgtttgtatttcattatgtgatatttttttagttatattcacttttatacaatgaaaaataaacgaaattaagtctaataatcagttaaataactaacatttttatatagaggaaaagggcatttttcaaaatagaaatatttaccactatataattatggttctcatcaacttaacaaattcaagtaattaaatgcagatttaactatacaaaagaggcactataaagtgctaacatcacttaagttaatatgaattcagataatcacgaaaggtgtatgtttaccacaatagtaatattttaataacataataattttgataaggttttgatggatattattcattggctttattagtaatctcaaaatcttacacaaattgttttttgatttctaaaaaatgtaatgaaatttctttcaaaaaaaaaaatgctaaaagataggttgaaaagagaaaagctttaaagacacttgtaaaaagtaggttgaggtgccttaagagaaaagaagattagatgtggggaagtagtaatgaatgggta

SEQ ID NO: 80544 - DNA, 692 bp, Cannabis sativa
gtaaatatttgcaaataaggcaattaacaatattaccaagaagcttaatgatcaacacgaacttgactttttacatgattgcagtcaaaaaatcattaaattagcacaaagaaccacacgaaggacatcatcatcacagaacaaaattaatcatactcaagaagtgagtatcgctcgccaaacactaagatgatggcttaaaataatgccacataatttcgtttttaagaattggtgtccctaagagaatccttttacagatcatgtacataaactcaagactttcaccacacttatcacttcactgataactcttcgcccaaacaaacaaaaaagagctcaaacaaaaaccaaataatcaacttggaaatcatttcagtatttacacacatacatatacgcgaagagcttaaaaaaaaataaataaaataaaataaaatacctgcactgcaagaagtaggaggatccttctgcaaatccttcagttccttcaagatccgcttcgaagccatttgcgaaaccctaattcccaaattccagaatcaccgtcataacagatcaaaagtgaaagccaaaaccataaatagatgtacgtatagatgaacaaaaccatagaggaacggatctaagaagagaccgaacgtacctgagagaaagagcaagtagctaaggttgcgagagatcctcctttc

SEQ ID NO: 80545 - DNA, 2880 bp, Cannabis sativa
  modified_base (26)..(27): a, c, t, g, unknown or other
  modified_base (53)..(54): a, c, t, g, unknown or other
  modified_base (83)..(84): a, c, t, g, unknown or other
  modified_base (114)..(115): a, c, t, g, unknown or other
  modified_base (141)..(142): a, c, t, g, unknown or other
tgtctctttattgataattaaatganntctctttattgataattaaatgatanntctttattgataattaaatgataaagatnntattgataattaaatgataaagattacatnnttaaatgataaagattacattgaaanngagttttatttagggcacaaagcaaaacattgtctccattcctctttcttttctatgcggaggctttctcttgtttaattcaggcaaaggagcgaaggagtaaattacaaggacttatgtttggaagaaatgacctcttcgtgtcccatttgttctttgctgacgatagtttggttttctttgatggaacaatggaaggatgtcaaaggttttggaatttactgaataattacacgactgcttcagaccaagtgatgaattatggcaagtctgaggtttgttttgggaagcaaattgatgttgaagatagaagtcagatagctaattttatgggggtccgacatgttgagtctcatgggaaatacatgggtcaaccatcctttgtgggtcgtaacaataaggaactaagtgatatgatcaaaaataaggtgttggcaaaattgaacgaatggaaaacatcaatgttctcaatggcaagtatggagttacttataaaggtggttgttcaagctataccgacttacactatgagttgtttctcgttgactaaggggataatttttagttttcatagaatggcggtaagattttggtgggcttatcttagaaggataagaagattcattggtgtaaatgggaacagctatgcaagcctaaagataaaggaggaatgggacttcgggacttgggaatgttgaattaggctttgctagcaaaacaagtttggcgttgtgtaaggtatcctaatgctctttgtagttgtattttgaaggcttcaaatttccctaataaatttgttctaagcaaaatgtggaacacatgcatcctttgtttgacgtagtttaatatggggaaagaaactaattttaaaaggttaatgttggaggattggtgatgggagtaatgttcgagtattggatgacccgtggttgccgcgacaagtgacattcaagatatatgataggccaccacttcctgaacatccgtgtagctgatcttaagtcaggtgatggaaattgggacgaagaatttattcaagctatgttcaacgaagatgatgctgagatgatccttacaattccaaacttggggtgagaaattgaagacaaaatactttggcattacatcaagaatggtaaatactcagttaagagtggatattgaatggcaagcgatttaagaaaggaccgacagcaattcgatgatcatcttgttgtggaatggtgacaaaaattatggagacttaaaatttcaccaaaggttaaggtttttgtgtggaaattggttcgtgcttggcttcctactcacaccattttgtcaaaacgtcatgcttagacagttctttttggcactaggtgctccaaaagggttcctgaatctaaattccatgcactatgggattgtaaggttagtaagattatttaaaaaatttgtggactccaacaaaaagtaaagcaacatggtaatgaagatgagcttgcatttttaatgcggcagaccacaattttgagtaaagaacagtttgaatttttcttagtttttacatggaatgtatggaatagtaggattgctgttgttcatggaggttttgtcccacaaccagctgagatggtggaatggagtagtccatgctgattttcagggagaaaatgcaacatgggtgaagtatctcaaagggaacattctacttggaaggtgccaaagtctagtgggatgaaaataaatgtcgacgatggtgtgaagaaaggcaatggcagcttgagtataggctgtgttattagaggagataaaggggaagtgttgtttgcttggttgactgcattactgcgagaatatccaccgctgcaactggaattgatggccattatactcgggttacaaacgggattacagagaaatatacaatggtttagcattgaatcagactgtttggaagctgttcaaataatccaaaaaaaggaagacaattatcgtgatgttgattgtttgctagatcagattagatctttgttgttatttagcaatgtgattggtatctcgtttgtatttggtgaggctaataaaattgttcatgtattagtcaattatactttaatttacaaagttagtgccatgtgaattggggttaaccctcttgtcctatagtcaagctattttgctttacttgcccaatcctcactagttattttagtttaatgaaattacatttaaaaaaaaaataataaaaaaataaaaagaaaattaaaaaaaaaaaaaaaccattgttgatgtggcattgaatttcaattttggtggagcagttacttttgcttgtttattttgagacaaatgttacacataaattagtatatatgaaataatatggcaatcatatgccatcatatcacgttatttatgataaaatatcataatacattgtgatatattaatttcaaccattaataaaaatgaaatagaaattaataacgtgttaatattataaattgcaatgatttcataaatcactttgtaaattttttacattaatgtttttatttttacatttttataatttttataaaaacaacaagaaaataataagtaaactacataaaagtaatataaaaataatatcaaaataacaccaaattactctcattcccaagcatgaaaatccaacaagggccgtggactataggcctattgcctgctgtactacgttatacaaatgtatatcgaagcttctttgttctagactt

SEQ ID NO: 80546 - DNA, 2432 bp, Cannabis sativa
ttttttaacccaaagggcatgactatgtagcaatatagtcctaaggctgtcatgaagcttgtgtgctctcgatttggcgaatgcatctttatttggttgtaacctcaatacgcgtccatgaaactcaagatttcatggcatctacaagctcgtcaattttgggaagcaacaaagcaatcctttggacatgctttgttcaggttggtgaattcgatgcactctctgcttttgattgggtttgggcacctgtagtgggttagatacccaaagtggatagaatgcctctattatggagtcgtgggcccatagcctctcgactttatctttaagaacttgggtgtgttccttgtctaacatcctccttttctattgaataggtcagatgtttggatcaatgttgagagcatgggtcatcacagaagggtcgatgccgactatgtctccatgtgaccaagcgaaaaggtacaggtttatccttagaaattgtatcagtaatgattttatttctggactagacctttccccatcttcagtcttcttgtttgagaagtgggatcaacctccacttcttctaactcttctacaggtccgaagctgcttacaggagccccaaagcgagaatttatgtatgtgtccccgctttgagatggactttattgccctttgtggggctcttctttagagctctagatgggcatcttttctttctttgctttggatagggccaagttgtaacagtgatgggcagattgttggtctcccctcaaacatcctaacccatgccttgttggaaatttgaggcataggtggtagatggatgttactgccttcaactcatttagggctggtcaacctatcatggcattgaaggctgaaggaacgtcgattacgattaactgtgccatcaaaattctggttattggattttcttgaacgatgaggggtaacctgatatacccgatgtgcgcaatgccttggccaaagaagtcatacatcacttgattgcagggtgttagattggtgagttagagccccatctttacatatgtttacttgaaaagaatgatggaggaggctccatcttccaccatgcatcttgctacagtcatgttctcgatttacgcagtgatgactagggattcgttgtgcgagaaactaacttgagcagcgtctccttttgtaaaagtgattgtggttgtccaagctttgattacttagcacccctttttttttactgccaggatgttgcttttaggctcttgacaaagtgtttgagcatagtgctctctagctttgatggtctcacctgtaatgtggtgtccgccaatgatgatccctaagtgtcatgctactggtggcattgaatctccattatgggcaccttgtgcttgagtttggtcgttctgcacataacgacgtaggtggggattgtttcgccttatgagatattcaatctcccatttaaaattctgacacagattggtgtcatggccaaagtcgtgtggaactgacagaacatcgacatgtccctcttgctcaattcccttttgatgggaaagggctttctataggggactgttccctgagtggccatgaagatggtctcaggcttctttgtaaggagggggaagcatgtatacttctcctccttgtccttctagttttgtagcatgcaagaagtgttaaacttcccttttttccactatttctcctagagcttgttgcgcttatttctagtgttcttaccactagaggtttgggcagagttattggtgttttcttgtgctcctggtaggtcatgagactgcaggatatcttatgactacatgttgttgacatgtcctatttgggtctgtcgtatagcttcttcgagtttgataaagcaatcagctttatcgaggaactccttcatgttgttggttgagatcctttggatatctttctagaagtcactcaatgggagtatgccccccagtatggtcatatatcagccctcttttgtaaggcctttgacttttatggcctcaaccatgaacctctagatgtaatccttcaaagattctcattattgttatatgactttgacaaggtcttctagctacgatgatacaagtcttgaggacgagaattgtgtgtaaaaatcttgagagaactcgacccaagatttgaaccttcctaaggcaagtgtaaagtaccattgctaagttgtttctaacaaagtggctgggaatatgcacattgcacatcaccaataattttctagagattgagctacatctcgaagtacttgatatgcgccaatgggtcttctcgtctagtatacatctttcatatcggtatcttaaattttagcaagggtaaggcatttatatatgccaagaatggtgatacccttgaccggtctagttcaagatctgaaggttttagactag

SEQ ID NO: 80547 - DNA, 871 bp, Cannabis sativa
attttttcaatgcaaaaaagtatcttatataaatattttgggccctgagtttgggtgggccctaggaaaacgcgttagcccgcgttagccttgggtcaagcttgactaaatgtgtttttagttacgatacttattgtgactaaaactaaattagcgacaacttgtatctaaatacactatgttttagtcacaagtaattttttgttgtgaataaaagtaacatatagtcacaaaaaatctatatatattgtgactaaaaagttattactaaaggtaattttttttttctgtaatgattatatcgtgtaattaactatacgtacacaatattcttcgtctacatatttataggcacgcagatattgtacgtgttgttaaatacacagtataacatacacacaataatatcatttcacataaaaatatttacgtaatttataaatatccgttaaattttatttcaacagttgagaatatattaaccacaccatatagttaacgatgaattaccaagtaaatcaacgacagtacgtccgttggtaaatcttccggtaggttgaccagttgggtagtcaattccatagggcaagtagttgactttcgctaacgtcgaaagcatgttattatttccaccgtcggataaagaatccccgaagatgaagaaagaagacacttgtggttgtgcacttatcatcactccattcttgattattgaagaactcaaacacaaaaccatcaacaccaaccatattcttttcatctccctatatttttactcataaaaaaaaaaagaaaaatcataataattaatataaatttatctgttaatcgtgtataatcatatataaatctacatacatatgcaaaaatc

SEQ ID NO: 80548 - DNA, 1233 bp, Cannabis sativa
atttttcctttataggtgttccttttccacccaatttcaaagaagtggtgaagacaatcttcaagagaatgtttcgtgtgtatgcacacatttaccatagccattttgagaagatactgagtttgaaagaagaagctcatctcaatacttgctttaagcactttattctctttactagggtaagttataattaagtgtttcattatattcttatttcttttcatatttttattaattgtttttatttatatttaattaatgcaggagttcaagttaattgacaaacgacagcttgagcctcttcacgaacttgtggagtctattcttcgacaatataataccagcatggatgaatgggaatgggaatgggaatgagatcaccctcaaattttgtggactttttttttaatttatttaatttagttttgcaatttgggaacacaatatatatgtgattttttgttggagtgtgtgagtgaaatatattttcttcttctctccagcaccaacaactcatcacttgcagttttttttgggagttagacatgatcagaataataaaaataaatacaaagtcgcacaagtttttagattacaaagtatggtattggtgatgtgatggtgtgtatattctaatagtttacttgttcacgagagagccatgttttaaaaatacaaaaataaccgccaatatatataataagtcaaacaaacaacaacaaagaattatggaccaaaccaacaaattattataattgtaaaacgtggctatcaatattgttgattgtagtggtagaacacttctaaaatcaaagaaaaaataatgtaaaacgatagcaacttacattacaatatatacaagattgctatgtactttaatatcaaaatttgtcctacttatttgttcaaaataaaatgaccaacttttgcatttgtttcttcttatttttcttcttttagttgataatttatttgtaacgtggttactttaaatttgacctatacaatcagtgaaaaaagttcgttttttatttaattattttttacaaagttatagattttttttttgatgaaacaaagttatagattagaatattgagtgtatctgaaatgtcattgcattgaattatcaaatatctatttttctcaaaaaaaaaaaaattatcaaatatctatatattgtgcacaataatatttttaaaaaaaaactatttttgctaagcaatcctattt

SEQ ID NO: 80549 - DNA, 1528 bp, Cannabis sativa
gcactttttgggatttagcttcatctcgtactttcttatcactgaaaaggcctctttcaggtctcgttcttgctcttcagaggtttttgactttaataacatgtcgtccacatatacctccatgttcttctctaactgtcctttaaacattcgattcaccatttgttgatacgtggtctccacattcttgtgtccgaacgagatcaccttgtagcgataaatacccttatcagtttggaaattggtatgttccacccaaaatctccatccatgaaggtgagcaacttttacccagtgtggcatctaccgtttgatcgatttgcgggagcgggaaatggtcttttaggcaggccttatttaggtctataaattctctgagcatcctccatgtgcttttggattttgggaccaataccgaattttcaagccaaactggatactacgattccctgaggaaatcattagtggtcaacttatcaacttccgcctatactactttgtctctaacagggtccagaggtcttcttatttgtcaaaatggagtctcatctttgcggatattcacggcatgaaaaatggtatttcaatcaatcccgatcatgtcagaatagctccaggccagcacatcatgatctttcttgaccgtatgaataacatcctgtcttatgatcggaggtagattctttcccactctgatagtcatggtgggatcttcattattgatactcacttcttctaccttctctattggttaaaaatttctttcaattccaactcttggatccaactcatccacacactcttccaaaacatcttctatgtccatcaggtcctctaccccagaagctacaggtgtttcttcccaaaccataaacacaatctgagtcgacacattatagtagttcctcgcacttcgctgatcacctttgattgtcccaatgcacccattgtcacatgaaaacttcatacacaaatgccaaatggaagtcaccgcaacaaagtttactagggtcgaccagcctaatatggcattataagtagttggatagtccaccactacgaaggttgagtgtttaaaaatacacttgcttcattgtcccccttaagggtgattagcagttggactttacccatgggaattagagcatcaccattgaaaccttgcagttggatgggacatggagttagatccacctcagcgagtacgatcgcctggaatgcaaatttggacaaaatgttatcggaacttccattgtctaccaaaactctggaaaccaatttattagcgatctgtgcatcaatcagcaagggatcattgtgagggaagcacacattcttggcatcatcttttgtgaaagtgattggtagattcatcattctaggacgctgcatgggagattgtaccaacgcgtatacttccccttcctccaattcccttaggaatctctttttcgcattgcgagtacttctggtgagatgagatccacctgaaattgttgcaacatatccatccataggtggtagaaag

SEQ ID NO: 80550 - DNA, 2582 bp, Cannabis sativa
tgaagatgaagatgaagagaggtcatgggagtccaaccaaatctattttttttaatgataaagaaaaattaatattaattgtatttattatattaattataatatcaattttaaaagaagtctattttgctaattaaaatatttgaaaagtcattttcctaataaaagttttcataaagcctattttgccaactcaactacgacaagccgtcaatgatccaaataaaccttgccgccaaacttgttagccctcaaataccaaaacccttaaactccatttctcgaactcaatctctccctttccctcgcattctttctctctcttgccagcgaaccatctgaccaacaatgtgggctccttgactcgacagaccagcaacttgggttttttgaatccctagactagcgacacgggcttctcaactcaaaaaccagatctggtttattttgtatttgtgattatgtttagatctgatttttttgttgatgtttagatttggtttttggttaagcttttctatttatatatttaagagttattaagtgaatgtaattttagtgtttggaaaaataggtattccaatggttcaatatgtacatataaatacatatgttgatttgatgagaagttaggagaatttttgtgtgttaatggaatttgagttgagataaaagagaaagatttgaactatttgaatttttatgtttggtaatgattttataatgatttggggttgagtgttgatgaagaagcttcttaaaaaaaaaggggaacgaacagaactaaataaaaaagggaatgaaattaaaatttatagtttaataataatttttatttttaaaatgatttatctcttaatttttatattttttaatttttaaataatttttatcatttttaaataaataaattatatggaccaatgtaaatgtgttacgtgtatatgagtttttacatgaacagtccaacatggcacatagcaagaaaatttaatagccaaacaaaatttgttaacaaaattataatttggcaggtttagccaccaaaaaaataagtttgaggggttagttgttatagaatgtgaagattaggggatttaccacaaataactctattttttttatgtatctttgtttagtatgtcttgccatttagcatctatatagttctgtttataatcattagtgaaatgtttgatctttatattttactaattttatttttcaatttcgtagaaatatttattgaaattagtcccacattgctaatgtgtgaaaataaattaccatataaaagatgaatgagctattcctctcattgccaataagttttgagatagaatctcattcaccttattctaaattctcatggtatcaaagttgcttgtgattcgttgtgagtccaaagtgccgctggtccaaaaagacgagccaaactaaaaaacttccgttgtttcccctttaaccgtgttgggtctttgacttgtttcaaaatccacaaaattctcgacatgtacacccacaaatttcctactattagagttagtctcacattactaatgtgtagaaataaattaccatatataagatgaacgggctactccttcccttgctaactagttttgagatgaaaccccattaagtttattccaaattctaacaatattgactggtattggtgcatcagaattgagtgattatcttcatcaccttggaattcttatgatctttgtatttggttcgttgaatttcttagaaagtttctccttttgccattttcccataaaatgttaggcctcaccacctgcttgtgcccaacaacccatatcccgatagcctcaacactaagactttctctgtctaaacttacatacagaagtaatcttgatttttacaactaaaatcgaagaagaagaagaagactcgcaacactagtggaatctcaaagtgcctccaaaggtacttaattttctctggcgggtgagtgcgaactgccttccgacgagatttcttttggctattagacatgtggaagttgatagtttgtgtcccttttgttcggctgctcctgagaccgctctccatgtgctggtgcggtgtaatttcgcgcgttcatgctagcagcagtgtaaggtgccgattgtagctcctgctgcaatgctttttaggagctggtttaaggaaggtttgtcgaaatggaatgaggttgagagtattgaagcggccatgactctttgggcagtgtgaaaggtgcgtaacgatgtagtttggaactctatttctccgtcgagtgaagaggtaattcatgttgctaagatgaattattcggactggtgcaaagcacaacagttcaaaaaagaagctcttcctggtcattcaatggttgcaagtgagaaatggtgccctccttcttttccaaacattaaagtaaacgttgatggtgctttatttgcttccgaagggcagtttggggcgagaatggtggctagaagtgcggctggtttggttcttcaagccaagactgtgcttaaaactggattgctgcagccgcatgaggtggaggcttttgggattaaggaagc

SEQ ID NO: 80551 - DNA, 812 bp, Cannabis sativa
tagggcataaaacccaacacgtcccctaaccgctggaaagaggccccctccggatgtctgccagaaacaaaaatccagagattctcctaggcaaacatagggtccaaatgtcccaaaggtagcgaaagaaaaaagagagaagaagaaaagggacataagtatgcaaaccattccacactctgagcagtccctaagcaacgaaacggttcgcaaaacgaaaaagaaagaaagcagcagaacacaaatgaaaaactatgtcgtgcgatggtctctgctaaattcatctcaccatagattcaaatactttgcaaaaaaaaaaaaaaaaaactctaccctaacatgcaattgaacaacaaaagtaaaaggtacccggaaaactcacgaaagggttgtgaactggaaattgatgatgatcggcggtagaatgcagattggcaacgacggagaaacaacagtaagaaatctatggtttctgaaattttctcaaaggagtttcttgggatgagatggcaaaatagtgaaagtaacccaatgcagattggcaacgacggagaaacagcagtaagaaatctatggtttctgaaattttctcaaaggagtttcttgggacgagatggcgaaatagtgaaagtaacccaatgaaataaaaggctggctttcatagaccagaaagggtgcaaagcagctgtgatcaggtaccatcgtacggtgggaatcataattgattcgtattctaaaaatccaacggctgagataattgggtgccagggcggttggaaacgtttgagtacttttctgacactcggattaaa

SEQ ID NO: 80552 - DNA, 1110 bp, Cannabis sativa
  modified_base (219)..(222): a, c, t, g, unknown or other
cattggatcggatcggatcgaatgtctcaattcgattggattggatcagatgacaaaattcaatatcccataaataatttgattagatcggttgggtctaaatacattggatgtgattcaataaacactcctaactaagaggggggatagtaagagaaggagggggttctagtggttgacggtgatagatcttagcctaggagagagagagagagagannnngagagagagagagagaggagtgagggcgacgagacgagagactaagagggagaatcatgagagtgggaggggttgtttggattttggggttatagttttgggtttatacttttagaaaattagattagggtttcggggagaatcgtgagagtaggaggggctctttggtagaagaaaaagaggaagaagaagaagaataaagatctgtctagaccaaaccaaaggggtctcaatggttctagagagagaaaaagaaaggaaaaataaatttgggaataaaatggtaatttgtaatttacattatttcttaaaattattttttaaatttgaaatattttttataatatttaaagaattaatattaagtggttcgcgaaaaattcgctacattaaagaatacaatgtgatatatctaccgtgacacttaacagagcatttaagacgtaagagtaaatagcataacagaagttatcgttcaagtaattttgtcgctaatattttttaaaaaaattaaaaaaacacggaaagagtccaccgtaaaagtacacatttatataataacatattatagttacaaaaattttcttgattccactttaaagcttgttaccataaattgtttgtaaattttcaaaagtaaatggaatatctgctaaaaaaaaaaattagtttataactcttcaaaatgccaaaaaaaaacaaaaaacactagaacatgaacgaaagtcatactcttacctaaacaaaattacaataaatataggtgcaatttttatatgtagtacatttatttgtatttatccaaaaagaaaaaaagtgggtttcctttggagttatatatatgccactcaaagtgtaataacggccattgatagctattttcattta

SEQ ID NO: 80553 - DNA, 789 bp, Cannabis sativa
ttaagaagtgacagcacaaccatgcatggagggaacgtaaatataaatgagaaaagaaagattcatgtaacaagttaacgagttcatttcccatgtaagttggcgagttcattttccataaattaaaattcataatgtgtaaatttaatctaaaaatagaaacaaatcgtttttggtcaaaacatatatctaatataatataatacacagatgctatatatataatcagttgattaataatgatttaaaaataccagtgatgtagctaatcaattatattattatgcatgactgattccaatctagcttctttctttttttatttatttgaaacagattccaatgtagattataataacgttcaagtatatatattgttgatgagagaaagttattataagcttataaaaaaagacagtaagtagtcataatgatcaacttggccatgttcaataattaggatcacatttcacaaataagaacaagattaacctaattattaaggaagggccacccccacttcaaatctttggttaaaaaataaaagaagataaataaaaaacctaaattattgagtgagtgggcgcaagtggagattcttcattttatgcctaattatgaaaataatttatatttatatatatattccctttttctttttaaaataattatagttacaaaaaccaaatatattctattataagtctttatttaccatactctttgggtccactcaattggaaaatataacaaaacattacaaatattgtcataaagtttattaaatat

SEQ ID NO: 80554 - DNA, 1247 bp, Cannabis sativa
gaagaagatttgcggcgaatgcccgcacttcagggtcttgactatccatctaagcctgatttcgattgtcagtagttatgtgaagcgagaactattttatatgccaagacagcagaaaattttctttgtaaattagatatgggacccctgtacaagggtccctttacaccatcataattgatccaactacttaccatactcaagatgatcactcatcccacggccatattatagaaaatttaacagcttgtagagagagagtgaggctgaaggggcaacagagtagagaaggagcaagaatgcaagataagaaatagtggtttatgggtctaagaattgtaggagaaggcatccttgatgttttatttataattttctcgagaaagttggaagtgtaaaatacaaatgttaactcacctgttttttcttaatctaaattatatgtggcttatgttagttacggtagattttgttcatcagtagaatcaatgatgttaatcaatcactcaattgttgtatgttattaatatttattctcggatgtacttcagggtcttatgtcttatgttatggcatgtctctgtagtatcaagtaatttttggattaccagtcggcagctcatggtaatatcgattatcttttcagataaaaaaaaaaatcaaataactggattacaaccaaaaaaatgaaaagggatagaaggtttgaaacctatctattgtctatattcatttaaccaactttaaaaacgaaagtttttgattcaattctgtgccatcttgatttttatcaatttatttttaacataattaatgtaaagctaattttcagcacgaaaaatacataaaaatacaatcaatagacacttctaagttaacttattatttaagtttattttaataaaaattgagttagtattattttttattattttatactattttaaaaaatataaattctaatttgtaatttaactaaataaaaaatttaattggtaactattttatttgtttttaatattaaggtttacttactttttattggtgtaaataaaactgatccaaaatatcatttactacattggttatattatatattatttatggaggaatttgttctaaccaaaaaaaaattattttctacgtatagtacatatcttactaacttatgtaataattcttacccaatatgagatgctctaataaaacaactactacatcatgttagataaattaacaattaaccc

SEQ ID NO: 80555 - DNA, 786 bp, Cannabis sativa
ttatttatgctctcttcgatagaaaataataagattttttttattattatctttttgtacctctaatttatattcttgaagttatgattttggctaatttcatttacttaaatagacacgtcagcacatttttcaacacaatttatcataaactactacaaaaatttgtgtttatgccattttttgtaggcaaaaataggggtttgccttgacaaaattgaattaactttagtcggtgctttttttggcaaaggtcatcgaaaatttgtcagtgctatatcaatgccaaaaaaataggtattgtcaatgcataaaaatactcgtgaaaatagggcacgctacaaaagagaatcatgattgatgtaattgttttatcttttgtcagtgtcgttttgcactaaaaaagagtaaattttcattggcaaaaaaatgcactaacaaaagttaacttattgctggtaaaagttaaaccattgttaacgataaattgcacagactaaagaggctgaattgattcatggtcgggaaaagtttgcatttttcaattacaatttaatttataattaattaattttaaatcataaatcaataagaataaataaaattcatcattatactgtaaaccgtatcatattagcaacttatcacgttcagatgaccatattttattttgattcagaaacacaaattaatctgaaaaaataatcaaccataatgcacagaattacaaggttcacccccttggaaacacattccaagtggttacgtgtaacaccctaactatct

SEQ ID NO: 80556 - DNA, 1740 bp, Cannabis sativa
ttatcagagtggaccctttgatagttatgtctccgcctgagtttagagaatatgatagcttcattggtcataggagcattttagcttttgctcggggataaccttataacacttcactgaacggttgcacccacgcacaagttcttcactagattccccttcttgtcgttgttatttttgcttatgattgcacgacttgtaattgctcctcttatttactcgtattgtcgtcttgtgtgcagatactccagaatctgagatattaaagtcttggaataaccagatctcagttgccatggatgaggccaggaaatcccaagaaaaaggcaagaagaagactaagacgaaggcttctaggactcgaaaatcgcctcctcccttgacttcttcatcatcagacatccgagagatttctcctcccatcaagactggactttctccaccaggccatcctactttggctagcgggcagaagggacctagtacctcccaaaaagcatcagaggttctccttgctccgggagagcagtcctctcaaatcattcccccgataggagtgataatcttagacgccacacctaacgtggagggttctgatgacagcttagatggactcgtctttccctcaaaggggactccagctaagtctaagcgcaagggatcaaagacttcttctaatctcagcgcaaagagggtcaagtctttggtcccggacccaggggcaactgagataccatcgactaactcaccattgccataacatcagtaacaacaccaataactacattaacaacaacaacagcagtaactgcaataacaactgcaacaaaaactaccacaatcacaatctggacaggtacctctaccgcaacaacaacaatctctatctcctcgtcaattacagattgtggcatctcagtcctccttacacccatctcagtctcctacttcttaacaagttctcgtgcgcaccatccctaggccaaattctactgatccacatcagcctgttgtaaggggtaaggctccttcattgggattctcctttcccatgaggccacctgctggccacgagtacctcacgaaggcctccattttgaagaagggccatgagcgggagtaggtaaatcttcagaagtgggttacttggctatcttccatcaaaacagccaagattgccgagggaatttcccagcctttgtctcctggtcccgtgctggatctaactgcagtgagtcaaaatctaatacctaagatgggtagggttattgccccttatgctgctgagatttagtaaacataagctttagtgtgaacgagcttacatcgaagaagtgggtagtgagaagcattgttgatctatacactttatcactagccgccaaatagcaggccgctggggtaagtctcaaccttctgatctattctcacttgtgatacaatttttattaccgaaatatgcctagtaatttctctctaccttcctttctctagatggcattattcgaaaagaggatagccaaagaagcggggaatatgaccatagaactaaaccagctctgcctaaagttcaatccttgaccattgaaaacgaggccttacgcgctgaaattgagcaggtcgaaacccaggcggtctctagcagccaaaagatctaagaagattggaaggtcaggctggcagtcgaagaggagaagtgggatgccaaataccggaagatgtacttgttgggttttatgc

SEQ ID NO: 80557 - DNA, 2536 bp, Cannabis sativa
atgagtttgtgtggtgtgggaacattttgcagagaaatgtttttttttttaatttaatgttcatctcagtcttcagtgggtttggtggaatctcctttttctttctcatttgtatatattacaagacaaatattatttgtctatatctttaatttattcataattataaatagcattaattagaattatgtatattatcttattttgaaacatatccatcacactaattaatttttaatgttaagttattagtgtttttttccatatcatttctcacaattttattttatttattcaaacggttaaattttttttttcatataacggctattaaacgtacatccatcccattattgattttcttcctaattattaatacattcataactttttgtttttattaaatagacaaatcatcttgaataactgtttgaaaagtaacgggaacaaactccatactataattacgataaacaaattaaaagacaatcagtaattgccaaacaatcaacaatcttgtttgcagattgtttaataaaaacatgtgaaatattattgatcacaaaaactaaaaaacgataattagaaataattaatcccaaaagagaccatatgacctgaactatgaagaactcttgcaatttgcctcaaccaatatgcgtgagaactcctattacttgatccaacttagcgcttccttcaaagcaattgcctcaaccacaactagctaaatcccccaggtatctgttttgaagaatgaaccaacacattaccatgatggttacgagcaagccatccaatcccaaaaagtttcgctctagaaatgacagagacatttacattgattttaatcgtatcaacacttggagtcgaccaatgctctacactaacacaagcgttggaaaccaaagtgttagttgaacgttcatcaccatccttctattaattaaagtaagacaacactgcaaccaccataccatatcagccaatgacgagcctgccaaagagacaaacaaaccatggcatcatgacacaactttgacttagaaaaactctccaaaacttgatgaatccaacttgagaaatcaaataccgatagaattgtcataacacctcatcatccccctcctaacacgtattttctaataggcaatcaaccaaaatgtaaagaattgattcggccctatcattacacaccggacaagtaacagaaacatccacatgcctaccctttaactgagacaagataggtagacacctagaacaagctcttcaaagtacgtaaatcattgactttcagcaggattttgagattccataaggttctccaaaagccatagttactatcttttaaccatcttccatgcaataactggagatacttataagcacttttaacactatatatctcagaagtttcttaaaatcaatactaatgattcgaaccatgattatcattcaaaacaatattcttaattagataacggtcaactgcattgaataaatcattaagaatttcgtcatcccactctctagcccctgtcaccataatttgttgaaccttcactccctcaaaactcggatggaattgagcttggacaataaatttcattaagactggaaattgagcttggacaataaatttccatatttggtttcttcctcccatccgagttttgagagagtgaaggttcaaattatggtgacaacagctctcccaaaacatcaatggaagcttcaacaacacacctacaccctacttttaatagctcttgagcagccagaatacttcaccaaatataccttgggttagacgctaactcagccgtcaacaaagttccatgaggataatatcgtgccttaaagatgcgactaacaagtgagtccttttgagttaggaagcgccaaccttgttttccaagcatagtatgattaaaatcaagaagactctaaaaccccattcccccatcatccttatgcaccaccaacttatcccacgacatccaatgaattctcaaaccattagctttagaccgccactaatacttacatataatttgctccatctacaaacacaactttaatagaagcaagaaaacactcataacataattggaaattgagcttggacaataaatttcaataagacttcctttcctaatcttgaaagtgatttactatcccaactttctacccgtttctgcatcatatctttaaggaagcctaatgtagtattctttcccaattcgatagtattaggaaggttcaagtataaattctgatcaccaaacacttgcatttcgaaaattgcttgcactcaagcacgattaaactcataatttttaccaaattactcgtatatataaatatagtgatttattaccaaattatatatatgattggatgaatgtgagagtcagtaatcccgtatgtgatctgtaaggggaaatatcaggtaagttgtgcaatttcacattgcctggggatggtcaagtgggatgattctgagaatgtgtaggtatgggactacacagtt

SEQ ID NO: 80558 - DNA, 1508 bp, Cannabis sativa
cttaaaaaccgcctctaaagggtgtttttgtagtagtgatgggatattgaattctaaattacatgtcattatcaataaaataccccaaaaacaaattgataatcacactaatttaatgttattaacttttagattttttactctttatcacatattgttgaatatttaaagtaaagataacaatttaatattactaacaaaataatttaaccttcataaagaaaatacagtattatgattctaaaagttcatttgtagcatttttgttgttgaggaaagatctctgcaaaacacagtctagaaaaaataaaataatagtgtttactttaaaaagtgtcaagatgatgtcgtttgataacattcgttcagtagagcgcgaaaaaataggtagtcaacattacaaatatatagtaattcattccctgtttgaattagtaatagagctaagtctaattgaggtttgatactagcgtgactcagaccgtacgttcagtgtgaaattaggaaaaattacttagaattttagatattaagttttctatagaaatctcaaaatatgaaaataaactaaacgagcctcctatttataggaaagtatgattgaatatttaaatttaaaatactaataaaatattcaaataaagagcatattctaggatatttttttttttgtgttgatctggatcattgaatgagggtctgccattcaaatgttgactatagatattctacgcttgatctggtctattaatcttgtttcttgatgaatggattaggtttaccatctttacttgaatgatgacctttgatcttcgagattggacgaggtctgtttgatcaaaatttgaggctttgatacctaattcgtactttcccttatgactcaatttttgactaggaggattctaaatttggctttcttcatgaaacatcaattgaaagatattttcaatgaaattagaatcacgtaaatctcagttgtattcagcaagatatgccaaaacactactgcagtggccaacaattgcaccaggcccaaataccttttacggcccaaatcggaattacaatccttcaaaatcaagtcagttaatataactcactcatccaaaatacattgggctttggctaagatagcccaaacgagcctagtagctataagaccaatctaatacaaagaataagaacgagtctataattgaagcataagaatcgatccttcctcctggaaaaggagaagaccacttcccacgttcgttcttcagaataggggaattcaaccatcagagaggctctataaaagaagaacccaggagtcctgaaggaccatctcatcttcactcactgaacactcactcaagaattcactaccattattattaccagtccttctccatcactctacggtgaaaatatttattttttatcttctttatttattcttcatttattttatttactgacttgatcatcgaagtacctttggctggcaccatctcggtgtccca

SEQ ID NO: 80559 - DNA, 1435 bp, Cannabis sativa
tttgataataagttttgttattgagtaatgtttattttattgatgaatgtaccagaaatattatttctttatctattttgcacaaacaattatttaacattggttttactaataatgagattattatttccaaatttactacacctatttgttatgcaaaatagaaaaacgaactttatgtgctcaagccaagtactttatgtgctcaagccaagtgagttatgtgctcaagccaagtgagcaactcaagccaagtgagcaattaattttaaataatgaattgtttagagtatcttttcctcactctaataagaggcaaaggtttcgaatgatgatgaacgtatctatggcatttacgtttaggccatattggcctagatagaattaattggttagcaaaggatggtcctttgagagaactaaaagttagaactcttctggtatgtgaatcttgtcttgaaggaaagatgcctaaagacctttctctgcaagatttcttcggactctaagataggttctctaacctcattatattctccaaacggaagagctcgaggagactcttccacttactctttcactgcttcttctccttcaccatcaggaaatgcggctacatgaaactcactctagtcctcgacttcttagacttctttgtccctaacatcaattttaacatcctccttaggaggtccagcttgttatacaccaaccatcgcaaaaaaccaagaaaaatgtgggtccttatccaaggcctttctctaagtttatttggtttttcccataaccttaaacgtagaagaggggtttggtttagtggtatgcttcgcgaagcagacagtgatttttgctagagtagagtttttctttgaaggctctgaacgaccttttagcaataggtctgggacatctgcgcagatcttgtacgtccacgcagctggctgataataccttcagcctatgttcattccccaaattaaccagtcgtatccttctctactgattaatttggccggggtaatgatggtgttgtatcgcgagctccggggactccaatgagttacttgtgacctcccactcattgaagctcgaggtcgatgaattttaactcgatgaagatgatgctgcacgaagtcttggttggttctagtgaagaagatgaagtaaatcgttatctatccgatagttacctctccagtaatcgccagggttcatctacaaaagaggaaagacagcagggaggtaagaactgaatgtatgattttttgcaagagcaaaacacgttttatatgtcgacctaatagattcaaaaagataatgaatctagaaaattcccaaaaactttaaataggtaatttcgattagtttctagcaaaattaacttggagctgatggaaatttgggaatgtaaaagccatgagtgtgcatctaaatc

SEQ ID NO: 80560 - DNA, 1104 bp, Cannabis sativa
ttgatgttcttgaaaatgtagtgtgattagggaatagttcaatgaaattggttatgagtttcttctgggaatctctgttgtcatttattgataggtatattctactttttatcaaaagaaaattaggctgaaaaaaagacccggtatgaagaaaatatgtaagagaagagaagggaatgaaagatgaatgatttttttaatctttgtttggatttgtatttgttctaaaatttcataaaattatactacactcaagtttaaatttttctgaaaattagatttcttaatttcttgattcaatccaaacacgagaaaatgaaattctttaggtttccttttttcttattctcttaaaatccaatgttcaaaaaaggcctaataaagccctggagctgttatttggataatgttgattgttggcgagagagggacacaaaactgatctcggtttgatacttttcgatttcaagtttatgttagccctggagcttatatgaatgttagtactttctcacaaatgagctgctcggtttcgtcttctatgttcaaatgggtgcagccatagaaccctctcttttgtcatgtcttatggggttttaataagtaagttgcagcagtaaactttaactataagattgatgaggaaaagtccttagctggtttaatacagttgcaggaaatattaaaatgtagtgtttcgttacttgttatagagatttttgtgcgatcagatgacaactactttacccactaagggcacaatctgaaatttctcaagggcgaaatcctttcattagcgtagtttaagttgaatgctaccatgttagttgtaaacttgagagactgcttcagttcttgttaaatcaatgattttgacatatgtatgtttgtgattgtatcaagacttaaattatgaaatggaaatgtttctttttacttatttctcatgcattcaaatgtcttttctttatctcttttcgaacacattagcgttttcaagattttaaggttttgcagtgtctttgatctcattgggtgtttatagttctgtgaacgatattgtacggttgagtaatgagctctattatggtgacagggatttcg

SEQ ID NO: 80561 - DNA, 530 bp, Cannabis sativa
caagcaatggagctcaatttcaaacagcattctgatgctcaatttcagaagttttctgccttactggagcagcatgtagctaagactgaagagaggttcacccagttgccgcaagccagttcagagaactccgagggtcacgatgggactgcgagggagtctggccagtcgaacactaggaggacagggatgacaagggatcatcaggaggtaaattccctactcaagaccttacgggtcaaggtacccaggtttgatggagaaaacgttgaggattggatctacaaaatcaataagttcttcgatctgcacaaggtggatgatgaaatgcgcttagcgatggtcgcgtttcacttggaggggtcaccttcaacatggtttcaatggatggagaagggaggggcactcactgattggtcttcttttatccgagcactgcaacaacgcttcgggacatcgatatacgatgatcctttaggaaggttgtcgaaactgactcaagcaggccgagttgctgattatagggcaga

SEQ ID NO: 80562 - DNA, 1238 bp, Cannabis sativa
tattatatatttactattaaataaataaaaaaaataaacaagtaaaattcattaaaaaattgtggaatgtaaagagagaattaagcttctcatgaacccaagtcagttttctcttactcattacacaatcttggatagatacaaaatgattaatgatggccgagatcatgtttattagagtaaagtgatctggtgcaaattgaatattcctaaacatagttttatgttatggataactactttaaatagactcaaaacaagagaaagactttaatttcaagttcaaaataatagatggttcgacttgtcttttgtgtaatgctcatgaagagacaacttctcatatatttttttaatgttccttctctcaacattgtttggaatgctagctttgtttcattacagagtatcatgaggtggatcgaaaggttcgagaaaagtttgttcaggaagcacattttctcagctgttatagcagccttggtgtacctaatttgaaagactaggaatgacaaactttggaacaacacaagggcatatccgactcttatagggcagcgggtaagacaattatcaaaacaaagatttcatgtgtaatgccgaaaaaatgacttattgagtagtttgatcgattgtaagcaactgtaattaatacaaactaaaagagttgatgtatagattttcaggtctctttggaggtgctattaggttgtataaactgtttgtggagaaatacaattcagctgattcataaaaataaataaaaaaaaaactcattaaaaaaaacacaggagaaaaaatggtaaaaaaaatgtagaaagacttaaagaaaagtattttaaaaaaacaaatgtagtaagaatttgagagattattttttaagaaacaaaataaatgtgagagatttcaaaaaaaagatagaggaaaaagacaaaaaataataataatttttatcaacaaaataaaacacataaccccaaatatgaccaaaaaaaattaaattactaagataattttattaaagtttgagaaaatataaaaagagcaaaaactataggaaaataaatataaaatattaatatagagttatcataatttagataacaaaatatttttatgtatcattatttattttgttttgaagataaaattatattttctcttttgtttttagaataattataagtaatatatatacagaaaaggaaaaaaaaatctaaaatttaattttatacata

SEQ ID NO: 80563 - DNA, 1935 bp, Cannabis sativa
  modified_base (486)..(494): a, c, t, g, unknown or other
  modified_base (896)..(896): a, c, t, g, unknown or other
gtccaaaatagtatttaccctagttttaattataagatcatatatttacatattttattaataaaatttgaaatgatcttattttcacattaaaatttagaataataagcatttttgcctcttgaacttttgacgctacctaattttgccccccaaaatatacggttgtttaaaaattgtctctaaaatataatagttgcataattatgccccttctgttaggttctgttatctttacatttaaaaattagcatttttatcccctaaactttgactaatataaaattttgtccctttttatttaaaaaataattttaaaattataatattctatatttttaagcaattataataacttattaattttgaaaaaagaataaaaattattaaaaaaaaaccccacaaaaatattaaattaattaaaaaaatatattaatttttactttaaaaatttaaattattcctaaaaaaatattttcaaacttnnnnnnnnntataaacacgtatcttaaaaaatcaaataaaattattgagaatctaataaataatttaaataatctaatatttttttgaagaaaaaatcaaacttttcaacccttaaaatactaaaaaataaacatatataaataccctaagctgacacatataaattttttttttttgagaaatgctaattacaacctcctattacaacctcttagtcaacctccacgtccaaaatcacatgccaaaatattttttttcatagcgatattcgttatagttacagtatcatccctataaatttttgaaaaatgttgaatagtttacagtacccaaaacatagttcctaatattccagtttaccacacacattcaaaaaacttcaaacgtattttcggcactgtaaactattngaaatttttcaaaaatttacaaggatgatgttgtaagcataagaacaaccccgtaaaaaaaattatttggacattagttttcgggtgtggagtttgactaagaggttgtaacaggaggttgatggtagcactcctccaaaaaaatttatcaacaaaacagtattacaatttgtaaaatatgaaggcattataaaaaaagcaaattatacaatacctcatcatctttttcaggtgtttgatccatcatgagtattatagctattagattaattaggagtcacgttttgagtatcttagggctggtatttgtccaccaaaaagtaggggtaattaaagtttggaaacttgtaacctgcctcattgtttattttcatgtactattttaatttctttaaaaaaacgtactattttaattaaaataatattatattttataatactttttattttctttaatcataacgaaaaagtcaaaatatgttatattcattataatggtaacataacaagtagtatgtctaaatataaagggtaaatactattttagaccctgtgttttgcaaaagttactaattagatcatctgttttgttaaatgacaaaatagatcctatattttctaaaattgtacaaatagaaccctgaactgattttttgtcaaaattaaacttaataataatctgatctagagatgttatgacaaaactggttacactttctgtatctatttgtgttagaaattgtcttaaagtttgttatattaaaaaataaaactgttgaaaatcgagcttaaggtcctttttttatcattttggaaaatatagtgtctattttgtcatttaacaaaatagagggttcaattgataacttttgtaaaacacatggtctaaaatggtatttacccaaatataaatgtttcctaattttaagttcaacttttcttataaaatataagaaaaattttatttggaccccataaaattataactgcaccccaatattaaaaaataattaacttaaattaattttttaattttttt

SEQ ID NO: 80564 - DNA, 3781 bp, Cannabis sativa
aggagcgtgaagcatgccttgactatctgggagctagaaatgtaacaacacatctccgggaggagaagaggccgtttgaacagtcatttcacatttaatgctgcatgggggtaacatattaaaacccccataaaaggattggatagatggtgtaagcctcttttacgacgattacacaataatcaacaagtctagtgacgactccattatgaagaatgacatcaatcaaggaaggataaagattaccttcacctaatccttaagatacctacgacataggtcatgtatgtcctattttatatctgctaggaatttgtgcccctaaggggatgacacttaaagacaagtgaaccctttctagtgatcctcccaaaactctataaataccccaaaaaatagaatgaaaggggatcgctggaagaattaatgaatcaaagagaataaagaagagagagaaagattcacctagaacattcgccgtataagaactctcataaatgataaagactcgcggactacgactcattaatgtctgaaccacgtaaaaaccacttgcattaacgctctcatagctctcgttattataacatttaattggttgccaaaaatctcgatcaacattttggtgctttcatagagagctgaaggaagtgttgttaaaaagaaaacagtcaaagagtcagagtaacaatggtggaaactcgaaacaacacacgtcagccccgtcctcctcaggatgctcaaaacccagaaggcgaagtagtggcctcacgagtaaatgtgggctctgaggaacgatatgaggcaaacgatgaggaatatgaagaaaattttgaagggtacgacacctacgacgaaggtagctatacggaactactggtcttgaggcaaaatgcggttgatcatgaagccaatcttattgctaaaaaagagcagaataaaaggatgcaagaggtaatggttacgatgcaaaaattcatgaaaacagtagggatacatatacaccctaaggccatcccagcggtaccggaggaaacactggaagaatcgtcaccgagtactcagaagcccaagaccagggagccaagccctataaagtacccttccaaggaaaacctctggaaaaatccaactttgatcccagtgagaaagaagaaggcgtaggatgcgcgaaaagtccgctcagatttcccaaaagggaaaggtccacggaggggcaagctccctcgagcgagtcttggccctcagaatcgagaggagcgaaagagcgaatctgttcactaagagcccgaggagagagggagcaaaagctgaaggtaccttccagttgacctaagacagaatatcaatgaaaagcatggcgacttaagagaccatcttgaaaagaagaaacatgcactgctaatttcggaagacacattgaatgagggaatcttggctgagttggaaatactacgcaaagacattgcccgggtctcccagagacaaaaaggggatgacttggactctgattttgaggaccaggaacaatgcgctcggcacatactggatgcagagctcctcaagaactttaagatgcctgaaatggcaacttacactggacattcagaccccagcgacaatttgtcgtggtttaaccgggtgataactgtcacgaggatcagcaatgacgcgaagtgtttatgctttccactaacactaagcgtttctgctgaggaatggttcaagaagctggaaccaggatcagtggtctgctggagcaagctacagtcagttttcggaagcagtttgtcacggcaagaaaaattaaccttgaagtcagcgccctgactaatataaaaaaattgccttcaggaactcgaaagaactttataaaaagattcaaagaagaggcttcaaagaccaataaggtagacgacggacaacagctgaccctcctcaaggctgggatccgcacggggactcctttctggaatgaactacaacaagagggagcagctaatctccaagatttgctgaaaggatccaaaagtacatcaacttggaagaagcccaaataatggcttatataggatactacttgaccggagtatcaggatatgcacctggagcacagcttctgggagccccgtctccggccactcctcaaatgagcgaaatacaattctccactaccccaggatataatcaaagcctcgccctggctcccacatcataaaactttggggcacccatgggcaatccctcggggatgagtgtccaaaccctgtcccaatctgcgcctgccattagcctagcaggacctcctcagagctcctggatcaaagggcagcacttgaactaaggacaaactacaacagagggggttatacccctcaatacactcaatacacagagcttacggacacacatgagcgtgtatactttgccaccaggcagaatacgcattagcggaagcctcctcccctttatagggatagctctcggagggatcccagtaaaaggtgtgaatataacaacgacattgggcacaacaccaatgaatgcaagaacgtggaagatgaaattgagaacctaatccgattaggtcatttgtatgaatggatcaagaaccgattactccatctaaaccggacttcaacaggaggccctttaccttagggaggaccagggagtatgcccggagaacaagtactctgtgtaccccccggaggcccattccctcaacaggtacctagattgccaccacggccaaatgggagagtggccatgatctacggtgggcgtcatatcggaggaaccactagaaatgaactaaagcgttacactaaggccataaaacacgacgaagtatgggaagtcacttaactcccaacacaaaggccctggctcatggaccaacccatcactttcacagaagacaatgcaaaactggtgtgtttcccccaccacgatcttctggttatagagactcccatcaccaataaggtcgtggcaggaatcctagtagataacgggagctgcgtgaacctattgttcaaagaagccttcatggcaatagggctcacggacagggatctatcacccagcggctcccagctcataggatttagcaaaacaacgattatcctaatggggaaagtgcagcttcttgtcaccctgtgccaagacaacccacaaagcactttaaatactgcacctttgtagtagttgaattcccgatagcgtacaatgccatcctcggccagtcggccttggtcgattttggagcaatcaccttcattcggtacttatgcctcaaattccctacttgggaagctggagtgggaacagtgaagggaaacaagggagaggcgaggcaatgctacaacgttgccttgtcaatatggtggtgcacaagggtgaagagccaagattgatggaacaagacgagttagatccccgcgtgggatttgaaacagttgtacaacctatggaggacactgaggaagtaaatgtgtacgacctcgactacactaaggtttctgtctaggaaagaacctagagccagaggaaaaagtaggatcattgaaacattaaaggcagccacagatgttttcgcgtggtgccaaggtgatatgaccggcataagcccccatgtgatcacccatgtcttaaatgttaacccagacatgcctctagtgcagcaacagagacgtcctcttgatccagtaaaaggacacgccttagagaaggaggtggataagctgttaacttgtggcctaatccgggatgtgtacta

SEQ ID NO: 80565 - DNA, 1517 bp, Cannabis sativa
ttacaccatattaactttagataactgctaaatgagcaaatgattttttttttcaaaagaatataattatccaaaatagtacatttgtaaaatcaaatggcaaaactttaaaggtcatagttctaaaaaataaaaataaaaaatacatatttattctagagacactagtccttcatttttttaaaacatatataacaaaatttcaatattaatttttgtagaatatattattgcaatttaatcctttttccatttttttttatgataaatccattttcctttcccaaaactattattcattacataacacccaccataaattagatatgaataataataataaaaataaaaaggagatgatttatgggtaagaaaagggtatcaaaatcagaaattctaattggtccaaccaatatcaccttatccacatcatatccacaccatccaaaaaaaatcaacaaaaataatcccttctaaatcccaaattgatcaaatatcatatcaccactcctcccaaaaaaacattaaccatataccaaaaccccaactcactcttccacgtaccacaaactcaactcatcatcaccggccatggccatggcaacccaagccaccaccagcctcttagtccccaccaaaaccggcgtaccctccgccgaccgatcagccaccgcttcatcatggaagcaatccatttccaccaccacctcattcatcgccacccccctcaagctctctcaccacgcctcatcacgctccgttagagtcatggccgccgacgagaagacatcgaccgaggctgcaccggcaccggcgaaaaaagaagccccagttgggttcacaccacctgagctagacccaagcactccctccccaatcttcggaggaagcaccggaggtctgctacgaaaggcacaggtggaagagttctacgtgattacatgggagtctccgaaggaacagatcttcgagatgccgaccggtggcgccgccatcatgagagagggaccgaatcttctgaagctggctaggaaggaacagtgtttggctcttggtactaggttgaggtccaagtacaagattaagtaccagttttatagggtttttcctaatggagaggtccaatatttgcaccctaaggatggagtctaccctgagaaagtcaacgctggtcgccaaggagttggtcaaaactttaggtctattggcaagaacgttagccctattgaggttaagttcactgggaagcaaccttatgatttgtaagattaattattgctattattaatacataatttgtgctgttattaattttaatgttgtatttatcatcatgactactacgtacgtaagtttgtgaatttcaacattattgttcattcgtagtagtgcttaattccttgcgtaaatttcgaatgtttaattcgggagtgttttatttgattgattttgctataactatcaattaaaattgaatatagtagtttgttttgtggtttttataattaacaatatat

SEQ ID NO: 80566 - DNA, 3671 bp, Cannabis sativa
ggtatgacacccttaggagtgtagtcttaaggcaacttcatgtagatattttcatttaagtcaccatgtaagaaagcattgattatatccatatggtggagatgccattttttgattgcagcaagtgcaaataggagtttgagggtgttgaattttgctacaagggcataggtgtcaaagtaatcgataccttgttgctgagtgtaaccttttacaaccaagcgaactttgtacctttcaacagacccatccaagttatatttagtcttgtaaacccatttgttaccaatggtatgttatccttggggcaatgggacaacaatccaagtttcattggcttttagagcatcgatctcactgtccattgcattgttccacactttagttttgcatgcttgtgcaaaagtggttggttcgatgaaatgtgcagtagcaaggacagctgctcaaaaagaagctgacagtttgttgtatgataggtagtgtgaaagagggtgatgagtgcttggggagtgaatggccatagtgtagctgtagtcctgcaaatatgcaggtttttgaagaggcttgccagattgagttgaagtaggtgttgttgctggtaagtttgaagcagtatttgtgtctgttgtggggattgttttgtagttggggacaatttgcttagtttgattatgaaattttttttcctggtgaagaaaaatattatatcaaatttaaatgcatatatactgatgaatgttaaaatataacaaactccaatttaaaaatataatatatatatatatatattactacagtaatgtgattttaatcgagtcaaaatcaacccatactaaaaggaaaacttacaaaaatactgacttttttccttatctttacaataatactgccacacggcttttttattgcccaggcccgttttttttctttcatactgtccagacccaatatgtttacttttatactgtgaacagtaacaaggcaaaaacgacgcgtccttcctggttggggactgacaaattaacaccagaatcgtagaaacaccaggaaaaaaccataaaatccggtgaagagaaaaaattactaaatcaacgacaaattaagaacgaaaaacaacatttacagtaaatttttttcccaacaacagaggtaaacacacctaaacccacagtatttttaaaaactacaaaaaacacacccatatttagatctgaaaataaaaaaaaaaaaaaacttaaaacagtataatctgaaattgtttaataatacatggcattttataagaaaaatattcatatagatcatccataagagacgactaaaaatgtacaatacaaaatcaaggttgtgaacaatggccacgtaaatgaaattttgtgaacaatgacagctcatggaatctataccaattctgataaagagcaatggaaaatggaaagaaaaacataattatgtcaagtatgaggctagtggagaattcataccaaaagattgcaagtatgaagagctattacaaatattacttacttcattggggtacgaaaacacaaacaacactgcaaatacagtaccaagcgaaagaaggaataccaccgataaaaatattcaacgacgtcagcctctacttttacttgcaattgaagatcaaagaaacagatttcaccacatatccattatgtgtcaaccaacagaacaataacacaacacctgcagcaattccaaatatcacaaccataacaacaccatatcaagagaacgtggcaatgctcgaaaacaacacaacaatgcttgaaaacaacacagcaacaacagaatcatacacacttgaacaccaatcagaaaaaggaggagagtcagaaagaagagaatttgaaaacgacaaactcaacatagttgactatgtgaatctagttgttgaagaaatggtagaaaaacttgaaaacaacagtaaaaaactagatccagaaatcgacatcaacaacgcgaagctaataatagaaaaacatcacccaaaagtagaaaaaggtcagtcgtacaaggacaaggaaacactgaagaatgtcctcagctactacgcaatcaaaaacaaccctttcgccaattatttcctcaaccacatctgttgattgcacaatcttcactgaggatttaccctttccctataatttaacaaaacaaaatcaaaacaacaacagtacacaccatcaaacaaacagaaaaacataaaatagaagaaacaacaaaaaggaaaatgcacaaagaaaaaaaaaatacagagaaatgaacaatatgataaaactgcaaaaaaaccctaaaacaacacaagatcaatacaaaaataccttatcagatttgggagactttacaaactctggctccaatacaaaatcagagtcagagttctccaccacaggtcgatggcgttttgctctagtgttcttcgaagtaccagcacctagtttccttttagcaggaactagagaagtagggctaggaggattatctttcaaactcttcttacccattgttgctcgagatttatttttcaggggttgttttgggggctttttagcaacagggagggtgatgatcagataacagccattgtgagtgaggggaagtaatatttatagaagaataagaacgaaaatgggggggaatgtagagggaaaattaagatgaagatggaataactgaaaaaaatttgaaaaaaaaaataaaccatccacaactgtacaaccgcctgaaaaataagggatattagaagaagatgatgaacagggaaacatgagggagtgagatttgagtaatgattatttaacatttaaaaataattttgaaataaattaaaacccaaaaaagaagaaaactatcaaacagtgacatccctcgtcaaatcaaagcttttttaaaggaaatttttaaaaaaattgaagtgacaaaaccccgtgaagacacatgtaagccacaaagtataaatgaactttgtaccataggcagtatcagtatacttccgtataaaacaaaaaattaatacacagtataaaagtaaaaatacacgtgtagcagtatttttgaaataaaataaaaaaagttaataaaccatgtaaatttccctactaaaattaacacaaaatatagcctcgtgtatctttgaattagaattaattagcgactctattatttacttttacaccacttttattatattattaaaagcaatgtagcttccataatatatatatatatatatatatatatattatatggaaaatattatttacttttacaccacttttattatattattaaaagcaatgtatagtttttacttccttttgcatacttgatgtattggaattggagtatttgacaatattttcttttaacatcaagtacttgttacatttcatacaagaacttacaaaaattgatacataagctatacagatataatgaatggatggatctttaatctggatacttgaagaccaaagttctccaagtaacatggcgtggtatttatataaatctgtatagtcattttcataaggatcaaagctgaaattatccatcacatagattaattaaaaatgtaagtattatcatttgatgaaccaggagtgtaggtctcacttgagaagcccatagtactcatagtagttgta

SEQ ID NO: 80567 - DNA, 1120 bp, Cannabis sativa
cagttttattataaaaatatacataagaaccacataatttaatttaatggtaaaaaaaaaactttttaaatggtagaaaacttatgttaagttcaatcataatattttactagtataattaagtatgaagttttacgttttaatttaatatatttttaaaataattaatattaaaggataaatatatatattttgtcaattattaggaagaatcgtgaatgcctgatataattataattataaagtagttggaagttagaattattagtggatttaaatttaatagtgagggaattaatgcacataaaagtgaaataaaaaatgtttttaactcatccgtgtttattttgtaccataaatcataggtgttttttttttttttttgaaagaacaaaagttcacatcataggtgtttgttgtatgtaatcatatgcatttttaattgatattatttatgaaggagtattattaaaaaatttaagacactgttttacttcataatttaaaaattatttttagttaattaacagtttttaaaaattaatataagtcgtttaacaaaaaattttaaaaataattttttaaaaattgagttttaaaaaactagaatttagaaaatatcaaaatattgtttttaaatttaaaaaatattttgttttctaacatattatattttatacttttgctcatatacttagattctagatctggaaccaaacccgaaaccagacccggatgggttcatattatggtatggtgttaaaatattgatttttttagtaagaaaaaatctagaaataatttttaaaaatttgtgtcaaacattattaaatttttgaaatggaaaaaaattgttttctattcttactttcaataacacaattttaaaaactgaaaaatacaaccaaacaagctctcagcttccatacttagttttactatctaattaaagaaagaaaaattctcaaaaatggtttaagtttcctttttggtaccttgtctagtaacatacatggtggtttctcatgtatggtaatttaagtcattaatttgttaggttcatcctaaaaatgatgtgaagtaattgtgaattctttagatttataatgaaaaatcatat

SEQ ID NO: 80568 - DNA, 1429 bp, Cannabis sativa
  modified_base (581)..(586): a, c, t, g, unknown or other
gtggtgacggcggcggtgatgggggggcaaccttcctgggcctcccttttttcctggacaacccgagtcgacgtggaggtgacccagtagagacagtagtgttcgagtttccttgagacccagaaacgttgatcgaatccatgaaagttcaaacaaaattacagctgaaatattttatgcgatcgtcaaattcagtggtgaagtttcaaagaaatgttttttgattatggcgccagaacaagtttacaagaaggctcttgttattttcagttacttctgttatattaagaaagttgcttttacgaaactacccttctaaataatgggctaagaccatttgagactgtttttccaaaatttgtggataataacttcacttatcactcatgtatctacataagttatagaattgttagttaagtaatattacagtctaaaattaaatttatatatttattttttttgaaaaaaattatatatttatttcgagttaaatttagataactatgttataaattactctaataaatacatgtaatttggatgtgtttgctaatacttttttaatcagttttttgttnnnnnnattagaaaagtgaaaatatttttaaaaattatgttctataaaactattttcaattttttaattgagaattaaaattttaaaaattttaaaaacaaaaaaaattacttcctaaatttttttaaataatttttttcttaattttgaactctcaatccaatctagacctttgaacttagaccctactccaatcttaaacccagatccatcccccaatatcgacttcggtacaaaacccaacttaaataaaattaataaataaaaataaaaataaaattaataaaatatactttattttttgtttttaaaattaaaaaacaaaactaattatacaacccatttttattttcaaaattaaaattttaaaactaaaattttttgattaaaaaatttaaaaacaaaaaatgttaccaaaaagtatgttttataatatttttatcattcatttgacacgtggattatttgtttttttaataaaaaaaattaatatatagagagaaagaaagaaagaaagttctttacgcggctgaaagggaaaacttcaggcgacggcaccggaagcgataacggaaacggctagcggcggcggaggaggacaaggtgggttacgtactgctctggtcttagtttacatgagatatgcttttttattttctactttctttaatctgatctgattagaacaatattccgtgtttcgatctagaatttttcatgatgctctgagtaacataatcttatttttcaggattggatattgatttcgaatatgattgagttagggaaggttttgttagtctgtaagtgtgtttagtttaggtttggaagagaatttttgaaggtgtg

SEQ ID NO: 80569 - DNA, 762 bp, Cannabis sativa
gataaaatggagagcttaaaacttatttttaagtatggagatgatcaaaataatatatttttaaatatttctattttttatcaaatatatcagatagtttacataaatatttaacagtcacattcaaaatactttatccaaaataaaaatatttaatgggttttgtaaaacaaacaaaaaatattattagaatttttctaaatattgatattttgagtgtagctaaaatcaaaagaactaaaataatatttatggtcataaccgtagtctaatgattcgaattcacgcttcatcttacaaagtgaagatcttatatgatttttcatgggaccaaactttggtatccacacatctagtaaaaaatgaaggctaattaagatttttgttcgtgttaaataccaaattgtatcatgaccttgtatgttgttaaaaaaattactttgaactattaaaattgttgaattcaaagatttttatctaattaatgtatgtttaaagtaactattgtccatataccaaagcatgtctcgcgaacttccattcacattaggcgtccgttagtaaaattgaatgatattgaactaaagtctatgaatctaataatcttaatatttcaaaaggaacttttaacgacttgaaaaatttggagacacaatttggtacatgctaaaattagaggagggatcctaattagccaaaaataaaacatattgagttcgtttagtacgttgtattacatttattgtattgtatagtattata

SEQ ID NO: 80570 - DNA, 2113 bp, Cannabis sativa
agtgttaccaaacgacaccttaagttatttattatttatatgagaagatgtatatatctatatctatgtatatctataattttcattttctagagatataaatttaattatagtgaaatgcatataatgcattgacatatatatatttatatgtcacgtatgtgctgatgattaaaatgtttgataatcagttttagcagttattgataatttagtagctaattaagtcaaaatttttaaagtttagtagtattagctctagtggggtttaaatcaatctatatcgtttaccttttcttatatatagtggtattaggttaaagcacctttaacttattattatcatgtattataatttattaatacaaacctaaccaaaaacttaattagtcatcaaagacgtggttaatttgtgggaagataaacccttgtaatttgatttgaattattgatagtaaacatatatataatagatatatggttgtacttttaatgggtattactcatgtgtggttaaaattagaaaattttgagtttttatacttaatttttctttctaattaaaaaaatctctcatttttatatcatatgggttgagattgttccatcggtaaaaaaaattaaaaaaaagttttttagcaagaaaaataagaaaagaaaaagttgagtttaagttaaatttttttggataaacatatttttgatatagagtaaaaagagatatttttaattaagtagttaaattaagcatagaaagtcaaatatgtgatttaattattcgttattagatcaaaatttgatggtttaatatttttaaaattaatatttacagttaaatttgtttagtaattcatgggtaatacagtgttccatatatactaggttgatgttacgtgcaatgcacgtataattagtttttttttaattagattcagttaagtgatgttaagtacaatacatgcatgtttaattttttataattaggtaatgtattttttttatttttaaatagggtttgagattttgtttttaagaaaaaaaaaattaactattgttagattggtgtgtcatttagatatgattatatacaaacatctttttttagtttttaaaattttcctaattaagtaacgtatctgataatgcatatattgtaatttactatattcttaaccaaaactcacataattaaataaaatatttagataattttttttattttaatttaaaattaaattaataaatttaaaaatatgaataatattttaagtattttaaatttaaatttttataaaatatctacataatttttattttcaaatatatataataatattataaaattaataaaaaaatattctattaattaatatgatattctattaaagttaatctaaaaattaaaaattattgttaaactaaaaatgggttaatataacaagaatgaatgataaaggagtgaaagtatgtttaattatttcttaggtacctacacaaatcaaatggatgcgacagagacatgatttcctaattatatatataaatatataaaaatgggtttcagtagtaattcataagtcttatagtactatatccatatctattatatatgtttgaaaaatggctagctatatatagtatcatgaatatccaagaattaattgagaggctcttataatttttacatagtatattatataaatcattcttgaaaaatgtgaataaaatagtttgtggtttgtcacattggttaggaatagaattcttctagtctaaaggctctacataaatattagttttaataagattagaaaaacacacaaatacctaccaatttaccaacatatagagtctctagtttctctctatcttaattttgtctctagtctcttattggtgatagattgaatgttcgttttcgagtttgttaaggtagcgaaggtggtgctttcgactgctcgataatcattgtatccttgaaaatagttcttcgctaatcctctagtatcgtttaagtaaaaggagaaaatttgcttagacaatgtaatgtgttcttcaatcaattaatataggctaattagtaaatttctcccctaaactttgacatgtacta

SEQ ID NO: 80571 - DNA, 897 bp, Cannabis sativa
atgctaagcaacaatttttttgatgaataaggaaattgtattgctcaaactatcaattacactctcagtttatgtacaaatccgactgctataccatatgcatctacttacagaatattacaaaaaattacaaattactcaaccatttcttatctgcttcttttgctttgcttggcattaccctgttaatctccttttgctcccctgttttactttatttacaaatgacaatgatttgccattgcttttgattccacagaacatcattccttgcctcccatacctggtatactaaggcagccagtattgtcttcatcatgcttcttctacttgctgaaacatttttcatcttgctagcagtttgcagcagcttctgcaagccgactgctgctgtcccccagttcagcttcctctcacttccatcaggcactttctactatactcacagttaaagaataagtgctcaatagtttctttttctttctcacagagtagacaagttgcatctacattcagatcatatttactaactatttctttcgtattcaatctaccccacagcaccagccaaagaataaatttatgcttaggaataatcagtctatcccacacataatgacaccaagacttcttctctgggctactgtatagtagctgataatttctttaaacactaaatttctgcaatgtaaatgcagcaaagtcagttttaagtttcagctgattcttaactccaactagctttttccatgactaactaaaatctgtgggagctatataatcccaccaatgtttgtcctttagatacacattgtgtatccatttaacaaacaaacagtccttcttgttagctatatcccatacatatcttgtcatggctgctatgttccacttttg

SEQ ID NO: 80572 - DNA, 980 bp, Cannabis sativa
atcaattcttcgattccttcataagacacattcccatttgaagaaaaaaggttaataaaataatccctaaggatgataccaatttccttttcatttgaaacaagtagcccactagaattcttgagattccaaatgtgattccttttccgacgaaccaaagtggaagcatggaaggaggaagtattcctatctcctttagaaagccaaatctctctcgaacgttgtttccacattgattctttcaaactccaaagaatggacaggttcttcaaaatggcctcctcactcacttgatcagagtcactaacatctttggattgaagagcttggagctcgacttcgagatctttgattcttttatcacattcaccgaaaacattcttgctccaccaacgaagagcatgctgagttcgattaattttcttccccaaacaccccgcctcctcattaggaaggcgacacacccaggcctccttaatcacgttccaactggactcgtcttcaaaccaggcttcgaaaaaccgaaatgggcgaaagcctttagctttggaaactgccgaatcaaagattataggcccatgatcaggtaatgggcatattacggacccccctggaagggcaattcgccagccaagtggtatccacaataacacggtctaacctctctttgaccagatagcccgaagcacgtttgttaagccaagtaaatctacaacccctgaaccccagatcaactcccctagtagcaagcaagaacttctggagagtagcaccatcacggggcatgaaggccctgcctcccgatttatcctctctagtcaacaggacatttaaatcacccataagcgcccacggaccattacaagaattaaccacatcttccatgttatcccagaatgtacatttgtgttcatcatatggagtcccataaatggcaaaaagattccatgacttccccaccgcgacatcaaagaccgaac

SEQ ID NO: 80573 - DNA, 1572 bp, Cannabis sativa
agtagcccatgttcttatatatagctcaattctctaccatttatttcatgtgggacattgtccacaatacatataagtcacacgacatgattttatatcgcctgaagcctttgtaccatgatttcatgacatgttttaggagaattatatgcacacacaagcgacatgtcgccctaaaccggacgataggtcgcccaaactactatccaaacttagatatcacccgcttgaatcttgatgtgtgactttcaaattaaagatataaagtaccactttgatggctaaccttttaatgtaggcacttgttttgttgtgttgtagtactcattgaaacctatttctgggcaccatggttgtctattgtgataataataaattaaataataagatgttttcttaaaagaataaaaaggaaatagatttgttgaaattattggaaagagggtacacatgcatatcattcttaaggaacccatgaaatgtaaggctggatcatgagctgctcttgtcgcacatgcagccacacacaacacagccatgttgtgacttgtgacttgtgacaatcaaatgtactattaacaatacaaaatcatacataatgaactctttattacatatatatggacaaaaagaagtatgagagatagagaggtatacttatacaattttattcatttttatcatgtaatgataaaattattttttaaaaaccaatgttacaacacgtttttttttcagaaaaaattgatacaacaataataataattaaaaaaatatttttttttactgcaacatgtttgtgtaacttatttaatggctaaagcactagtcatcgattacatatagtgataaaatagtttttacaatttcttatacttatgtgaactaggaatgttattttatacactctgtaatatttggatgcatatttgaagtataatcaaaataaaatactctattaacaacctactcataatacttacataataatcttattttatactctatgtaatattttgatgcatattttattagatatcttgggataaactgtgtaagcataagagagggggtgttatgggttttcaaaaccttcatgattttaatcttgccgttcttggtaagcagggatggcgtcttctaacaaggttgaattctttagcctctagagtgttcaaaactagatattttctaaatggtaactttctttcggctcagcttggatctactataagttttgtgtggcacagcatttgggaatctcaagagtatgtgtcgaaaggtgtgtgttggtgtcttagtaatgaaaggaatgttcctgtgttagggaaaccatggcagcccaatagttcaaatcctatggccatctctaatagagaggccactatgtttaacttgctcaaaatggatggttctagatgggaggtggacttgattccaaacttgtttgaggaaagattccagcgactcattcttggtatcccgttacaagtggctgaggttgaggatgttggaatttatatcctaaaagttagtaattaatagataatatattataaaatatatgaaata

SEQ ID NO: 80574 - DNA, 1595 bp, Cannabis sativa
atgaaatgtgagtatttgatgcttagattttgtagtatatatgatgggtaatgtgtttttagctttgatttgataaaaaaaaaatgaataattttggaacatttcattggatgtgttcttgagcattgaagtacaccaacaacatgaaaaagtttcatttttcctccctttttcttattttgattctgataaaattgagaaaaatgtgtttgtaaaaatagtgtataccgtagaagagattgttgaccatgtattgtgtgttggtggttgggattttgggttcccttgttgattccaagccacaacaccactctaaggggtcaaggtggctacctcgagatacctccttggggggttgggggggcaccccgagataaatcctttgggcgtccaccttgattgcttgaaacacttgggtataccctgaaataggccttttcttcttttttttattgctagccgaaattgggccgagattaggttggggtaatacccctgagaccaccacttcggggttggggtacaccaccttgaagctcaaaagatccccatgtaacctgagatcatataccccgagataggtggtctcgggttacacccctgagctactcttttttttaaatacaccccaaggccacaccccatgaggcccaagtacactgagataggggattttgagggtataccccgagtttaagaatttttttttgagatggatgtaggggtgcctcacccccgagactaccaactggaggttgggtgctccaccccgagaccatctcatggaagtcgggggtgtggtaccccaggatgattaaaatgcggcttcattggttggtgatgatttcttcttatccacttctcaggatcttacatatatacactttcatgtattgttttttcttcacacacttagtaaaactttggaatatgtaattgtcgttgttgcttctttcatttggctatatagaggtcgtcccttcgttgtaaatttttttttctgcactatgaatgttatgcatgtatcccttctcctttcttttgtactagtaggcgagtccatcatggatagcctactagaattacttggtatacttacctccctgctcttccttttttgcagatgcattatggcaactattggggaggtgactatcgagtagacgaagaccttcttcaacttttatttaaagatttttccaagtcaccttcgcataacttgtctgggaatgagaattctagtagcgagtctgagacacccacccatctctatcgagagacgataggcagtgaagcgtacactaggcacatctgggagatgagagggggatacacttttatttaccccgtgagtggacatgtattcctccttctagtgaggttaccattatggtaggtaggtgtacccattgaaccatctagggagtgtacttttgctgagactactgtgactttgctcgatcgtcaaacatgttgcccgccatggcctggaccaaagaaagtgctcgagctaaggcttcagtgtccctcgtgcagagggggtgatcactaaaagaagagagtctaatgaccttgaaactgttggaaattatttt

SEQ ID NO: 80575 - DNA, 3638 bp, Cannabis sativa
taaattattttttttgctaaaatagataatataaataatttgagtagttaatttttatttatttttttaaaaaaattttactgatttttttaaaaatttagaaacgtttaattaataaaaaaaatcataaaatacacgttagcaaaccgttagttttttttggatggaaggggatacaagtgttatagttcggggggtattttcactagaaagcaaaataattcagaaaaaaagagtttacaagtacaataattcaaagagtgaaaaagttttttgtcctaaatattaaaacttattaatacaaactgtaataatttatggttaacaactaaaatattaattaatggagaaatattaaatatatgatatacatagattgaaaacttacatgacttgcaaggatgtagaggaaaaagtttagtccacccttaacccaaacaattctagtcactgtatcttgactcttttcaagttctttacatgattggtagattcgaaaaaccctaggtaaatattgagacagaagaatagcatttagcaatattttgctagaagatcccgacgcttcaattattcctttatcaaaccctaaaattattacctacaaaataacaatatatatatttcaattatagtagagttgaagaattttaattatattttttttatacgaaattatatatattaattgtagtcaagtattgaaaatatttgaatatataatacaatcctaaaaatatattagtttagagagttacacttaatccttcatcgatgataaaattattgtacataatttttttagacaattttataatggtccattcaaaaggagataattggctgtttataatctttttatttgtatattgtagttatataacaagtatatatttaattaaatttattatatgtacttagctgtgcatgaacaattttcatcatttcatgtaataacttcattaaaaaaaaaaagtaatgtattcaataatatatatttaggaatatatatatatatgtacctgaggaagtgggaggatggctagaaagtcaacgaagacgagagaccaagaggtgtaatttgctacagccgaaacagtgatcttaactatatgatatttttttagtaactcaatggccttagctacgttacaaataatatcaatgatataaataatatctgttaatgatcttaaaacaagagctgaatttctcaacttattgtcaatcttaatgcattttctatctttgtctatcattggaatatagaggaataaagggtctaatgtaacagcaataacacaaaccaatagaaatgttttattccacattgggacaaaacacctcttttcattcaaaatttcctttaatttgctccaccaaaatttcatgtcatgatgatgaaattcattatcatcccttccattctccaaccccatggttggaccaaatgtgttttgtacgctccattctggttctgattctgcagtactgttgggccaaaataaaaaaaaaaaaatttactcgagaaattatgatttataaatgtatgttgtaattaattaaaatgcatatatatatattttttaattttttttttcagaaagacgactgttccttttcgtgggtctactcctggttggatagataaatttttttaattatttatatatttatgtgataatttatattgtagttatatggaatctctcataattcttttttaaaaaaaagttagaaaaaaattatggagataataatttaactttagggtattgaaatgatgatgattcaaatagcagatattggacacatgatcagagaggctttatgtagttttatttgtgtgttgttatatccataattctttaaacatttataaaaaaaaacttatagctttacaaattatccatttaactgaaattatacttaagaaatccaaacctaatgcaattaatattatgccatattaatatggagagctgtcaaatattataaatatttcttcgttttaattttagattttttaatagttaataaataaataaatataagtgttaatatcccaatcaattataatattactgaattattgagatatttcaaagttgcaaagctaaattattataaactcaccccacatctattttcttctcctccttattttccatatatatatcctgcccaataaattcatgtaaacagatcataaattttgtgttaatctttatttcatttattcctgtatatataatattaatatattttaagaatttggtcatatctattaacaataataattaaatattaccaatgaagacttaaatacattaaatattgtaagtagaatattatgtatagtagtaattaaatacctggaaatttgttcttcttctttagcaatactttttggaggatatatttatggagttactgaaagaataattagaatagagagttttatgagttgttatgccaattatgaccaaatatatgtatatataattattttctaatttatagtacacctacgtaacatcacttggcaattatcttctcatatatatattttgatttttctttttatgtggctgcagcctacataaatcatctttaacaaaccataatgcaggaaggttcctttctaagaagtcaccaaaatatttttcaacttttttcatattttttttaggtaataataaattaatatttaatttaatctgaaaaaaactcaagtaatattcttaaaaaaaaaccctaaggtaatattccaagtgttaaatatcatacaattacgtttttctttaaactatcaatttttttttttcaaactatcaatcacgaatctttttttaataaagatttttaataaaaaaacacaaatacaattaattttaaacttatatatcaaatatttgatgatctatatcaattttttttttttcagtgaggtatgctgacaacgcacatcatatttgaatatagaaatatctcgtgtcatatgagtaagaataatcacaatgactcatgtctaaaagagtgagagagactaattaactttaattttgtttttaatcatatatactttttgattcttcatttattgatttgacatattaatcaatactttgaatattcttattttgtaaatactggtcagtgtgacctgtttttacacctaatttttttatatcattcaaaaaaaaaattatatgaacaaataataagattaaaatttgattattttattacttagttatcatgaaacactacaaaaaaaattattattttgtgtgacaactttttagtcataatatatttttttgtttactaaacatgatttttagtcacaacataatatctatatataaattgtcactaatttatttttagatacgataagtattgtgataaaaaaatatatttagtcacaataaattgtaatttttgtgactattatatttagtcacggatcttttaataataatcacaacataggaatgatgatttataattagtcaaaacctttaaaactaaaattttttataatgaaataaaaaatatagcttattttatatatataatttaaaattttttaaacatccgtgcaaaacgtaaattatttactgataatttat

SEQ ID NO: 80576 - DNA, 2621 bp, Cannabis sativa
  modified_base (938)..(940): a, c, t, g, unknown or other
agaattctctatacgaaatttgaatacaatcatgtcgttagtcaaggcacaaaccttggccactagttttttttcaagtaaaaggcactagcttataggtaatgtgccaaacttttttcaagcaaattgcatacagtgctaagttatcagtacctaatatttttggtcatctatgaattagcaaattggaggttgcttaaataagttgtattatgtatgatctgcttttaatggggcgaaaattctctatttaaatggaaaataaaatggggacgatgatcatttctaattcttatataatgaatagggtcgagattgggataacactctctctcccaacaacaacctatttaatattttatttatttttttgtagtattatttattcttttatattatatatatatatattagtgtattagtaaaaaaaattgcattttggattaattattatagaataataaatattgtgtagtattttaatttttaaataatttaattttttgtgtttttaaattttcaatataaactttatttttaaagtgaatctctctaaggactcctcaccctattaggaaataagaagtgtttattctcaaatgggaatatggggagatgagacggggacaagaattaaaatactcagcgagaatggagacagtacaccaaagaccacccactgattacctcgccttgtgtgcttctctagtgttgatttcaaatataagctctctagtggtttagcttttacacaatataattaactttacataatgcgttatccgtgtatttctggatagctgattcatgggtcattacagaggtccaacaacgttaagcttacattctgaaaagtttgtaaagatatttttttattaaaaatattagttttaattttgatatatgtttgaataatattttatattgaataatttatnnntaaatatcaaaaaattatttattcataaggatgtgacttgtattgtacagagaattaagatcactagccatgaatataatagtcatcaacatgttaaagttatgaaatctttaatcaacaattgctagtacggtttactgatgctcgttattcgatgcaagcaaccttgattcgaactgctgatgtaggaagacatctatgtgaaggtgttgtatataatagagattatatatgacatggatcgatatgtaattaagcttttgttatcaaacaagttatttactataaagacctaatttatatcacaacgatgatcaattagtagatcgacctaaatcttgagtaatcatgaactcatgttcatgttattagtttctttgattcacacgttaaagtttctcaggcaagataattcttacaacttttattttgggaagctaataatatagatgactaaaatcttgatttataatcatggaattctaactttactaactaattgaatgttgttccttttatgtgttaattctagaactaaaaaattgtgctcaaatttagattggatctaaattatactttcactagtgaaataatagtactaaaggataaataaataattagaatgataaaatagtgatttgacctaaactaattatgaaccgacacaatgaggattaattaatgatattgactgtatcaatagacactgcaattaaactcactgaatataattctataattactaagagtttaattccatatttatagtggagtaatcatgaaattaataaatatgattatttagttgatgattcaataaataatctaatttattggaacttagtattataagttcatggtccctggatgaccaccttgaaatactatcaagggtatggataccactaaataatgatattcataaaatctattttgaattagcaaaatattaattatttatttttatattaaataatttattttaaatttattatttattatttagattaattggggagataaagacaacactattttttggttaagacaataagtggtgtctagcactgtgttattacacaatgatatgcgcctatcactgatgatgggcctcgatgaatttattttttgattaattaattaattaatacaagtctaatttccttaagggcctatttcgtcttttcagttctagaagtcacaactttctctagatttatcttaaactcgaccttcaagttaccccaagcttctctagcagcatccctctcttgtcgggcaacctccaaatctgcctaggcaactttcctctacctaactgccacatcgcgctcaagacaaatgatcccaagcttccgtacgacggtgacaactgcagctgcaacacgatgagcgaatagaacatcttgttcaaatgaaagagttagacaataggaactcaaaactaaaaaatagtggcctaacctagcaaagaaggaatattcagatttaccccagtaatttgatgaaaaattaaaattcttaacgaggatggagacaaaaaagcactcaccaatttccctactgtgtgtgcttttctaattatgatcatcaaatataagttctctagggctcgtttggttcgtcatattgtattgtattgtattatatagtattgtgttagattgtattatattgtatt

SEQ ID NO: 80577 - DNA, 3310 bp, Cannabis sativa
ttttgaaataaaataaaataatatgtaaataatggtaagttcattaatctaaaaagttaatataatgtcataaaatatgcattatgtgtataatatacttatacacataatatcaatactactcatgtcataaaataatataattataattatgttaataactatgtgtatatatatccttacagcaaaaaaactatatgtatatataaagaaacatataagtggaaataggattagatgtaaaaaaaagtataattaaggatgtaatatgttaataaaaaaatatcatctaaattgattctatttatttttttttttttgaaggaaattggatataattaaagaaaagagcttatcttatacagttaatagatagaaaaagaaaatgaaaatactcgaaggtgagttattaagcattatttattttctattttttcaatgctcatccaaatggggtacacatacaaggtatgtgtcttcctactaataaataatagggtttggctcttagtatatatagtatattttggctcttagtatacatagtatatgttgtgataaataaaagagaaatgttaaagtgtagctatatgtagtacctttataaaatattatattattatatttgatataatttaatattaaatctaacttattttattatttttttattattttaatttaataaaaattataaaaaaattattaattaattataaaatactatataataaaattgttagataagattctgaacgagaggggaatactagaagggatcagttcgccctgttcatatccaatctggtggattcccggggcctcattaatatgcctattcagggagacatgtgacatgggataaccaccggtctggtatgaatcatgtcaagtctgctcttgacaagagacttgccaatggtgcttggctgaagttattcccaaaagctactatttgttcttaccagacttgcaactgggatcacagactactgtgtcttttttcggaaggtttagattcaaagtttaagagatgtttcaagttcaaagaaggttggacgagagatgataggagaaagctagtggttgaccacgcctggaaatctgttgtccacccttgggcccttgctcgggttttcaaaaagattggggctactagggttgctcttcgtcattggcaccgatcccaatttggtaacttagagactaatataaaagtacttgaaggaaaactgaatgagattcaaagcttacctggaggcgacagggattggaacactgaatgtaatatcaggaaatccttaaagaggccttagaaaggaaagcgctgtactggagacagagggcccggatctcctggattaaggagggagacaaatgctctaaattcttcttcctctctgccactattaaaggaagaaggaatgcgattgaaagcatcttggacaaggacaacaattggatcaattctcgggaattaattggtcacgaattccttgatttcttcaaggggatattctcagggtcgggttgtcgccaggcgcttaactgtagtcaattcctccaagatagtatctgctctgaggataaggaagcgatccaaagtattccctctgttgaggaaatcaaaagaactattttttgcgatgaaccctcataaagcccccggcccggatggtatgtccatgttattcttcaaacattattgggagtcagtgggtggttatttctgtgatgcagtttctgatttcttcaggaccaacaagatgcacagaggcatcaactcaactaatattgtgcttatccccaaggtccaaaacccgaaaagaaccaaccattttaggccaatctctctttgcaacgtcatgtacaaggtcatttctaagatcattgcaaataaatataagcctatcttgcctaatatcatatcttccacacaagctttctttgttctaggaaggaatattcaagataatgatgtaattgtgcaggagatcatccactcattcaaccgaaaaagaggcgaaaaaggcttttttgccattaaaattgatcttatgaaagcctatgatcggctgagttgggacgctattgaccaggttatgagttgttgcggtattcctttgaagtttcgcacatgggtctcccagtgtatcacaacaacaacgcttaatatatgtctcaatggagggtcggtgggttcaaataaaacttcttgcgggcttcgacaaggggaccctttgtctccttacttatttatttggacggctgaagttttatcgagaatcctccaagatgccctcaacaagaacttgattaaaggtattaggttaagtagaggagggccgatcctctctcatattttctttgttgatgacttaatcctggtgggtagagctaacttagttgaagccaggaactactggaagtgccttgagagtttctgtgattgggctggtcaacgagtaaataagctaaaaacctctattttctttagtagaaacactccctctggcctgatgagggagatcagggaggctttgggaataggatcgccggaaggaaacgttaagtatctaggcctccctctgttcagatcaagacataaggatgcagatttcaactttattttgaataatctgacttctaaattgcaggggtggaaagcaaaaaccttgtctaaggcaggcagggctacccttattaaattagtggggttgtcgatgccgttgtacgccatgcaaacaacaaagctgtcaaatcgtctggcctctaagatagacaatatggtccgtgacttctggtggggtttcgagaaagataatcatggcatgtttctaaaagcttgggataaaatgtgttttccaaaatctcgaggaggactgggattcaggaaatctaaagaaatgaacctcgcctttctggctaagtggggatggaacattttaaatggtgaccagtctctgtgttgtaaggtgttgaatgcgaaatatctaaaaggaaaagagttccttagttgtgggtatagagactcagattcctggttttggaaaaacatggtcaaaaccaaggctatcctattgaaaggtgcgtacaaattagtggcggacggaagggatactcgaatttgggaggacccttggatccatcatttaaagacatttcggcccaagccaaaatggtcactctgctgggggtcacagtttagtgatggagttgatgtattcaaatggttgttggaatatcttcaaattgaataacctttttgatcgggagactgttgctgcaattctaaaaagtggggaccccc

SEQ ID NO: 80578 - DNA, 1746 bp, Cannabis sativa
ttggggtttcctccaaatttggagttcagatatttttatgttagcttaacatcaaagattaactttgtccatcattgagaacatatctgacctcatggctaaggtataatgtttaaaattaatcattttgtgccttactcatgctttatttgcttatcaggaatgtggtcaatttggagtagggctaaagatgttaatcttctgttccttttcgtatacatattgcagttgtatattcattcgaatttcttctgtttctgtatataatagatataatggatcattatatgattcactgtaggcttttcatctttgtaagatccacattggaacaggatcaagagatagattttcaccaatgactgatctcattctaatgtttttttgtcttgtacaagattgattgatgcacttgagatgatgaagcaaggagtgaagcgtcttctggttcgtaagagtgtggtgtggaaaggcatgagcaaacgattctcaattctttataacggtaagtggctcaagaacgttgacaccactggtggcagtaataacaacctttatcacaatccaaattggccctcatcttctacaacgacatcccgtgacaaattctgttgtctgtctagagaagatgttattcgttttgtcatcggttgtcttggggccttagcaccacttcctctctcgtccatctcgtcccttggaatcatcaacccaaactaccactcaattgaagcctcctctccagccatagaaaccaccgaaaatattccaagagacccctgcgcaattgctgttgtggaacatatgtatggcgatcaatgtaagatcattggtgagatctctgcctctaaactatggaaatgcgatcatttagctgctgcttgggctttagccaacttttcagctgggcagtttgttatgggagttgaggataatgtatcatcaaggtcacaagatttctgtttaaacccaaatgttggcaacaatggccaaactaatggaggtggatcgacaagagccaggaagtttagtagcagaagtatggggtttaatcctggcaactccagttttggcattagtaggagcatgtacaggggaagaagtgcacccttaacttgcaaggtcaccagctcattagctgccgtcatggctcaaatgctgtcccacagagcaacccatgtgtgggtgattgaggatgaaagcgaggacgttttggtaggcgtggtgggttatgcagacatcatggcagctgtgacaaaacaacctgctgcttttgctgctgcaagtcgacattgtgaggggggaattgttaatgaaattcaaacttgatttgtttgtttgattggtattatttgatttgttagcctagtaaaagtgcccaagtctgttaaacttttccaaccaaacatttttgtttgagaactcagtactttgaattgaactttcttttgtacttctagcccccctgcaacttctactggttgtggctgtatgaattgattttgggcttgtctggcgtggtatttataagatcttcacaatctgtatgataattgtaatgaatgatgatgttataaataatggatgtgtttcttatgatactgattatttaagagctcatgttggaagaggggaaatgatggtgagatttttcttctggtttggtaaacatcccaactgaattttagtattgtagtaagaccaatgtccaatggagcttaagctttagacagcaataccattaca

SEQ ID NO: 80579 - DNA, 915 bp, Cannabis sativa
atttccaaacaatttcaataaacaacatattacaaatattaatttccattctttctcatttattctgttacatttctccatttatttcaattctgattagtatataataaacgtgatcttatcacgggagtgaatgatctagcgtctcgtgctagaactggaaatgtaatggacttgtgttgtttaagggaaagattgcccatgtcaattctatgttgtttggttaggtctaatgaaatgatgttctctttcaaaaaaaaaaaatatagtaaatgtggcaaccaaacaaaccaataaaatcaaaatcaattcatttctattccaatctattttattacctccaaccaaatattgcaacctaacttcaaatctctctccttatccttctaatcctatatatcatcaaaccaaacaaattatatatctattaatacgtgaacacaacttaaaattgcttaaatattagttttttcttcttttttccctagttaattagaaaatcaaagtattaaagtattgataaaacatatatatacctgtggttggttagtgagggcagcaatgtgaagcacgttgtttgtttcatcatcattgcatttcatcaaaattttagatgagattttatagcctcttcgacgtgcactacaaagtccctgaaccagaatttcaaaagcttcaggtctgccatttctcacagcaacaaacaaagcggtttcattgttaaccgttacatcttgaatagacagtggacaaagtgataagaacatcttcaaaaattcaaggttcccttcttcagccacacaatgcagtggagttttaccctctctacctcgaactcgaacgagatcagtatcgacccgaacaagccgattaaccatttcggtggtttgaggcctattttggagagctagatgc

SEQ ID NO: 80580 - DNA, 707 bp, Cannabis sativa
gggattgcacagcttacccggtatttcctcttacggatcacgggactactgactgtcacaactttggaccctaaatttttttaaaattactaaaattaattgggtcattagaactattaaaaaacatatgtgttttttaccaaaaaaaaaataactagatcaaagaaacttgttaacggaggaaaaaattaataaatttttaaagcgacaaaatattttaatcatattcatgcatacatattttagtaaaaatcatatccaaatgtataatttcaatacatttttacaaaatatgatatctaaaaatttatttttaaatacaaaacttacatagataggagtcaccattccgtacaagagacataacaacttaaaagtacactgtcatcagagataaaacccatatctttcccatgatcatatctattggaaccaaattatgtttaagataataataaagaacatgatttcacatgaaataatttagaataataggtacatgccttatttattaataataattgctaaaagtatcatataaataaatacttattgtatgctattctttgtgcacacccaactcaaaactagctatcttattctcttagaccatcataaccaataaataactagtgtctactatactggttttagaactaatatattattattatggactataaataaaaatgatggtaattaattaa

SEQ ID NO: 80581 - DNA, 1915 bp, Cannabis sativa
cgtcagttgttcgcactaagagagggaggcgaggagagagagagagagaaagatggagtttgggggctgcattgagaggaaggtgaggagacatggtctaagggctacgttggtggtctacggctgtcatgcaatgcgctgagtcatctgacttgagggagattgagaaagtgagggagagagatggaagagggattgtgtgtgtatcgtgtccgagagaggcgggaggagagatagatagaatttagggtttttttaaagtttttttaaaaaatataattaaaatatgtatattttacacgtgttacatgcaggtgcagatacaactcgacccgtgaattaattaaaagttatattttgtctgaactattcattttcaaatgacatctataatgctcacaaatattcattttttattttagaaatttcttacaatttaatccataacaattttcacattgaacacacaaatgttcacaaaaacaacaacccgtgaactcgctcatacatgtagcgcgtccaacttgacttgccaataataaatgagtgttttcaaatgcatgggtttcacgagccagaacccagtcaaatccaatgtaaatgtttagcccaagaaaataatactaaacacccccagaaaataatactaaacacctgttgatatttaagccactaaggctagattagttgtggggagggatggaaaaaaaggggagattatgtgttctaaccctagatttttaaattattaagttattaattgattgtaaaatattattatatatactacactcaaaaacaccccttatatttttttttatttaatttctgttttaggaataatgaaatgaaagagatgttttgttaggctagctatattcaattggaaataactatgttaagtcatacggcatggaagttgtagttaactaatcaaaatatctgtctagtaaattacaattctaacctcatataaaaaaggaaagtgccgccctaccaattcacccctatttccttgagcatcacctcttttcttttatatgattgtttcttgatcagcaaactttgcttactttgtctaatgtcaaagtctacaactacatactactattattattgttattgaaaaaagaagtctttgggattatatgggctgtgttatttgtcaaaaatttgtgctccattcatatcattagagattttttttaaataactacaatagttagagagccggcatggaaatagcaaaagatgacaatggattgaactggtattaataagaattaacaataaataaatcaacatgcctataagattgtaaatatgtgcttaattgctgtatatttgatcttaacaatttgtataatttgaattaattttttaatatatgtatatttttaattacttttaattttgacgtttgtttttaattaatttttaatttatgtattttgctaaattattatttgtttgaatagataaatgtgagtgtcctaaatatattatgaaagtaaaatatcctatttactttaatatttatatataatcaaaaaattaattcaaacgattttattatttttttcttctattgattttgataatattctttgctgatgacatcgatattaaatataatagcgactataagtgagatgtagtactgagaattgtgactttaaatgtagtgatgactacaagtgaaatacgatgatgataacgactttgaacatagtgacaactacaagttagatacggtaattacaatgggtttgatagtggcgactataagtgagatgcagtactgatgataatatatttgaatgtagttgttgctcctgattttgcccaatgtacgtggaccaatcagacaaggacacgtggacacaaaggttttagcactcaaattaatagctaa

SEQ ID NO: 80582 - DNA, 1551 bp, Cannabis sativa
tgtttttaacaagccacatatcataaaaattatggagaatcatttaatggtgtgtttgtgtaagaatactaattattttcttaaatatatattatatttgcttatatgtatgttatataagttattttatttaggctaggtagttatgtgtcggtatcactcaataggtggaaatgtgacaaagagaggaatctggctataggtctacgaaagtttataaaaatataaatattgtagacccaattacaagaaacttatgtgtatgtctaccttggaaatggggaattcataagtttcaactaagacttaagataattaagaattgcagttaatccatttagtcaaaaaagaaataaaaaaaatataaaattgcaatcaattgccttgaataatgaaagcattttcttattaggggtgattttgtttttctattatttgttttttctgtaagattccgaactttgaatatatggcatatttagtttgttgtagtggaatcgtaataaaatcaaattatttattataatatttactttgtttttaaaaataatgtgatagaactacgttgtaatcataattatattatacaaagaaatcttcattatattagaaatgtaataaagatctaatgtaatgagaattacattacaattaaaagactaaatactgtaaatactctcttttatataaatataaaaattaaagtatgagataattttgttaatttatcatttatttcaatattcatttcaataacaaactaaacatcttaatcaattcctattactattcttattccattacactactattacatttcagcaaaccaaacatcaccataaatcgaaataatatgcaacgtgcacgttgtttttgttaggatttttaataatttagtttaattataagaaatttcataataattaaaattttctttaataactttttattaaatgtttacaatctagaatcccaaaatctagtcactaatgataaatataaaagttgtgcgagttgattttccataaatttcattcctctaagtctagcaaccaaatatgtacaatcttcactggagtcctcgaatcactgttgatcaatttcactttttttcataattaacacatatagtaaaagagctgtgaatcaacagactcagtaaaaaaaatatacatcttacaccataatatttaacttgtaactaagcacccatacctacaattaccataagtttactataatgcctttaacttctaagaatgtcacatgtatgctttaataaaccaaattataaataagtccaattttagattagaaagatgtaatttattaaaattttatatttaatataaataaagtatacatttatttaaaattttaattttacagagtctcaataccgaagatcccaatttaaacaaactatttttatttacataaacaacattaaataaaaagaccaagtaaaataaataccacgaatctttaaaatctactcctaactactaacacaaccccgtaggccgagtagagcagaacatgtacaccagt

SEQ ID NO: 80583 - DNA, 1426 bp, Cannabis sativa
atcgtttggggcggttattcttcggtttgggcggtttacgaatttttttgtacaaccctagtagaaacaaaataatgtgcaattagttttacacttttctatttatagatatacttttgtaatttatcacatttaacaatgaatccctaataatccactattcaagtctaatccctaatttctgccattaattttttgatttgaaaaataggaatgctcttaataacatttagatacattccctaatctcactttaattttatgattttaatgccttaaaatgtctccacattcaaatatttacattattccagaatttgatattctacatatattgctacttaaacaaaaaaaaacatacaatcactctttatgatttgagaaaaaaataaaaataaattaatttatgagataactaaatttacatgtaattaattattagaatatcctcttctatcattttctctcttattattgccttataaaagtagagtaaacaaaacttagttagttattgagaaaataacaatttttggaataaaatattgataatgacaatctccatcagttgtagatagtttagtttatctttgtgttataccacattcatttaaagtaaaaatatttttatgtgggattataaactgtttgagaaaaaccatctataaatctataataagtgtagcattcctctgccatttgacttcaaaactagataatttgtatgaatcactctaagaacatacagagcaagttttgatatttgagaataaaatagaaatttaagttttaaaaatcatgtcaagagaaaaataatacttaaaatcttatttccactttatttaacacatacttaaaaaagagaaacatccaaatacttgtgtttttgaaaataaactcacaaacataacattttaaatccacccaataatagtcatctattttacttagaaataaccaacaattttatttaaatacttagcaatcctgtctcatttgtcaatgagtctttatgccttggaatttttagtcttcacttttgatcccgagttagcctccacttcaattgttttccccatcgatagctctgaactttttgttttctctcctgcattaccattcttgatgaaggaaatattagtactgtcactcttatttgaacctataggtttctgatttagcggagaaacttcttcattacttatagtattgtgagtgtaagttgttacttgctcttgatctagtattccattagataaaacaggagttagaaaagaaactaaaaacattattaatttatttttacaatctagatgaaattaaaaaatagcaattaccagatattaagattttcagccgcttagtggttaatcccaacactgcactcctagctttctttagagcaacatccttagccatttgagtc

SEQ ID NO: 80584 - DNA, 949 bp, Cannabis sativa
cagaggttgaattaagttgcagagctgtgtcttcttttccaggtaagttttcatcctccctaccgttgagagtggtaccttcactttctgcagtcactttctttgtttttgtactactcccagcagagatcgggttggatggtcctcctggagaagtccctatcactggattagggcgtacagggagttccttttccactaccatctcggctgtattctcaaaaggggtaatctcaccaattcccggtaagtgcaccgccggaaaacgattcatcaccacttcttttgtcgccggtctcctctccaccaaaatctccacttgtcttcttttcccagggaattgtcttctcagctctctacattccatgtcctctgcttctttccatcttcgctccattctgagtttgttccgagttattggatctttggccgcttgttggaggagaatccattcagtgaaccatttggggagaggtaagtggaagggagatcgttctaccgcatcttcattcagccaggtcccaaacatggggaagaaggaacctttctcatccttaattacagtgggagttttgaagcaaaactttaagtcatgggacaaggctccacacttaaaacacatctttggaagcttctcatattggtattggatccataagtctttaatacctttacgccttaggtagaaaccatcgcgcaaagtattggccacggttttaaacagtggcccatactttgaccctcagttcgaaaccgtcgggtatgaggttaatgaaataaaaaccccttctctcatcaagacattcagaccacaatactcaaaccctatcgcacctatctctggtttccccctctctctctcgcgagccgttcttcgccccaaacctcaacaccaccttcgccggcgatggtccccggccttcaaaacccataactctttctctcttct

SEQ ID NO: 80585 - DNA, 3771 bp, Cannabis sativa
  modified_base (698)..(707): a, c, t, g, unknown or other
aaatttgcatttttattcatttttggcattttaaattttgctctttagatttatagatgttttttttgtataaactcaaaactgtgcaaagcgtaaaaaataaaaaaaataaataatttttccagtggaccactacagtggtcacaactagaaaaaaccatagtcacaaccaattgcatggtcacgacaccaaaagttacagaaaagatcatgaatttttcctgccatagtactcgcaactaaggaagatcactgtaacgtcctgatacgtaggcgcactaaagtgatgttctaattaacgtgccacctttgctaatcaaaggattttcttcgaaaattgtgccaaaataatttttttaatttaaactattaaactttataaacatatatatttacgaaatcgagatcccgtgtttaaacttttacatttatcacaaaatactttaatagacttgttgcataacgactacaaaatacagcccaagttgtcctgagaccaaacactccaggttgcaccgtctcggatgtacaattatcccctgagctcagaactcactcttgttcaaccttcgcctttcctttacctacacacggaaataatatctgctggtcaaaagactcagtaagaaaagcacatagcatataatataatactgacttatatttaggcgcacatacacctatccacaaggattatnnnnnnnnnnagaatgttctttattaaggtacgaccactgtaccacatgcactacgtaccgctactgtacaactgttggtagggtttttttcgtacctcgaataccgtcatgtactctttaaacatcatacactgtaccaattgactcagtactgctactgtacttatgttggtagtgtatgaatcacatagcatgaatatatcactcatacacatattcatatataaatacatatcctagtcataccttatttgcgaattcaagtgtactggtcgacctgaacagaaaatcacatgctagatgaatgccctatgtcacattcacgcaaaataagtaaacaaccttctaattaaaaccttttcagggatctaaactcgaaattaaaagtttctctatcgataaatagcatggaaaaaccctaaatatcgaggaaacacgagaaaaccctaaaacaaggaaactacccaaaaaatagaggcaatttttctaggttttgcaccagtaaaaatggtaggtcatttccgtagaaatggcctgctatttttcactgcaaaaaaccaaaagacccccattttggaccaaaacaaccccaaacatcctcataagctctagaacacctaatatcatcaatataaacaaaaaccaagcaacaaaaccagataaaacttgaaattacaaaatccaccatagttgagcgaagtttgagttcttgaactcaaacttgctcaaaaccaactacaacccttaaatctaacacatctaagcctaacccaacttaatttaacccgagattagggtttgaacagaactgaaacacaacaattgcatgcttttttatcaaaaggaaaattttattgatcaaggaacaaaataactttacaacccgaaaaccacttgagaaagctagccaaaatagccagttaactcacaagtaacctgtcatctataaactttttatataaacattgatctttaatgtttagcttctttttagctaagttgtacaatctacatctcaatatactcaatatttctttaactaaatacagaggagttccggtaaatccttcatggatgcacctgttttgatttttccacaaagtgtaaactgtagcagcaattaaaaggttacttatagcagttgccacacctattcttggagtattaatccaactcctccaatcttcgaactgcctaggccataagttgcagccactctacctgaaaatgaagttcagcacctgaaaagagacattacaatcaaagaatagatggcagtgactctctccatcaaggccacaaacggggcaattagtgctatcaaaagggataccgaacctcagaaggatatcttgggtaagtagttaagagttcaaggcttaccaaataataaaccgatgtttagggaggctcttcctattccaaacattctttaaatactccactactagggtatttattttgctgttataaagcttgacagccttaaattttttcccttgtagctagcttcctttatgttttcttcactgaaaatatgccttaagttgcaaagttttctccaataccaacttgtattttgctttaatgtgtagtgctaaaattcgttacctataaggtgtatagcattgatccatttgacccataagctctcatgattctccataatagcccatatgtacttggacaaagttgctttgttccataaaggcccttctctaaaactaagaccaccaaactctttagggaggcagacttttccccaagaggcaacttgaacttaacttatgttccttttgactccccacagaaatccacggcaaagcttttcaatttccttgacaatactctgaggaaggacagatatgctcatagttcctgaaccccaaaagaaccgaatggataagttagaccctaccagcaaaagaaagatattttgtagcccaagtttggagtttaagtttgatcttccttaagatgatgtcacaatcttccattctccacttagtaggccttagaggaactccaaggtactttagagggaagctaccttcttcaatttgaatttcttgcaaaatagctcttttaacatcattagacacccctgccatatatatgtgagagttagctttgttaatctctaaactcgaagccttactgaagtcacttaaggcattttttagatgttttactgcttgaatagtacccttacagaataggataaggtcatcggtaaaacaaacgctagtaagcttcaagtgcttacataaagagtggtacaacaattgcatgcttgaaactaaagaaaatcaacaaaacttaaagagataagttctagggttcttacctttgatccgaactccttcaattactgctaagaatctctgaaaatcaatgagaaatgcaccaacactctttttatccaccaacactctttttattctcttgttgacgagctgatctgtaatgacaagaggaccgacatgtggatacctcacatgctttgtatcttcctccgagaatataatcggaggttcttctgtttttgcttttttcagtggttctagagcaaacactgattgcccgttctttatttcattgacatatattttttgggcgttattactgtctccaacgagatgtggccctcccgagataaccaatatatcctcgccctcaatagggggagcttgcaatctctagttatctgggttattggggtgattgcactagtttggttcgttcccttgacacttcacatattgtctaaaatatccacgcaagattaggctctctatctcgtctttcagttgtcgacactcttcggtagtatgccctatgtctttatcgacaaaattttattgaatctcgtttatttctcgcatgtctcattggttcaggcttgcgaaaggcaaccctgtgctcatttgtgaggaaaatgttttcacgagtttcattcaactcggtgtatactgtataaatcggaacatatttattgtgctttttctatttcttcttatttttaaatgattctttcgagtaatctttgtttttggtatttgaaccactcaga

SEQ ID NO: 80586 - DNA, 1345 bp, Cannabis sativa
  modified_base (26)..(29): a, c, t, g, unknown or other
tttagtcacaagtaactttttattgnnnntaaaagtcacatttagtcataaaattttatgttgtgactaaaagattatcattaaaggtaaaaaatttttgtagtgtggcatccacatcagcatgtgtcatgcgcctcatggatgatcgggcttcagcaaataagcataaagtcaatatattatttgtaacaccccatcagtaggaaaatggtaacaagtatgaaccctagacactataaatattcaaagaacccttcatgcaaaggttagaaacttattcctcaactgctcgcaaaatatttcacatattcttgtaaatcttataaggcttttctagctttaaaataataatattgactcgtgggctaagactcattaataccacaatcacgtaaaaattcatgttattttctttatctttgattaatttctttagcttttacagataatcaattagtttctaaaaaatctcactaaataggtatcaacacaatataattgaactttgaagaaaaaaagagaattttcaaaaatatattttcttaagttttatttataattttacggcctaatattttttttatgaaaatatgcttgtaaagttttaaatacaaaaatacattttttgaacaattaaagtaagagaacaactaaaagcaacaataaatcaatctcacgataatcataaatcaattataaataaactatataaaaaaaaaaatcagaaaaacaacatcataacaattataaataaactataaaacaacaaaaaataaacggtttattattttactgaaaaatgtatttttacaaataaaaaagtttaaagtgtaaaagtaattttttttttcatattgacgtaattttgtaattttttaaattttggttaattttataaatttttccaaaaaatatatgtacatttgaacttaggaaattaatatttttaaaattaattattattataatatataacaatataactaattattacattgtacttaccaaggaaaataaattttcttatataatattaaccattaatgcattcgatcacaagttagtaagtgagaaacaaaataattagttatatattatatataatataatatgatttgagaatctcacaataaaaattaacaaatttgaatttttcataataaataggtttaactttaagtcattactttttttttttttatattgatctatctatgtgtaaattccattttgaattccgtgtgttataaaagttattaattagactttatattttgttaaatgataaaatggacattgaattttttaaaatggtaaaaatataggacactgagcttaatttttg

SEQ ID NO: 80587 - DNA, 1596 bp, Cannabis sativa
tttatcatcttcttcttctttaatttagcaaagactttatagatttatgatttagggttttctatattaaagcacttttaggaatatgtttgtattgtgatttatatatttcttaaatgttttataaaaaccctaacagatggaggcctcattttgtttttggtgtttaaaagaaaaaaaaattggccaagacactataaaagaaaaaaaacttggccaagacagtataaaagttatttctgctgcgtggcaatatttttgtaaaaattgggccaaaagtcagtatttttgtaagttttggagtggaattttttaaaagatattatgtttttttaaaaaatattgtgtaagttttatattgtattgcattaagttttttatattgttctacagttattttatagttgttctactgttgtttttaattgttatattttgttgttttacggttattttaggttgttttataaaaagacaatatttttgtaaaaaattatgtgtggcaataaacttataaacttttacccgaaattcaatatttttgtaaaaatccctatattatttaaattataataaattacccaaaatcatataaatatttttattttaaaactcaaagataaatgattattttatcattgagattatttcaaaaatacacaaaaataactaaaaaaaaattataaaaatacagttgtacggaattttaaatatttttacgatttttacaattttatttcatagaaaatacgatcttttgatttattttaatgttgtacacttgttaattttcttattatcatctaaatagcataatatatttgttgacactaaaaattagttcaacaatgcatttgtattatgacataaaattttttacaccatgtttgatctagtaaagattcattgctctatcattttacacaatttcctctcagtttctacaattactctcttgttcccctatttctcgagcctagaatatttcgagaatgtatttcgacaaagttccaactaatctggtgtgagcaagaatctgtcttcccttttgaacgatgcggtctcttatttataggtaagaatgatcgctggtccccttcctttttttcgttcgatttggtccatgtggattcattctgttggtttttatggtttatattagagttataaaagcaaaagcgagatttgataaaaatagtttttatccaatatgaaccataagcccaagtatctcaacataatatttatagattaaatctaaactactgaaagaaagattatacctattgaaagaaagagtatacatatcgttttaacaagtaatactcaagtaagtgagatcgttctcacgaggactgtagctaagtagcaatcaattgaattcttgtttcaatttagcaatcgaatagataaattttaaagctaaataaactaagcaaaaataaataaaacaaataaataagaggtttaacaatgaatgtgaaattatgaatatgatttcaattgtatctacctattatagtctaacatgattcaatttctattaccaaattccatgcaatagtaagtttactcaagtaatttatagtcttctca

SEQ ID NO: 80588 - DNA, 1272 bp, Cannabis sativa
tccctccaacctgatcaccataatcaataagagcattgaaatctcttagaataatccaaggtttaaccgggaacctaagattaactaggttcttccaaagctccttacgatcctccaaaccattcatcccatacacaaatgtagcacagaaagcttgagtatgactagctaactttacatagcaatgaacaaattgatttgattcttcaatcactatcaccctagcaaaagtctttttccaaaagagcagaagccaaccttcaattcttcggctggtataactatcccaaccaataaacttattagacatcatttccttcaccttctctcctttcaacttagtttccaccaaagctccaacaccaatctcctttattctacaaaccttcaacactgcctcttgtgttttctctttattaaggcccctcacattccaacacattatattgcaacaattcatgatgacactaagctaacaagttctccatgtgtcccactccccttattttgtaatatatcaaaagagttccttcctttgtcatttctccttggatccgaaaccatcttcttaggcttaatcaaatgagtctttttaggtgtctcccaattcccttcaactccttccttcctaatttttacagcttcattaggcctattttcaccctgaactgaatgacatatggcctccccaacttcactatctcctttatccccacaacatcatcttccttctcaatccgctttccttcatctttcttatccaagtcaccaccttcctgaacatcatcccccttcttcttagcttctaactctacttccttacccttattcttctccactcctcctcctttctcctcttttttaacccattgtttagtctcaccctttctacaatctgccatgatatgcccgaatcccccacaactcttgcatttaactggtaaccattcataatctacccatgctcaacaagccttcctttttcattaataaaatgaataactctcggaggattatccgtaatatcaacttccaccaaaactctagcaaatttgaccatagatctctccttagtgaccttatctaccatgatagggtttccaatagtactaactaaagcactcaaacacatctttccccaatattgcacccaagtcatgtagccaaatccataaaggtactgatttaaccaatttaacagaatctaaatcagtagtccaaggtctagtaattactggtttccgatcgaattgaatgactccatgctctagc

SEQ ID NO: 80589 - DNA, 1433 bp, Cannabis sativa
taaactgggaagccattaatcaagctcttgagtggtatggatatccccagaagtttcgtaattgggtcacccagtgcatctccactacatctctaaatgtgtgccttaatggaggaatggtggacaagattatgccctcttgtggacttcgccaaggcctctttctccctacctctttatctgtgcagctgaagttttatctagactcttggaagatgatcttgcaaaaggtgtatttaagggtattaagttaagtaggggtggcccggtgctaactcacttattctttgccgatgatttaattttggtaggacgggccaatgtgagtgaagctaaaggtttctggaattgtttggagtcatttctcatatttttgagctttggcttacaattttaactattggctcttgcaggactatagttccaggagttgttttagattcatatgaagcctttaaacatggatcacacgtctaaagaaaagaattcacaaggaggtgtcttatttatctgtatttgtttaaggcaaacaattaagaattcttaaatatcttatttatttgtgtttcttcaagccacacaattaaaaatccttaaatatatataattttttaaaaactttcttaacattagtagtcttctctttgagattgctttcttaacgtaacttctatctaatatagatataatataagtaagattcataaaaaaaataaaaaatacaaaaaattttactctcaaaaaagaaaaatatacaaaaaatttagagactataaaatttaataaaattcaatttggcggcagttctcaagcagcccctatgcctgctgggagtggtggacctgatccttacatacaatatcttattgccagaactcgtatttgattaaaggtcagcaaagtatgaataataatttcaacaactttatggccttgcgacatgaggatgaaaggattcaggtagatcaactgaatgagttggtctagagactagtggtgagcccagatgtagagaacttttttcacatatctgacgcagtacacaccatatcagtggccacggtcgccaccaccaccaccatactgatgtggcgtggtcttgaggtaaattctcttcctctatgctttttagtttcacattggagacaatgtgtatatttagtttgggggagatcttacaaatttttaattagttttttttttgtttgtgttagttgttaagccattatttttgtctatattacattacttttgcttgtggaaagaatgttttaatatgttgcaatctttttcttctaaaaaagaaaagaagaagtaaaagaagaagaaaaaaaatgaatagtagattaattttagtgtggattgcaacaatataaatctcttttgtgtattatattaagtgggggttgggatagtttgtaatgaaactaagg

SEQ ID NO: 80590 - DNA, 1312 bp, Cannabis sativa
  modified_base (32)..(63): a, c, t, g, unknown or other
tttagaaagttcttatttaggatgttaataannnnnnnnnnnnnnnnnnnnnnnnnnnnnnnnaaataatttccaacacttttcctgggtgccgatccgcttttggttttgattccagttccaagtcacggggtacgagttcgtgtctagtttgggttcgagtctgggtttgggtcctgaattgggtcaagggcgaggtttaggttcgggtttcggtctcggttagggtctgaggatgggtccaattccaggttctggttcgattctaggtcccggtcccgttccaagatcccggtcccattccagtccaagtttcagttgtggttcccgagtgtggatctgggtctgagtatgtgtccgggtcctggtttgagtttgagtttgggttcgggttctagtataagtcccaaatccagacaccgacaacgggttcgatccaagcattgagtcccggatctgaagtcccgaggtgggtcctaggtccaggtttgggtgtggggttgggtctcggatccccatccaagttctgaggcccaagttcttgtcccggtttagggacccaattcccgggtctaggtcccccatctatgttcaggtcctagatcccggtttgggtccaagttcgtgttccggttgaagttcgggtcttaagtcctagtctgtgtctaggtctcgatttgggtttgggtccgagttcgagtcctagtccagtgtgggtctgagtttcagtgccaggtccgagtctggttcttaggtcctgggtctggcccctatttttttgtttgggtctaggtgtgggtcccggtttgggtctgggtccaactcttggtctttgtttaggacccaagtcacaggtcctggccccggtccaagtcgcgatatgggttctggtctatgttcgggtttaggtttgggtcctgttactgtcccaagtttggtacctagtcccaaaccttatctgattcttatttcgggtccaggatcgggtctaaatctcagtttcggttcgggtttgggtctgggtacggatccaggtctgagtcctagattcaaacactgactacgggtcaggttgaagcctcaggtccatattttgaatcttggtcttattccagatcgggtaccgagtcttggaccgcgtcctatatttgggtttgggtctaggtttggggttgtgtcccagtggtcaggtcctaggttctgggcctagtttcgggtctaagtcccccatctaggtccgaatccttggtccaggtctaggtccaagttcaagtttagggcccaggttccccatctaggtctggatcctagg

SEQ ID NO: 80591 - DNA, 1128 bp, Cannabis sativa
ttattttccaacaaaaataattttgaaaaaaggaaaaatcattttctggttttcttagccctagctgaccctctccctctccctttctcatctttcctaaatcttaaccaatttttaaaattaaagcttgaattggagtgtatttggtgtgagttagtgcttgaagcttatgtatttttggtaagcttttaatccctctttatttatatttaatttcttaaattaatagcttgttgaaaatacttgaatgtgttcttgttgagttttgatgcatgttgatgatttgaggtcatgttttagtggttgtagtgtattatgaccattagattcatgtaagatgcattttgattggtttaggatgagaatttgatgcttgaatttttgggtatcttttataattttgaatgctttgagtttaagcatgagattttggtgaagtgatgtttgttttgtagcatgcttttgttagtatgtgtttgaattggtaaatttgagctttggttagcttagaaattgatgctattattggatataggttgttctagctttgaatttaagattatgcatgatttgattaagttggttttgaattttgggttaaaatttgaagttggataaaatgacaattttggaggtttccagggccctcttcgcggccacggctgggctcgccgctgcgaggtcctgctttccccaaaaattatttttgggtttttatttttgtcataatttttgacttggaactccgtttgggacattcttgatatcgttggaaagctcatttcgagctctatatgcttatctatacttgaaatgaaaattatgtgattatttgaaattgaattttgagattaatcctatttgtaaaatcttataaatgtgtgactaggattaccgacgcttgcttaggaacacctagggatttaaaaactccacctacttgggatactgggtaagacagtagttagcacgtagagttaagcattgaggtgctcatgttgatattatgcttgtgattgattgagaaattagaatcagggttattactttaaagagagcggttatacgatctaggttattactctagtgtttaaataattttgaatgcaatactatgttgtatatgtt

SEQ ID NO: 80592 - DNA, 2391 bp, Cannabis sativa
  modified_base (2281)..(2288): a, c, t, g, unknown or other
attaacatttaattgttatagttacagagagtattactattggacactaactttctataggtgacatcctatgattagttagcgatattttctttaaagttattttcttaagttatcatatatatctaatacttaattacaccaataatagtagtataataccgagctaggcgccgaaatattggacagcttaaaccattgcataaagtccctatttttttaaggcccaatttttctttttttggtaaaagaaaattctattttattttatttttctattatacatacataaaatatttacaaccaaaagtttattaggaacaaatttttaaaaaaaaaaaaatctaaaaggctaaattttaaaattctgcacaaaacccctaaaatacttaagttggccttgatactgagaaaaatattaggcacccataatatcttttagcaattctcatatatagcataaaaatggagccaatattaattaattaaaaagtatatctctttgatatgatccaatgaagatctcttatacatattccaacgttttttgttttcatgtttatttaaagttaaccaattaagtaaaaggatatatcacttaattctaaacctaatttagaaagcttattaatgtttgacaattttttatgaattattaaaagattatgatgacattgagtatataagtgaataatgtatataatccaaatctacttaattattagtcaaaaaaatttggctatgataaagtgttttaattatcaaaccctatttaggtttaaacatccctatatacttggactttttcatccatattttatgccctaattaaaatttgaaatttttaagatatatgtgtttattatagagtgtatttatgcatattcatccatcttcgtaatggttgatttaattggattaattaggaagtagtcttgtgtgaccaatgttagatatttataaataaaatatgaaacatatatgtaaatggtgtataaatggcggaattaataaagcatatatttgcattatgaacaaatgattgaaatacttctagttattgattattagagtttcaattccatacaaattttggatctgcaaaagaaaaggaaattaattattagtgtaggtaattggacttccaacctctctctactctctttagatgaatttagtagtgagagaccctatatttatataggtgagatattccatcaagatttctgccacaattaattgtcagaatattttgacaattaattcagaaaattaaattaaaaaacaaatagttgataaattgtgatcaaattcaatgaatataaattatatacacgtataaaattattcattgatttaatatataaaatattctaataattaaccagtgcaaccctctcatcgcctgatgagtcaccgttcattacaaaagatcttatgttttaatcacaataaaatttgtaattaaataaaaaatttgagactaattataaatcatcatttatatgttgtgactaaaagtcagttgttaaaggtattagtcacaaaaatagatttttgtgactaaatatatttttattttttagtcacaatagttgttgtgagtaaaagtatattagtaacaatttgtatctaaatattatactttagtcataagtagctttttgtaataactaaaattcacatttagtcacaaaaaatttatattgtgatgaaaaaattgtcactaaaaataattattttttgtagtagttggtcattaatatacactcaccactactaaaaaaactctttttaatgtcatttttcatgtccaacaaaaatagtatcacatatatgttttatattatatacataacgattatagctataatccatattatacataactagaatatttatataaaagaacttttaaaaatggtcgtttttaattttaaaatttttaatttataataaaaaaaaaaaaaaaattattcctattactattcctaactaataaagtgtgattaagtatttctaaataaaactcatgacaaagtggcctacaaaaattttgtttaataaatattattttggatcctgtgttttgcaaaagttataaattagaccatctattttgttaaatgacaaaatgaaccatgtattttctaaagttatacaaataggattctgaactgattttttgtcaaaatgaaatttaataataatctgatctagagatcttatgacaaaactagttatattttttttaaatatgttcgtgttagaaattgtcttnnnnnnnnttatattaaaaaaaaaattgttaaaatttgaacttagggtcctatgtttaccattttaaaaaaaatataaggtctattgtaacgtccccgcttcaagcctcca

SEQ ID NO: 80593 - DNA, 1527 bp, Cannabis sativa
ggcggttataattttttttgtacagccctattagtgacaacagtgttcctatgagcttcaccttcatcttggaaaagatatattcattgtatgtaatgctactgtttatttattaggaagaatgttaattacaatcttttagttaacttttacgtgcgaaaatatatattttttgtagctctatttattatagttataatattatatttttaaaaaaaattaaatttttttaatagtttacaatattaagaatataattttaaatatttgaattttttatgcttgttaaaaaatcttcaaatttgtaaatataatgaatattgtcattaaaattgcataaaaaagaaaatatttcgaacatgtgattttgagcacagagattgtaataagaggtcgatagtagcactctccatttattataaaggacgatggtatcaacttggtaaaacatgagaaaagaagatttagaacaggaggaattcaccatagggtatctttgaaaatagttctatataaagaagaaaaaggatagaattaagatcaacctattgacttgacaagagttaagtgagtttttttttttccctgaaagaaaggtggggttaagtgagtttaatcccagcatatacaaacatcatttttttttataaaaaaaaaaagtatacaaacatcatacaaaaattgctctttctagatacaaagtaacattttaatttataatgaagaagcttcaacataaccaagcaaacaaggcagcctaacctcacatcacaattgctacacattgcataatacccgccaacggcttctgccatgtccacaaaaatagctcaaaaacaagcttccatcgcatacaaaccagttgggagacaaatctttttccagcagcagcagcaggtatcacatgttttctaagccttcaactagtatgttgctgacagtgtcttgtgtagcagaattcccatatctcggcgcctcgctatacatatcttctctaccattagtaccaaccaacaatccatgagtcttagcatcagggaccaaacccttttccaacatcaaatccaatatctgattggcctctcttttattaccctctttccacagtccattaatcagaatattgaatatcgatgcattcatttcttctctgcatataagtttattgatcgaacataaaaccatagacaactgacattggttggctatacaagacagcatatgaagaagtctttctgaatcaggtataaggccttcattaatcatcatattaaaaagcaatgtacaattctttatttgatgctgcaaatccatgctcactatgaggatgcagtacgcttccaagtcgagattaataccctctaccagcatctgtgagaagactactgagacatctcttggtttgtttactgtcaacaaaccatgcataatcatcgtataagttgaactagtacaacaagtacctgaatagtaagctaattggcgtagccttacagcttcggggagatgcccagtgtcacaaacacc

SEQ ID NO: 80594 - DNA, 828 bp, Cannabis sativa
gctcgacccgaaacccgacatacccgaacacccaaaaattaggttcggttgtgcatttccaagacccgaaatccaaaaactcaaacctgaacacgtgaaaacccgacttgtgtgcaaccctagttcttttcaaggaaagatgtaggatttttctttggacatccttctaagggatattgaatagggcttggttcccaacttttactctttgggtactttgcgaagattcttaccttgttttgcctagcctacgaggaatggtttttggatgtacgtggatacctgccgtctccatagccttctgcatgacgaccattatttcttgcattttcctattcttctctttctgtgccgccagtttggcctcgtgatcagccgctttttgccttaaggtcagtagttcagtgtaactgccatcatcataggcatcatattcttattggttttcttcgtattcctcatcattcgtttcatcttgttcttctacctctatgtctactcacgaagttgcttcctcatcttttggatccctgggacattgggggggatgaggctaacatgtatggtttctagtccccatcattgttccctagatcttattatattaccgttttgcaataaagctttctacagttctcaatgaaagcaccaaaatattgatcgaaatttttggcaactagatcattaatgtaataaagatgatttagagagagtaaatgcaactattttacgtagttggggcattaattagccatagtccacgagtctctgatattaataggtgggtatttcttataaagaatgttttgctctttttttcgattccct

SEQ ID NO: 80595 - DNA, 1648 bp, Cannabis sativa
tttatatacaaagctaggagactaggaaataggaaactaccaacaaaataggaaactactaaatacaagttaccctaattcttttacacctaatatacagctaatactctaacatttagttatggttagagagcacatgggaggtattttgttaaagtgttttggaatcttgaatggggtcaacatggtttgtggggtatacttgtattgagttatggttgttcaatgctttaaatagtattgggtatattaaactaatattcctatatctatctattcactgtgcaagtccaacatcaaatgttttcaccctaaagtttcatcacaaaagaacattaatggatataggtaacaacccctcttacctagttgggaaaactcactatgtccatttttgtttattagaaaccattagtatgcatgaactatttgagatagctagggatgtgggtcacaaaaatttaaaggtattgaagtttttctttaagtgggcagatagtgacactgttgagtgtgtacctagtaatggtgaattattggagaagattggggcatcaattaaaaagtctcatatggttgaatgctatgtggttgaggaagttgtgtcacctactaatgaaacaggaaatctcactcaagatggggttgattggggaaatggggctgtcacacaagatggccctgcttggttggtgggcctgatttgggtggggggaagttcaaacaagatggggttgagttgggaaaaggggttgtcacacaatttggatggccaaatcgataatggtgggcctgattgggtgagggtaaggtcacacaagatgggcctacgatggatgatgacttaggggttagaattgaagatattggtactggtttggaagctgaaaatgtagttggtttagaaggcaaaacaagagttgttagtggtgaatcaagaaggcctgcaaatgaggagattggtactggtttagaagctctacatgaaactgctttggaagatcgatctgcaataggtttggaggaaattctacctggtttagagggtgagacatgagctattattggtgaaccagtagagccaacaaatgaggagattgttattggtttaaattgtgagacaagggttgttagtggtaaacaagtagggcctgtaaatgaggagattggtactggtttggaagagattttacctagttttgaagtgaaataggggatgtcagaactgaagcagttaggcctggaaataaggagattagtggtgaacatgaagctaaaaaaattgcttgagatgatgactttgttgctgctgcaatggaaggatttaacacttttgggatggggaatggtgaagaaagtgattatgatgaagaattgaatgaaaataatgatgttcctactaagaattccgaaacttttgaggcaaacgatggtgaagaagatgaagacaatgaagatgatggtgatccaaattacataatagatgttaaatgctaaaatattatatattttatagtgcaaaaatacaaaataaaattaatgttttataatattttcaagaaatacatgcaatatattattatgttgaaaacattttatttaaatttaattttatctttgttcgtaaataataattggtatttatggc

SEQ ID NO: 80596 - DNA, 884 bp, Cannabis sativa
ggctcgagggttgtgcaagtgaaaatcattggtaagtttagaggatatatcgatgtaatcttccttaatggcatgctggccatcaagagcctcatgcaacttcttcttgtgatcctcaggttcagtttgcaacccagagatgagggtagcttgggtgttgttctctatatccctggcgcaaagcatggtctccaatctagaaaccattaattgcctctctgccagaagggcctccagctcggaattggctttgtcttttgttgcaagggaagcctccaagatcttcacacgctcctgaaaagaatctaaagactgcctagagccattacgagtagagcccagtttcatcaagcctaaaagcaaagcaaaacaacaacagtatcaaaacataacaactttggctagccagtcccctcttttgactgccatggtctatcagacccttatacaagcttccaaggtcaacaagccacttgcaagaagcaccacgactagccagcctatatagggccaagaaaatcaagagaactagatgtataacaaactagagaaagatcccgatgtcaaccggagtaaagcttgtcaggtccatcatcacccagctccttaaaagcctcatccaagaaaggaagaaccctcttttgaagcgttggttggctgactcagtaaccttctgtcctgtagctgaccccactcctctactgggcctccgtacctttgttggcaggctgtatcacaagctatctggctagtgcaggccctagtggaaggggaggcagtgatggtccgacagcattctcaccacgagaggtcctgacaaccttggccctaacccatccagtaggctcatttgaaggtccacctgcaagaccactcagcttgga

SEQ ID NO: 80597 - DNA, 751 bp, Cannabis sativa
gggtcagtcttcaatccaagaagcggcaagagtgacgtactcgtgtataagagtcattattccgtgggtctaaggacctaatagaggcttgaagcggggacgttacaccatactagctcatccaatggagaagacaaattgagaggaagactaagtatgagatgaatgtcacactcattatttttaatttacattaagttatattttttatttattaaaatatattttatattattttctttcacttttaatttttaggttaagttagttatttttaatttacattaatttatgttttttattttttaaaatatattttataatttttttctattttaaaatcaagatgaatgatttttaaaaatgaaaacaattgaccaattatactatgccatatgttcgctaagttatttttttttcaaagccacatcagttccctaagttagcttttaacatctgtgttaaaatagttaataactgataaaagtatacattgtgtacttttaccgtaatgaaataatggattagacactaaatcaagtgatacttaaaatattaggtacttttgtagtaattttctctaacacttatcaagtatcgttaaagtgtattaactgatagtaaagaatgtatacatggggtactaaataaaaaaaaaaattaaaatattggatacttttgcagctattttttcttttcggtatttaggattattttttatgatcggatacgttgtagttatttaagattg

SEQ ID NO: 80598 - DNA, 2185 bp, Cannabis sativa
ttttttttttgaataaatcatgaaactttattaatagcaatcaattaaaataatagcatgtaatccaatcgagacatcttccccgctagaaacattaagattagaattagaaaaataagccaactaatcagtcgcttaattctcagatcgtctgacaaaataactaaaaataaatcagataaaaaagattgcaacatcacaattaatcttaagaacacctatattcagtttcatataccgcttagaagacacatttgtaaaaattgttgcagcatgttcattcaacctcgtagcttgagcacttaactattgtgcaagatatgtaattgcactactaactactccttcagtcgcagagaacttgttactcccaaccactaatagtaatttgatggcgagctatcgaagaacaaaataaactaataacgaaacaaaacaaaaccatgtcatacagacaagactaaaatactcaaaatcatgtcacgaagacaagactaaaatactcaaaacatgtcacagagacaagactaataaatcgaatcataatagcaaaacacaatcccaatcaagtcgcacctatgtctagggaagattggcgggcctgactagggaaaaaaaacaacttcctgtaactataaatttaagaacgagaaatcctaatttttttatactatacgtagcatatagtggttccttttaatatatattgttatttattaattggttaactaaatataattttgatcaacatctctataaaatatataacatttaaaatttacaaaaataaatggaaagaaaagaaaaatgggagagaaattttttaataatattaaaagtttattacatttttgcaaagttaaaaaaaataaaaaataattgaaagaagaagaacttgatgatggggtggggaggcatgtgtgatatatggatgaaaaatggaagagttctttttttttttttttcacgaattgactaatattgtgtggcaacaacactttgggggagctcatcttcagaataccacacccacattatatacttagtacatgagaatttttcggcagagaagaagatcatagtaccaaggagatacgccaagattattttctgcttccaaaatttttggagctcagtttgactaattatcgttgaagtgcagaaaaaagaattaaacaaaaacaaatttataatcttcatttgctccccacattaggccaaaacttgtctaatacatatttttctaaagcacgagggaggaagccatgtaagctagttccctttctatgtgtcctatgggagacaagatgataagaaaacaaggataagggaagtagtgcagtcaatgatatgtaattcattctcttcattttgggttaggcatattgtagtttaaaaagtcttgttgtgaatgaattaatgaagaagaagaagaaaaaaaacgtaaggaatagaagagaaatattactataattgttattgatgttcttattattattaccggataccatatataattattaatttgctttcacatcagcttattcaaagggttagttttgttttgtccgcggatccagcaattatttgcgtttgtcggcttcttcgattgtaattttgcatagaatttgaagagcagaaagaggaactatactcatgtcaccctttagtactcttcatcaccttattgttaattcaaaaatatatactttacaaggactagttgctctttgaaactatttatacaaacaaaataatagaagaatcgaatataaagcgcgcacttggtttagtactataatactttttttaacaatataattataaaactttaattaacctattatttatgaagttaattttgtacaatgctccgagacgggattgggtctgctaatttctttcttttgtgaagctgtcacaaacaagtaaaagaaaaaatatttttatataaatatatatatatatatatatatttacataaaggtggatgagatatcgataagaatgcggaaagtagctttggaagccaaaagcgataagcttattattacatttgcttttgtaattgtagatggcttttggccttggatgcccccacaatcctaccctactattactttagacttgggaggtcgtgagcccaagtaggtagagctctcctagcacagtatggcatctacta

SEQ ID NO: 80599 - DNA, 1465 bp, Cannabis sativa
tatttaagcgtttatatattatataagcataatttgggatacgaacccaggacttccaatacacacgcacttccaatacacacgcaacccctatggccacttgagctagcctcaagtggttaaaaactgaactccactaattacccaactaacaataaaaatgtttggagcttgcatggaaagcctataaaagcatcttttaaaaaccttacttttgattaaagtcatcaaccaagtatgtataccatgtattttcaatttctttggtgtttttgtgagattttgaaccatgcatatatatatatacacttaaagttaagttgcttaatttgacttcaacactatatttatatagtatagaatgtacgtattttctaagcattgagtttgggaagagctataagtttccatggtccattattattgcagatattatataggggatatgaataagatgtatatctaagttggaccattacataaagaagattttgttatctatcatgagttgactatatatttaaattaaaatcaattaattagatcaagaatgtgatcatgtatagctgttcttgatcaatatgaatacatgcaacaactttatatatgtgcatgtattaataatcacatgaccatcttaattatacgtgagccaccatcgaattaataattaattaaaattaataaaaatgattcaagtatttttaatacatgctatactataaatccactacatatatgatagagaaaaaactactcacaaattatactagaaaataagaatctcacttaaagttttaaggggtaatttcataattacctaaaaacaacaaaaataataaataaaaaattcattgtacggaattttgaattttttatggttttaagattttctttacaaaaaataatattatttttatgttgtattattgttagtttgttaatttttttattatttgtatactattttttatattgtttaatgttgtttttatgttatttttatataaatttttgttgttttcgtaattttttttataggatgccataaaaatgtaaaaaaaatatatatttaaatgtaagtgtaatttttttttaccaaaaataatattttatgtaaatttcttatttatataacattctatctatatatatatatactacctttaccttagatgtttgaacattatatttaaagttttccaactgatcaaacttatatgcactcaattaactaaatttgatcatattattagtgaattaatacataatggaagcaataattaattgaaataaaacaattgggatatcatcttaggcgcctttgcaccattggatcgaaagcccgctagagatatgactttgataccatcttgagaatcatggggttccatctcaaaaccaattggcaatgagtggagtagcccatgttctttatatatgactcaatacttttacatttaat

SEQ ID NO: 80600 - DNA, 669 bp, Cannabis sativa
aatttttaaaatgaacaaaaaattgttttctattctcacttttatttaaaaactgaaaactgaaaactcaacaaaacaagctctaaaggttcagatagtaggagtcccaggtcccctttacggatcggcttggccattagaggtcagagtctcagtattctggttagtcaaagctgtggagttagtcgcctcaaggttttttttagctttctagcccgcacagtaactaagatatgcctctttggtatcactgaggtagtcaaagtttccttttggtttgccttccaaaactcgtagaacacttccagggcggcagactgcaaaatctcgacctccttcagaagatcttcctcccttgtttgtctgaatttgatgtccactttcatgtttgtcttatctgtggctaaggctaaaagaaaagtttggagactctctctctcatctttgaaattattgacctctttggactaaacctcgacatctacctcaagctaggcggtagatggcatctcctgaatctctttctttagctcttcaactcgattattggagactagaagtcatttgttcacctcaaatagctctgcccttacaacctcaacctccttcttggccacatccacctccttcttggtcgcatccacgtccttctacagatttgtggtggtg

SEQ ID NO: 80601 - DNA, 689 bp, Cannabis sativa
aacccaataagttttatgtaataacccttattcaagaaaggaataatattaccaggattatcgctaccttgtcagcctccttttcaatcattatcttttatcgttttccccctttcttataccttctccttcttcttagttaaacaatacacattttcccatacaaaactatacactttattatatacaatatgaatatgctaaccacttatttcacacatgcagtttatatcatttatgtcttcttggtaacttttgagacaataggatatttgtactgtaggcacaaggtagtttttgtagccaattaattaaagtcaaatagatggtaatatgtatatgcatctaacttttttttgttaaaaagaatagatgctttataaaaaagaaaaaattgttaacgaaaaaaagaaaaagagtatatggtgtgtatgtatatattaatatacattattttcaaatattaatattgcataaaaatttgtattaaatatatataaataaattattaaactacgaacaaacaagacaatcaatcataaatggttatgaaccaaagcttaacatatacattagattatcatacggcacaaaaagttacattaatacaggataataaatattaattattgcgttatatttgtatgataatctaatttagtatcattccaaatacactaataatgtat

SEQ ID NO: 80602 - DNA, 601 bp, Cannabis sativa
tagtcacagaccttttagttacaacacaataattgataatttataattagccacaatttttttatctttagtcacaaattttattatgactaaaagtaagattttttgtagtgttcatagtctcccccacaaatcacaactacaactacaaaaaacgagacttttatcagcatatttttgcgttagcaaaagttagatatattgcaacgcaaaatagtaaaatgcccgacaaaaagggtcggcaaatcgacatcagtactgaaacttttgccaacataaaattaaaagcactaacaaaaatgactattaccagcgcattaagtcgctagcaaaagtggacatgctagtaaaagatatctacggtaagtgtggttgtaaaatcttttgtcggtacattaatacattgataaaagtctaacctttaccggcgcattaaagcgccaaaaaatgtctattgatagatgggtatttgactatttccaacgagtaattgcaccagtaaagatagaatttttccaacgcttaagtgcgctggcaaagactgctagtacaaaaaatcttacttttagtcacaacaaaacttgtgactgaaagtaaaaaa

SEQ ID NO: 80603 - DNA, 764 bp, Cannabis sativa
ctgttaccaatttccatccaacttcctgtatttcgaacctgaaattgattaaccaaaacaaaaaagaatgttggtaatgattactatgccaaaacatattcttgtcggttttcaatcttgcttaaagtaataaagtcaacaagtaaaggaagaaagaattgatcaaagtaccaggaagaagaagtgtaaagtcatcacatccgagactaatatgacaaggaaataacaacccgaacgtggaagtttgttaatctttgttatcgcactgaatacacatctgcatttttatcgacgacgagttaagaaaaaagtcaatattttgatatggttgagaaatctgccatcataaaagttggaacctttacttacatgacgagcatgaatgggatgaataacttgaagataagcaaggctgccatcaagaatggctgcaattcaaggaatataatttaatctcaaaaatatcttgcaaacaatacaattaaaaagtgggaaattttaaccttcacttacattgaagatggtaatgaatcgataaacagatgaaatctcaaagcttgcaatactcgcgaaatttccagttccaaagaaggccacattaaataacaccatcttaatatcacaggaattagctaatcagaggcagtttaatgttaagagtcataatgttaagagtcatttgaactgcttatttccttgatctttactacattgaagttctgctttccaattcactttctttgtgtttgatttctatttttttt

SEQ ID NO: 80604 - DNA, 1894 bp, Cannabis sativa
atgcctgataacccaaacccagaaagaaatatgatcaagaattgagttggggttgtctatataagcaaaacagttatagggcttctctattttggcaagtgttgatttaactataatataaataccattagtgtcatatatagtctccgtacttgccaaaggagagttgccctaacactgttttagcttaattatcttattactcgtctcattaatccatgttcatatggcgtaatacattcataattttatggtacgtattcatcatttcactatctgccttctctactctctctcaacgatctgatgcatatatttatagtctgtttcttgtgcatcttacacatgttcgatcaatctctaaacttagaagaagataaacgaaatgttgtactcatatgtatatgatattactcatttgaactatcggtaacaatttaaatatagcaatagaaattgaaaaatgttccaagtcaaactggttttctttgtgaatttcgaatattttatgtgagacaatttttacatacacaagcactgaataatgaattatatatgctttatatgagaaaaatgctaattaaagggtgcaataccgttagctttaacggtaaaaatattaaaatacccttactttataccagtagtcatattgttagcggtacaatttaatattggatccaatttattttaacttaataataattatacaaaatagttaacatttcaggatgctacctcataaaagtgctaaacaccattataccttataataaagctcttaatatatatggtaaactcataagacttcagtttacaatgatatacattgtttgaatctaatttacaataataacattattattatcattaaaaaatatcttacttttatagtcacaataaaatttgggactaaaagtaaaaaagtagtgactaattataaattgtcattcctatatgttgcgactaaaaagtctgtgactaaaagtactagttacaaaaagcacaatttgttgtgactaaatgtatttttagtcacaatattagtgacaacttgtaactaaattttatgtttagtcaaaaataactctttttttgtgactaaatttagccacaatttttttttttgtgactaaaaagtactttccactaaaaatggccttttttttgtagtgtattattggcgtgccacttcagctaaatttgacgcatatgacgttttctgatatttttcgattattttttcttattttcctacatttttaaaactaacttttcggttactaatagtattgataagaaaccaattagttacatttatataaaaaaaatatatttctaaatcatataatttgggatacattttggttatattatatctaaaacttatttgtatacatcttagtaatttattagttatttttaagttataatataatagattatataatttaacatacatttaggtaacttcaaaaatcacaactagaaaaataggctttagaggaggttttttggggcatacaacgtcaatttcggtaaaattcattatcgacgccgttccagtcgacacagtaggggaaaaaataatttatacgttaagaattctcttgtggtatgctttaaatttatttattgttttaggcttcttatatttttgtttctatataaattgttagttttgtttaattggctatataatgtaactagttcctactacattttgtttaagaaactaggttttatgtttcaatttatctaatgtaacttgtttctgcaatttaattgttaattttttaagaaactagtttttatgtttcaatatatcttttgattgttttaattaggttgtcttggtaacaggtttccctatttagttattatttttgttgtt

SEQ ID NO: 80605 - DNA, 867 bp, Cannabis sativa
tacccattaagagcatacccaaaatataatatatgccaaattttataccacaatatgtattattttttttatttacttttttgccacttattaatataattaataaatttttacatttaattatttttaatagaatttttacacacttttaatgttttatatttttacacttttttattaaaaaggttaattttgctcctaatacattgtacaataactattataaaattttagtcaaatataattttaatttattttttgaattaaatttaacttaaatattatacaccaggagatgatataaaattctctagtgtagaaactaggagatttggctgctagaaaaataaaatagtaaagtggtttcttagaagaaatgactcaagatagtacgtcaacaattgtattgaacaaaataagtatatatgaatattttttgaaaaagatatagctgctatgaactgattaatttaactattattagtcaattatacatatatgtaagaatagttttgagaccaaattaattataaatttaattgagaagtcaaaactgaatagatgtattggtacaaatcaaaaatttacacccaaaagtatcaacttgtaacacaaccataatatttaaaactccctaacaagtactattattggaaaaatatataaataattaatatctaaataattatttatgacatttttttatataaataattaatatctacacagttaaaaacttagatatatttatatatatgtttttataaaggggtcttttcaatattatacctaaaattaattttatttataaaaatacctttaagaaaattatttgcacaaataccgattgccacgtcagcataaata

SEQ ID NO: 80606 - DNA, 1138 bp, Cannabis sativa
ctttcgacattaacatggtatcaaagcttatatcgtcttcttaaaggagcaaaccttagcgatcaacaatggaggttcgtcgattcctttaagttcgtctcaacaaactggtttatctcacaacactactaatcttcccaaaactattcttgtccctttctctcactcactctctgttcgacttgatgagttcaattacttgccatggaattagcatcaaattcttccagccattaagggaagttgactgcagaaattccttgatcccaaccttactccaccgcagtatctcacagaagaatatcgacgagcaaacaaattgagtccagaatttgaagattgggagaacgaggacaacattcttgtgtcatggcttctctcatccatgtccaagaaggggctcaaaagaatggtggatctgattatgttgttccgatttggatcaatcttcgagaatattatacctctctcaatcgtgcgaagatcagtcaatacaaaactctgctttgcaacactaaaatgcttcttcttaatatcaagagtatcattgatactcttgcatctataggtcactcaactacatctcaagatcacattgaagcgatcttcaatggtttaccagctgaatataatattttcattacctctatcaatactagaacagatgcatacaatgttgctaagattgaggtactttaatagctcaagaagtttaattggacaaagttgcaaaagaacttgacattgccaaagcataagccaaccttgcccttactaagaatcaaacaggtcgaggtcaacatcctcaatcattttctctattttcttatggatctggtactatgttcaaaggcaatgctgaaacctttccaatgttgcagtctacccaactaggtcactttctttctgtttccagagattctgcaccaccatcaacaggactatttggaaattttagaggaggtttatctcgtggttgtggtcttactacaattgggggccaaaaactacaatgtagtctgtgtcacaagcttggacacattgtgcaacaatgtttccattgttttaataagacattaattttcaggacctaaatcatttcaaaattttgcaggaaatgccagtgccaacatagctg

SEQ ID NO: 80607 - DNA, 1946 bp, Cannabis sativa
tttttttttaatttaaaagtctttttagaagaaattatgatttgtaacttttttttaaaagatttttgacaaattatttttaaaattaaaatatacataatttcttatttactcataaaagaaatttttttaatgatatcaaaatacttttaaaaaaaaattattaaaaaatatctttatataatagtcattcaaaatagtaaaaataattcaaaatacttatctattacttcttataagtataaacaaaagtaaaacttatagtgaaatggtgtcatatacgtacataaatggtagagcaattatagaatataatatgtccaacacatgcatttatagtattatatttattaatatattcaatttggataggcctcaataatggatggcaaagccttaattttgatgaagttgtagcgagggaagcctccttgctccaaaatagtcttccactgtttctgagttctctcttttccacctgtggtgtgagccaccattacaaggtcaagcaccaaagcagtgtcaccaaacacctcattattattattattattattattgctttcttcttccaaaactgactccacaataataacttttccactttcctctgcaattgctttccggcaatttttcaagatcttcacacaatcttcgtcactccaatcatgcaatatccactacacatgcatatataaattagattatttaattatcgtgttctttttctttttatccttttgtgagcaaaaagacaattgctctactcgttaatattttacataattaatacacacaaatggaaagaaaaaaaaaagtaaacaataattacattaataataaaaggaaaacgatatatttgacaattataagtatattgagcatactgctcctgttgatttgaactctattgtaatggttgacaattgacatgttgtcaagtttgcttttatgcagagaaaagaaaacaatattgatatcctttcaagatagatattgatgtcctttcaagataataataaataataagtatttgattaattggaagttgaagtttttcatgtttgtgtattacttggtagactaattatcatttttgctgtaggtagttaatttttaattttaactatttagatcattggatttaagaatttgttcaaatacattcaattttattaaccgaaaattgttcatgtatcaaattgtgctccaaaacttttaagtctaccaaattgtaacttttaacatttatcaaattatatttcttgaattttcatccacatcaggcttctgttaataaatttgaacaaaaatatttaaattcaaaaatctcaagtgttcgagaaattttttaataatctaaaaagttcacggcgcataatatcaaaatttgggatcgaacaaaaaaactaattagtgatctaattattatatgtcagttaagggtatactatatcacattttcatctgttgtgcgtggcaatagttaacctaatatttgtttccatttaattaattaatattttaatctatttatatctactttatataagtttatttataatgaaactttgtagttggtttcaatagataaaaaacaattagtaatttttttcttttagttttcgacatatcttgtctcctaaaatatatggcttgttaaaaattttctctaaacttattatttacagaaatttaattcatttattaggtttcatctcattattctgtttaaatactaacctgtctttgtaaattaaaagttttgccccctaaaagttttgacaacaatcaaatcgtaacttcttcaactgaatataagaaagtttcaacattttttttggaaattttaaaaaattaatttagatcttaaaaaaaatgactttgaatgattaagaatattaaaaaataaatgaaaaaaataattaagtaatttaaaaaattaa

SEQ ID NO: 80608 - DNA, 1346 bp, Cannabis sativa
ctaactgtttgattttttaattgggggttagttgcaaatacctgaccacttaagggggttatgccgcaaataacacatttataaatttatatgcatgatacgagtcactacttcataagttggaagaacagagcacaatagattagaaacttgtattattgatcacctcaccactatatttacattaagtactttatataacatcttcatttatatactataggcttatagctatcaaaatacaagtggagagatccatgatagtgatagcccaagtcccctcacacaaaacatatacctaaatagaaatttataattctttcacattaattaattatacataatattactttattatttttctcaaagcaccttcttctagcttaataggacgattaaaaggttcactaaccatcctaagctcgcctggggcgcaccttaacgctgagtggattagccatctcacaagacaattttaggatctcagatagatcaacaccactttgaccatttgggagccattcaaattcgtgcaacagtgatgccacccaaaagcaaactgtggtcaaacccaaggccttaccggggcaggtccttctacccgacccgaatggggcgagcctgagatctgacccgaatacagagaactctgcctcgtcttcccctgtcacaaatctctgcggcttaaactcaagcgggtcagcccaaaactcctggtccctggatatggcccacatgttgaccatggcggtagtcccctttggcacgtgatacccatcaatagtggtatcggttatggccaggcgggcccacgagaggagtgggcccggagggtgtagccttagaacttccttcaccacagccgtaagatacactaatttggacatgtcggattcagcaacggatcttgatctgcccactaccttgtctagctcatcgtggaccgttgattgaatatcatgatgaatcaccattctcgctaggatccactctatcagtacggcaacagtatcagtccctctaaatatcatttcctgccaaaattaaccaaaaaaaaaaaaaacaaacatattataatatcagcacaaacaaaccacgcacgtccggaactataacaaaacaaacaagtgcaacttttttaattgtaatgaatgtataattagtttaatcaaacatctctaactaatttattttagccaaagtgtgatttgtattgtactgatagtacgtacttgcatcgcaatgatatatatattttaaataacaaattaactgtaattagtactcacccagagaacagcgatcatatcagagtcggataacttatcgggtccttgcaaggaaag

SEQ ID NO: 80609 - DNA, 1495 bp, Cannabis sativa
gtgatgttatttttggtaattatttacttccttttgggatctgtgttgaactatttacgcttaaataatacaactgaataagcaccactaaaagactgaagtaaaatttctaaatgttcaccgtaatagtcaaaaccttctgtccctttaacagacaaactgctattttgagttaagcgtttttcatctctttcgagtgtaacaaattgaaccccgttcatgatacacgctggataagagtaaaccacaagatcagacccatatgctagagctagcagttcattaccatgctctaaagacccgagacgatttagctcatatatctgcatatagtaaaatatgcaaacatcaatttgaaaatttagaaagattgtgttcaaagtttgtaaggcaataattaccttcttatgaaactatttgggaaattctttctcatgtaaaagattatggttagaaactccatctctatgtcaaatctcgttgaagtgttccctaattaaaaaaataaattattaaaaatcaaagttttaattcaatatactaagcattaacgcaatagattttgattaacttactccatataatgatcaatttgagaacaattatacaatatgaatcactctgctttcttctaatttttatcatcaaatggaattatggtttgctttccaagtggacgacattgagattcaaacacaatcaggtgacgagtaacagaaggtgtatccacattacgatcaagataattaaatcttgtttgtatgcctttgaagtacatagaacaaaatgtcaatgtctcatccacaacatataattcaatgatactcccttttggatgagctctatttctgacataatttttcaattttttcatgtacctttcaaaggggtacatccatctcataaatattgggccgcccattatagcttcttctggcaaatgtagcactaaatggatcataatatcaaaaaaataccagaggataaatcaactccatcttacacaatatatgaatgagatcttcttgagccttcttcatatccttcacatttattgtcctttaacataacattcgaaagaattggcaaagttctatgatggagttggatgttctcttatccaaaaacttgccaatacaaattgggagtaaccgctgcattatctcatggcaatcatgagattttaatccaataatatttgtctcattttcatttaccttcttcgtaaggttagaacaaaatttatctggcaatttaactcccttcaaaaatttactaaactcttgtcttgcttcagtggtcagcacataaggagcgtgtggcttcataaaccttttattagcatcttcgtagatccataacgactgtcgaacaccgagattttccaaatcacgtcttgcattaatggtgtctgaaaaaccgtgtttttgcaaatgtctgttgtatataagaaaatataaaaactgtaagagtttgcagcagcagaaagtaattc

SEQ ID NO: 80610 - DNA, 901 bp, Cannabis sativa
ttttttaaaagttgagttgtaccacttttagcttttagttgtactttctccataaattattcaaaaagttattttttaactatttaccaaacacatttttatcacaatttttttaaaagctgtgccaaataaattcttagtctattaggtactagtgcctaacaccacaccactacaagatggtaccttgtaaatgactagcgatattctcgtaataattatttaaattaaatcacgtagaatccaatatttaatttcacccatatgcctagctaaaagtagtctacaaatcgaaagggttcatttgtaattatttgaaaccaagggtccaaaatgatattaaaaacaacccaatggaaccccaaaaaatattacaataaaaaaaatcaactatttcaaagaatattacaataaaaatcagatctttatgaaaataaaaagctcatattagaaaataactcatatttatatgtaaatataatcaaccaaaacaaaagaagaaacaatcaaagagagaaagaaagtaaatactaaaccaaacctactcagaattctttgctttccttttcattctgctaaagggtccaactgtatgatccataacatacatatatatatatataacttggctccaagatttatacgagtctaaaccatcatagtactctgatgcaatctgcttcacttatggagtttgttaccaggaatttttggaaattggcccagatacaatttatgaatctatcgattgagcaactgatgaggatgtaataggacattggcccatatacaatttacttagaagctggtacttgtacaaaagacactacaatatcaaacagaactccttacttgtacatatgccttctttgttccatctgctttaacaaggttttttttt
